United States Patent Application Publication US 2014/0057251 A1 - sequence listing, part 134

SEQ ID NO: 246734 - DNA, 793 bp, Cannabis indica
tcgatagatacagagtctctgaacccaagcttatactcctctgcaacttccaccaaccaatctaccatactcctctcatgtttgcactaacatctttctgaactttctcaaggtaataggcaatggccttctcttcggctcaacctgaagatcagatcagatcagatcagatcaaatcagatcagaaattcactaacaaaacaaaaatcaaagcaaaccccagaaaataaaaaccccaaattacctccatttgatgaagatactcataaatgccagacacataaggaccacacatgtgtgaatcttcatcttcaaatacaaccttcttaaccttccttggtcttaactctccgtttaggattttcaacagcagctgaattccgaagctcacccaatacaactcgtctattgctaataaaagaggagtcttcatcgtcggaaaatgaatcggcttccgccgcagacctcttcttagacaaacgagtaatgcgaacacactgagacatggcagtaattaatcggatctaaactgaatctcactctctctccctctctgactctgttgttgggtttgaagaaagagaaggaaagagatagatggagatggaaatgggaaatggtggatttgtagaggtatgaaaatggagggagggagggagttttttgaaagtgaaactcaaagaaagcgccatttttttttttgtttttgtgtttggttttttgggttcggaaagtggtttttggacaaaacccaaatctagtttttgcgcgcttagacagaagagagagaaaa

SEQ ID NO: 246735 - DNA, 705 bp, Cannabis indica
tacggcgttctaaacgagccctaatagtttaatgtaatgtacaaatttgctctgtatatttcgtatagaaaaccagactatttcttatttgaacaatgtattatttggagactcacaatcaacttggcagcatttagatctcgacaagagttggtttggaaaataattaattgaattgaattcataaatattaaaattatgacactttatgtgatgtcaacagatacccgctagcaatacttattgttagatgaataacatactcatgtatcaactagatcaagaaaattgtgtataatttatatttagtattaaataatgttttaattatttaataatatttatgagttggactaataaagtacactatagatccagtaacattttttctttttcggggagtccacaaaatattgcgccaaaaaaaaaagaaaaaagaaaaaaaacacatattaagttaacaaacataaagtgttaaatgtcattttacgattaaacaaataacatgcatatcacaagttcagggtagccctatggtaacttgggccttaggtaaaaataaataaaaaacttacaaaaatactatttattttaccaaatgttttcaaaaatactggaacacaacaaattttacatttttactgtccaagcccatttttatttcttttatactgcctaggcccaatttatttacttttatactgt

SEQ ID NO: 246736 - DNA, 1206 bp, Cannabis indica
aggatccgttactgtggggacttgaccgattgtccctccaaagggagaatgcatattctagagagataggggctggctggccataccttgggagagtgtatggtgaaggtcaaccaatcccatgttgaactacagaccctggccggccattccagccatgcctacatctggctgctgttcttggccggccagacctacattgggtagggtctggccgcccatagctccaccatggccggctagacctgcaaagggcagggttttgctacccgtgatgcttgcatggccttccaaacctgcaaagggtagggcttggccgcttgtgactccacagtcgactgatgttggctgtgtgttgacagggggtagatcacaccaattgttggagtttggtgatctagatgcctaaagtgatcggtttcacttcttaaaccactgttttgggtgtttccacccattctcagaccttgtcgtttgaagattgacctatgggaaccttgctccccttagggaggcagtgctatactctagtcggccattagtactcctgctgatggttggttagccagaggctgcacaatggggggagttactgagctagagatccctggccggccccttgtgctgttggttgccgagatctagctgttttttccgtttgacctttgaggaaaggtttgtcctctctctagcaagggaagatctaccctagtacttgaggaacttggttgaagtattccttgaagtggatctctaaggagatcctggtcccttctattggttctctagttgaaccgtcttatcagatcactgacctctcgattgcaacaatctaactctgcttggtgagattgaaggatgtactcttggtcattcatccatctcaggaattcacgtctctactaagcgaaaacatctcaatcaacaacgcatggttctttagttaggcttgcacgacctatagtttctctaaacctaaccaactaaaagtcttttcctaggtccaaatggggttcgttaattgaagactcgacaattcctgggcctgtctctccagcgtagaatcggagacgagatccagttgttgttccagggggttgttgcccaagggtccttccttcaaaaggaggcaccaatgtgggtctactcttggaggtaggggctgttggaaattattttaccaggatctatttactatcatgtatg

SEQ ID NO: 246737 - DNA, 495 bp, Cannabis indica
tattaaaacaatttatgttttttttaagtatataatgtcaaattatgtatttatagagttagcgaagggacttaactacataatcctagttagattgagcctgctcatcaaaagtttcagttaactaaaaaatctcacatttcttcttcaactagactttatacacacggatgttaagtccattaactattaatcactaacaatacgagctaacacatcacagaactatccaatcaacccgagtatcaataaaactaataaaagttaatgtaatcctaaataaaaattttaaaacaagaagcttatggatggacccactatttttgtgataccatattctccacaaaaacaccaatagtaactcaatttcttattttactaagacagccataaaatcaaccaacttcacaatatacagaaggctagagcaaccctaaagagcatggaacgatgtcttcaatcccacaaacaagacaagtaattgtcatggggact

SEQ ID NO: 246738 - DNA, 790 bp, Cannabis indica
agatgaacgatttttcagtttctcattaataatgtttttttttttaaagcaaagaaagtatatagttattgtgaattttaaggtcataataaaattggtaaaattggggtgaaagtgagaagaacaaatgattttgaaggtggtcaactctgaaacaaagaaatggacaaaaaagttgtaattttgtatagtgctgatctgaaatttaaaataaaacattcagattttgttgaattgttattttgtctatgctctgcaccctcattgatttttgttctgccttcacttctttatgcaactctcttttatattttatttatattatatctataatacaaaaaactaattttgacactaattcattccaatttaatgtatgatgtcaaatgctagcaagttcattccaacacacaatttaatatgtgaaaaacacaaaattatatatttacaatcaaatatgtattctgatttttcaactcatcaaattaactatcatgaatacatcttttgaccaagttaattagacaaattatgggacaaaaatgacctaattaagtcactggtttttgggttacctttaactatgaaaaatgaacaataagagaaagttaaaagacctgagttgctgccgttagtgagggagaagatgtgtcgtcgttggggagggaggagctgtgtcgcttccatcgttggtgaagatgccgtcggagacttagggaggagatggccgtcgtcgtcagcgagtaggggagaagtcgtctccatcatcgtcaaatcgctgggcagcgaa

SEQ ID NO: 246739 - DNA, 617 bp, Cannabis indica
tgataaagaacgagagttgcgagcaatgaaatgggcagctctgttcgcagatcgtcgtacaaaagaacaaaaaaaacatttactagagaatttaaaagacacttgcaatcctccacaattaagccaaacggagatggtaattgacccaaaccataaagtgcctggattgaagtcaagctatctgtctccgcaacaacattgctccaacgcttgtttgccacccaacttaaagcttccttgatgctcaaaatttcggcaagggttggttgaggagaaccaatcttataaaaagcaaagccttcgagaaggaaaccaccattgtcacgggcaagaccaccccgaccaaatgacccctcagccgcaaataacgctccgtccacatttattctaaacaaaccagcagctgctttagactagcgcgaatcaacagccgctatagtagacagaatccaaaggggatcaaagcgacgttctcgtgcacatttccattattgcaacaccgtctttgccatatgaacaataacagcatcagagtttaatttagactgccataacagctcatttcttcccttccaaatcaaccaagcagtagcacagcagtttccacgacagtcgcg

SEQ ID NO: 246740 - DNA, 545 bp, Cannabis indica
gaatattgagttggtaagctaacttgaggagacttgtctccagtttgtcaagactaatcagattatctttccttgctttcttttattttcggtatgttttaacttttgttttattcgtttatttttatttttctaagaatcaatatcatgtcattttacattggctcactctctagtgttctcgtttcatgcatttcatgtatatatttttttaacaatgaggacattgtctgattttggttgggggtggtgagcatattcaagtatgtttcttaattttttgtcaaattaatattttcatggccaaaattttcagattttactcatttattctcgtagaatattatttttaagccaatttttgctatctttgttacttagaatttttctagagtataaaacgcacatgccaaactttgtgatgagatggttgttagcacatatttacttaaaaaaattgccaagtttaagtgttcatcttttttatgagtcgcgggatttgagaaaataacttttaaatttttattgattcttaaaaatggtta

SEQ ID NO: 246741 - DNA, 934 bp, Cannabis indica
taagcagatattcataaattaagggggacacagtcaagtacaataagtcccctcccatccgagtaaaagaatgaagaaataataagaggttgaggatgctcaaagagccatactcccttaaatggatgctcgcctaccacagtaaaaaaatggcttggctagagagtgaccccagagtcgctcggccaacgccgcttacgaagatggggtagccagagagtgactctagagtcgctcgaccaatgccagttacaaagatggcttggccagagagtgaccctagagttgcttggccaatgtcagttacgaaaagggcttggccaaagagtggtctccagattcgctcgaccaatgtcagttacgaagatggcttggccagagagtgagcctagagttgctcggccaatgtcagttatgaaaagggcctggccaaagagtggtctccagattcgctcatccaacgccaattacgaaacttattggaccaaatatccaccctcacattcgttcagttaatgccaagtaaaattgttgctcgacatatcaacacgaagtaaagtttaaccaagggaagcccccaatacaaagggggcactacctcagagaaaaccaagagggtctcacacctcggcaaggcagatcccttaacttattcagtcgacaagagcacttaaaagaattgttgtagactgggggcaagtgttaaccccaaaaatcgatagagttgatttttgagattagtcaatgattagtcccaacagttgagagacatcaactgtaagagtcgctcgaagaatgactaagtcaatgcatatgacatgaggattgttaatcttggaaatccatgctcgcaagtttcgaggtataaccctgcaactcggagtttaaccccttaacaactcatgagtggtgttagtaagatcaacttactaag

SEQ ID NO: 246742 - DNA, 674 bp, Cannabis indica
tatacacatttatatgtaaatgtgtaaatgttcctgcagaaaaacatatatcaatacacagatatgtagcatgtttgcaggtattacagtatgcacacccaaagaaatgaactatttccactcgttatctaacaaagattcctttcttcaacaagataaccagcagatactaaacaatgagaaggacagtcaaaccttttgaatactcaattgttgcactagacttaacatgcaatccatgtttcttgctaggttcaattaaagccttcaaaagctcctcaagatcattgtataccatcagcattcagcacaaacctataagcactgttttgtcaatataagatagatttatctagaactgctcattatagctaattagtaatagcttatctaaaggatgaggccgaagaggaaagactggggtgcactagaaactgtaatgacaaccgatgagtagaagcactacttgcagaatacacaccccgacgagtcttctttaggtagggaagggggtcacagataacaaaacaccatcaaaacctgcagtgtaagaaaacccattacagaacctactactactttgaggtcataactgctgttggaaaaacggagaaaccgagaggttgtggtctgggtacaggagcggatgcagaaggagtgatcgacgattaaga

SEQ ID NO: 246743 - DNA, 589 bp, Cannabis indica
tatcgatggttaacatggtgataccgtaaatatcgtaaaaacaagaaaatttagggtgccctaaaatgccacaaatggtatatcggttcccaactggaaaatcagttctgtggggttgacatgggaggaaccggtagaccgattcctataggtccaacctgaaccagtcgaccgatttagtgcaatttccacaaaaacccttcttaacaaaccaaatcgaccccaaactgatccaaaacttttagaccacctaactaggccttaacaagcataaatcaagcaaaattctaactttgctcaacacaacaacaacactgaatcaattctaaaccagctcaaataacctcaacacatcctctgaatacaaaatcaaacatctcgaaaacctgcaaaatcctaactcaaaaatcaagcatagaactctaacttagaacttaagaaaacaaagagaagagctatgaagttttaccttcaattggaaacaccacaatcttgccaaaacgccgaaatggagctgaaaccttatctttcttttggtttctccgaggtggtagagagagagagagagagagagagagagagagagaga

SEQ ID NO: 246744 - DNA, 739 bp, Cannabis indica
atcaaaaatctaacaagattgactcgtggactatgcaaaattttaactgcaaaaccacgtaaaaaaatcccttatgttcatgttttttcctttactggttttatttttctgtgagattatcactattaggctcaatttttggttaacgaaaatttgcgttaacagtttggttctttcattgagagccttcgtgaaaaagctcagaaaaaaccctcatattttaaagaaaaaccatctcctccatggctgaaaacccaaaaaacactaatacgccacacgaagaaactcatcaccgttttgggaaagagcccatgggctccagaaggtcttccaacccacagtctagacagaccactcactctaggagaactcaacctgagggtggccacagcactcggaccactcatcctaggaggacccaacctgatgttggtcccagtacgcgaacaacacgttcgaggagaaatcatcgcaggaatgaccagaatcttggaataagggaagagggacccaatcgtggagatacttagcctatgggagagaacacttatgaaacggaaaagtgccgccttagacgccgcctggatgaggcacaacggcagaacgctgaactacagcgtgatgcagctgcagctagggcggtactggggactaacactcaaaatcaacctgaacctagaatgagaagaccacaaggcaggtgtaatgaccgctttagtaatttggattagtaaaggca

SEQ ID NO: 246745 - DNA, 1670 bp, Cannabis indica
actatcttttagtattctgtaccatgaagacagggagcaacttaatccaagcctgagagttgaaaattacatcgaaacctacaactccgaaagccaacctaggcacatagagttttaccaggcgttcaacttaacattctcaagtagagttttggttttgggaccgtcttagtgaaaaatggtacaaaacttacattgggacatcaactagacgtggacatatttgaggcatcagagtcaaaatcaaagtaagctaatttttgagcgcccgaggacccgagcacccagcgcttaggttgacaatctgtcaatctaggtgacttccaagtgttcgatttgagatccaaatttttcatcttcttcatcttcatcaaaactggggaaatagtttttggaggaaaaacaacaattcttgggtacaaataacaaggtccaccgacaagtttgaaacatggggctggccctacaccctgattgacatttcgtcaagttgggccatttgaaatagagtttttcaagaattatatcgagcatcttctccacttttagaaaatattgaaattcaactattttcggggacaaaacggaaattttggaggggcaaaaccgggacttaggtctaaggttgacatattgtcaacctgggctattttagatcaagtttagaaaaaagtggtgcaggcatttttttcgtgaccaaaactaccaaagattcaagcaaacttggggagaaaaccacaatcctgagtccctgcaaatagggcccagcgcccaagttgacctagggctgggctcaacacctaggttgacaattaacctggaatgctaccttatttaattcctaaaatgccaaattctatgtgaccattgaattaagaatggtcaaaatggggtgggagagcttgtcctcaagttcagaagttggaagcttcaaaaacaaaatcgtaagagttcgagagtaagtacccagcacctaggtggacaaaaggcctggtgtgctggcacctgcttatccaaatctaatgtcggtttgatcgtctgtctagtttttcacaatgaaaatgatctatcaagtcaaagaaatcaaattcacaaattttcttttctcatttctagctcacctagacatttcaagttttgagtctctcatttccacaaagcagcaacagctccaaagtagagtaagtgatgtcaaaatattactgaggtattgtaaagtacaattcttggacatttttacacttacccagcgtcaaggttgacgccatatgtcaacctgggcactggatgtcaacttgggcattgggtcatgaattgcctttagtaaaacatccataacccactcaattttcattcgattgactccattaaacttgcatttcgaagcaaatttaatgctctattatgtcatgtctcacactctagatataattatgaagctatcatcacaaaattcaccccaagagatttacaaaaataagctttgggttacctacagcggaacctgcaggactccgaaaaatggctatcaccaccaagagctaatttttaccgttagatcatcatcaacggtcaaaaatattttatttgaattttcccctattttttgggcctcattcccatataaaaggagagctccgttgtaacgccctaatgctaaggcacgctac

SEQ ID NO: 246746 - DNA, 759 bp, Cannabis indica
atttggcaattttccctgcaaattgggctcaaatttgtatgtgaatatatattttattatttacagtccattaatcgatattaaagaaataatgtagttaccttataaacagaaccaaatcctccttgacctagtttgtttgttgaactgaagttgtttgtcacatataaaatgctggcaaaatcaaaactaggtagctcggagggatcttgttgtgatgataattggagggtatctcttgaattgtcacttgactgcatcaagtcaatgtgctctgtggccttcataatgtttcctattttgttttaaacattttttttttgggtcagtaatgtccagagtgaatgctattgttaccaataggaatctatattgtgatatggagagaattaaaaagaaattgcagagagagaagaaaggaatcttatgttgttagtacagggattaactaacataacttctatatttcctatagacttgctcatcttcggattattttgctaatggcatcatttgtatctatctacaagatgaggcaaatcaagtgtatgcacgtgtttgccttaagagaaagaaataacattttgtgcatcttaatttcttacctttttttctatctctacgtcgtttcaaatataataatatgacaactattatcccaactgtagaaagagttgcaagacagatgataatcctctcaactttatgtcctccaactaaacaattattcaacacattgaaattagctagggagaagag

SEQ ID NO: 246747 - DNA, 1191 bp, Cannabis indica
tcggggtggaacccggtacctgtctttcattgtttttgagttatttggactattttgaagttgttcagggctaagtataatcggttttaaattagggttatacttcggaaattttgagttaaggtattcattgattttaattgtcgtgacataggaccgggatcgcgtagcttttttttccactcaggtcggcccgtacgtttgaattctgaactaaggtaagaaatgtggtaagtaatatatgtggctaaatattaatgatgaatggttatggccttcattattatcaagactttgattaatgttgttcagcctaggttatgacctagggtaggaagcggttaataccgttatgagtaattaatcttgaaaccgcagttaggtttcttacttattgtttgcttcatcgggcaacgatagtgacatattcagctcgtagttaacgagtggtaaaatagggtactttataaagtaccaggactgtatgtttatgatattatgtaaatgtgtaatcatgttgatatgagatttatttaataattattgtccgttattgtttatttcacttttcttgctgagtctatgtgactcacaggtgttttatagtgcaggtaaatggaaggctaaggttgagcaaccatgagtgcgaggtcgtagcagcaatgtacatatcagcagcagtggcacggcccagtgaatatgatgcttcattttttatagtattttggaatttcaaaacttacgttgtaaaaacactattaaaccagtttgtaaatattttaaaaatagggggaccccgtagttaatatcacttatctatcatcaagtagttttatatgttgaattttaattaccaaaattttatttcccacacttttactataactatactgtatataaattacgaattttattaaaacacacacacacacatggcgtccctgttggatagggcgttacattccttgtcgttcctaattgtatttcttgctttcattctttcgtaaaaatcaagtcccatcactcccttcattcacctcttacaattcctcatcggttttgttcacttaaacttgaggaattcccatcttattgtcaacttaaatcttgtccatttctacttattttaacttgcatcaatttctcttgagttgacacaactttaaaatttcccaatcacttacaattaac

SEQ ID NO: 246748 - DNA, 1879 bp, Cannabis indica
aacgtccgttattttttctttattcgacactcatctatttagtatttttatttagtaaatagattatattatattatgtgaacagactgctattagaaattaaacgaaaaacgaattactgaataaaaactttagattgagtcgcagactaagttattctgtatgagtactgaattttacagtacttgagcttgagcaaaaataacaatggatgaaagaagcagagagagagagagagagagagaaattggaaaatattgctcactgaatgaaacagtttgcatagcttgacatttatatagagatgaatacaaaaggagtttaaccgacttacaacagacatataaccacttattaactaatcttgattactgttacattagttagaaaacagataaagaaaaatacaagtaaatgattcagccattttcaattccaatagcccccctcaagtgacattggtgtaaaccagatgttaacttgttgtgaagaaattgaaaaggcattgcaggaagtggtttggtgaacagatcagctatttgattttttgtttcaacatatcggatgtcagctgctttgcaataactctatctcaaacaaaatgaagatccacctcaatgtgttttgtccgagcatgaaacacggggttggaggctaaggatccagctccaagattatcacaccaaagaattggtggtgatggagtggaaatgcaaatctcagtaagaagagattgaatcaagattatttctgcagtggcaagagcaagtgctctatattctgattcggtgcttgatctagcaacaacagtttgctttttagaacaccaactaattagattccctccaaaaaatatgcaatatccggatgttgattttctgtcatcaaagcaccctgcccaatcagcatcagtgtatccttgaatgtcaagtcgatttgtgggtctaaaaattaatccatgtccgattgagccagctaggtatcttagtaatcttttacatgcaccccaatgttcagatgtgggagcttgcatgtattgactcaatttattaacagcaaatgcaatatcgggtcttgacattgtaagatattgtagagcaccaataatgcttcgatagtgagtgggattttccataggagtacctgatgtggcagacagttttgtggtagagcacatgggtgttgattgaggcttagagtcaagtagttgagttcgtgcaagaagatctctggtatatttttgctgtgtcagacagattgcagtggctgttctttgaacttcaaaccccaggaagtattggactggaccaaggtttttgagtgaaaaattagtgtgtaaatcagagatgagctggtgtatggcagtggtgtcagcacctgtgatgaggatatcatcgacgtacaccaagataagaagaagagaaccatttttgagtgagaaaaagagactgctgtcggctttgctgcagatgtaaccccattgaatcaaagtatttttgagtgtgtcaaaccaggctctaggagcctgtttaagaccataaattgctttgttgagtttgcacacatgattgggaaaatttggatcaacaaaaccttgtggttgggccatataaacatcctcttgtaggtggccattgagaaaggcattgttgatgtcaatttgttgaatttccaatccattggtgactgcaagagtgaacataattctgattgtgcaaggtttaaccacaggactataagtttcaaagaaatcaattccaggagtttgttgaaaaccttttgccactaatcttgctttaagtctttcaattgagccatctgcattaagtttgattcgatagacccatttgttttgtataataatcatctctgaagtgcg

SEQ ID NO: 246749 - DNA, 1028 bp, Cannabis indica
tcaagaatggattatattacatgactggtacagcagcaattgggacaacatctccagcaataaacaatgtcaagaacaatatagaactatggcatttgagacttggccatgtcagtgagggggggctcactgaacttgacaaacagggactgtttcaaggtggattgaattggaaacttggtttctgggaggagtgtgtttatgggaaaagttgcagggtgaagtttgctactagtcaacacactactaaggagaaattagcctacattcactcggatttgtgggggccttctagagtcaaaactcttggtggtgctagctattttattagcatcatagatgatttttctaggaaagtgtgggtattcctattgaaaagcaaggatgaggcatttaatgcctttgtcaattggaaaaggctgattgagaatcaaacaaagtgcaaaattagaaagctgagaacagacaatggatgggagtattgctcaaatcaatttgatgaattttgcaaagaacatgggatagctagacatctcactgttagagatacacctcagcaaaatggacttgctgagagaatgaatagaactctcattgagagagttaggtgtatgttgaaaggtgctggtttggatacgcatttttggggagaagctgttaagacagcttgttatctaataaataggtgtccatcagttccattgaaattcaagactccacaagaactatggacaggtcatgtaccaaagcttgaccacttgagggtttttggttgctcagcctatgctcactacagacaagacaagttacaacctagggctctaaaatgcatgttcctaggctatcctgatggagtaaaggggtacaaattatggtgtctagaaccagggcataagaaatgtatcattagtagagatgtggtgttcaatgaggaggaaatggcaatgaaaaggggtgttactgttactgcaccagaaaccagcaattcctctctatatgtctacgctcttgggatactggattctata

SEQ ID NO: 246750 - DNA, 619 bp, Cannabis indica
ttttttttttttttttctacaaggttaacattaacataaatcatgctactgataaaaatagggtcttgtcttttgacatgatattctctctaaaaaattcatgtttggtcttatacgtggggtatactttgtttttatttgtcatggagcctggtaatcaatctgagcctaccattgaagagcagtatgtgaatgttcgcatagaagatgaggaagaagatagcctgatttatgtgggagacgctgatgatttgacggagattgatgatagatggtgtttagtgggtcgcttcttgactaatagaggtgtggattttcaagcaatgcagaacaagatggcaacgctatggcaaccgggaaggggtatgtatgttaaggaacttgatagtaatttattcctattccagttctaccatgaagtcgatattgatcgagtgatcgaagggagtccatagacatttgatcgtgtgccgttgatatttgaacgattgaaacaaggtgaggacccaagaatgatcacgttgaacaagttagatttttgggtgcaaatacacaatttatcaactggttttatgttggaacgggtggtacgtgatctaggcaactatgtgggtacatt

SEQ ID NO: 246751 - DNA, 596 bp, Cannabis indica
aatctcaagaaaaatgtccaaatgcgaaatcccgaatcgtctatttttgaggaagtttagaatgcaggtcgaagagactttgctggtcttggatggtactgaaagttctagaatgacaaaatttgtaaaatctagtgttcctacgaattttcctgttactacaaatttaaagtttgctgctacaaattcaaagtttgtagttgtaaaggcagtatttacagaattaaagtctccaataattacaaaaagagtaagatctctatgaaaggagatttgtccctattttttatttttgtggtagaaagggacatattagacctaaatatctcaccatgcagaatatgtacaaaacaaattaatttagtaatttgaataaatttcaaaagaaacatagtattatgaaacaaaaatgggttgaaaaagaaaaatggctagctggtttttttaataaaattcttgctttacaaatgtggtattttgacagtggtcgctctagatatatgacaagtgacaaggactttttgattaacatcaggccaatatagtgtggcaaagtcacatttgggaacggtgtagctagaaatgtcattggaatg

SEQ ID NO: 246752 - DNA, 1819 bp, Cannabis indica
tgagtgtgattgttatcaaaaaataattaaaataaataaataaattgatatagtaacgcgctatgtgggtagctattacttttacaatctaacaaggtgtgactctaaaagcttatagtgacgcacggtgagcaactctaaaagggtttagcgacccatactgaagggtcactaaatagtatttttccagtcacccacattagtgacgcacagtgagtgtcagtaaaacattttagagtctctcaacgtgggtcattgaaacccattttttgtagtagtgtgagaacatgttatacaataagtggaatctaaacattccgagaggatcaaatattaattctctttaagtgttaattctaagaatgaatttagttattgagctcaaatcgataattggattatagattaactagttattgtggattaatggtacttaaggattcaagagataattaaaagggtaaatagttattttgactagctctaattatgaactaataaattggagaaaaactacttatattgattatatttacaccaaaagtagccctggtgatgtggacaagtgtttgacacatggcaagaaagaaaatatcccgaaattgagtagtcccgaatcatagcaagtcaacctggaggggtccctagccctgtgcccaagttgactttggaaacttcggaatgggtgtttgaatcccgccaaattgttttcaacccactatctttcattattttttaccatgaagtcatgatttcaaaatttaagtcacctggtgaaaaagcaacagtgactgaaggtaaaaataaaggcctcgctaagggaatgatagataaattttgaggctcaggccaagtagcttctcgcaaaaagtggcgtttaccctcaattatttcttgtaaatatcgcctatatcatcctgaggttttgtcttgactagtcttaacgagatgatcccaaatcttttcattgtttaattcaagaatggttttgggtatttgtattttgggtttgaatttaatggcagaaatttgaggataatctgattctagaaattttgacattgtgatttctaaaacgaattgggacatacttataaataacaatatcccaatctccaaaaaaacagaacacaaacttaactccgaaaatctacgaatcgaataacctaaaaatattcctacccctataattattcaaacaaacgaaatcaaaattacctaaacagtaaaacaatgcaaacatgggaacactaaccaaattatgaagacagaataaaaaaatcacaaagaaaagagagtgtgtcacttactgtcttgttgaggatttctgggcaacagagattgcaaatgaaatctcgaagattgagaagctaggtcctgacgatttttagaactggaagattggtcagatgtaatacgcaagaaaaatgtaagagacaacaagggcattcaaggttgagaaagagcaattgaaaaaattctctacagaaaggtttgaaggtttgaaacgtgaaaatggcgaaatgaactttcgcttccaattttatacccaaatactgatcaccatttgatcaaaagaaatctaatctaacagatgggaacattgtaaatgggaacagtcagagcattaaatgctaatgatgtgcctcgaagttctgaatcgccaaaactcaaggcatgcaatttttcaaaaacgggttaatacgattgtactcctgtaatcatttaaaaagttctttttaatttaaaagtactttttaagaggcaattgtattacccgaaattcggctatatagtagaagctaacatgtgtcctata

SEQ ID NO: 246753 - DNA, 1476 bp, Cannabis indica
ttcagattatatattataaatttataaaaataatttaattaatgatacaatttaattaattatatatttatcaattataaattaatatattttaattttaattataaaattattaataaaccaatataacaaaatatcagaattatacaaaattaaaaaccaattcatcacaaatctatacagaattaataataacaaatctgtacacaaaaatctaaaataagcaaagaaaatgggtaaacattactaaaaaattaatacatcatttgaactaaatgacaaaccttggaacaataaaagaaatggacacaaacaacatacaatttaaatcaaaactaaaatttctaaatctatataaaaaaaactataaatgcactgcccaatatcaaaccccaaaaagcttaaaccggaggtgcgaaagggatggttgtcgttcgtcgaggcctgcaaacggccgccgctcgtcgaggcctgcgaatggccgctggtgacaactctggccgtacgtcgagacctctgctcttctcgtcgctcgggattttgggtgttgcgagcactgtgatgtggtccatttggaccatcgtcgttcacctagttacgccaccgatcaacaaaagagggaacgacttcctctctggaaaccacgatttcgcctttgctgctttcctcggcctagtccctcagccggccgacggctcggatttcgccgaggcttggaaggagtacgaagaaaatgaggagagaagggtggtacaaaggagaaggttatgaaaatatgcatttgcagggaaggagatggtttgggaaaatcaaggccaagttcaacgtagccaagggagagagagagcgccgcacaagggagagagagagagatcgagatcgggtagagagaggaattttagggtttctattctaacataccccttttatacctctttttagttcttttttaatttgttttaataaataaatttagagaggaaaatggggtaataggctgattatattcagtctttttttttttttttttctctttttatttctaactttttcaagtttttttaattctatttattagtaaataattttttgtacttgttattaatgtgcttactgtcatacaggtgtggcaccatttttttttttttgttaatttttaaaattttttttaatttctattttgtcacgtaaatgattttttgtactaactattggtactctaatgtgcttaatgtcatatcggtatagtactcactaattagtttgcaatttcttttttgttttgtctttttctcttttgtatggatgatctttgtactatttttcattatttttggtaaataattactaattagttagtaatttttttataaatgatttttgtactatttacttttttttttttaattttttatattttttctttaattttattttttaaaaatattttttgtacttgctattggtactcttaat

SEQ ID NO: 246754 - DNA, 547 bp, Cannabis indica
gttgcctatagtatagccagtggttttaaaccgtgggcaattctcttttacaaatttaaaggattttttaaggcacatttaaaaatcgttgcctatacctccggacagtaaaattgaatgaaattagataaaagtccttaaatctaataatctcaatagtcagggggaagttttaacgaccaaaaaagttcaagaggcatgatttggtacatgtcaaagttcggagaaaaaaaatcttaattagccttaaattaaataagttgtcatatatctataaataaaatgcaatcaaggtctttcggtgtaattaatccttattttattagggtgaatccctatttatataaaaatatgactagaataatagaatattaaatcaataaaataaaggaaaatacaataatatttatggtataattgatttaactgattaagacatccatatatataatatttcgtaacacttaaatagtgatcattaggaaaaccctgttagaaatattttaccaagatctagatttactaccatgtatgtttcattaacatc

SEQ ID NO: 246755 - DNA, 357 bp, Cannabis indica
atatataaaatatattaattatgtaaaaaaaaatatatacaagtttatcaatttgctccctaaaaattaattgttttatatttgtcccccctcccctcaatttacatattctccctccgccactgaccttaagaatagctatattcagtttcatctatcactcaaaaaacacaacagtagaaattattgcaacaagttcatttaaccccatagcttgagtattcaactattatacaaagtaagtaattgcactacgaacaacccttcagtcacagataacttattattcccaactatactaatagtgaattgatagcgagctatcgaaaaataaagaagattaatcaataacgaaac

SEQ ID NO: 246756 - DNA, 1690 bp, Cannabis indica
ccgacagacttaataagagttgcacgccctgctttagatagagacttggccttccaaccatgcaatttcgaagtcagtttatccaagataaagttaaagtctgcatccttttgtctagatctaaaaagaggaagccccagataattgacgttaccctctggcgatcttaaacccaaaagctcccttatcctttgtttaaccacattgggcgtattcttactaaagaaaatggaagacttcatcgtatttaccttttgtccggaccaagagcagaactgatcaagacacccccaaacacccttggcctcttccacattggctctttcaacaaggattaggtcgtcggcaaagaagatgtgagaaataatagggcctcccctactcagcctaatcccttgaatgatgccctcggattgggcattctctagaattctagacaaaatttccgcagcccatataaaaagatagggagacagagggtcaccctgacggaggccgcacgagggggagatctttcctaccggacccccattaaggcagatattaagggaggtagtagtaatgcactgagaaacccaagcccgaaattcttggggcacaccaaaacaagccagcacatgatcaatgaacccccccccgctcatcctatcataagctttcataagatcaatctttattgcaaacaagccttctctacctttcttcctattgaacgagtggactatttcctgggcaatcacattgttatcatgaatgttcctcccgggaacaaacgcggcttgggtagggcagataagctttggtaacaaaggtttgatcctgttggcaatgatcttagagataaccttatacaccacattgcagagagagatcgggcgaaagtgattaggcctcttcggattctggactttgggaataaggacaatattcgtagcattgactcctttatgcatacgtccagtgtggaagaaatccaaaaccgcctcacagaagtcgcccccaacagagtcccaatagtgcttgaagaaaaggacagacataccatctggccccggggctttggagctactcatgacaaagagagtattcttaatttcctcgggggagggtttcctaatgagttcggcttggtcgtccgaagacaaacattccttgactagctcgctacaattaggattacttccaaactctgagccagaaaaaatgccttggaaaaactccatgaattcatttccaatcaactcccttttagagatccacgcattttctctattgagtatgcactctatggcatttcttctacctttgatggaggcagaaaggaagaagaacttagaacatttgtccccttcctttagccaggaaaccctagccctctgtttccagtacacctcttttctcacccgggcttcgttaagagagttgcgtaaggcccgttcagttgtccactctctagatcccacaggcaacctctgaatgatatctagccgacgttccaggtcacggattagagaatcaagtttcccaaactgggatctattccaatgaatacacggtaggtggaacgttaatttttaataattgtttgtgtaaggttattattgtaaataatttatcaattatgtatattattttaaagttaaatttctctcttttgggccttgtgtgagagttgggagccatagaagtg

SEQ ID NO: 246757 - DNA, 585 bp, Cannabis indica
ggtaatgttgcttttctaggtttatcattcccttcatcaatctccaagcaatgttgaacctattcctatgaaatgaaacttgtataacaaacggcccctataaatttactgtgttatttatgagtatttacaattattttattattatataatctctttaatagacttagtgtgtcgttggctaaaagcgaggtcaacattttggtgctttcattgagagcctaaaatactatattgctctcataaaccttcgattttctattcactctaaattgacaaattatagttttgataagaagtcctcgtcaactgaaacacgcgatcctatggcgacggatcctagcatctaggctcctactgactcaacggtagacaaccccaatgcatggctgcctcctcgaggcaaccaacctacagttcctacaaacactaaccccataactattgggatcactacccctctcactggaattactcctggagttcaagagacagggactgccagttagggctgaacatcgggcgggtttaccgggtttcgggttggcgggtttcgggttcatgggtttcgggttcaaaaaattg

SEQ ID NO: 246758 - DNA, 716 bp, Cannabis indica
ctttttggataagatcagtgtagagttaatttatgagaaagtgaacatcttaatgtaaagatcaactgttaaacttgtaagtgcatgatagagatcttgggttaatgggtttgactcatttttaccaaccaagaacttttgagacctaatctcttcaacatggcgcttagatatttctgtattaattgagtcagcaatggacataattatggtttctccttctctcttgatatctgtaaaaacatattatttttcttttaaatagtgataacttttgcagtatataacaagaaacaaaaaactaatacaatttatattcttagtctctctatatcactacttaacccccccccccccccctatttatacatgtattgattagttaaaataaaaattatttttaaaacataaaaatcaaattactatttcaaatattcttaatttgaaatttatgtgacatattattcatccttacatgttctaaaatattatttcaatataatatgtgaaactcattactataaaaactcctttttaagtccatcaaaattggactagataaatttttcgagtccattttatattgaacatgataacctggaacataaaaaataaagtatttttctaatccaacattattggactaaaaaatatttctagtccaatattgttgaacttaaaaggtagtcccacaacttgaaacttaatgttggact

SEQ ID NO: 246759 - DNA, 697 bp, Cannabis indica
ttacatattaattttattattttttatgttaaattttttatgtattgatcttaaaattttaggagttttgttccttattaaattctccttttaatgatatattataagcataaaattacttaatcaattgagagaattttaaaattgaagttttaaagtttttatgattatatgatgatattgattttgagttttttatgattatattacaatgtctctacatttttaatttttaaattggctgagatatatatatatcataatcacgttgtttgttcttaaatttttggattatagtcaatcagatctacttaattttttgtgtttatgcacgaaattactaccatagatttcttagaaattgaatcttgatcaaacacccctcattttctgtccgttttgtcaagtttttggctggatttttctctctaacttgactgcctacaaccgggtcgtgcttgaccagtttcagacctgcctaaggtagaagacaacatcctccagctaagcccactctcgacctcagcacatggggccgcgtgcggtggttccaggaatcgttttttgacgaattttttttcaatgtgcttagaatttaatttctgaattttttatgatttttaattaatttaaatgacttcgtttaaataattattactaatctaatgataattatacagttaaaaaattattaaaa

SEQ ID NO: 246760 - DNA, 755 bp, Cannabis indica
cattgaatttaatttgataaacctattttcatccaataacatgttgatggggaggcgaactcactatgatccaagtatgactatcttccaaggttgtgatttcagtggacataacattgtcccactcaatgatacatgttgtctggctatatggagcaggttcataatgactgaaatggaccaaatgagagcttgataagtggaaaaaagtcttgagtaatcaagaacatgaggatgacaatatggagtagaagaatgagtaaaagaagatgacaaatgtagatgaatacagtaaaacacaatgataatcttggagataagatggcttttaagcatgtctactagtctggaagaatttgtttcatctgcggttaaagcagatgaaataggggttttacctaaataggtagtgtgatcgtgtataccactatcagagaaaaaaaaaatatatgatattaaggggggcaaaactttaggagtaagaaaatgaaaaatatactcttaaaattgaacatctctagaacaaaaaattatattaattttaaggtctaacaatttgtaagttttcattctaattggacaaccaagaaatatgcaagagattgttcttggagaaaacttagacctaatttggtttaaagtgaaagcataggctaaggactgaaaagatctcaagtgatcataagcaggtggtttggaattgaggatttcaaaaagagacttgtttcttagatttggtgttggtattctattta

SEQ ID NO: 246761 - DNA, 820 bp, Cannabis indica
tggtagtttttttagggttaaaactattcatactaggattcaggcaatatgtaggttgttttaatatctccaactcattaccttttggtttgataaaattctctctagggattgggactggtttttgctgacagcaatgtcccactcttgttcaggaatttatcgtccagaagttttagagtttgagtttcctaaagaatcggccatcccatataaacccaacccctcaaaacccacctccaaattagagctaaacgacgctagggccaacgaacacatagtgagaacccaacaggaagatatttctagcgctacaggcgcttcttgcaagaaatatttgaaggtaaacgtcgattcttgcgagaagcagcctgaccagaaccacccagcgtgtcctttattcctatggcaaagcctttgtttttacccaacgtcacaattgctttagaaccaaatgactttgatttcaaaattatgcctctcaagccatgtatgtcaaaaactcctcaggatcccagcgtcaccctaaaggctgagttgatagaatcaaaggtgcgatctatctcaggctatacgggcgagatgcttaagacctgtggaattgcacgcgggcaatcatgccaatttaagtcaatgcgagagggagaattcagttgctaccccctgcacgctttgccagcagtaacccaggaaccagtggtgagactagtactagtggttcaactagtctgggcgcctggagccttaagcatatttttgcaggggccttctgttcggttttgtgcccaaaataaaacccatttcaagataatcagattta

SEQ ID NO: 246762 - DNA, 928 bp, Cannabis indica
gtaattgggtcattgtattaagaggagcgtttgagtgagattacaatagtatatatagaatacttaggaggattggtggttatgcaatgttttgagtaaatactctaattgcaccaaaggagcctaagggctcctatcttttgtaattgaatttctcaatacatttaatatacaattcctactgtttggctactgtttaattatcaagtgactgatcaacactggtttttgagcaagatgattcatctatgccaagatttcttcctcccttatacaaacattttatacccataaggtttttggagttgtaatgcttgattgatttcaattgtccttggtggaataaactcatgggcttgtttggctctcaccaaattcgtagtcagcttgttaatctcactttcattttcatctaactgtttggtgatatttttaactatgccttctagactagatttttcagactcaagttgttggtttgcatcactgagtttaggactgaacatattggccgggtttgatttggacccggtctacctgctcggatttgacccgtccaacctggccgtgtgcccgttccttacgggcgggtgggctccaacccactcattttcatcggacaggttcgggttgattttgaacaaatgcttgggttcgggttggacccttactcgcccgccaacccgccactttttttttttctttataactttaaaaacctaaaatagaacctaactttttatgtatctttttatgaatttgcatactacttgttgtaatccaagcttttatctatgcttgttattaaagaatattgtagagttacttaacttttaaaagttttggtgtaatatgtgagaattataaagaatttttttttctgttctttttagtacaggttacaatttacaactttttttttttgttt

SEQ ID NO: 246763 - DNA, 723 bp, Cannabis indica
cgagtttgaataatccatccttttttagtagattttggataatccatgctcttgcttcttcattatcagtaacagctcattaaccacaaattccaagcattaaacattatcagcaaatctaaaagttaaactctggaattttacctgaggaaggtaaagggatataaagcctttttgtaagtcgcctccgcgctgcttcatctagttcctgaggccgatttgttgctcctggacgatgaatctattagcaaatttacagtgcagcatactaaaaagagcggtaaaaaagaaatcaacttgagctgtgaaattgaaaagacacatgcatcagaactactactaagtttagttgtttaacaatcacctataagtagaatttgttcgctgccactgtcaaagccttccatttcaatgaggaactgtgttttgagtctcctactcgattcgtgttcaccttctgatttacgctgtaaccagaaaacttatatcacaaagtatacaaaaacaagaagcaatgaagaaccagtgatactctaactagagtatctaaagtggtcatttcataaaccaaatacagtactgtaaagatatttgctagagattaaattccacatgctgcatgtgaagccgttaattcttacatttttaccatttataaaagttaatcaccttcttgacattaaagttttgtacttaaaaagagaattgtccaagggagctaca

SEQ ID NO: 246764 - DNA, 594 bp, Cannabis indica
ttagaggtcctctgtggtgaaaatctttactttgatccttcacttgaagggcattgatgctttgatggggagccaacaaagcatcgtccttaaggttgactaacgctacaaggtgtcccacttttaagtccttagaagtgaggctttggtacaggacctgcctcatctccaagacaggagtagcagcgagacgaggtatggagtaaaagataaaaaaatgataaacttgatcaaattcccaatacaaaaaggaaaagaataaaaacaagaaacaaagagtgaacgacaacacttgctcacagtgttaaagtcaagggtgagagttggaaccatcttcaacgagaaactggaactataaaaccagtaggcttagaagtcgtgggtgtgcttcacgaagctaacagggaaaaccaaagatttggagttcctatcaagtctatagaagccaatcttttgtttgtgtttccgcatattctgaggctcaatcttgtagaagtacaatatttcttctagactggggacttccaccttttgtagctcgcacaaaacataccatcccgtaagcaacttgtagacttgtgggatgaattgaaa

SEQ ID NO: 246765 - DNA, 963 bp, Cannabis indica
tgcagcaaagagtacgcactgcgtacaataaaaagacctctgtggtctgctgtccatgaccaaaaatcggcccctgcagttcgacttaagggaattcccagaattatgcttgcctcatgagaaggaaacaagtcattaaccacttcaatgtcccaagcgcggtcagaaatctgaaaaagagagctgacaaggttattttggagacttggatgactggaagtaatgcatttggtttgttgattcggtagccaaggagttcccaggatacttgtacttaaaccatctccgatagtgcgaatagtaccaaggcgaaccacatgttgagcaccccaaacacttcgccaaacaaagcttgggttgtttccaagatcggctgaaagaaagtttgaacgtgggaagtactttgctttgtacactctagaaaatagtgaatcgggattacacaagagacgccatccttgtttggcaagcatggcaagattaaaatcatgaaggtgtctgaaacccattcctccttcttccttgggttttgcaagccgatcccatgacatccaaataattccacgcccttgattagtattggatttccaccagaagttggccattattctctctatctctgtacaagtaccaagaggtagaagaaaaacactcattgcatatgtaggcagcgattgtacaacggttttgagaagaatttctttcccggcacgagataagaatttgccatcccaactatttactctcgcaatgactttattcttgatgaagccaagtattgcatttttattacgcccaattatgttgggaagaccaagataaagactgccttcagtagcttcaatcatgtggagagtggagcaaactcgttgttttgttggaccatctgtattagggctgaaaaagatagatgatttggatggattaaccttttgaccagaagcatcttcgaacaaccgaagt

SEQ ID NO: 246766 - DNA, 626 bp, Cannabis indica
ctatgtgggacaatgtccacaacggacggagctttttttaaaataaatatataaataaatttttaaatttgctataattatttggaaactaaaaaaattaaagtattgtatcaaatattatataatttaaagttaaataaataatgtaaaataatttttttaaaattcgctcaaattatttgtgctactaattggtaatgagttatattaaaaactcatattattttataaatatgtgtatataatgcgtatatatatcaaattataataaaataaagtaatgaataattgagatttcaaatagaaaaaataagaagtaaaactagttaaatagaattgtatattaaatatgtacaaaaataaatatattatatatgtatagtgtataatatatatgttcggtcgattctcggtttaatcagtcggtctgccattaacactaaaaccgactgtgcaaaggcgattttaatcgaaggcaattttttcggtgttcggacggttagtgtaatcggtttggtcggtttcttggattttttactcacccctaatgaactcgttaaaaaaaaaaaaaaactaataaatatacattatatactataatattaccaaataaaaaaaaaaaaaaa

SEQ ID NO: 246767 - DNA, 992 bp, Cannabis indica
attagataaaaacattttaaataatgagctttaataaaaaagatatttgatctccattgttggttctatatagttcttgttttagtgagattcatccctaatagatggacgttcattagcaatttaacgtcatagaatctcgaaagataagtattattttaagtgttttgttcttagtaacgaccatccgaatagtgactgctaagaataggacgtacaagttataaaacaatggtagtagctcatgaaataagaatgaccttgactctcgaccaaaacgaagcaacatcagattcttttttcaatcgaataaaaggttgctagaatggttttcattttagatgagttgactactctattcaatagatgatatctttgactcaactaaaacgaagcactgtatcagtttgttgaaaacctgtgaaaataattgaatatgttttattttggtatttttgcaaacatgtttgcttgttattttctaaacttgtgtatgaatttaagtgatccaaataatttatttctgttcattgatatttgtagtgtcaaaaatgaataatccacacccctaacctcaccttctacatgtctttgcaaattaactctatagtgtgaaaatgtctcccggtaagagcattaattcacactcaataatgatgaatctgaagttccaaaaacaaatctgctgggaattgatttatcaagagaacaatgggttcaattcattctcaatagtcttccacctgagtataatgtatttggtgtatcttacatgatcaacaattttaactcatccgacgtagacaagctggacgcagaattgcgtgcttacgagaggactttgcctgcaaggaggccaccctccagttttgcagacatgcaagaagcaagaaggtaattgacaacgatgcttctaacaacgctgcttcttcaaatactaaaataatggacagtcatactcttctatgctcgtattgtgatgagaagggaca

SEQ ID NO: 246768 - DNA, 690 bp, Cannabis indica
tgtgaagataacagtaaggtacctacaaaatatctgaaagtgtaacggaaggtatttatgtcgccaaaattttaacttaggtattaaattgcaactggaagataaacttaagtatttataccgcaaattactctaataataataataaggtaatccacgaaagaaagtagctactctgttggacagatgaacctttcattgtggatctcaattctcaatcatgaaatctatactgttcagcgtttggttgggtggaatgaaaacataagaatagaaatatgaataagaatttaaatagaatagaataaaatataaaatgcctaaaaaattgataaaataatcattaaatattttctcatgttatattggaatgatctttccttttattttaaaatagaatagttattccaccaaaatggtagaaagggcattccattagaatgacattctaatactttaaaatgcaaccaaataaaagaatgaaataaaaattgttttctttccattccatttcattacctccaaccaaacccaccttacttgatttcttttgttttttagaaggaaaaaagatagaacatactacacatcatgacaaagaatcaaaagtgactcttaagttgatcaatgaagattgaagaaaaacacattgaccaaatcatgctgtcaaagtaataatattttatttta

SEQ ID NO: 246769 - DNA, 1125 bp, Cannabis indica
gaaaatcattattatttgagtaagatatatataataagggaattgctattagtatcagtgtgcctagcactttatcgacatgtcgcgttgcgatgggctagcgatactctttaaaaattattatattaaattagatgagactcgatacttagttggaccaatagcgatagatttttgcaccaaaaactttgacaagtagtaaattatgcttctgaaattttaaagtccttaaaaatgcttttgaactattgagatggttagatttaaagattttttttttttttactaatttcaataaaaaagtctaacatggataaaagttgagaggcatgatttagtacgtacatgtcaaagttcgaggggtatgatttgctagatatcaaaatctaggaacatgatttagtacataaacaatcattgaaatagtaaaattaatcgaaattagataaaaattcttaaatctaacaatcacaaaagttcaaagaatatttttaacgaccttaaaagttcataaacatgatttattacatatcaaagttgggaagcagaaatcctaattaatatattatttatatgatcttttttgtctttcaaaatagaccttgcaataattatcactttattaatttggcttaatatatgcaagtgctgtgaactatgaaggggcatcttagggggatgcaatattttataaaagatatttcttagttcatattattttttatatatttttttcactaggaaaaggactattagaaaatattgaaacttccaattgattggaatgaaatcactacgtatttgtccaattcaaaaacttccttactacttacgttcttagccaatagttatctatttataaaaaatcttttggctcaaaactgtggttgatttttcttttatatatattacttattaaattaaaattaaaatcatttttaatataaaattttctaatagctatttaacaaatataacacttatttaattgattaaatttgtttcttttggaaagagtgattatgatttatgtagttttaggtaataatgagagtataaataatcataatcttcacttacaaaaggactagaaaatagtgaaacttgcgatgaattagattaaaa

SEQ ID NO: 246770 - DNA, 695 bp, Cannabis indica
ctcattcattttatataagttatttatttacacacattaactctaatttgggacttactctactaaattaatttagtccaactccaacaaaatagaaaaccaaaaaaaaaaaaaaaaaagaaagagccaacatttagctagtatagaaggaaaggaaacacactcatttttttcgttgcaaattaaagattgtaaacattgttctttgctagatgaatgaaatgaagctgtgagacatttgcaatgaagtaataaaaagtaaacccatcatgtccaataatgtatatgtgatgaggactagattcggctgactggtaacgatctaactaactaaacagttgaaataaagaaactattattctagctttacatctaccataacactcattacccgaaacatagcctataactaacaaactaataaaaccaaaactagctactctgctctaaaccaaaccaatatcttaacactcattacctaatagtcttttctatttcttatgtcatgtacccaaaactaatcgagaccccattttatcagcccaagcccaaaagacggcttgttttacataacatgttaatgttacaataacattttgtatttctttcaccaaaaatatatataaatattttgtatgtcaaaattatgtttatagaaaaaagaattatttcaaaatacataaaaataataaaaa

SEQ ID NO: 246771 - DNA, 540 bp, Cannabis indica
aataatcccatcaatatttctaattaaaaccattgtaaaaattttaacctccaatcgggtctccaaggtcgcagaacttgaaaatatttttatttcacaaataactcatattatatctacgtattttaaatagatttctgtgattaacaaattacgcttatttatccacttatcaagtcttcagggttgccaaacctgaaaatatttttattccacatatagctcatattacattcacacatactatataaatctccgtaatttataaattacgcttattaatttactcacttaaagcaaatttaaattttatgctaaaatagattagtaggatcatgatcccacttattacctaattaacccataatataaatataaactctaattatttaccattagacttatcggaatattgcagccacgtacatagaaatattattctagtttttaagtttttacgtagttgcattaacattttactaacactctgaaactagatatatcaatgattataaactgtcaacgatacaatagttttta

SEQ ID NO: 246772 - DNA, 938 bp, Cannabis indica
aaccctaatactagttcagtttataaaatttgtatctttagttgtactattttttaactttcttttccaatttatcttcttaaaaaataggctaatttagatttttgccccttgaactttgacatgtaccaaatcattccccctgaacttttcagtcattaaaaattctctcaaaaccattgagattgttagatttaaggatttttgtccaattttactaaataaagtctgatgtggatgaaaatttaggggacacaattttatacttttgaaagattaagggcgatatcaaagtttgaggggcaggatttagtatatgaactatcgtcatattagtaaaattaaataaaattggacaaaagtccttaaatctaacaattttaatagttcagggggattttttaacagcctgaaaagttcagagggcatgatttagtacatgttaaaattcaagaggtaaaaatcctaattatattttgaatattttgaatataccttattaaataaaaataaattatatttagaatattataactaaaatatatataatttaaaatatatataaaaataaatcaaaataagtaaaaaaaattaacgtgaaagaaaaaaattttaaaaaaaatattaaaagtaatatttaaaaattatttatttattttttttaataataatagtgcacttatcatttatggagtgtaaatataacttttttttgtcttcttttggcagagtaaactaattttgttaccattataatcagggccgacctgagcataggcgggttaggcctgtgtttagggcccacctagcccaggggcccaaaaaaaatttatcctcttttaaaattacacattttttttatcaattttgaaaaatactacattttttttctaaatgagggtccaaatatattttttttcttatggcccactaaattt

SEQ ID NO: 246773 - DNA, 1532 bp, Cannabis indica
aaaatcacgtaatacgcctttgctagttagggtgttacataaactaactgaatgtgctctcgcttgtatcttggtctttaggtgactaatcccgagatttagcagtgctaattttaggggttaacacttgcccccattctacgacaattctttaagtgtttttgtatactgagtgaattgggaaagttgcccttctgcaatgtaatcattatccccattgcatttatccaagatgttcccactatatataggggctccccatgcttgaattctcacttcacaacatcaccttggtgtagtggcgagtctctttcaccttatccaagaggccttgagttcaatcctccccaagtcacttttacatttcttattcctattattttggcatagatatctactttcattttttcattgatgatttaatatgcttggacatcttccgctcttgtctttactttgcttggcttgcactgtaatgaccgcatttcataatatggattagaaaaagcaattagcactaattattaatattttagtagttatttgggaatttatttaattgtgagtcccattattaaaaatgggcattagagttataatttctcaatttcggagattttattaaactctaagtgtattatttgtgttatatatgaattatgttataggcttttcttactgagtctctcgactcacagttcgacttccatgtgtaggtaaaagaaagacgaaagctgaacaggagtgagcactgagctgggatgaggttgattaggatgagagaagtgtttagtagttagtcatgactttttgaagggattcaaatgaataatagttttattttcccctaaaatatgttaattttgtttctactttttaaattatgaagaattactacttttttttgggaacatttttcctcttcacttggtggattgttgatgctattaagatataagatatttacattgcatgtttaatgttgaactaaaactatttgagtaatgtgcttgaatgtgaaactataacatgtcaataccaatgtaattgatttacgaaattagttacttgtagtaattttgaatgtgaagtagatcaattacaatttttgttatagttacaacgttttaatattttctatctttaagatcataattcctatgcttaactacactttgaattacctttacaattacaggcattgaaagacagaaacatttatagacacaattgtttctatttatccataagctataaacggttgcaacaatcatcctttaaacttcctattctggtttttaaccaattctgccaactgacaaagtcaaggtgcctagccttgaaacctaactagctaaaaaattagcaacaatttctttgaataacaacaatcaaaataaagatgcttgtggctctcctactgcaaaccacaaacacgacagctagaatctgcaacaaagatgttaaatcaagaaagtcgatcatttgttttatttgtcttgtaaatttgttatattttattaattgttatt

SEQ ID NO: 246774 - DNA, 644 bp, Cannabis indica
tatggtttgggaatggtggctcgcgatcaaaacggtctcctcattgaagcccgaactgttttctctcatagcttggttgatcctcctcttgcagaagctatcagattgaaggaagctcttagttggattaaggaaaagcaatggcaaaatgctcaactggaatccgactgcctcggtgctattcaagctattcgtagctctttaaaaatactttctttgtttggtttagttattcatgattgtaagactttgattaactctattggtaatgtttctgtttcttttgtgaaacgatctgctaatgtagtggcccatcactttgcgaaggctgctatgttattccctgatcgtcgattcagtttggaggatgttccaactgatttgctaccttgtttggtagctgaagttattggttaataaaatatttgatcattcaaaaaaaaaatattttatatgttgtaattcaacgtgataataaattattttatatattatattttttctttatttttttaaatttacggtttgggtttctaaagtggttgtagcgttagttgtaatagggatttctagttgcaatttaagttgcaactctagttgcaataggaatttctatgtagaatttcgaaaaaaaataaaaaaaa

SEQ ID NO: 246775 - DNA, 1714 bp, Cannabis indica
tgtaattactaggtagggtaatactagggtagtaattatactatattttaaatgcaaggtgtgtttggatataaggtggtaattacatatgaattcctaatatcttgtttggcaaaatagtagtaattacatgggaaaacaatatattttagtagctaatattttaatattggaaagttttttagtaattacacagtgtaattacattacaattctcaatggggggccatgagaattgaagagtgtaattggaacccctcaattacttccaattacagagttacagtgtaatttacatagtcagacaaacatgctaaattgtgtaattacctccaattacacacaaatccaattacatggtggttttctaaacgtacccttagtaaattcaatgtcatttgttaacatttttttacacgaagcattgatgtttttttttttttgttttatgctaattttgaattatgtgttttgcattttatctattcacactttgttattttaaataaaaaaaatcaacctttaaatcttatattatctcacgtgtgaataaataaaatgtgaagaatgtccacgttttattaaccgttgtaaataaattaatttcaaaaggaataactgccaatctatattcctataaataaaggcataatctatgagaaaaagggacaataaaagagagaaaatcttattatttcaaatattgagattgtattttgtattcagaaaatatctctaataaaggactcatggagagtatgtagattttaactacaaaacaaatatctggtgttatttattatcatttaattatatagtgtatttattgcaaaaaaaaaaaaactatttatttagttaacgaaaatatgtgttaataatagtacttcattgtaattaatatattttattttattttttatttgatctgcattaatctctctatttaggatttgtgatgtccaagaataatttgtaggtgaatttggttttaatggagtttaaattcacaatattaactaagacatattaggattttgtctgcacagatcaagatttatctgttcagaaaaaaatttcatcatttaatgaaattttgtaaggaaacatttaatgcattctctttgttttcaaacctttagagcttagttttggatgtcatttatccctataaatatcacctaaaccagtagcttccactccttaatttcttttgtaaatgacagttgttttactattccttgttgatttgtgagtctttatgattacttttgtgtgaagtaaatttcaaagtgaagaacgtgaagaacaaccttgtggagaaggttcatctaagttttgcatcgagaggaaacaaataccgctattttcgggagaagatttctacaagtcttgcattaggagcaagcactgctatcttcgagagaagatttttacaaatcttgcatcgagagaaaacaagcattcatcaagtatttgaaaagagttcaaacattggtgtcttaaggagattcattcagtaaatatgagtacatcaagcttgtgacaaatcattagaggaattctataagttttgtttaagtatattactttgtacttggtaaaatttatgcactattattttgttctataaaattcaatatttgatagaacatatttcacaagtactattcaaacaattttattataattttgtattaatcaaattgtttgttaa

SEQ ID NO: 246776 - DNA, 1117 bp, Cannabis indica
aggaacacactaagagtttagtgtcccgctttgatactaattgaaaaattcagtatttgtaaataccaataattttacaaaattttagtaaaacacaactgtaatagtctgcagcaacagattgtaatcctatcattgcaaaacacaaatttgcagaatcaaactggaaccagaaataaataaatgcagacttgataaaacttgacacaagagaatcatatgtggtatcactgttctttcaaacactcctagtccatggggctacgcccaaagaataaaataaattagtgaagtatcaaaaattacaaaatcaatttacttaaacaaatttagactccctctagtgatttgctgcaatcctttgtaatccaccttgctaatctgatcttttaaacacacaaagtagtgaacttccttcctctattgatgtgtgcttacttcctcccgaagtaagacttaaacaaatcttctctcgaagatatatgctcacttcctcccaaaatgagacttgaaaaagttttctcccgaagacccacgcttgttcaaacaagttcttcaaccaattatacgaacagtataagaacaaaacaaactctctcctcacaaagatgaaaatataaaaaatgcagctcagagaggtgagaatcgtttggctgatctctatgtcttattaatagaacataacaaccttagagacagccagaaacacaaattttcaaatgtacaaaactttcttaaaatatttcctgatttgcagcatcataatcggactctgctgcatcagatcaggactagaaaggaaacttttccaaaatgaccaagatcacaatttggacttcaaaacctgccaaataaagtttattcgatttgctaaaaacctatcaaaatcgaattcatcaattagaaaaaagaaaagtcaagtttctcaaaaataagcaactttccatagagagaatttcttctcttgcaagaaaaatttcgtaaaaagttgaaaccagctgggaatagaactttccataaaagaatgaaaatgcacttattacaataaagtcaatttagttgctcaatgaagatgcacattaattaaaaaatattttgtcaactaatttgccaaaaa

SEQ ID NO: 246777 - DNA, 797 bp, Cannabis indica
tgtttgttttctagttttattctgtagttacagagttgtgttgtgtagtaatagaataaactcttccagtaccatatttattattccgcatttaattaattgattaattaaataataaattagtaatattaaaatatagaatttcaactggcatcagagctcgtcactatactcttagtgagatcctaagattattctattctgtataatttgttttgtgtgagatgtcgttatttgtagaaggaggttccataattatcttagaaggtcagaatgagaacattcattaagtcacaagatgagaaaatatggagggatatacttgcatgtcatcttggttaccagagggtggtggtggaatctaaccgtcttttctgttattaatgttattattcatagcaaggttaattagtcttatctaggtttgttagagatttcattgtttattgtaaccattttattgatatttctttcttgtaatgtcctagaagtgttaatagtgtggctcacactttagctaaattagctcttttcttgaataattattatgtttggtagtctaactatctaaattcttttgaagataaaactcttataattaatgatattgtatgtcacttttttttcctattgagattttttcccatttgggtttacttttgaagtattaatgaagttgttttctcaatatatatatatgattatatttgatgtttggtgcaatttcatatttaatgttatatggttggagaatggcataatgaactatgtctcggattaaatacatcatttgtaac

SEQ ID NO: 246778 - DNA, 1217 bp, Cannabis indica
ttatctgcttatgatagtgaacctgttgaaaatccctatccttacaaatttattgtgggggctctctagtaccttaccattacaaggttataaattgcatatattgtaaataaagtatgccagtttatgcaaaatcccttacaagttcattgggttgcaagaatcttgaaatatgttagtgctacgttagattatggtttgcatcttacaaggccttataattttgagtttctgtgatgctaactaggttgtgagtctagatgattaaagatctacttcttgttttgtggtttatcttggaggcttattacctggcaatgtaagaaacaacatattgtttccaagtcgagtagaggtagaatacagaagccttgccattacagttgcagaaattgcttagctgcattccctgtttgctgaattacaaaattagtttcccaagcctcctgtcatctggtgtgacaaccttagcacaattatgcgtacgctcaatccagttctacatactcaaacaaagcacataaaattgaatctttactttgtcaaagaaaaggttcgtcaaaagctcattaaaatcaagaatgtcccttgatcaaataattaatggcctaactaaaactatctaaagcaccgaattctcattattcagaatcaaactgacaattgaaattggctccaattgtcagtttgagagagcctgttagagtgtgttagttttatcatattagagtgttagttggtcaattctgctatttgtccaactgcctactcttacaaacttgtattcgattttctgttatcttgagcttgagctcactattgtatatatggtttgatgacttgattaagtaatgaaaagcttcattctcttacaaatcttttcctctctttccctctttctgtccaaacatgtctagaagattgaatagtcatacaatagaaggcattcgaatccaacccaaataaattaaagaaggatgtccctatatcttttcttgtgttcctttataatcatgctaacattttcctaatattaattaagcgttttatgattaactaatttataaatttaacactctcaatgatgatgccgatactagcttatatgtatataaatttatgcacagcaatacccaattgctcaatttgcaaaccttcatatataattgtaatcataattattaagtacgtcttcttgaacaatagcaagacaaaga

SEQ ID NO: 246779 - DNA, 625 bp, Cannabis indica
ttattatactccaagtggaggagtaccgagttacatgattactcttgatagactcacttatgtctacaaatgtgggagtggggctacttcttatgaaatttttggacaaaattttttgaacgttcactatactagaatagccgtgcatgaccattaacgcatatgactacacctttaaaaggttggtgcatgatatgatgttaaagataaagttcaaaattatgagttattctagtaaaatttagatcatagtgaatatgtaaaggttcaagtcgaaggtcacttttgtttattcttgatcttatagttcaatgacattgttggataaaaatattttttttttaaaaaaaattaagtgggagactataagaagttttatcaaagtaaatgaatttttacaagatagaaagtgtgttaacatatgatatgagaatagttctacatgagatatatgagcccttatttacaagagtatataagagtatataaggtaatcttaggacttggggttgggccccgaaagattatttgaatggtatgaggaacttacacatttttaataagagcatctctaaatggtgctaaaaaagtgatgtattcttatattttagtacacttaaaaaaa

SEQ ID NO: 246780 - DNA, 591 bp, Cannabis indica
tattcgcaaatggtggattgaaaagattccatcttcttttggcaatttaagatgcctgcagactttgagagtaaggaccaagaagagtgatataataataccaagttcaatgtgcaagctggagcaactgaggcatctatattttttcacttttgtgattggcataaattctagtaatttcttgaggtcaactaagtctagaaatttacaaacattggtaggtattagtaccaaggatcttctacctagtgatcttctacagttggagagtctcaagaaattaagaattcacgtggatggaaattttgagacattcttacacaatccccaaactctcacattcactcgtctattatcgttacaagtgacgaattctcgtcttgtgggcaaaaggatagatattgttcctttgatattaagttgtcctcacatttataagctcacagtagagttgcctataataagattaccacaagtcaaccaattctccccaaatctcatcaagctaacgttgattaatctccaacttaaggatgatccaatgccaactattagaaaagctacaaaaattaagagtccttagaattgact

SEQ ID NO: 246781 - DNA, 1685 bp, Cannabis indica
ggagctgcattagaagggaaaaataagccctgcccaggggtctttttgagatattgcaagatgcgattagtggcatgtaaatgaggaagccgaggacaagccaaaaattggctgaggtgatttacggcataagaaatgtcgggtcgagtaatggtaaggtaaatgagcttaccaattagactacggtagacagtgggatcgggtaatggagtccctttgtctttgctaagttttaaattgacctccatgggggtagaggcgggtttggtgccagtgtaccctgtgtcttgtaataattgcaaggtgaaatgtctttgagaaacaaagattccctctttggtgcgaccaacttcaagaccaaggaaaaaacgaagttttccaagatcttttaacttgaattgtatgtcaaggttgtgtttgaagttagagattgccgtggcattgttgctggcaatgatcatgtcatcaacatagacaagaacagccataaaaaaggaagaggtgcgtttgataaagagggaattgtcagattgagattggtgaaagccatccttgattagagtagtactaagtttggcgtaccactgtcgggaggcttgtttgaggccataaatgctcttattgagcttgcaaacagtgttggggggagcattgtatccaggaggtatcttcatgtaaacttcttcatgaagatctccatggagaaacgcattgttgatatctaattggtgaatggtccaattgttgatggcagccaaggctaaaaaaaacttttagagtgttgaacttggcaacgggggcatatgtttgtgagaaatcaataccttctctttggttaaagcctttggcaactaaccgggctttaaatctcaccacttcacccgcttcattgtatttcactttgtaaacccatttgcatccaatggctttgtggccaggaggtagcttagtgatgatccaagttttatttctttcaagggcttgggtctcacaatccatggcttgaagccaatgtttgaattgagaagcctccgcataatttttgggttcactgtgtgtgtaggctgctaggacagcagcacggaagtgagggtttaattttatgtaggatagaaaaggttcaagtggatgtgccgtagaagacacatgacacacatagtcttttaaatgagatggctgagtgatggttcggccttttgaagaggttttatgattggtaattggagtggtgctaacaggattgttaggaacaacttgatgggagatattgatgttggttatagccatatcagtggcttttggtggggctgtagcaggaaccgtggggttgtctgcagctggttcatggttcaaaccagtagccgtggtgtttgtggttgtgtcctcctttggagtgacacttttattaacgatgttgttgaatgcaacatgttgtgaatgttgagtggtggagatatcaacatgtgtgatgggtgcatctggtttatgagccaaaccagtagccgtggggttggtggttgtgtcctcctttgaagtgacacttttagtagccgtggtaggaatatcaagaggtgtgataggtgcagcagtaggctgatttttagtgatggaaatctggtttggtaaacacagattgtgagaaaaaaaaatcaaattcctgagatgatgtagagtttaagtaaagg

SEQ ID NO: 246782 - DNA, 558 bp, Cannabis indica
tgaatcaagtttctgctagtctaaagactcgcattgttgtctcttctcaactacaactcagccagcagctaatttcgcttctcagtcagcaaatccaaggcgcttcttccaccagtgaaggttttcttgtggtttttaatgtctttggtagtgctaaaatttttctaatttttatatgaattgtagatagcggagccactcatcatatatgtcattctcttcattgttttatatctctaaataaaaatcatgttgctaacttagttactttacctaatggccatcaaatacacatcaacaaatctggcaccgtgaaaatatctaataaactaatatgaacatatgtattatatattcttgaattcaagttcaattaattttctgctaatgcttatcttgaatattgtcctaataaactcacatttacttccaatcaatatttgattctggatccctccttgacttctacgattgggacaactaagaaagttaaaagctattttttttaacatgagcgtcattttctcacttctactatttatatattttgcaaacacc

SEQ ID NO: 246783 - DNA, 726 bp, Cannabis indica
aaaaaaaaatacaagcatgttccatcttccaaatcgaacaaccagcagcaacagtacctacacacttttaatctgcaagacctgatagcaaatgccccaaataattctgaataatcaagcaaacacaaaagaccaatgaaaataaataaagatcaacagctcaatggaaattcacagcaatgcaactctacatatagcatattttaatgtctcattttcttatcattgatgtttactctcttgtgtttcaacaatacctttatcaaatccaatacttaataagttttcttcaaacttcatatcattagagacccaatatcattttgagctaccagattactttccataaaatatgtttggaccaaacaaaatttcctactacctctatttcacaaatcctaaccctcaaatctatccaataactaaatcaaattttgtggcattcactaatcctttttagtcattgttattccatccacactcaatatcagttcatgtcactggaaacccaataatcattttatatcatattccatggttattatttgtatatgtatatgtatatgtatatgtgtaggattttacaagaaacccataattttaatggtgttgattcaaagcaaggactaatcatttttttaaaaaaaaatttataggggccccacagcaataaattatgacgtaagttccgccacttgggcaaaccttagcttggcactcttccta

SEQ ID NO: 246784 - DNA, 661 bp, Cannabis indica
gctgaagttgggaagagccagccgcagaggggtctggagtgggagtcaccgaggcgtgatttgcccgagcagtggtggtggtcttttccttgtctccatatctaggaggaaaaccgtggaggaagtagcatttatcgacaaggtgacccggtttaaggcaattagaacaagttggtcgaggtttcttgctccgagatggttggttcagatttggtttggccgaagtagcagtaacaacgtcagtattgccaagacagtgttggcgctcttgttgaacaaccatggagaacaccttcaacagcgaggggaatggatcatagagtaatatatgagcccgaataccctagtaagactcattgagaccaaacaagaactgaatgatctggtctcttgtgtaataatcttgaactttttgcatcgcaccgcaagtacagccgcaggtgcaggggatattgggttggtactcgttgagctcatcccaaaaagcttgcaattgggtgaaataagtggtgaccgagttatcaccctatttaacattgccaacgaaagttttgagttgtaagattcggagaccattgctttgattagatcgatcatggatgtttgtccacatctcacaagcagtggttttgagcataatactagcagcgatctcgcgaga

SEQ ID NO: 246785 - DNA, 904 bp, Cannabis indica
agcatgttatatatttgatctcttgttcaattaaatatactatttattatatattaattttaaacatcttaatcaattttttaatgcaacataaaaaaaataggccaacgattaccaatatgtgataatgatagagttatgaaacttttatttgaagtaattaacatgaaagtatcactacaagaatagtagtaggagcgacaaaagttacccctaaaaacttttataatcgtcattaaaatgtagtagggacgacaagtcgccactaacttatcgctcctaatacttcgtccctaatgcttcttgttgaccgaggttttcggcaaccgatttaaaaaaatatatgagaaagttgtaggaagtttaatgcatgagatttttacgtggttggggcattaatgagccttagtccacgagtctttcgtatttatgagtatttattacagagaatgttcttggtagtttttctctctttgattcttataaacctagaattctcgacccccgtcttaatgtgtttaggggatattatagtgtgtttctggggtgatccctagaaccgaacttctagactttctgtatattttcagtaggggcacacattcccagcagatataaaatgggaaatacatggcttataccctaggtatattaggggttaggtagatataaccctttatcccttcttgactgatgtgatccctcataaagtagtcgtcactaggcttattaatcatagcataatagctgcagaagaggggttacgccgtcagacttaatgcttatggcagtttcaatacgtcttctctcatgcagcattaaatgcgaggtgactgttcaaatggggtctggtacctcctggaggtgctttgccatagctctgtcctctaggagtacgtggacc

SEQ ID NO: 246786 - DNA, 2174 bp, Cannabis indica
tcaaatttaaaatctaggcaactcaattgtattgctctgttagtttgagattggtggttaagtggaataattattgctgatagatatgaaaatttgattctcatctatacctttataacagctgggttcatggaactttgtcctctggatgagaaaattgccgcaatacttgtatgagtaatgtgctaaagactctttatatgtgatgaactttgtcctcttgttattatcataacattatgacattttattattttaagaaatatattttatgcttaaaagattgctcttggtctgccgtgaagctttactagtcatacaaggggtcagtaccattactaggaagtgaaattacaacaaccattattgccattattgtttttttaattatagcatgaactgcaggaaaatttcgggaatgcaatgaagggagaagcttgtctaatgtgatgagtttagctttagatctattaatggtgtttcgcagcttttctttcacatcaattgtccataaatgtaaaagtttgaagcaattctaagaagttcaagggtctaagccacccatcaccttctttaagacctagaatctcattctctgctctcaaccctttttggtgaaatcaaccggtttcagcatggccgagctcaatcttgctccaaataacttcactttcacttttctcttttaagacttctcaaattgttgtgcatttgatgtgggtaggcagtttcatagtatgttggttaagaatcctttggttattgttagaatttggaataaaagaggttaagataaatggggttctatctcaaattcaattagtaatgggatgagtagctcattcatcttatatatgataatttcgtgggactaactctaatacacccttacgtctgggtttgaaaagtgttggtataacgaacgacttttaagagaccatagggcccattcatcttatatatgacaatttattttcacacattagtaatgtgggagtaactctaatagttatggatgttttttgttcacaattcactcattcagtttaacttggtttgtggggaaatgaattatgcaaggagagtctttaatcaaagtgatgaaactgactttgtttcttggaattctataattaatggcgacgttagaaacgaagatatgtccaaggctcttagcttgtttgataaattgcccaaaaaaataacatatcttgaaatagtgtacttggtggtttggtaaaaagtttgatcttttggatgatgcctataggccattcacatagatgccacggagaactttggtatttggggttgtcatggtttctggttatgcttaaaatggtcgacgaaaagaagttgtctctgtttagaaatatgctattaatgggccaggatgctaactctacaaccctaattgatatgtatgccaaatgtggcaccattgatcttgcaatgcaaagtgttcaattcatcaaaaagaagtgtgtttccacctacactactgcaatatatggattggcaatgaacggtcgcaagaatttcaccagatagtatttcctatattacagtattaagtgcatgtagtcatgaaggatgagttgatagaggctttcgctattttaattcaatgttgaatgttggaattagatcagagttggatcactatgcctgcatggttgaccttctaggttgtgctggttggcttgaagaggcagagcatttaattatttcaatgccgattacaccagacattgctatatgggatgcactccatggtgcttgcatggttcatgctaatgttgaaatgggtcgcacagttggaaatctgttgatacaatctgataaaatccacgatggacgcaacgtcttactgtctaatatctatgcagagttcataaaaggagaagacggtgaagaagttagaactatgagaaaaaagaaaaataaagcgttccaagggtgtagtttaatggtgttatcatgagttcttggctggagataaatcgcatgagaaggcaaaggatatctaccatgtgtgggtgttaggactaaggtgcgctttacctatgctaggagaggtaagaatgctactgctcaagggtagtgtgttcttttactttatgagggtattattgtaattgttaggtgagttgtagttggttatatgcttgttt

SEQ ID NO: 246787 - DNA, 1078 bp, Cannabis indica
tttttatgcattaattggactaaaattggtccactaattcaaaactattcaaaatttgtacaataagttatcttttactaaaagtccattttactcatctcattccaaaaactgactctctctcttcctcccctttctctcgaacccaccaccaccactaggcttctcgaccgacaaccgaacccactgtgagacactggatcaaacccacctgaggatgaatccaccacccactgagcaccattggaccaaacccaccacccactcgacctaccaggaagaggagcacaatgacgaccaaggtaagatttcccctatgatatttttgaatatttttcttaatgattagggttaaaatattatttattgatagatttagggtctgatatgtgcattttggattagatttagggttagatattgtatttgtgatttttgggagagaaaatgtatttttaggcaggcccaatgtatcgtgatgctaagttggttctggggttgaagacaaaggcctgatgatcggtccgattgtctgaccaactcccaaaagttttgacttaacccgatgggcccaatatagggtacgatggtgcccgatgtttatttagaattttagtttttttgttatggcccgatgtgggttcaataggacatgatatttacaccctgtgtgttttctctttcataattttaggtttgggtacgataggcccgacataagacccgattgttggcccgatagtaattttgaatttttatacattgttgtgacctgatattggcccgatgtagggtacaatgtttggctcgatatttattctctttcataatttttggtgagggtctgataggctcgacatagggcccgattgccatattgaatatattttttttgctagggcccaataggttcgatacatggactgattatagtccaatgcttatgcacaaattttctcactaccatttttttgtatttttttgcagtcttccaaagtttcacgccttttacttccagtgtcagaacattcttctggtcgtgtgatttggcgggacggtagttggtattatccaaaag

SEQ ID NO: 246788 - DNA, 576 bp, Cannabis indica
tttgccttactttgttttggttataatatacacattttgtaaattcatattattattaatttttaataattctattatacttactacaaaatttacaatctcttagtgagaatctatgtacaaaaagagcatatcttactattataaaagtgttgtaatgaggtgatagtttgaagaccattttaccctttaagaaattcaatattaacaattttgccttttcacctctatttgattctctgtcttaattgacagctcatgttttggtaatttccaatatattttgaagctcaaaaagtgtaacagtcaattgacagctcacgttttggttaatgtaatgcttttaatatattaaatatcttccattttactctttaagaaattcaaaagctccaaaataaaatttaagtaggacgattatctatttttataataaatttatggtgcttaacaccctttataaaagtgttataagcaattgtgcaatataatatcgaatcataattattttacttttaataatgaatataaaaaattaataactattcatagggtgtcacttatggtggtactaaa

SEQ ID NO: 246789 - DNA, 989 bp, Cannabis indica
agaacatgacttcacaagatatccattgtgtgtgatctagaagatcaaggaaaagaagatttttaggtgcatgggatacaaaaacacagaataagtgcagcaaatatggccaaaaaagtcacaactggaagacatgccataaccaaacaattagatattgagagaacattaatttaaattatttaatttttttctatgaacttttacaggcagaaaatgttactttaatacattgttattacatttaatacattattagttttgaaaaaagttgcataatagttgttttgtagttgaatgttaaatccaacatattatcaaaaatgtaaagcattagcaacaccatatttgaaacattaatagaagttaaaaaaaaacttttcttattacgttgacaggcatgttggttattcaacaattgtcaatctgttgaatgatagttgtatagcagatgttacacataacacattgttcaaaagattcaagtgatttctctaactactttcatagatataataattagacatgttgaataaacgttgtcccacagttgaatcaaacattttatatatcagcataatgaaaaactcgcacaaaaacatatgcattataacctaaagtactacattgtctcaaaaaaagataacaatctgatattctgttcttaaacaaaaagaaaaaacaactatagaactataacttgaataaccaagtcttaacatctagcattaaaaaaacaaacaattaaaatatataataacattcaacaggctatagaaatcagtctccaattaccaaactcttattcttcccttgaacattcttcatagacttctaaggcttctcatactcactatcaatgttttcttcatttttccttttatcatatacaaacaaagcatagcaagcctcgtgcgataagctccgatatcaaaatctagtggaacatctttttcatgtataaagaactcagcaaatgcaacaacaaa

SEQ ID NO: 246790 - DNA, 1168 bp, Cannabis indica
taagaggagatgctttccaaacctgatatgctcttgaacaatctagcaagacacatgagtgatagtttcattggggcagttacaaaaagaacaacacgggttgggagggaatttcttggaaaaaaagttggatgcagtggggaagaatatgataataaactctccaagagaagactttaattttgggaagaagacacgagctccaaatggttgtccaccgcttcttagtaagactacaatccgaagaggtgggagggagagaagcattattagctagctaaatggtaagcagttttaacagagaataaactagagggatgcatattccaaattaaaaaatctttcttgcccaaaacaacataatcaaaatagttatgaaagtactttggataatatcaagagttatgaaagttaggagtaggagaatcttttctaatcacacttatggaagataggcttgtgtattgtaagtgtaaatttttactaagttatgaaggttaggcttgtatattgaaagtattgttagaaatatttgttatatagacactttatgtaatattactcatgtaattgtcttaatttaaatttatcttttattaattctaattttatattattattttttaatagtgaactttcagttagaggtaataaaatagaatggaatagaaatgaaactattttcatttcattcctttatttggttgcatttaaagtattggaatatcattctaatagaatgacttttctaccattttagtggaatgactattccattttgaaatagaaggaaatatcatttcaatgtaagatttgaaatatttaataatttttttatcaattttttatgcattttaaatttttattccatttcatttctaaaatctattctttatttcttatttttattcctattgtttttattcattctaatcaaacgccaaccttagtgagaacgttagtccttgaacgttaagtttgtaaatgtgtatattggttgatgtcaatatagagcaagactcaattgttggaggagattagatttggttgatgtctaattttacaacaaaaaaaaaaaaaaaacaagagtttgagaagtagactcatcctgtgaaaaaaataaatttaaaattattggcaaaaacaagaaggttacaacaaatgtttg

SEQ ID NO: 246791 - DNA, 911 bp, Cannabis indica
ttagataatgccatatttagtgacatttactttttatgccatatttatcataaccttaataattttttccatatttttgaaaatagccctattttgtatttgttatttaacaaatattaataaagattaaaatgtggcatattatatattaatacgatattaatatatattatgtgtcggaggttgtattatattatatataatataataatacacataaaagttgtaacatattaggagttacaaatctgaaaatagattgtaacctaaggatcacaattgataaatatgtgagttattacatatgaaagttatggaattaatgagataagtttttagcggttagaaactgttacaatactcaattatataatttaaatggatattgagacgttgggagaagatttaactcgaagaggagttacaaaaactaaattttgagttttttggaaacaattgtttaatggttgtttttcgaacaactaaaatcaggtttttaaaaaaacgttcataaacgtacataaattaatactagctctcttgtccaacgtttttatcccattaaacaccaataaagtgttggtaacaaccatgtgataaaatgattttattttcaaatgtaatcctcaaacactataaatagaggtctttgattaacttgtagacaacaacaatttctatttcctaaacagtaagctagaaaatattaaaaggcttatttattcctaaaagtatttccattctattccctaagtgtttcttatagggggaaataagctttttcggacaaaggtgcttaaaccttgttcaagcctttggtgatcccccatagcttacttgagttctttttcatcctctatttttctatttattttctaccctcttctcatctttattatatatatatatat

SEQ ID NO: 246792 - DNA, 552 bp, Cannabis indica
ttagggggtaatagaaagttattgggcaatataggttgtcgtcagggctacggatctttattgagatcttatcctaagtgtctgaaatgcaagaaacaccatcagggtgaatgttgggccaagacttgtttccagtgtggcatggtgggccactttatcagagattttcctcaagccaagaaagaggagccgaagaaaaatactacttagaacccgggacaacttcttaccatgactcaggctgacactgatgctagtccgtcagtggtgacaagtaagttatctatacatggttgttcctatactgtattgtttgacttgggagctactcattcctatgtgttgagagagtaattgaaagttttcataaccatgtgatatatatgctttgggtttggtaccctgttaccttcaagagaccttatagtatccactaggtggattcggtctttgtctttctagattgacggttgtcaattaaccgccaatctaatagagctgcaactgtctaatttttatataatcctgggaatggattttctgtcaaagtat

SEQ ID NO: 246793 - DNA, 3064 bp, Cannabis indica
cctatgcatgcccgtgattgttctcaggtaaaggtttatcagtttacgttgcagagttgatttcattcaaacaatataatgattatttcagattagaagttgggggctaaccctagtcttctgtttcacgttactcctgtgccttaatattttgcaagatgctctatactattactattatgtcttgagcccttggattaatagtattttcggttggtaatacttcaggtacgtcgattagcttcaatttatcgcttacagagtggttgccatggctctggcaaaaaaaggtatgtgggtcccttttgctttctttatgacatgaatacagtatatgcatacctttctgattctagtttccattttgttctttctcaagatttgtaacagtgacacgaactcagcacacatccatgccgtcttctagtgacagggttcgtctggaaaaggtactactgttcaatatctgtgtttgttttgctttttttgcaataattttctgagtagttacatattgttttcaaagtgtttgcactaagagtgaaaatttactttgtggtttcttattgtacatgataacttaatggttgatttttgtaatttcagcttataggagctggcatggaggatgctgatttttctgtggttgaaaactccaacataaagtcaatgagtggagatggaaaaaggttgaagaaaattggaagaggaactaaattcacaaggccagtggacctcggagtatctgctgaaagaaaatcatcagccaagcgtcatggcagaggcaatgagagtagagaaaagggaaaggagacatatgccaatcaaccggtatcatttgtatcgagtggtgcaatggtatctgaaaaagctgagtttacaactgtagattcaatggagatggactcatcaagtggtcaaaataatgttgttgctggctcagcaagctttggtgcctttgaggaacataccaagggttttggttccaaaatgatggcgaaaatgggatatgttgaaggtgaaggcttaggaaaagatggtcaagggattgcaaagcccattgacgtggtcaaacgacccaaatctcttgggttaggtgttgagttctccaacaccgtcgatgaccctgcaacaagtaatccagcagcaagtagtagtaaaccactaaagaataaatctcaaaggattgaagcttttgaaaagcacactagacgatttggaacttttgagaaggaatcccaaggatttggatctaatgggaagaacaccaaaggatttggttcttatgggaaggaaactaaaggatttggatcttttgagaagcacaccaaagggtttggctcaaagatgatggcaaagatgggttttgttgaaggcatgggattggggagagattcacaaggcattgtaaatcctctagttgcagtcaggttaccaaaatcaagaggtataggtgccaaagattagaaatattcactgttttttattgtaaaaatttaaagttaaagagctttgtcatgacatcatgacatgatttaattgaataaaactatagatgattaattttcatcttgttcttctaccatgtacacatgtgacaacagatgattttatgtttttctccatgttcctagtgctgttttttgcaactatgggaaatgggtttgattcagttctagcttagcctcatcaagatgcccttccattttatacctgtaattaccctttaattatttttttattaaactataaaaagtaattttgaaacttgtattgtatgacaatgatgtactccacttttgaactttttaactggttgtgaagatcttataatcatgatagaattgatgtgtattaattataagtaatttggtttttaatatttctttgtagaattgaatcaagtgatgagttggttgattctgcaattttatattttgttagaaaggttttgatgattctgcatgtttttcataatgtaaaacatgtgtagctacgactgacagaaatattctttttcttaaataatagcaattattattcaatcattcgatggatgaatccaaattattcttcttaatacgaaaatatgtagttataacaaatgaccagatactcttatttaaatagtaccaccattagactccatgattgtatattatatgggttattttggtttttttttttttttggtcttctttctccttggagtagttatttataattctcttcagtaaaaatgttggaatagtataaagaatttcatataaaggacctatttcatcaataattatgacattattattgctatatttattgatggaacatcaatataatgaaaatgattttatatataagaagaagaaaaaatgtgacaagtgtcctatgttgctgaatcacatttgcttttttcttaagtataatttcccatgtttgctcctatggtggcatttcttcatcacttatcaaataatgcacctgttgtgagttgtgacctctcaaatttcaatcaaatttgaatttgataaataataataaaaaaaagtgaaataattataagaaaattatgaataaaaaaattgaaattacattaatgtagttgtggtgtagcttttaagtttggttagactgtttctgtttgtggttctggatcatgggatacaatacataataaacaaaatagatttatttttaataagaagaatttagatatttagtggaaggaaggtacatcatttttgtttctttcttaccaaatggtaatataaaccgatatttttatttattcttttgttgcaaggtacaattttgatgaatttgtatttattaaatatataaaattggtattagctgtccttatgcaagctacccaaatatacatgaaagatatattattattcaaaaaagttgttaaaaaaaattattttgtagatttagaaggtgagtaaagctaaatacataaattgtttacatgtactacacaagtaatgtgcaataaccaatactttcacatttaatagggacaatattttccactaggatatggctctgataccatgttgag

SEQ ID NO: 246794 - DNA, 776 bp, Cannabis indica
taattatattagtctaacctaattaaaattgtattagcgacataattatctttaaaatatatgaaatttatttttctttggtttattttaaagttaaatttagaaaaacacttagttaatgagatatattctagatagttgttaacgtagattttcgttcaccaaatttgagccttacgatgataattcaacacaaaaaaaataaagctatagaataataaaaaatgaacaccatggttttttacgtggtttagcagttaaaattctttatagtcctcgagtcaatcttattcagatttctgtgtatgtttattttagggcctttcgcgtaagagattttttcatcccccctctttgatcctgtctgcaactatttataattgcatagtggtagtcaattacaaagctggccaaaattcatttacagccgttatccctaaaattgtgggatttgattacaaataaggccaaataaatgaggttctcacacagctgtgaatatactgcctttattgggccgagattgttatagtgagatttctctcacctagaatctcgagacaagactcctatttaaaggacacgtatattcagatttccaagggaagctgaaatgtccatgagaggctcctcgaagtttgatcctcgctaggatagagcgagcgagatcttgcgagtacgaccaaagtcggatcgcgtaattcgcgttatgcaggaggagagaatggatccaactcgcatgtgtcgggacatatgcgagtatcctctctatactt

SEQ ID NO: 246795 - DNA, 1230 bp, Cannabis indica
ctctgcggcaaccatttctttgactggtttatggaagtgttgacagtaggaaatatggggttggttgaagaagctatcatagttggttgggcaatttggaaggctcggaatgatatgcattggaatggtaaaagttgtagtgctgctatgttgtttggctggctcgtaccactcttcgacaatggatgtgtgctcaggctaagcggctggactcgagttccctgccttccaatcgtactgacacgagagaacactggtccaaataatctgctgaacagataaaaattaatgtggatgcggcggtttttcaagacacaaatgagatcggtactggttttgtagcacgcggctgtgatggtcgaataattgaggcgttttcaactatttcttctgttagtttctgacccaaaattgcagaaattctaagcgtcaaggaggcacttagttggataaagacgaataacaagtgaaatgtcattttagagacggattacattttagttgttcaagctattcttagttcggtctttatgccttctatttttggtttgtttgttaaggattgccaatttattttatattctttaagtaatatttctattggtcatgataaaccgtctgctaacaaagtcgcgcactgtatggcacgtggtgcttgttattggtcagatcgtcttttcactgagagcaatgttcccattgctcttcagtctattgtattagcggatgtttctgtctaataaagattgcttttattcaaaataaaaaaaaacaaaaaaaaataattttttataataatactgatttatattaatgcattctgtttttttaaaaaaattataataatattttttatttaagtagtcagacataaattttcaaactaatttattttgaaaagggacccacactaaattattttttttgcttttccatagcaaataaataaaatgtatataatagtaagtaaaataaatatttacaagtaaataagaaaaaagaattgtatgcaaagaatctattttgtttaatggaatctgaaattttatagtttatcatgggtgaaaaaattgccctcatagtataggaaagaaagtggccccttactttagaataaccctatatatttataatattatatataggaatttttacttccaatttatccctattattttatatatgtaatagtattatatatattgaattaaaattaataatttaaataaa

SEQ ID NO: 246796 - DNA, 935 bp, Cannabis indica
tttagaaagttcatatttaggctgttaatcaacatacttgtgagtagatctaagatcctggtaaaataatttccaacatataaagcctgttagattacattgatagtggtatcaatatatgtagagttgtattagataccaataaatgtatgtttggctcaagtaataattgatgctatctcattgatacaactagagtaccgagtataggctaatattatggtcaatagtactatcgtacgaacattctagactcagtaccgcatgggacgcaaggataggattatggttgtctgtatgggcacctaattgtaatcattgttatatttttaactacaattatgcttttcttacagagtgtgttaactcacatttattatttacatgtgtaggtaagggcaaagctaaggcttagtagcagtgagtgcgactggatgaagattgtacatgtcaggacagttaggcttggaacgtacggtatttgggacaacaggcagtattttatatagtcactaggcaacaacttttgaatcgaatattttgtatcacagttgtaattattttaaacacggaatcccatttttataaaagttatttgttttcaatttaatagtaattaagtaaagttttaaattatcacgattttcaataaaattgtttattaaaaacggattgtacaggtaatataaaatcactataacacgcctaaccttgtagggtgttacaatgtcattgtcaaactatttcccataatgtgacataattttctatggcagcccaaactgacatataatgttctaactacaaagtcgaggaccttcttggaagttgttgtcgctagtggctgagcttcgatccacttagtgaaatagtcgactacgactttagtatattgtacacctctttttcccataggtagttgaccaatgaggtct

SEQ ID NO: 246797 - DNA, 1345 bp, Cannabis indica
gatttaaaaagatacctcgtgcaatgccgaacgaactaactcagatgcaaagtccttggcctttcaccatttggggaattgacatgatcggacagttacccaaagggaaaggcggggatacgcagtggttgcagttgactattttaccaaatggatggaggtcgacccattggccaccatcacgtctaaagaagtgcaacacttcattgtgaaaaacataatatgttgatttggattaccatgcaagatagtcaaggacaatggcaaacaatttgacagacagtccttcactaatttctgtgcgaaccatggaatcataaaaaatttctcggcagtggcacatccccaagaaaatggtcaagtcgaagcagtcaacaagacactcaaagataccctaaagaaacaacttgaaaatgctaaaggaaattggccagaggaacttcctgaagtactatggtcataccgcataattgggaaaacaacgaccggacagactccatttgccatgacatatggttgtgaagctatgctgcccgtagaactcgaactgccgtcccacagaagactgacatataaccaagaggtcaatcatgcactccttccagaatcacttgatgaagttgaagaaaaacgaaccgcagcaaacttgaaattgatagctcatcaacaaaaggtagctctgtattgtaacaaacatgtgagagcatggaaattctttgtgggagatatggtcctaagaagagtatttctgaacaccaaagacagtacaacaggtgtgctcggactaaactaggaagggccatatcaggtggtcgaagttctagaatcaggggcatacaaattgggtaagtatgacgaaaagatgcaacttgttctagtaccaaggtggtcaacagatatggtcatccgacctggtactttttactggtattattttttggatgaccatgttaagtacgaaacagaagaacatttactcttaagtgaatggccttctgggcggaccacgcccaaaggttcgaataaaattatcaagtacttaggtcagatgaccacctttgaaagtatgatttttattttttgcgattggttttgtttatgctaagctaaagatcagattagatcaacataatagcttcgatgtaagttactacggtaacagacatattttcgaccaataaatgaataaagatgcttatttcaattcaaaatgagtcgagttcattagcatgttataaatttatcattaaatgtgtagaaaaggcttggtcgtacccaaaaccccgaacagacaaaaaccatacttgtgaaaacaagtgaccaagagtcaaaagtctgctcggtc

SEQ ID NO: 246798 - DNA, 659 bp, Cannabis indica
accttaaatagaaaaaaccagaaggtcctcagatcgacacctctccaatcacagatcatagccgcctcttcactaggagtagatctcatcatggttagagatctttgagctgcacagtgaccatcatgcttccttgccgccataaatatgaagtaaaatggctctttgagaaatgggatgatttgatagccaaagattaggaagaaaaatgagggtgaagagggagaaaatggaggctgaagaggatctaagtgattaaaagagtaattaatgtggtcagaagggaaagaaaaaacaaagcaaaaaagattgagaggatcaaaagcattaaagatgcatttaatgctctgaaagtaatcataatagggttggattaagggatcggggcaccataaaccaccacacaactccggtgggtggaccaagaacccatttcgggtaccagagcaggaaacacacgcaggagtcttgaacattctagagagaaaaagcccaaacatatatggaaaatttcataagcataaaaatctttatgtgctatgtaataataaataataacattattattatttaaataaaatgatttgactatataagtttggatatgaaataagtcaagtgtgaatgacctaacttatttgatataaaatttaccaaaa

SEQ ID NO: 246799 - DNA, 931 bp, Cannabis indica
tcataacaaatcacagaacctttcatatttaataaaaaagaaaagtaaatgactttgacaccacttgttcttgtttgtgtaaactaatttattcaataacaattttgtaggtaattcatccctctaaagatcctaaggtggagaagtactacaaagagaaataccgcatctttagtgagctgtacgaacaataaatatctcattgctctctcatggatcaagcattgtcatagctattttgctcaccaacaaaaaagaaaggtgactaatggccctgttatactgtatatgaatgattgctttctcatcaagtaagttatcttttttttcctctggatttaaaaagacaattgtcttttctggaacttgtttatttccatgacaacaagaaatacattaaaaaggacctaaataatgcttacgtggacatgccacgtcatgaggacaaattttgggataacactagtaaaataaaaagaaaaattataagtttgttaaggataaagtcattggagcaggaagagattcaggttctaatccttttgtatttttcctatagttctttcttacacataacactcgaggtttttgcaggaaaattggtatgccattgtcaatttgagttattctcaataagtaagtgtttattttttcttcattctactgctatgtactcttagacacagttttgagcttcaaaataaatagtagatgtattttgatttttctcgttaatcgagatacagctattagttgttttttatttgtagtgacaacttaaaatgataatgtgctattcgtagtggaaggattcttcaatgtgactcccaataaacagttcaagcaatacgggcatcgtgagagaattttttaagagtttgaggggcatgtgcttcttgcttttgagttggagccagattagggccttcac

SEQ ID NO: 246800 - DNA, 602 bp, Cannabis indica
gggagatcaaacctattaatatcagttaaaccaaaaaatgaggtataaagataattgaaaatatccctaaaatttatgttgtattgttttaagttagctgagtgaaaaaggagagcagattcatatcatagtcgtcgtgtatccgagtctttgcagcaaacacacccctccaaccccaaccccatattctcaaccttccttccttcctacggtttattctctctttcaggtatttctatctcattctctctctactatctgctttgctttttcgaaatttctttctagggcttcgctttcctgcatttatgctttcacttctctgtttgtacctgtgaaacacaagtaatttataggaaaacgattcgtatcagtattaactttcaattctctgtttgtacctgtgaaactcaagtaaattcatttggtgcgttgattggattcgaagttttgaaatatttttagggtattaagctcataaatttattttgttatagcttgtcatgtgcattgttgctttattattatttatttgttttctataataattttctctgttttgtactgagttatttagcaattatcctattctcttttttttt

SEQ ID NO: 246801 - DNA, 1271 bp, Cannabis indica
gggtataagggcctgttaaaaaatcgtcacctacttctcgccacatttttcacgtgtccacgtacttttattctatttcccacatgcccacctatttcttctccatttctcacaccctaataaccaaaatcttaactctctgaaattccacccacgcctccacaccatcgccctcctctctcgctgttttcctccctctctcgatctccctttcttcttgtctctctcgtccatcgatctccacccacccctcctcccgtcggtctccctctcctctccatcacatacgtcagaccaccaccaccacctcctgtcggtctcccctctcctctccaatgcatacgtcggaccaccactacctcctgtcagtgtccctctcatctctgtctcatacgtcagaccaccaccacctcccgtctgtctccctctctctctttctctctctccaagtttagtataaatacatttatttatttatttacttttttatttattgtatatatttattttattattgtataaatttaatgtgttttaaagttagttgttattataataaaattaattagttgttttattttaatttaggtaaaattataaaactaatggcaggaaaatctgtatttttttctctctttttacattcccgacggtttaaaatcgtcgcctataacagggtataggcgatatagtatagggcacgatttaaaaccgtcgcctataccatgttataggcgacagttttaaaccgttttgcaacactcgtataggcaacggttatagaaaccgacagaaatactttaaatgactgtttaaaaacgttgggaaaaactatttttgtagtagtgttgttttgagacattctctagttggtcgaccaactagttttattttatatgaaattttgatttttccttctcataacagagcttaacattcattatttttttaagttaaagaacttaatttaaatgattttggaatgacaatctattttacaaactttctcaacttttattactcattactgcaaacttcaaacatttcacatcactagttttatatttaggtattttatgtctttttgttcaagtatacaagcaatcagtctttctgtccctatctagttttttgtatagtttataaaaattattcttggtgattaatttcatttcaatgaatgatatatatctttatatattaaaagtgtctatctaacggcatttcttggtttaacagaatatacttaaaaataaaagaatattctgtta

SEQ ID NO: 246802 - DNA, 850 bp, Cannabis indica
ataggttgtagtttaagcaatatgagtggagatttagacccaccataggctttgtcgaattgggaacaaagggataagttagagtgatatatcagttcaaacaatataccccatagggattagtatcatgtgtagtgtgatcaaaagcagatgtaaaagattctaaggaaaaaatctcgcatttcaaggaaaattcaaatgttatgtatgcaaaattgtgtttaaacactaatagattttttagtttatgaaaggtacgaaggttgggtaacttgcagtacgttccaattccaggaagataacctggttttgtggataggtggtatcacttagttacaatgtgttgtgaaaattctaacacgtaagtatacatatcacttacatgtaataacccacaagaatgagatcgatcccacaaggactgtagctaagtactaaataattgaatctttgtttatatttggcaaacaaattgtgtgatgttgatagtaacaaaaataatagaaataaatgaataaataagagaagaaaataagaataatttagaaatataggaactttaacttcaattgcatcaactttctatggcgaaatacaatctaattactcttttcatttcatgtgatagaagattaaaattcaatctatattcttattaggatatatagaatctcaatcatatggaaaaatcttacacttcttgtaacgccctaaataattaggcacgctacccaataaacttatgaaaccataatcccctaatcgggattactagaaaaataagcgcagaaattaaattttattaataaacggaatgaaaataacttgtaataatttaaaccttataatt

SEQ ID NO: 246803 - DNA, 532 bp, Cannabis indica
taatttgatgctacatgatggtatcactcgaactatcaaacaagttagatatgtccccgatttgaaaataagccttttatcaagcaagttaggtatgtttataattatggctatttagtcaagattgacaatggtacactcaagatttcaaaggggtcactaatctcaagattttaaactttaagggatccccttttaaaattttacaaaagttgccaactcggtactacatccaatattaaatttgtaatctcaaaagcaacataaaaatatgttctgacaactcagccctgctagtcggataagctgatatgttcattttttgaggaagacctccaactcatgaccgctctaatttgttacttctcttacctacaccacaaagcacccgtgagtcacaaaaattcaggaagaaaaccaataacacaaacattacatatcaataaatgagtataatcaaataaacacattcaaccaaaatcacataaacatatactttattccataaacagcaaattaccttacacaatat

SEQ ID NO: 246804 - DNA, 832 bp, Cannabis indica
aacggaaggagtcattatatccgctgcaatcaatgtaaggttttcttaaatccttatgtctttatttcattgttttagtgaattcatatataggatgttaattcaacatacttgttagtaaatctagatcctggtaaaatattcccaacattaacgatgaatataatgaagataacacacggatcacaacaacaagaaatctaaaatcatagtgtgtgaacaaagaaaacaaagagaaaaggaatgaacacaatacctcgtgaagcagaagaggtcactgtaaagtactaagctacaccaaagcaagcaagacacttgccacacaaggcaaaatggaggcttcaaaatgcgacctcgtgtacgagagaaaacctcgttgtacaccatggacaagcgcgaaggtcattcaaaaaaaatgatacaaaatattaaggaaatggaagttgaaaaatgaccttgtgaagaatgaaacttaagacctcctagacaaagtgaaaggaatttgcaacaatgccaaaatggtttggtgaagtgaaaatcaagcaagggaggctctctatgtatactagaaacatcctcaaaaaatgtgaagaggataaggttcacattttaacaaggaaaaacaccaattcattcagtcaaaaagaacacttaaaagaattcttgtagactggggtcaagtcttaaccccaaaaattgacacttatactttttgggatgtattcaagcaccacaaagacagaaccaagacgatccacaaacatgggttgaaaaggtggaatctagaaacatagtcgtgcgagctggttcatgcatgttgcatgttggacgc

SEQ ID NO: 246805 - DNA, 518 bp, Cannabis indica
caatgtttttctatttacatttaaatatatatttcctttggcaatgaatactcatacttattatttccctacttctagcttgtgttcatggcgctgattgctacaacacttttcttgagaactgagatgaaacgtaatactgtagatgatggtggaatttaccttggtgctttgttcttcactgtaataatgattatgttcaatggaatgtcagagattccaatgaccattgctaagcttccagtgttttacaagcaaagggacctgcagttctatccagcttgggcatatgctcttccatcttggattctcaagatcccaataactttggtagaagtagcagtatgggtggccattacatactattcaatgggactagatccaaatgttggaaggtagataagaaaacactgagactacacttttgaattaataggttttatgcttaaatgtttttctcaacagttgttttttttttttttgtgcatgacttcagattgtttcggcaatatgtggct

SEQ ID NO: 246806 - DNA, 518 bp, Cannabis indica
agtccaccttccattaactacttgaagcctcttacaagcactcttaacagtgtaatgacctgaggcttcaaaagaccagtatcgagtatcaaattccatggatgaactaatcacaaccgcccgaatcaattttctgtcatgctcagaaaacaggtcatgaagaacatcttcatcccactgccttgcattcggaatcattagttgagaaactttagcatcaatcaaagcatgatgcgaagaggaaacataaggattttctttatccatcaaccacaattgattcaaaacatccaccaagtccacacttgctacactccacctaacacccgtctgaatcaaagattgactcttagaaatattccgccaaacataactaggattatttccaatactagcatataagaaagaaccttgacggtaatatctagctttgaaaacacgcccaaccaacgaagactcattagttaacagacaccatccttgcttccccagcatcgctagattatgatcatgaagac

SEQ ID NO: 246807 - DNA, 638 bp, Cannabis indica
atataattttaaaaaatattttaagttacttgctatagcaaattattagattgccacattataaatttttttaatacccatcaacgggtaatacctattaaaaagtgttccctagcggactaaaattaaagttgagtatgcaaaaattaacactttgctaggatttaaaccatgattatatctctaatgaattgtgtaaattttatattaaatttgattcaaaaaatagttaactatatatttggtctaaattttataattgtactccaatatactagaaatgataaaagaaatcatattttaaaaaaaaaaaagtcaacaaaaatatttaatttttattaaaatataaaaattatattaaatgtataaataaaaatataaaaagttattacaagtagcaaaaaaagtaaataaaaaagtgataatcattgtaggtttgtgtaaaatttgactcatgctatatttttgtgttaaatttgacacaacttaaacatgtgtcaaatttaaatcacatagacgcaggtattgcattaatgtttgcttctacagtgcacccactaaagttttggaattacaaaaaaaaaaaaaaattttactttaatttttttttctatattcatgtacattatagctattta

SEQ ID NO: 246808 - DNA, 1483 bp, Cannabis indica
tcaaaagatgagaaggaaggttgcacggtacatcatagtagagggagttatgtatagacgaggattctccatgccattgctcggatgtgttacccaagaagaagctgcacaacttttgtctgaagtacatgatagattttatggaaaccatgctttcgggcagagtttatctaagaaaattctaaggcaaggttatttctagccgacgatgattgaagattccaaggcctatcttaaaaaatgtgataaatgccagagacttttgaagatacctcgagcaacgcccaatgagttaactcagatgcaaagtccttgggctttcgtcatttggggaattgacctgatcggacaattacccaaggacaaaggtggcgtgcagtatgcagtggttgcgattgattacttcaccaagtgaacagaagccgaaccattagcaaccattacgtccaaaaaagtgcaagactttattgtgaagaagataatctgccggtttggatcgccatacaaaatagtttcggacaatggcaaacagtttgacagccagtcctttactgatttctgtacgagccatggtatcatcaaaagtttctccgcagtggcgcatccccaagcgaatggtcaagttgaagcagtcaacaagacattgaatgatatactaaagataagacttgaggatgctaaagaaaactggccgaaggaacttcctaaagttttatggtcgtaccgaacaactgagaaaacagcaatcggacagactccatttgccatggcatatggatatgaagctatgttgcccgtagaactcgagccaccatcccacaaaatattgacatatagccaagaagccaatcgtgtactccttgctgaatcacttgatgaaattgaagagaagcgaaccacaacaaacttaatactgatggcccatcaccaaaaagtagctcagtatttcaacaaaaacgtgaaggattggaaattctttgtgggagatatggtcctaagaagagtatttttaaacaccaaagacagtaagacaggtgtgctcggacctaactgggaaggaccatatcaggtagtcgaagttttagaatcaggggcatacgaattgggtaagtatgatgaaaaaatgcaactcgttctggtaccaaggcattggaatggagaacatttaagaagatactaccaatagaagtaccaggttggatggccatatcaagtacgaaatacaagaacatttaattttaagtgaatggccttctgggcggaccacgcccaaaggttcagataaaatcttcaagtactcaggtcagatgaccactagtgaaagtatgattttcaatttctccaatttgttttatttcatgttgagctaaagatcagatcagatcagtataatagctttgatgtaagttactacggtaacagacatattaccgatcaataaatgaataaagatgtttatttcaaaattcaaaattgagtcgaa

SEQ ID NO: 246809 - DNA, 847 bp, Cannabis indica
tgtttaaacaacatacttgtgagtagatctaagatccgtaggtaaaataaactcccaacaagggactcgggccccagcgatcatttgtcctggtttaaccgagtaatgacggccatgagagttagtaatgatgttaagtgcttgtgctttcactaacattaagcggttgcgcggaggaatcgttcaaaaagttagaaccaggatctgtggactgcaggaacaaattacaagttagcttccggagacagtttgtcgctgcgagaaagattaatctcgaagttagcaccctgactaacatcaagcaactacccacagacacattgaaaaatttcataaaaaggttcaaggaagaagcctcgaagactaagaaagttgatgacggaaaaaaacttgaacttctccaagctgggatccgtacaggaaccccgttctagaacgagttacaacaagcaggagctgcgtatctccaagatttccagaagagggtccaaaagtagatcaacttagaagaagcccaaatagtggcttacggaggatactacccgaccagagttgcaagatatgtacccggagttcagctttcaagaaccccacctcaggctactcccccaatgagcggtatacagttcgccgctacccaaggacacaatcagagccaagccttggctcccgcatctttgcactatgggaaccactccgggatgagcggacaaatcccgtctcactctgctctaactgcaagcctaacttgatcttctcaaggctccaggagcaagaggtcctcaaaaggcagcaaccggacggaggacaagcgccaaaaaagagggtatactgcccaatataccca

SEQ ID NO: 246810 - DNA, 904 bp, Cannabis indica
ccacccccagagtaaccaccatctcaaattggttatgagttggtatagatataaagatttcaatatatacccttatcatctaacatatatgtcacattcataaatttccttgactgtctccttatgttccttgtttgattacatcttagatggctcccactcaacagtaggagtctggttaaattcatacatagaagtacatttaacctcttactattgtttttagggtcatcttgttgtgacatattatcttagtctgaaactgtaagttccttctagattaagtcaccaacataaaaatctagtattaacattaatgtaaaatacttgcttaagattaagtaatttttagagataccataaaatatttcatgtggattaggaattttgcctaagtcattcgaatagactatgcaaaattctactatcttattctcaaaattctgataagttatttctatccatatgaatggttagatttactttattagttaaaagttcctatcacaagtgccatccaaataaagatgagcttagaattttaaaaaattctcccactcaaataaggtactgtcatactatgtccaacaacttttattgctatcaatatctattacaacagtaaatattaattggaacaaaaattaagatcaacaacatgttctaataatttgctaactttgttcattatattacatccatgtttttaattgaaatatgtgtgccatagagatactatggtgtattaagtatagtctagagttcaaaatgaaacacatatgtcaatagcttaatccacccctaagtgtcatagagatcatgtggagttataatccagagttcaaaagatataaaagatcgttgaactacatatattattcttaacttcttccacccctatcag

SEQ ID NO: 246811 - DNA, 854 bp, Cannabis indica
aaatttctctgtacctgaactgagtgtttttgaaggttgagttttcttggcaaatcatgaagaagaagatggggaatgagagaaggatgatcgaagcccttgctttggtgtgctccttgcacgttgagatattgtctgataatgatcgtagtcatcatttgggttcggttgacgatttggttgaagaaaaactgagaaatattgatgtaatgaaagaattagaggaagacaccccaaaacggcactgtactgcttctacttctgggcagtactactctccctcatcatcatcatctgaagaaacaaaaaggatcagcaacgacatcatgatcttcaaaagtggcatcccaaaacgacgccgtactgcttctacacactcatcatcatcatcatcatcatcatcaccatcagaaagaaaaaggagcaacgacatcatgatcttagaaagcggcatcccgaaacgacgccgtactgcttctactcactcaacatcatcatcatcatcatcatctgaagaaagaaaaaggggcaaagacgacaccggcttcccgaaacgacgccgtactagtgatgatcatcatgatgatgatgtagtactacgagtagtgcctgaagaaacgaaggtgacaagaagaaataagtcgaataataaaagaaagaggatcagggatgatagtgatacaagtaaaggaggtgtaattcatggaccaaaccctcctccgcctatttctgaggagctagcccaagtcattcgtagtatgactactgctgatcatcccaacatcaaattggtaattcagagaaaacttttccaaactgatactctctcacgacaaaatcgtcttcaaatgcca

SEQ ID NO: 246812 - DNA, 1329 bp, Cannabis indica
aaaactaaggctcgggaaaaaagccccaaccgacagacctgttcccaactggaatcccggttcctgggtaccaaccggtcgaccggttctaattgtcccccagaacaggtcgaccggttttgcgctgggaaccctaaaaccgatcgttctaactataatcaatcccaaatcttctccaaacttccagaacacctatacataccataatggaccaaaaccaagcaacagaactcaacaattcacaccaaattcaaaaacaccattagaggtcaaggtttgagttctcaaaccttgccaaaacctcaataaaattcacaaaaacagcataaaacaactcaagtaaactcaattaaacttcagaacttcaattcaaacaataaactccaacacagccccccaattacaaaattcaacaatttgtctaacttaagcttcaacaaaatcaaaaggggaagagctagggaacactaccttggatcaaagcttcaccaacactgctagaaaccccagaaatcagcaagcaaatccaaccctaggtggggttcttgatgcttcgaaaatgagagagaaggagaataggtgaagtaatgaatttctaaattattcttctaaaagaataaaccttccttttttttttaaatattaatgttattttcagctaataacattcccacaaaaggacaaattccaataacaaaagacctatatacccctaaggtgataaaagtaaccatatgcattatgggcaaaatggtccaaccaatttcccgacaaaattccaacaccaccaacacccaaccatggtaccccgataataaaattctaaaacatataaaatacgactctctaaaggcccaatgtcgctttccacagcttccgaacacaaacacagaaattaagtaatttacataaaatagcataataaacatatatgatactaaatatatttccagaatatgcatttcataaatattaattaaatctcatgcataaaccctaattattcaatagtctaaaatattaatcttaggcggtctttacaactattcccccgttaaaaggatttcgtccccgaaatctaacctgacaactctagatactgagtcctcatatcagactccaattcccaagtggcttcctccactttactattcctccagagtactttaactaacgctatggttttggttcgaaggacctttttttcctatccagaatttgcactggttgttcatcataagataagtcaggttgtaactccaatgtctcataactcaggacatgcattggatcaaacacgtactttcttagcatggaaacatgaaatac

SEQ ID NO: 246813 - DNA, 1011 bp, Cannabis indica
ggaagaaaatggattagagagggaagagaatgggaatgggaagtaggaaaggagtaggtttaactgttttaaggctttacgtggtcaaaagaggaagctaattagtcaacttttaccgattcagctgctcctgtcgtcaagccgagctggttgttgacacatggtttattcacccgcataaatcaaggataattattttttattattaatataccctacaaattttgtaagagatactattttaataatttttattttatataaaatttatatatttttttaataagagagaagaattttacttgaccaagtattaaacaaatacaataaccaaagggggaacaacccccaacaaacaaattaaaaattgttaattaagatgtcgtttggtaacacttttttaatcagttttctgtttttaaaattgaaaaagtaaaaatatttttcaaaaacatgttctataaaactgtttttacttttcaattttttaattgagaatcaaaattttaaaaacaaaaaaaaaatcactttcaatatttttttaaacaatttttttttcttaatcaatatcttgaacttcgatcatgacccaaataaaatcaaaaaattaaaatgaaaatgaactttagagaacacacttttgttttctgtttttaaaattgaaaaataaaagtggttacagaacgcatttttgtttttcaaaagcaaaatttttaaaaacaaacatacgtaggattagaaaggattagactgaactggacaagattggattatgctgaaaatagtcctgtttttggtttaagactggacaattttatttattttcttttaaaaaaaaacttaaattaaaataaaaagatataataataaataaataaaaatgaataattcgtagttaaaaataaaaataattaaattatataataaaataaaataatatatcatatataatcaagtttatatcataaatatataataaaatagtttatcatattttttatttaataaata

SEQ ID NO: 246814 - DNA, 648 bp, Cannabis indica
aaaataatttccaacaaaaagataaggggaaatggggtccccttgtcttatgccacacccaggagcaaaactactaactgtgcccccatgtaggaaaaaaatgaaagaagtcataaagatacactggcagacctaattacaaaacttgtcaggagccttgaagctacaaagcacataatcaataaattgtcagcttagcttatcataggctttaactaagtcaattttgatagcaaagaaaccctcttttctatttttgagcttaagcaaatggatgatctcttgggactagcatattgttatcttgaatattctgtcctagaacaaaaactgcctgagtagggaaaatcagcccgaggagaatcagtctaattctattcacaataatttttgagataaccttgtaaactacattacaaagaaaaataggtctgagatgtgatacttttttcgggttgggtaccttagaaatcaggaccacattcgtttcattgagactcttatttatagtccctgattgaaagtaatccacaatagcctcatagaaatatgcacccactgagttctagtaatgtttaaagaacatgacagacataccaactggacctggggcttttaaacttctcatatagaagagtgtttgtttaa

SEQ ID NO: 246815 - DNA, 639 bp, Cannabis indica
attattacaaattgttatatatatttactagtaacaactctacgtgtaatgcatgtaaaacacatattatataattaaatttatggtgaaataaagaaagattttttttatattagtttcgaagtaagtaaaatgtaattttccaaaaaaaaaaagagaagaaaaaatgtagaactcaaacatgccacttataaatccaacaaaaagtgattattagttttgtgaggaataacagagagagaatttgagctgaatgattttcagtatattgagatgagtaataactcaacgtatatatacaagcctaatacagttacaaaactaacaaataataacacaaaacagttgtacagtaactaacttaggcaaaggaaataacagaaataacaaacttaagtgatagctctaaccaccccccctcaaactaagctgagctaatgaagctaagcttagtttgtctcgaagaaacagaaatctggaacttgacagagccttagtaagtatgtctgctatctgatcatgtgcaagagtgtgtttgacaattagctgcttggacagaatccctttccctcacgaaatagagatctagctctatgtgctttgtcctcgagcccaaaacaggattggcagcatcaatac

SEQ ID NO: 246816 - DNA, 565 bp, Cannabis indica
tagaaactggttttccatatgatcatcactggtaacaccaccataaactacaaaaactcaaccatgacaaccattaaaaccattatcaaaaacaaccaaaaaaaaaaaaaacaaataaacacgaactatatactaaaaatgaaaactcaaactgaaactgaaatgcttaatacatatacccaaattaaaatcaataaaatgctgaaaccgaaacaaaagagtgtatgagtaaataaatggattataaattgaaaagtgagtaaaatccccctttaaaccaataccaatgccaaaaatctcataacacaaaaatggaatgtctttaactttagtaaaaaaaaacactgtgaaatatgctcataatgttcaaaacaactgtaactaaacacgcttggtcaaactccatgtcactaaacacaaacaccctcttaaccatttcttctgctttcaactttccattctccgccactaccagaattgaaattactaaaatcataatgaaaatcatactcaaaaaccagtttctaaaaaacgaaggaaaaattaacactaaaaccaacaacaa

SEQ ID NO: 246817 - DNA, 612 bp, Cannabis indica
ttatggttgagtaattctattggatgtctctcacttttgtaagttttttttcttcttcttcagataacgggtagggttatggttgtaatgagtttttgaagtctattatttggaatcaaataattgaagaaggctacaaatttgggactatgtgggaaagcaatggagtgattttgaatgagaaggtttcggcaatgacaggtatttaatttttatgtttgtatgattttgaacatatgttcttttgttccatgaaaatcaggttagggttatattcttaggaaagaatttaataattttttttcctaatattcatctttctctaaactattcatgttgattcttttaagtagaatgtatattctttcttataactttttttagaaaaaaacaaccagtaaaagtcgaagtaaatcttaaactttacatacagaatggaactttaatttccaattagtcggaattttgtagaaaaatgaaattaataaaggcagtatcaatatatttataaccgtaatagaataatcatgttatatataataatttatttcttttgttattattatctgttaattttatatataatcacgttataaatttaactgacctttt

SEQ ID NO: 246818 - DNA, 4373 bp, Cannabis indica
cataaagtaaagtaagaccaaatgaaaattgacatgaatagatcatcatacatgtaattttcataccacactatcatgattgatctatgttatttgactttgtcaatatatatgaccattgatgggtttagttgtgattgatacaatgaaaactgctttgatcctatgttgatataattaatggacgaggttgcatgtctatggttatgatgacaaagatatgagctcaataagattgacacatttatatgcatacatatgtagcctagtggaagattgttagaaatttatttatttggggccacaattgtatatataaaatatgcattgggtcattatataaatgagtcaaatttatatggtttattttggaataaaatttacgacttaaggacatgattgtcataatttttaataatgtgaaataccaataaaaaaaagacaaccaaaaaaacaaaaaaaaatgaataccaaaaagccaaagttaaaaaagtcaactgtgattcaggaataagtgaagccaaaaaaataaaaagaagctaaaaaaaaaaaataccgaattcaaaaagtagagcaaaaagaaccacttgtgatcaacaaggatagtgagctaaaaaagagccgcttatgatcaagttgtccaatatggtgagcaaataaaatagctaccatcttgagggaggatgttagatagtcccacatcgctaatgtgtggaaagactactcctcccatagccaattagttttgagatggaaccccattcaccttatcccaaattctaacatgttgtaaggattgctaatatggttgttgtaaggttgctaaaatagttattgtatgagattgagttgttgaaagagttgctaacatgtttgctctaggagattgaatttctctaagtattgttgtatgagattggattgctaaaatagtttttgtatgatattaaattgttgtaaggattctaaaatgatcgttgtacgagattaggttgttgtaagagttgttaacatgattgttatatacgattgaattgttgaaagagttgctaacatagttgctgtatgaagattgagttgttaacattattgttgtaggagattgggttattgtaaaagttattaacatagttactatatgcgattgggttgttttaagggctgccaacatagttttttttttttaaaaaaaatagtaattgttaacatagttgtttatgaaaccaatatgtgctcattctacttcatgacttatagttttaattataccactaagacaacataggcataaagaaaaattacttgtcttttttctaagtcatcctgaaaaataattcgcactcgatattagattcattcaattctaatttatataattcacatttactagcacaataaactcatatattcaatctaaacatacacacaaaaaaatagtaaatatatgtgactttacaagtcaattataggaaaagtttaaatcaatattgtgtggaatcaaactggtttcaaaagcgtttagagtgtggaagaatattgaaagtcttgtcgtataacatgttgtctgatgttttttgagtgcttctaagttattcgctatttgttgttttgcttgtgatggcttcaagtagtcgtaatgattttgatcttaatgaacgatatggacaaatcagtttggtggatgaggaggaggggattctaattggtgggaaagatgaagggaatgaagctttgtttaatgacaaatggtgcttagtagggaagtttcttacgggaaggacctttgattaattttgatgctatgaagcatatgatggcctctctttggcagccgggaaaaggggtatactttaaggaactcgacactaatcgatatctttttcaattctaccatgaattagatatacaatcggttatacatggcagcccttggacgttcaacaagtgccctcttgtgtttcatcgtctgaaaaaaggagaggatccaaaatctgttgttttgaataagattgatttttgggttcagattcatgggctaaaaactggttttatgttggaaaaagtggtgagaagtgctggtgcgtatgtgggaagttttgttaagtcggatcctaaaaattttaatggtttatggagagattatctacgtgttagagctacggttgacatagataaacgattgaaaagaagaatgagattgtgtaaagagaatggggattggatacgggcaaactttcaatatgaacatcttccaacattttgttttgtttgtggcataattggacattccgaaggttttgtccaaggaggtttgatcaacctctggaacaagtggctaagccttatgggattgggatgagagctcaaatgaagaagaaaaattacttgatcggtgctcagtggcttcgtacggggaaggaggacggtggagccgatggtggtgacagtgtttccaggcggatgagaaatgttggaggtgattcaatctcgcctagaatcatggaaattgatcaggttgactctggagttaatcttgatcccatgaatttagataagaataaaggcattatgggtggaaaggaaggtgtagttaatggcaaagatgttatggggggtcaaacagctatgtctggaagtgatgaggattcaattaatgaggaagatttgctagtggtcctggatagtaagaggaggtgtatggggaatgagaaaggtatatatgaggaaagttttcatgggtcgaatatgggttctaatgtagaggaagtaaatggttcaaaaaacgttttaaaggtgggccttggtactccggcccaccagtcatcatgagtgttatttcttggaattgccatgggcttgggaacccatgggctcaacaattcattaaggatcttgtgatccaaaagaagcccgaatattttttttatgtgaaactttatctcgaaaggatgttgtggaaagtttgcgtgttgggatcggttttgaaggagctatttcagttgatgtgcaggggatgagtggaggaatagctttattatggagagttgaagaagaagtgaaggtgctggaatttggtaacatatttattgatgtgctgatatgtgggaatgagagaggagattggaggttgacatgtatgtatggtgaaccaaatagaagtttaaggaaaaaaacatgggacctcatgaatgagctgaacaataaactgaacttaccttggtgcatcattggtgaccttaataatgtgacttctcaaggagacaagagaggaggcaacccttacccgaattggtttgtggacggttttaatgaagctttagctgaatgtagtctacatgatttggagttgtgtggttatccttacacttgggagagaagtcgtggtacagtggattgggtggagtttaatattgaccgcgccttggttaatcaagcttggttagatttcttttcctttgctaaactttacaatcttgaagtttctacatccgatcattgccctatccatttggttactgtcaacaatatggtgattgcaaataacaggagtttttgctttgaaaattcttggttgaaagagccgttgtgtttaaagatcattcaagattgttggagtgttgatcccatgaagtcaattattgaaaaaatagttggttgtggggaggtgttaatggagtggggaaaggattactcaggaaatttcgctagaagaataaaagattgtaagttggaggtgaagagatggaagaaaggcagggatgagatttctgttgagaattataaacttgtttcgggtaaacttgttgaagtgttgctgcagaaagaattgttttggaagcagagaagtaaagaactctggttgcgtggaggagataataactcgaagtattttcatgttgttgctacagcgagaagaagaaataactcaatccaaaaactacgcgataatgctgggaattgggtcgactggcagaatggccttcgcacggtggtaactactatttttctcagctttttacagcttcagcagtcgacatttctggtgttatgcagtgtattccaactacaatttcgaatgatcacaacatgaagttgctggaaccggttttggaggatgagattaggcgtgcactctttcaaatgcatccggataaatctccgggtctcgatggaatgactcctggtttttatcaaaaaagttggagcattgttggtggggatattgttaagttggtccagaatttttttgtctcgggttcctttccaagagacttaaataagactaacatagtgcttattccaaagaagaaacagccccaagtgatgaatgatcttcgaccaatatcattttgtaatgtggtatataagattat

SEQ ID NO: 246819 - DNA, 758 bp, Cannabis indica
aaaaactcacgtaaacttaaccagcttgcacaacaactctaactcagaaatcaagcatagaaacctaacctcaaacataaaattcaaaggaaaaagagtgtgggagttaccttgagtggattcgtaaagatcctagagaatccttgctagaagactcaacaatcgatcaaccaaaccttagatttcagctgggaacaatagaggtcaagagagagagagagagggagagcaaattctattttgtgttcgatttttctaacttagtcaattaaagtcttttaaaaaaattaactaataatcccactactttcagcttattatacaaaggataagcttggaatttattaaaacaaattcctttaaaagaataatagaaatgtacggtaaaatgaccaatttaccctttgcatcctcaagaagtaaccttgtcacctaagggaattttggtcaaatctataacctcaaatatttttgacattcttaatgtctatctaaattaccccgccatttctaaaattactaaaccataagaaaaagtgactttatcggccaaacatcgcgttctactattaccggacataaaatatgaaaaatataaaattttacatataatataattagcacacttagaatttaaatatatctccacatttgcataattaataattaaaagtctaattttgaattaaaccctaattatttgctaactctcatattaaaattaaacggtcattacatttatagtatattttgggcca

SEQ ID NO: 246820 - DNA, 865 bp, Cannabis indica
ggagcggaccattgctcaaccccatcacccgtctgaaaaccagaccatgatgactcaatgagagtgctttgagcatttgtccattgatcaagataacctctagctaacactacaattccgtcagcatttaccacctttttttgccaaacaaaatcatttcgggtactccaaatcgcccaacaaagtgttgcaattagacatcttttacttgaatcggcaccagtaaaaacccgaatgcaccagtcaagaaaaagagtgatatcgggggtgatatttgtaccaatcccaactcgatcccaaaccggttttatgtgtgagcaagtgaccaaggcatgtaatatagtctcttcttcctctctacaaatcgggcagagagagttaacattaactctctttgtttgcagcatacaaagagtaggaaggcagttcttacccgcacgccatagagtattcttcactttaggagggatttttagacgccacatagtagcccagaaagttgatgcagcatctacatcattatcccatctaccattaacttgttggaggagcttgtaggcacttttgactgagtatatacccgaagcttcatatgcccatgtcaatgtatctttagctgccgattgttgcaagggaatttgcactatcaatcttctatctctttcctcaaataaatcttctaaaatttccatatcccaacctgtgtcattcatcttcattaggctatggactttagcatcaattaaactaggatgagaagtagagacataaggattatcagaacaaggcagccatggttcgttaagaacattgatttcggttccatcccctacacaccaacgaagccctttccttacaagttgtt

SEQ ID NO: 246821 - DNA, 1031 bp, Cannabis indica
tcctccatcctcctctctcgtttctctcctcctctccacgctctctttttctctccctctccccactctccttttctcttttcctctccccactctccttctctcctcctctccccgctctctttcactctcttgctcccttaatctcccacacatagtccccatcttatgctacttgttccacacaatggagcaatacttagaatatatatgttgtgagggagtgaccaccaagaggggtttaagagggaattcctactaagtctacacaacaagacccactccacaaggtgccaatatttaactaaatattttagtgttgttttcaccttgtgagccttgtgagccttagatattatgggagagatatcaaaagaatacatgataaaggacaagttcccagaataagcacgcctttgagaaatgagcaaacatacgacaggtacaaaggtacaagtagtggagacaccccattttgtctcactcgaggtacaaaatgacacccactaccacttttttgctagccctgacccgctaatgttcatggtacaaaaataattttgtctcccaacttttgtgaccactcatattttcgagccattagagctctctataaataccttctttatcattgaaaaaatggttggaaaataaccatttgtaatggagcttagagactcaatacaatattattttagtctattggtcttcttagtttctcttaagcttttcaactttagccttttgcatttgattttcttactaaagttcagttaaagaaaaattcttaccgtcaataaaaggttatacatgtttagtggaaatagagactacaaaaaaagccctttcatgtctagcaaaaataatgatggatatgaaaaagttatagggagatttcatatccaacattgaaggacatgaaaaaaaaaattatcatgtccaataatgttggacatgtaaagttgagttgggacaatgataaataattactattatttttattttttaaaaaaaaattagttagccatttt

SEQ ID NO: 246822 - DNA, 1026 bp, Cannabis indica
gcagccagagtgacgtactcgtgtataagagtcattcattccgtgggtgtaaggacccaatggaggcttgaagcgggggcgttacacagggtcaacgcaagtttttgagagatttttttggggggcttttttacaactaaggaagaagactttgatcatgtaatagtcatagatgatgatcaagtaaagtatttataggagaaatcaacaaataaatgggagaaaatgtagaggaaaaattataatttaaaaacaacaacaacaacaaaaattgtgtaaatttgatttaagtaaccaccaaaaaccgcccttaacacaagaactggatgtgttttttttttaaagaaaaagaacacaagaagaagacgattaaaaattaaatggggtaatgggtaaaaatcaccaaaatgtggtgtgaaagagtgagtaattaagatgaactaatgatctgtttcaaagaaaaaaaattgaaatgatgatcacattggattaaaagaaaaaaaaaaggaactgtcacaatgtgatcagtcatgagttcaagggttaggtggtgtattatacatgttcgggccatattagaccacacgagttgggtctaccagttgatgtattttgtattctcggttttcatcacttaggtcggcgtgtaaaaatggtttgtaatatttcgtgaaaatttttatgggatcccgaaacatgtctaatcttttagaatggtttgtatattaaatagttacaagttatattttcactctgtacttgatttagagtttaaatttctgctcttatttctaggactgttcaaaaaaattaacaaactacccaacccgaataaaccactcaaaccaaaccaaataacccaacaaaaaatataacctgaataactttaaaaaaaattcaaaccgcccaatgaatatattgggcgggttaaatattattctaacccgcccaaataacccgaataaactgatttacatattttttactaaaattatttataacataatatataaattatgtttaata

SEQ ID NO: 246823 - DNA, 889 bp, Cannabis indica
gccattatatattatgatcaaacccttcaaactttgatatgtataacactatctgagagagactaatgaacatctaaggatatgttagctaaataatttctaccacaaaaccaatcgaatcaaccaaagacaaaaatcactcacatactcaaatcccattattttttattattttttttttttggaaattaaacaacaaaatttcataccagatattaaacccaaaaccaatttgaaaaattaaatccaaagacctgataaaagctaagaacaaattttctcaaacaaaaaccctaaataaaaaaaatgaaataaaatagaagagagaatcatacctgtaatagcaaaaagtctttctctctacgaagccattctcattgtcatgcgattctaattttcaaatctgaaaatgaaggaataacaaaaacaaaactaagaaataagaagagagactggcgagatatatatatatatagagagagagagaggaacagagatccgtataaatatacagagagagataaagagaggaagagatttagatgtaatagtgaagttgaagccatggaaactcctctgatgaagaaggtgactaacgagagaaagagaaaaccaaaagtgataaaagtgtttttaaaattttttaaaatcatctaaaatctgtttttaaaattcaatccattctgttttttaattttaaaaacaaaaagcgaaattgagttaccaaacataattttcatttgtattttcaaaattttaattttaaaaacaaaaaaccatttttaaaatggttaccgaacatacccaaaataaaataagtttgaaaattttatggttagaaaccctaacatttctattcaaacctcaactaacaaatttttcaaatttt

SEQ ID NO: 246824 - DNA, 891 bp, Cannabis indica
caattctcatagggatactagtattgacattgagcacgccatgttcaaattctctacgaataaataacatgaaatctatggtttatcaatccccaaagtttgagctgcaaccggatcagtggcggacaaagttcaaattcaatatggactttccaaggaaactttaaattttatgagaaaaaataataggaattttttagaccaaaaataataataataatcttaatttaatgatttaatcctgataaaatgaaaaggattttgtttcgtcgtaaattcaaaaatccaaacaagaccttgcaatatgaatatatatcaaactttttcagaccaaagaatttggcacaatattttactttgactttgaaaccaaaaaaaaggtttggccggtttgggcgggttaacccgaccaaactgcccaaaccgttagtcggtttacagattttttttttaaattgggcgggttgcacttaaattttagcaacccaaactttagattgggttagaaaatatataggagaaaccgcccaaaccgaccgacgtacagccctacctctaagtctttgatgtggtcttaaaatttctttgacttaaccaacatgtcgtcgacttagacttccatattgtttcctattaagtcatgaaacatacggttgactagtctctaatatgtagcacctacattcatgagtctgaagggcataactttgttgcaataaagcctgatgtcagttcaaaaaccagtatgatcttcgcctggtccgtgcatgcttattttgttgtagccggaataggcatccatgaatgtgatgagttcatggttggctattgcgtccaccaattgatctatttgttgtaacaccctaactagcataggcgtattacgtgatt

SEQ ID NO: 246825 - DNA, 621 bp, Cannabis indica
acagtatacattcatatctattaagttattcatttactacgataattaacatatgtatatgtgtaatcaatacaaatacatttatatttataatatattattattatatatacttaaataattacttatatattatatatatattattacttttttataggatagtatcgtatgtatgagttatgttatatattgtatatattatatatagttatatactattagttgcttatattataaaaaataaaaaaaaatagtatttttaaaaattaaatttcatttcaacccataaattaaatatttgggctcagcccaacaagacccgaacccgactacgcccaacccgaaaaagcccaacccgatacccgacgcacccgagcacccaaaaaccaggttcgattgtgaattttcaggaccccaagcccagaaacccgaacccaactacccgaaaacccaaaaaacccgacccgtgtcgcacccctagaggagagtccaaaggaacatttttttaggtttaacttcatgttatacttctttaatattttgaagtcattccacgaggtccgtggtatgatccccactttttattgattttaccagcatatcatcgacgtaaacctc

SEQ ID NO: 246826 - DNA, 533 bp, Cannabis indica
tattatattaaaataattaattaagattttatccgttaaactttgatatgtatcaaatcatatcctttaaattagtctgactgcttaaaattctccataaattattgagattgttggatttaaatttttttgtctaatttctttcatttttttactaattcggtgattgtttatactaaatcatgtttctcagactttgatatttactaaatatattatgctcctcaaactttgatatgtaccaaattatatgtgtcccctgaactttcattcatgttacactttttttattaaaattggacaaaagtccttaatctaataatatcaatagtttatgaggaatttttaaaagccttaaaagttcagggagaataatttgatatgtgtacaaagtttgggggtaaaatcctaattagactattaaaattaaccacctaaactaaagttaatgtgtataagttttttgtgtgccaactttctattatacgcccaaattaccccttctcattttaaaaaacccaaaaaaaaaaaaa

SEQ ID NO: 246827 - DNA, 835 bp, Cannabis indica
agtgagaaacgaggtcgcatattgtctttgaaaaaacatgtcagagttgaggtgtaatcctcaaaaaggttatcttattttagtcgtgtgcctttccaaatgtcagtagaggggacagatccctaaatttcttgtgatcatagggtgtcatgtgcacctttccaacttcctttcctggatggtcctgagggtactcccatttaatttgagaacttcgtaagtctagtcgattttacatagtgcgcctttcctggatagccctgagggtactcccatttgatttgagatctttgtaagtctagtcgattttactaagtgcgcagtgctacatttgagagttacaaaactggagtctcaaacctaatcaaaacatatcatccgaatacccttatagctgggtgaaaactatcatgctagtcttcttagtcctaataactaaaccaatatttattggacctccattagacgccatgtgtcactcttccaaaaaaaaatggtaacaaaaataaattaagaaaaaaaatctcaaacatttctccaattaattatgcctaccaaaaaatgtcacatctattcatgaaaaatatgattttgtttattaaaaaaacatgagacagcctcatctcccatttatttggttgactaaaaaaaaaattgattttgtttgaactataaatattataatacataagcacgtatgtatatgtatggagttcacgtcttgagtcgagagaagtgataaaagaataaagtggcttgactcgggtgttttccgatgtctttatgaaaaaaggtcaacacgacttgcatctcaggtcctgaatttgctattttc

SEQ ID NO: 246828 - DNA, 705 bp, Cannabis indica
acttatttgctaatctataattagcttattaatgttcgatgaaatatataatagtttttgtttctcaatatggtagtttaattaagttatgcatgatgacgtacaccagagagttgtgatgtgaagaagaaaaaatattaacgtggcgttgaatgggcttataagcttcagatttgtgaagagaattcctctctttgactacctaataatttcattaacttgttcctttcaaaagttgaaatttttattcatttatgtttcaaaaaatttagattttgtgaagaaagaagaagaagagtgattacagtaataacttaagtttatttaatttttttttgaaaaaaaaaacctcattctaatgctaatgcttctcgaactattgtaagtgaaatatttttgccaagtagcgacaaaccttaattggacaaaaaaaccttaatattagagttatttttaatggtcctatacaagaactctctcctatttatatttattacaaccaattaatcccaaatgataaaattactattggctttcaaggaagactaattagcaattttttctcccgaactttgacatatactaaatcatgttcttgaacttttttggtcgttaaaaattctccctgaactattgagattgttaaatttaagaacttttgtctaatttcattcaattttactgttttaggtactaaatcatgct

SEQ ID NO: 246829 - DNA, 740 bp, Cannabis indica
ttctaatcatgccacattcgatattgtttgaatagcctacctcattgcacaaggactcccatatgtatatggtccgatcctcaaggcaccatgcctccacacatgttggcaggccctcgagagaagccatcaaactagtagtgtaacaccatgtccaacagggacgccgcatgtgtgcttttataaaattctcttttaataatttatataattataccaaaagtgtagttaattaaaattttgcaattaaaataaacgcataatatttataaaagataagtactaatctttatggggtcccctattaatacaaattatttacattcggttccaaaagtgttttacaaagtacgtttatacttcaaaatacaatcaaaacggtttatcctgtccaccgggccgtggtcccgcggctgatatgtacattgcttctacgacctcaaactcatggctgctcaactttgacctccgctttacctgcaccatttagcacccgtgaatcacagagacttagcaagaaaagtgaataaatctataaacaatataacattcatttaatcacatcgatattaacatgcttaaacatttacacgatatcataatcacacaatcttagtacttcataaagtacccttaccactcgttacccacgagctatatatatcactatcgttacccgatacaacaaacaataagtaagaaacctatcagcggtttcaagagtaattactcgtaacggt

SEQ ID NO: 246830 - DNA, 1150 bp, Cannabis indica
taggttaattaaattagtttaatctaataaaattgattagcaacataattaatttgaaattaatttgaaagtaaatggaatttatttttcattcgtattttttaaaattaatttaagaaacacacacttagtttaattagattatttatagataaactatatgtatttttcttgtatttaattaaatatgtaattgtaactaattagattcttctgaagcttaattttaatatctcattaaatattcctatttaagttgtaagttggttatttctaactattttttttttatcatcttaaatttgaatatttttgaattttaatttaagttaaaaattagttatttaaactaatttgggatcaacttgaatttgatattatttttttaaaaaaatttcaaaattaagttgaagaattctaagaattagttattgaagattcttaagatattttttaagttggattttttttttaaattttggatcaacttaaaatgaaacatttctcaaattaagttggttacaactttattagatatttaattaaattttgttttgaaaataatttaagttgaaaaatctagttattctagaacaactcaaattagatatttttcaaaatatttattttattatattttataattttcgaaattttatatattttattatataacgattttcgaaaattaaatattgaaaattaaattaaagttgaaaattaattttaaattaattttggaccaactttaaattaattaattttcattattacaatatatggattaaaattaggaatgtcaatctgggttatttttcgcgggccggccctggcccccggcccgacgggccgactgtggcctgaattattcgggctcttatcgggcttctggcccagccccgcccggcccggtgtatattatttcgggtcgggcccggcccaacccaagtccaaaaaataaaaaaaaaaaccttaatccctaaaaaaaaatcccaaattctaaacctaaatctcaatttcgacttctctctctcagacgacagagcccaagctgcccaacccaacccagtcatcgctctctctttcttcgcctcccacggtggtcctgatccatgctcggtggaagggaggagtgttgtgttgggttctc

SEQ ID NO: 246831 - DNA, 751 bp, Cannabis indica
actcatgttttccttctgagtcaagtgagtgaactcttttcttttggcacttctaacggcctcgttataatacttggcattgagacgttcctggaacttttcgcaggtcatcgtagtgacgtcatgtatcatggacaccatgtcccaccagactaaagcatcctcctgaaactggaaagtggcacacaccactctatcatttccggtgactcccatgcagttcagaattttggtgatcaccgttagccactgctcggctttcataacgtctggacctcccagaaaaactggaggtgcctgcttacggaacctttcatacagaggttccatccgattcactgcaactataggttcggcctggacaacaagatcaggtaccactgggatttctagaacaggcactgtaggagcaccctgctgtcttagctgccgaattacctcttcttgttcattaattttattttgcatttctgcaaatatattttcccaattctgggcttcttgagtagcttgggtagcctgggcagcctgtggcgggttagcatcaccccgaccacgtgccctgcccctgggacctctacctcggcctcgagcatttgggcaaaactgagctccctaaccttcgtttgacccgaccgagttgccctgagtcttggtattttgcctagtgtccatctaatctgaacagcctgcgtaaccaagagctagcatggtcagatcatgatcaacgagaacttattaatgccgctta

SEQ ID NO: 246832 - DNA, 775 bp, Cannabis indica
tgtcaacataattttcgagttcgtgagggtatttgatttcttgatttgaagaaatatttggaataatgggtttgcaataaactgcaattgagagtagtaggttctttgtatcatcattagatgatttcaaagaagatttccaaccgctaaagagattgcttaggtttctcatttcatttttcgtttttggatattcccaagcaagctcaaaaccatcaaagccatagtctttagcgaaagctaaggtcgactcaacaaacttgttacgtttgtcagcgctccttgccatcatagagatagcggaggaagggtcatcggtctttgttttcgggcctccaatggacactagagctttcttatttttgtcatgagcacaattgacaaaagacctcatatcttcctcaagttcaggagggataatcagctctcccgtcccctcttgaacttgaagaaatgcgtaatagaggtgagtaaataagggtacaatagagtcattttcgggtgaaaatggtttttctgttgatgcaatccagtaaccgatttggaacttcgcaggtgccattatatagtagaactatcacacaagaaaaaacaatatagttaatgctttaaaaaaaaaaaatcaaatatcgcataacaaatataaggtcaaagaagttgtagccctaaaaaataatattacatatttaacatatttctttttatttagatcattaaagttatatgtatattaatatatcatgtctaaacatatatcaaatatttagctagctag

SEQ ID NO: 246833 - DNA, 1317 bp, Cannabis indica
ccaaatcacaatcatctaacatcaggtggggtatgtgatcaagtgagttcggctcacagattgccgttttctggaataactgcttgaatttggataggaagcaacaagcaatttctttaggatcctcaatccaatctgtcccggactcactcttgatacactgaatgtaatttcttcgtctcctaacaatcgtcgatgccatgaaaaacttcgtgcttttgtcaccctcttgaagccattgaactctagatttttgcttccaatggatctcttctctcagcagggcttccgaaagctttccttttgccatgttgatggttagccaatcatcaggccgattaatttcagcatcatggagtagagatgaagcttcctccacttgtcttttaacatgcctaaattgcctgaaattccacttttgaagcattcggcctgtagctttcaccttttggtaaaagttggtcatggggttttgatgtagccgtttcgcccaagtttccttcacaatccaaaaacatctcgggtccctagcccacatattttcgtacttgaataggcgacccttacaatttgcacccccggtcgagtctaggaggatgggccgatgatccgaacccatggacgaaagatgcttaacaatcgcgttaggaaacataacacgccaatccggagaagctaagcctctatcaagtctggctctttttgttgaacccccatgattattgctatttcgatccttagcccaagtgtaacaaggaccttggaatcctaagtcaattagccccactccattaaccatcctccgaaagtcaaaagcatatcttgaagagttcccctggttggcgtagtgaaagcattcagagtcttttaaagttccattcatgtctccaataagtagaacaggccgagaggattgattaaccatgtccccaatgttgatccaaaaagcttccttgtcttcacggtgaggtggcccataaattcccattaacatccatttgaagccttttggttcaaagtcaatggcagcagagattacatattttgaggagatttcaatttcacatttaacatcatcattccagcacaatcccaaaccacctgatctgcccaaaggagtaacataatggtatttattgaaccgaattttcgtgcataatctcatgaatttgtccagagataaacgagtttcagaaagtagtagcacgtcgggtttatgaagacggaccagagccgccaattggcgaactgtcgcggtattcccgagaccacgacagttccaagcgaagattttcatggcgactttggagacttttc

SEQ ID NO: 246834 - DNA, 702 bp, Cannabis indica
gcaactgccattaatgacttgataaatagccaaaatcaccatttgcccaatgcccatttaaaagagttgaactctttcatatttctttatgctgtgttcctcttccctgtacaaattcagctactctacttgagactatgtacctaaaataatatgggcttaattctacatgaggttctaagatacagtgtaaatgttttttccaattttcataatattgtgcatcaatttcttgcttctgcatatacaaaacctcctacaatataatgtaactttgtttttgtttagcctggatatcactttctaaaatatatatctgcataaatatatattaacttattttataaaattgaaaagtctatatcaacagatatggtataccttgaagcattcctttagtgtctatatatatatatagaagagttttcaataattacatttttattgtaactatcatagttacatttttttaagccattagattactattaaatggttatgattaatttagaaattaaataaaaatataaccataatagttacaataaaaatgtaaccattaaaatttcttccacatatatatgaatagataattaacaatatcctttcgcagcatgatcagagcgctgcagaataaatatcatttgtttgttgtgttgtaaagataataaacaccattttaatgagtcataatcattattc

SEQ ID NO: 246835 - DNA, 574 bp, Cannabis indica
aacaaggctatcacatttttttttttgaaagaaaaagtggtaatattaaaccaaatcaactattaactcttacagaagcacttaaaaatttaggacaagcatcagtccaaacatgaatttttgacgaactagtaacagatttagctagtgtgtgaatcacatcatttgcaacacacgaaatggcacaacacgaaccaccaccaaccgcagctaaaagacagataatctcctcaataacatgtttgaattcaaaattagaatcaaaattattaacccaattacaaacgatagtcgcatccgtctccactctccctacattgatacccaaatttgaagcccaaaggagaccaatacgaagagccaacaactctgccatgaccacacgaaattcactaacaacaccaatcaaccatgccgcccacacaacgccctctacatcacgaaccacccccaaaaacatgtaaagcctctcccaggcatgactgtcgcatcaattgacaacaccaacaccccgagttcaaaaggaacccacctgcgaccaacaccagcggccaccctcgacctcgactcccaa

SEQ ID NO: 246836 - DNA, 876 bp, Cannabis indica
cgggtccgagtccgggttcgagtccctgtccgagtccgagtctgggtctcgagtctcgggccccgaattcgggttcgggtcggagattggtgttgactccaaatcttttataaatattataatataatctaatacagactatttgttatatattaaataataaaacatacattgtattaaaaattttgatcgtaataattaatataataaattactttatctaaacataatgataaggtggtgttttgtgaatgtataataatcttttttgcagaacacgaacataaaacaaaaacaagaaaaatgttcaaaacaaattaaagagctctatataatctaagactttctcaaagttgacttccttgccatttcctttttttattaattttttttactaattaatctttgtttgtgttaagtatttctaatagttttgaagtttatcatctttgtcggatgttgccattattcatttcaataataaataaattagatagtctttgaaaaagactcaattccatttcaaaaaaaaaaaaagaaaaagaaaaagactcaattttattctacttgttccttatccttggaactggtcaactggggcttccttcttattaattaaaaattttgtgctgttacatataaatgattaaacaatttaatgcaatgggaagcttttaattttttactatgcaagtgtgaatagatttataacattaaaatattacctcaaagtaatgaatgggcaagaatccaaccataagaaaggaccaagaaagtgtgtccttacccaataagacataactcaacattatttcaatattcacaatgcatattaatatatataatgtttagttttactagtagtttgttaagtgt

SEQ ID NO: 246837 - DNA, 1041 bp, Cannabis indica
ctcatgccctaaatattaatccacaattttgtcctgtccaacaaaagagaaggttactggacaaagaacgtgcgcaagcactaaaagaagaggtagaaaagccccgcacaaacaagtttattactgaagctttctacccagcttgggtggcaaacctagtactagtgcccaagttatccaaaaaaaatgtgagtatgtattgacttcaccgacctcaataaggcgtctccaaaagcctattttccactcccaagaattgaatacttatggatgcaacaactagacatgaaatcctaagttttatggatgcctatttggggtataatcagatcagaatgcatccacctaactaagaacacacaagctttcaaacatacatgggtctatactgctataaagtaatgtcatttggtcttaaaaatgctagatatacctaccaaatgttagtaaacaaaatgttcaaagaccatatcagaagaaacatggaagtatatgtgttagacatgatcatcaaatccaaaaaggatgggggaacatagaggatctggatgaatgctttaaaatccatagaaaatacaacatgaaactcaatcccttaaagtgttcctttggcgatagcttgggtacgtttcttagatttcttattaatgctcgaggaatagaaggcaagatatgaagtcaccaataaaaaatgaaggaagtggaaagcctaactagtcagatagccgcactcagcaaatttgtttcaaagtcgacagaaaagtgtgttcccttcttcaacattctctaaggtaataagaagtttgaatggacagatgaatgtgaaaatgctttcccaaaactaaaaaagcaactcgcaaaacctcccgtactctcaaaacctttggacggtgaagaattagggatatacatggcagtcactgaatacattgtgagcgtcgtactgaaaagggaagagaataatgtccaacacccgatgtactatatcaacaaacgactagttgagacagaaggttgatatcctttaattgtaaagctaac

SEQ ID NO: 246838 - DNA, 2020 bp, Cannabis indica
aagtaaatatttgcatgcttgatgattttgatgtgtagctgctgtgtatgtttgttgttgttttcagaagtttagatatgttaattgagtggattcaagctggttttgggtaagtagttggatttaacctagtgtaaagctttgaactcaaaacttttgattttagtggtaaaatggtgttttagctgctatagttgttctttgtgtttgggtttatttttagatgttatattatggttatttaaggtgatttaagtaggttttggtggcttgtttgtgggatgaacaagctttgagttttgaactcaagcttgactcatcaatggtggtttttgtatttatgcatgaagctttgttttattcttaggggtccaattagcaggtctggaaagtttgaattggtttggggttgaattggtcgagttatgaatttttgaaaaaattctgcactgaaccggaattctgattcagggaggcctgtaagaaccggtctaacggttggcttccaggaatttttaccaaaaccagaattccggttagagaacaagtctaccggttggggaaaatttgggaaccctagttctttccatttttgtgttatttagggtattgccatgttatttgtcgataggaaaactttgagtttcaagtttaagtccccgggaagtgatttagcgtatcacttatcagtgttgtgattaatgtgatttaggagcccgtaattcgtcgggcagattgttctactcaggttgactggcacacctaaattcgaaatcaaggtaagattagtataacagtatgcatatgtatttacatgtttagcgtgcatgttaggaagcctgttagattatattagatatgtatgttggcttcgtactatccgaaaatatcacatcggtacggctatagtatgactagcgtaccgagtataggctgatattatggtcgatagtactgtactaattgacagtatcacatcggtatggtcagagtatgactgatataccgagtataggctgatacagtaacacatcggtacagctagagtatgactagcgtaccgagtataggctgttactatgtcaaaattaccgtcgtacgaatgttcgagactcactatcgtgtgggacacggggattagggttatggtcaggggtatgggcgtctgatcataacccgggatatatgtatgttatatgatctatgcttttcttactgtgtttgtcgactcacagtgttatgtttatgagtaggtaagggcaaggataaggctgatgagccgtgaggacgagtagatgaagattgtacatgtcgtggcggttaggcctggagcgtacgatcctcgagacatcagggcttttgtagttagttgttgggcgacaaatattttgtattgagtagcaaactttttataaagtgttttttaaatgggatcccgaagtattttgtatgcaatattataagtatttaattaaataagcaaaaatttaattaatcacgattttcataaaccttgttgattagcaacgagctgcacagtacgtttaaaatcacgtcaacacgcctatgctagttagggtgttacaagaagggtcgatactccggctcctagctctgactcagggatcccacctgaggcggaggaatatactgtgcctcccagcatagtcctgactcccgttcctgctgatgaggagagacaatagctctagatttccaagcacaattatgctatggccgaatgcacaaaggggaacgcggaggtggaggccttgaaaaaggtcctaaggaagggcaatgacaattcctcacacagtgattactttgggaacgcctgggatctgaatatggaccccctgacagactggttcaaccgcttcatcggacctaccctcgtttgatttccctcagagttgacgagccactttgtctccaatttgacccagctcccggccaagagatatgtagcctgtgattccacgaactcaatctacgatattcaggatattagcgctgccat

SEQ ID NO: 246839 - DNA, 655 bp, Cannabis indica
ctttagatactgattctgctcccaaaactaattcaatcacaaattcaatttcctggtgaggaggtaatctaggcaaatcctctagaaatacatctagaaactcacacaccagcctggtacttttaggtccagttgtaacaggtcgtccagtatccactgctgtaaataggaatcctatgcatcctttgtgcattagttctctagttttcaaaattgtaattctaggtatgcgtgatccttgtaccttttccacaaacacagatgtaatggcactatcaggttcaaacactaccatcttctgtttacaatcgattgttgccccatgcttggataagaaatccattcctaaaattatatagaaatcagataggtataatttgatcaggttggtggttagtcaatctaataagacaaagatctgatccacctagtagacatcatcatctccctaaatggtaacaaggttccaaacccaaaagtataaacactaagaggtttaagaaaactttcggtcactctacttgacacataagagtgtgttgctccagaatcaaataacacaatataggaaaatccattaatagttaattaacctgtcccaacggatggacttgcatcaacgtcagtctgagttaccatgaacaaacgtcctgga

SEQ ID NO: 246840 - DNA, 614 bp, Cannabis indica
acaacatcaaaacaacataacaatatataaataacaaaaaactaaaaaactattttttgaaaataccaataattttacaaaataacaataataacataactgtaatagtctgtagcaacagattgcaattctgtcagtgcagaacacagatttgcataatcaaacaaaaccaaaaccataaataaataagtgtagaatttaaaataacttgacacaagagaattatacgtggtatcaatgttcttcaaacactcttagtcaatggggtcatgcccagagaatgtaatcaattagtaaagtctcaaataattacaaatacaattgacttaaacaagtttagactgcctctaaatatttgccccaatcatttgtagttcacttcacaactctgatttcgaaacaccaccaaacaacgaactcccttcctctttgatgtgtgagtgcttacttcctcacgaagtaaggcttgaactagtcttctcccaaagacttttctctcgttcaatcaagttgttcaacagatcctaagagcagtataagaacaataacataaacactaaaacatagctgaacaactcacaaaaagaactctttcctcacaaaaaataaaatat

SEQ ID NO: 246841 - DNA, 768 bp, Cannabis indica
ttttttttctttttttgtatttttctgtttttttccccttattaaatgtatatttttcactattaatgaagaagcgattggattgaaagaagtcctaagttggatcaaaaggaagattaatattgcaggctcttcaaaccaacttccagctacttcagctggcgcaagcaatggttacttctgttgatttactttctcctgctgctttactattttcagattataaatgtttgcttcagaatttatcgaatgttgctattctttagttaaatgatttggaacgaggtggctcattaattagctcgctcttcatgttctagtcctgattgtattatcaatggggtgttgtccctattgagttgaatgccattttgttggcagagatttaaagaagttgatttccttcatctaatgaaataaacagatatattccccattggagtacaccgattaatatcaccctttcatccaaaaatttggttaaaactcttcctcaaactttcttctctactctagaagaactgttctatctatttgagtttctatctatttgagtatccactattttgtattctaattaatgtgaagtatactaataaaatgtctctatccaaggtagaaaccgaaataatgcatcaccaagaaccacatatatacctcaacaattttcaagcaagatgagacttgtaaatattgaaagaaggaaaaaaaaaatgttgtaagatttcaacatatggagataaatttatgatatattgttaaaaacaa

SEQ ID NO: 246842 - DNA, 754 bp, Cannabis indica
gcaaaatacaatactgagagttattaactgacgcaaaaaaaaagtgaaatccctaaaattaaaaaacgcaaaatcctcagccctctctcttcagactattctcttcagccgcatctccttttcagccctctccctaaacttaaaatccttacgattttcttcaaccgcatctcctcttcagccgcatctcctcactcaaatttccttctcttaaattctctcatgtggatatatccacactgaggttcccttcttcctgaatcgcttcaatggcatccttacatctaatggtaaccactacgaaacactctgctcaatccacgaaaataatttctgtagtaccaccaccgatctcaacttcccaaacggactcaatcaccaccaccaccacatatgttcctaccaaaaaggttttttacaaatacccaaaagctttgctcatatctataattttcagaggtttaccttttgggttcaaatccttattgcacagttaagttcactaaaatccataacaggggacttagtatatgctttcatgggcaggtgttggtaccagtgggttatggtaccgaagaaatggaagttgttatcattgtagactgttctctgccgagctggtgcggatgtgacggtagcctcagtggagccacatctggaggttgaagcttcgggtggtacgaagttggtagttgacacctccattaagaactgttccaaccaagtttttgtaacaccctaactatcttaggcg

SEQ ID NO: 246843 - DNA, 2523 bp, Cannabis indica
aaccactctttatctacacttgagagtttctttggaaggaactctgaacccgagtccttagactccatttaacctcttcaatcatttgattggtgtctacttgtgcaccctgccataggacagcattcctcggtttccaagcagtgtacaccatggcagcaaccgcaacactatatacgactttcctgaattttgagatttttgccctcccaatccatttggcaagctattgtacgttgaaggtgatagctttccaacccagtcaagacttgatctctaccaagcattggttggttttcctacattcaaagaatagatgctgtatattctcattgcagtcaccacacagattgcgtttctcttgcaccttgatacctattttgatcagccgatctttggtctttagcttgttcagcatcacaagccagagaatcatacagtgcttaagtgtattcagtcttgaccatacctctttgctctaatgagttttcggttttggggtgctgaacagtttgtatcctgccttaatagcatatctatttctctggaaatcagcactaacattcaatgaaaggatctggtttttgagagcaacaagcctcttccaataccaactggagcggatagaggcattgtaactccaccagctttgtcctttgatgtatacactgttcacccaccttagccataagctctcttggttgttcgagattgcccaaatatatttggacatggcagccttgttccaagtttcaagctttgtgatacctaatcccccagtagatttaggttgacatacattgtcccaggccacaacacctgctccataaaacatcgcttgacctttccataagaaagctcaacagatagcttcaatggaattcaggattcttttgggcatgattatgatttgactccaataagcctgtatggtaatcaaaactgaattgataaggcttgttctcccagcaaatgagaggttccttgaactccaggttctgattcttgatgtcattttctcaaccaaaacctcactttctttcctggatatcttcttagcacaaattggtattcccaaatatgtgaaagggagctcatgtctctgaaagcctgaaagttgcaaaatcctatccacacaatcttgctgcatattacaacagtatatagcagttttagtggcatttggttgcaaacctgatgttaatgaaaagagctttaaggcttgtagcatgtatagcacactcttgaggtcaccatgactgaataatagaacatcatctgcaaagcgaaatgatttaatttgaggctcgagcatctgtcatgaaagagttgaaaatcttccttctctccaatctttccccattaatctagaaaagtattccatacccagtacaaacaacaggggagacatggcgtctccttgtctaagtcctctcctagattcaaagaaaccatgtaaggtcccattgaacataagagagaactttggagtagatacacaattcattatgagttgaataaatgtgctggggaaattgagcccaattagaacctcctccgggaactcccactcaactgtgtcataggctttttggaggtcaagtttgatcatacaacttggcttattggctttcctgtagtagtgtctcaccaagtcttggcaaatcatgatattatgtatgaacttctttaataaatcccccttgtgaatgggaaattatttcaggaagaatattgctgattctagagctcaaaagctttgttgcaagcttatagataacattgcaacaagcaattggcctaaaatctttaacagagttaggagatttacatttaggaaccagagtaatgatcgtagaattaatctctttaagaatgttacatgattccaaaaatgctatcactgcaccactgatatctctccaatgctcccaattatcttgaaaaaagctacttgagaacccatctggtttgggagatttatttccaggtatgatgaaggctgccttcttcacttcttcactagtaaatctttgagtaaggccaattatctgctcctttgttagaaccggtcccctggctattattttagcatctactttccttctctgctccatttttgacccaagcaaccctttgtagtaatccaagaatgccttagtgattagctctggttcatggactcttctaccatcaaatatttcaatggaaaggatacggttttgcctctgcctttgcttaatgcaagcatggaagagagctgtgttacaatcaccttgttgaacccaatctgctttagatttctgctgcaaaaaggaggtataatcaccctgtattttgatcagtttttcctgagcttccttctcctgcaaatgcaaagcactatccaagggatgcatctgaatctggttttgtagcaattccaactctgccttagctcttataactgaggcctggagttccgagaaaccctccttgttgatctctttaagcctcattttaaactgtttcatcttagacact

SEQ ID NO: 246844 - DNA, 750 bp, Cannabis indica
tggtgatagagtttctaaatttttagtttcctctatcacagaaactattgaatcatatttttctatacaagaaattagtatcttttgtactaggctcccatttaatttactatttctttaattctagaatagtaatcttttgcagtctcattatccttcattctaagatcctcaaaatctcttctaagcatttgtagtccaactatgcgtaccttaattgttccttagaactcctcttgcagtgtgtcccatgcttcttttttcgttgtgctgcccataatttgtgaaaaaaaaaaaaattgtctgccatagcttgctacaagcagtataatgcatgagaattcttttgttgattatcctccagtgccttcttttgatcttctgaaagagatgtaatgtgttccggagtagttactccctcttcaacaattttccatagattttgtgatcgaaaataggtcctcattttgaggaaccaaaaatcatagttttctccatagaaaattggaagaggtagaggagaccagttggattccaaactcttgttgatcgaacagagctttgataccactgtcggtttgttaaattagatagagtaaataattgtgatttgttttaggtgatagttttgtaatgtgtttagtgactagtgtagtatgataataacttgatagttggttgtgtatatagtagagaatggttttcttagaagagaattatatgagaaagtagtaagctttattgatagtt

SEQ ID NO: 246845 - DNA, 1452 bp, Cannabis indica
tggtttattttttcttgttcgaggaaggattgtatagcagtgtgaagagccattgtttggacttcgacaaccattgtacagaggcatgttaggtaccaaaaaagatgggctatggactttggagtgaagagtgcagtccggaaggggactagattggcaaaaggatactttgggtgaatcaaaaattatattgaaaatagggtccaaatttggagagaatttgttcgtgagtataaataaatagccctgtgagaggccctttctttggctgactttttggatttagaaaggatgagctttgcatctcgggtaaatgagcaggaaaatgagcaattcttttgtgatgacgatgatgatgccattatatatatgtatggaatggtatgggaagagttgtggctgattaaggggatggttttgagtgggtgtgaggagaatagtcatgcagaaggatagaacaaatatactatataataatatagtccataagcacgctataacattaaaattacagttttactcttcttgggttaaaattatgaaaatgcccatggctcatcaacggggtcttaacatgtcatttatcaatataattcacatatattaatttatataataataaaattccacattaatacacatttaactaattatggtttgctaatccagctccttaatcttaggatattacaaaagccgtcgcgatattagtttatactccttcagtgttgaccaataaggaagatcgtatattacattaatatgtaccccttctcccactcactattttatgttaatgtatttattttataaattccaaaaattaatattatatataattaatatttaaaattattatttcatttaattcttctatgtaacaatttttttttttaccttttatatcaacaatattattatgcattgtttaaattctttataaataattattttggttatttagatatacatttaaaatattttacttgtaatcacaacaaaagttgtgactaattataaattactattctatattgtgactaaaaggtctatgcctgtatagtattagtcacaaaaagtacaatttgttgggactaaatgtatttttagtcacaacaagtattgtgactaaaactaaattagtgtcaacttgtatttaattactatgttttaattacaagtaagtttttgttgagattaaaagtcacatttagtcacaaaaaaattatgttgtgaccaaaaagttatcattaaaagtagctatttttgtagtgatatatacataaatataatttttttttctattaattaatcatattgaataatttattattttgcttgaagtgttattagattgttggaatataataattttcaattagcagtcataaacaaaaaaataatttattgagtgataaagttaaggggtaatttcatttttacacttcaaaa

SEQ ID NO: 246846 - DNA, 1371 bp, Cannabis indica
ttccctacgagtacggttattgtctagagttagttacctaaggattttccgtgcgagtagcgggtactcgaggaggacgtcaagtcttgttttgtacatccacctcggcctgcagagcacgtagctggtcttggagtgtagtgtactgatcggtggttagttggataataccttcggacaccgccgctggagtaaaaggtgggaaatgtcttattgtggctgccggtgtagaggtttccccagcgtgagggccagtagtttcagggaataggttgagaggtcttacattaccccgacctattccgccgttgatgacatctacgggaggcactcagcttcctgacagtggaacgttcatcattccgatattgatggattcattgttaagacctctgtttgcttagtttccagccattgtgattctctctctaaattagcaagaaagtacttctcatttcccatagacggcgccaaatattgttgaaggaatttcacaacaccaattaaataatagcaataataattataatagtaatatgatgagtaagtgcgagtattcaacctagaatgacgagtactcgaactgggaacacaaatacttaatgaaaactggaaatacaaagaacacggggggaatacagtggttcagtcagatcactgtctgcttagtccactgttacaaggattctctaggtgtcccatttctcggtggatcactcctttatatacaaagcaagtgtccgattatttacacaaggattgcattcattgtcaatccgtttgtacattgatttataataattaagctaaaaaacgtaaacactaataaataaaaaatagtttttattcactaaatacagcaacgtatgcgacttctaatgtgcgagttggaagttcatattcttgcataagctcgtgggcttagaatacacctaacacttagttgagtctaagatgtctgcgttcttgtatagtcacatttacggacattgtataacgagctgataaaaccaagacatgcgagtctatatcaatttatcgaggttattgggtcattaggaccaactcgctttatagagaatcgatgtccatgtttttcgcaggaggatcgagaggatactcgcatatatcgtgatatatgcgagttaaatccgttccttggtcctacataatgcgagcctcacaaatgcgattagacttggtcgtattcgcatcatctcgctgagtttagctcaggcgaggtttaaactcgaggagtctcttattgacatctcaactttccttggggaaattgatgttgggttttgtgccctaaataaaaccatttacaatctggttagttatcaatataagaaatttgaagtgatttat

SEQ ID NO: 246847 - DNA, 1267 bp, Cannabis indica
tttttttttttttttcttatacttggtgctttgtttgaagtgtgcgtgctcctcttataataccttactctaatatatatatatatatactcacgtatacctttatatacatatatatattttttaaataaaaaaaaagacaatccaacaaagtgatactaaatcagccccatgtctattcttattcccgaaagtccatttaatattggcattcttcttaccgagacaaattatgatgtatggtctcaacttatggagatgcacattgccgaaagagagaaactcacatacattatgggcaaagtggaacctcccgctacatcagacaaaggctatgaaaaatggcaagctgaaaatcagaaagtgaaacgttggcttttaatgtctatgtctcctgatatcatgaagcgatatcttcgtttaccaactgctcgtgaaatttggagtagtctttctaaaactttctatgatagcaatgatgagatgcaggtctatagtttgaatttgaaagctttctcagccaagcaaggtaccaaaacattatctgtttattatggggagctaacagaaatatttcaagaactagatcatcgagatacagtggccatgaaggatcctgatgatgttacggcataccagaagtccattgagcgaattcgagttcacatatttctcgcagggcttgataaaagttttgaccatcttcgacgtgagattctgcgacaaacacctcgaccaagtttagaagagtgttatgccatggtccgccgcgaagacttacggttcataactttcaatgaagagaataccaaaactgacgcttccgctatgctctcttatcggcagcccaccaactcaaagaagaccactgttgataaagcctcattgaaatgtactcactgcaatcaaacaggccatacaaaaaatcgttgctttgagttaattggatatccggattggtgggatcccactcgacatcgaaatgctaagagaccatctacaacagcaattgccaaaacaaaagaagatgttggtccatctacgtcatcatcactaaccaccaccaccacagaagaaggtaaaaaagtttttacacctgttttgaataatgcatggataattgattctggtgctactgatcatatgacatttgatgtgaaccaagtctctaaattaaaatcctcctctagaaattgtgtctctactgcaaatggtaataccacccttgtttgtggggaagggtcatgtcatcttactaacactttac

SEQ ID NO: 246848 - DNA, 1489 bp, Cannabis indica
tgaacaaacctctgattacgggatccaacatctccaccaaccgcgcactaccccggttgggtgctatatgacacaaacaccccaaaatagccctgttaaccgcacccatagtatggctaattctcatttgaccttctcggcatggcctaccaatgagcaaattgtggatttggatagtcctccggttcggtcaacaactcatacatccttgttaaatactatgggatctactggccctctacaccaagctgtttctgcccctgaacaaggagtatcccctgctactatttcagccactcctatagtggcaacaacagtgacgtctgaagtcactgggcatactattccggtttctcagggctttgccaccatcatggccgacctcaatccaagtcagcccctccaatttaccatcggttcatctttttcacctgccacggctcccacctccactcgcaaataccggtcaaaacgccctgaaagtgccaatgagattgagtttcggaaaatgttgaagcgaactcgtgatctggcgcgtactcttgatgaaggatatatcgaagaggcgggtgctgctcagcgcaccccccgggtgccatgatcgtcattagttggaatgctcgtggattagggagtaaacgagcattctgttccctctcccttttagttaggaaatttcggccaacacttttgtttgtatcggagactaaactccaagttggttctttagatagatttaaaatgcatcttaattttcctaacggtttagaagttcctcgagtcgggcttagtggtggtcttttgttgctctggactcatgatgctaatgtaaacctgctttcatataatataagtcacttcttttgctatgtcaagccttctaatttatcttcttttcactttactggtttttacagagcacctaattcaaataataagtctttttcttggcaagtccttcatagaatcggctcaaatattcctcaggccccctggctcataatgggtgactttaatgactttctaatttggaagataaaattgggggtgacacttctcggagcccgtcaacccaatttaggaattttcttgatacttttactctccatgctctccctgtaaaaagtaattttttcacttggaccaataagcaacacccgaatactcacacccaggcacgtctcgattgggccattactaactctgaatgggattccctctttccaaatcacaaccttcttcatggtgacttttttggatccgaccaccggcctctcattttaaatctccaccaccaagtccaagccacatcctctaagccgcgcttcatctttgacaaactttggttggctgaggatggctttgatgattgtcttcgcaaagcttggacaatggcacctcctttgtctgaatgtgacccaattctcaatatcaataaaaaactggaacaatgctctacacatcttcgccagtggaaaatgacacttgg

SEQ ID NO: 246849 - DNA, 876 bp, Cannabis indica
aatatcatcgtattataaaaataaggattgtacttgtcaaatacgcgacctgaatagataaaacacaattgttgtaatattcatttaaatatgtgaaattattagttgttttgtgattttttgttaattggctcgcaatagatataactgtcgcattatatttttcttacagttttctcatagtagactgaccataaattaattttcaaaatgtcaagaaagggacgtaattccgtttctcatattttacaatgggcagtttgatcaaggaatgaattgtgtaaattacaaagttagtggcaaattcatctcaattgattgaaaatatgaagaatttgtacacaagttaaaacaagtgctggaatacaacaaagaaaacactcaactgtaactgaaatattaagtgaaagaaggtaaccaatcattgagataaaagacgatccaagtctacttttttacatggtccaagtaattatatattaaaagaaaatttatttgacttttttaattttttcaaaactcatagaagaaatattttcttcaatacattgtgcatattgatttttaaatagttacataatagttgatttaaaaggatccttctcctatttgggtatgggctcaacaaaattatcataagaaaaattatcatttaacttctttttcccttttccttttcctcttggagagtggagacagatttcaaccccatttttgaagctttaaggcatgtaattagaacttttccacaaaagaaaatgaagaagatgaagaatgaattatatataggaaattgtagaaaaaaaaaagagaaaaagaaacttggactgattctttaaaagcaattgaagattgtgagattaattcagttttttt

SEQ ID NO: 246850 - DNA, 1522 bp, Cannabis indica
tatatattatttatatgattaaatgaatatgaattctattattggtataatggtttcgtattacaaaatatctatatacttatgtttattcatagcaaatgccagtagtaatttggatttcatcttatgaacaatgtgtgatattttgattcttattgtgtataaatgaaaatattcaaataataaactatatgattattattacttttcttgctgagttgttgtgtctcacgggtgctatgtagtgcaggtaaaggcaaataaaagctagatcaaccacgaggtgacagtcttctctagcaatgtacatattgacctcaatggcctgtgcgctgagttgccaaaagttgttttgggctagttgtatctactgtgtactttgattttgtgtttaaatggttgtcgtatatatttctttggcaaaactttttataacagagatccccgaaacacactttttatgtcgttctaatgtctgtttttagtgtttttattttggtcaagttttttaatattatcacggtttttaataattaattaatttattagtattaaactagcttataaaatcacacacgtggcgtccctatagattagggtgttacaacatctcacaaaaacctcatcaagggtggagtaaatttcgcgaatgtcttggattacatactttgactcttcctcttcatagagttgctttaactctttatgaatcttcttgacaaacctccctaagtacataggtctactcctcacccaccaacgacaataccaccatgtacattgacccatacgagtcatcttaggtatatgaaagtgaatgttgatattcctccctaaaattaaaacccaagctttggcgatatcttcgattccacattgcgtcctcctagggatacataagcaaaagttctttaagggaacaccttgttcaaaaccaaattgacgatcaaatctattgggataataaggttccctatatatatcactgccaactctaacgggtaataaagcagagcgcatcgacattaacaattcaaattttttgtcaaactgatcttcattatccaaatagtcatgatcttcctctgaaggaaaataatatggttaatgtataatataattctctcccctttaaatatgtcgagctctattcaaagtcgggtgcctagctggaatcccagcatacttatttaaatgaggtaaatcgggaatgagatcccaacatgataaagatcacaaaagtgctcatctaaccaccccaacacatagtgcataggcaagaaacatttgccttattcttgacaatgtaaggcagaattatataaagctcgatatatatagcccaagatagaaggtgcaagtgaaactctaaccctgtgtgccatttgttggatattattttaccaggatcttagatctactcacaagtatgttatttaacaccctaaatatgaactttctaaaacgataaaataaacacataaaaagttaagaaaaccttacattgatgcagcggaattaa

SEQ ID NO: 246851 - DNA, 839 bp, Cannabis indica
atctttccataacatagctaaacctccttccctgccttgtgcatcaacagaaaacattctctcataaccaagctgagtcaataaaatctccaatcttggtttcgaacataaggtttcacatagaaaaataaaagtgggcttcttttgataaaccatatctttaaggaattgaaaagtccctgggttcccaagctcatggcaattctaacttaaaatactcatgatgattggcgagcccgatcgattgagcctgccattaaaacatttttgagtgagcacttttatcattacccatatccacatccaagttttctttaggtccaacaggcccaataacaacttctttacctgtccttttacgcttagaatccaagaaaatcattccctcctcatccatatttgaattagatgacacatggaaatcccccaaacttcctaaattatctcccccattactcccaccaatatctacattttgattcctcagattcccctggtaacttccaccgaaatattagagccacgaatcactccttaaccctttgaaactcaagatagagcctccatgaaatccccaaatatcagggatatcagtcctcccatcactcctgagatcagcccccatcggaccaccgtaactttcagaattagacaaactcgatcataaccacttcgaacccaaagcgtactgcgttcttctaggcaccgccttcatgaacgtaccataaggtttaacaatggtggaaaattggttgaataaacaaaccagagcaatattgatctgtatggcctgtaatcccacaaataaaacaaaatgtaggcacaaactcatacctaaa

SEQ ID NO: 246852 - DNA, 520 bp, Cannabis indica
cgattctaacatatatcaagagaattatgacaaaaatagtaagaacacttaattttgaaaatggggtgtgtgagcccatgtgccattgtgcatgtcgaggagcatttgtgtgagtcatggagccttttatgcaagtggcggagcatgaatacgagccctagagtgtgtcttgtgtgtgtttgcatgaggttggggctcgcgtgcgagcccatatgcgtggctagcatgcaaactgtggagtgtgtgtgcgtgttatgtgtgtgtacatgtggggggataccatgctagccatggagtgtgtgtgagtgtcatgtgtgtgtgcattagttgggggctcgtgtgcaagcccatgcgggggattgcatgcaagtcgtggagtgtgtgtgtgtgtgttgtgtaacaggtgtgtgtgaaagggctcgtgtgcgagcccgtgatgcatgggggcttgcatgcgagcccatatacatgtgtgtatttcgggtgggtgtgtgtaaaagggcttgcgtgcgagcccgtg

SEQ ID NO: 246853 - DNA, 858 bp, Cannabis indica
atatacaacatcatcatatttcaccccccaaaataaagtaattcttctaattattaacaatatcagtacataaacactactatttcttacaaaatttactttattaattctcaattcaaaacaagcataactaagttagttgaaatttgtaaccaaatgaagtatccaaattcgccttatgttagggaaaaaataaaaagagaccttaaatgctgaaagaaaatgtcgtatgaacagaatgatctggtttgtgtatggaaaatgatgtttggggcaacgacggtaaacagaagcaatgaagaaggtgattgtagtgattaattacctcggcggatttcggaacctcgtcgcagaagatctcgcacttgatgtcacccagatttgtatgcaacgtcactgactgcaaaacccgtttgcttaatatcaaaaacaaaaagaagaaagaatatgaagcttagttcttgaatcatgagtacagtgaagcacaaaacactaaccattttcaaggcaactgcgaatcctttcggatttttgtatgtagtaaatactcgtactgcgaactggtgtatgaaaagggtttcaaatctttgcgatattgtaataccaatgatttatttttcttttaaaaaaattgggggctcttttatttggtaaaatttgtcaaaatggactttgacaaattgaaattagcaaaatagacttttctatttttttttttaattacttttattttacccttaacatttaaaaaattaatttaatattaaacaaaattaattaaaacctcataaaacaaaatactaaccctaatttttttttacagcctctcttccttttgttcttcttctcctcttctcc

SEQ ID NO: 246854 - DNA, 1172 bp, Cannabis indica
tatttattttcactctgtttttgctaggctgcatcttattcaagtacatggactaaaggagcgagcgagctatgaagcccttttccaaaataaataaataagagcaggatgaatatgggaataaaaagtaacaaaccatttttctttatcctcaagcattggtgctggctcaatggatatcatgaacaaaacctatgataggcaataattgtgttacagaattgaaactaaaatagagtgggggcaataaaagtaacttgcaagaaaaggaaaaaaaaaaattgttactaaagtactaaccctcattgggtgcactgcagatctgggaggaagcccctgaaaattaacgagataagaaacttctgcaaattagtactaataaaatccaaatgtgaaatattaaggacagaatctcatctcaaaaacataaaacagaggtaatctccatagatattttaaaacaatgttttattcaccatagcaggtagtattcgttactgtcagaaaactaatttcccagatccaacaaagcaaaattcaaacaagtttttgggtatattaataagtggggaaagggatccgaatcgtcagattacataactccccccagatctgctttttaaaattttcttgtgaattgaaaataagttacatcttctctagaaagtaaagtacctctgccatttcaattgcagacacaccaagtgcccatacatcaacctggaaaaaaaacaaattataaaattaaacaaaaagaataaaagggaaaacatcagtcaaagagactgagggcttcaaaatatgcaacagctcacaggtggagacaaatcgcatgaataaaaaaatgatgaagacttttgctactcatacaaaaagtaagaaatttctctaaaagatgcagcataaaacaccaaactcaaaaactctcgataccttcccatcatagcgactttcttggataacttctggagccatccaatgtggggtgccaatgaactggaaacaataaagaactaaatgcattaagaaacagtcatcaaccgaaactcgctgcttgtattgcctcagaacatagaaccatttaatatatgcaaaacattaatgacaaaaagaaaaggctaagttacgaaacttaacttattacgattaaaaaaatatttaagaaattgcat

SEQ ID NO: 246855 - DNA, 703 bp, Cannabis indica
gtttgataaacgcaggtgcgacgtataagaggctagtaaatatgatgttcacagatttgattggggacaccatggaagtatatgttgacgatacgctcgtaaaatctaaacatgcaggagaccatgtcaaccatttacaagcaatgtttgatatactgtgacgatataaaatgcggctaaatcctcttaagtgtgtctttggagtcggttcatggaaattcttcaaatttatggttaatcagggaggaatagaggcaaaccctacgaagatcaaagaaatagtagaaatgcgatcaccgactaagccaaaagaagtccaaagtctcataggtaaagtccccgctcttaaccgttttatatcacgatcctctgataaatgcaaagagttttttcagattttaaagggcaaaaaggagttccaatggaccgagaaatgcgaagaatcttttcaagcattaaaaacgcatttggggcagcccctaatcctgtcaaaacccatatccggtgaagtcttatccatttacctagcggtgtcagaatatgcgattagtttggtactaatccgtgaagatcaaggacaacaatacccggtgtactatgttagtaaatgcttgttagatgctgagactcgctatcctcaaatggaaaaactagcatttgccctggtaatatcatcaagcaaactgcgaccttattttcaggc

SEQ ID NO: 246856 - DNA, 646 bp, Cannabis indica
ttttatcctgggcgaggtctaaacttcgagaagtctctcacggacatttcagctttcattggaaatctgaatacacgtgtcctttaaataggagtctggtctcgagtttctaggtgagagaaatctcactataacatggacgattcaagatgtttagattgctgaaagaacgatctaaaacttttgttcacaagacttttctagaaagtgaatgcatcataataaaaaaataacttgaaatttcagacctaattttttttatcacaaagagagcgtattgatcattcaaaacttgaaattttctactcattgtatcttataactccaaatccatgctaaatccatcaaattcatcatatttaacatgatttttcccaattcaacccatatgatgtatttggccattaaaatttgaaacataaagaaaataagcgtaattccacacaaaataaacattttgaactaaaaaaaaataaaatacatcctcaaatgcatcaaaatctaacctatcaatagttcgtccttaattatcaaatctagaattagattactagatagcagtcaaaaccattctcaaatatcttagtagaacaacagactatatacatgtaaaggatctacaaattcaaacttccaatcagatcgt

SEQ ID NO: 246857 - DNA, 1217 bp, Cannabis indica
cagaacaattcaacaaatgaaaattaaactctaactcacaatttggattttccactatactccaagagtctctgctatcaaggttcacctcaacaataatgacgatggcttgactttttaaatagaggaagattgcttgactttttaaatatattcattataaatcctttcatattttgcttttaagagaaaatgagaaaaggttctctatatctcttcacttaaacaatgaacatttaatagaccttttaagctatattatatatcctttcatatatatatatattgataaaaagaaaaagaagaaaaaaaaaaagtgttttctttctcaattaaagaacgaacatttgttattaattcttggttaattaggatttttgccccctgaactttaacatgtaccaaatcatgctccctgtacttttaaggtcattaaaaatgcatcctcaactattgagattattggatttaaggatttttttccaattttaataaaaaaaatctaatatggatgaaagttcaggggccataattgagtacatgtcaaagttcgaggggcatgatttggtagatatcaaagtctggggagcatggtttagtacaaaaacaatcactgaaatagtaaaattgaatgaaattagacaaaagtccttaaatctaacaatctcaatagttcagcgggcatttttaacgatcttaaaagttcatggagcaaaaatcctaattagccttaattcttaaccgtttcttttcttatcaatctacattattattaatattaataatattaatttttaacagtttcttttcttatcaatcttcattattattaatattaataatttattaatcctcataatgaataagaaagaataaataaaatatattgaaacaatgagaaaatagaaaatttagtttcttgaaaagctagagtgccacgtcaccaactccaacatcagaattatagatatatatatagaccaggcaaaagcgcggttttgtaatttttttttaaaaatgatttaagtttttattaataaaaatttaaatgtatagctaactgaatattttatttcttttaatgcacataatcaaataataaattttatatttatatatagattgttaataattatttttggacaaaattattatcattatattcagtctaaaaattgttaataatttttttactacccattaaaaaatataatttt

SEQ ID NO: 246858 - DNA, 637 bp, Cannabis indica
acaaccaaggaaaagcaacaaaactataaacttaaatcagcaccaaacagaaagctagcagcagattagccagcatgtttcctccagtccaagtaatcggtcagcacagtaggatccacatccgtagacttagttaagcctattgtccttgtctcctttgcccattttgcgacattatgcgccatatagttgcactttctattcagatgaccaatgccccaacttgtaaattgcaaacacaactggtggaagcgcttgctgatattagtcaatttgaaatggatgtccttccccaactcggtggaaagattagtagcaaccaccatgttatcactctgaaatatcacctgcttgaccctcatctctagcatcagttcagcggccatacagactgcaagcccttcccctatcaacggatcagtagttaggcttctctcagttttgatggtgacaatgttaccttttccatctcgcacaacagttgctaaaaccacacctccctcatcaaaagagatatcgcaattgcagcacaaccacgattcaggagggggatgccattcacagaattccaccacatcgttggctgccaccttaagatgatctctaattttattattaacattaagtagcaccttct

SEQ ID NO: 246859 - DNA, 1033 bp, Cannabis indica
tttttcctgaatttagtttgcttggctttcctaactgctttgagaactgcctgcagtgtatcggcctgagttctccaatgcagccaattcttcacttgcaccagacaatgctgggaaaatacacacctgaagaacaggtgttcagttgtttcatcttcgctgttgcagaagctgcagactggagaatctattactctgaacctgcataaacgatctctggttttcagcctctgctgaatggctaaccaggtgagaaaactgtgtttcggggtgttaattctagcccaaacctcattacaccagtccaccctttcatgctcttgaaccagtaccttataacctgttgcaatcttatactcttcatttgagaattcctcatggttcaaagattgtttcactaagtctttgatagacaccaatttcctccaataccaactactaccttggggagccttgtactcccaccaattatgattttttatatatacacaatgcacccatttcacccaaagattatcctttttattagctacagcccatatgtgtttaaacatggcagctatattccattgagcaatgttcaaaagaccaagcccaccttcttttttcgggtagcacaacttttcccaaccaacagctccagctccttccattaagctcttccctgtccacaagaaggatctacaaattccttctatttctttaatgacttttttagggagaaccatgatttgactccaatacatatgaattgtactaagcacagaattaaccaacaccaatctcccagcatatgacagatttcgggttgcccatacctgtattcttttagttattttttgagcaagtgtgacacaatcagaggctgcaattctccttgcacaaatgggaactcccaaatacttgaaaggagcatcctgcctcaagaatcctgtcatgtccagcacccttttaatctcgttttcctccattccactgaaaaaaacagcagacttacccttgtttggtgttaaaccagaagtgtttgtgaata

SEQ ID NO: 246860 - DNA, 617 bp, Cannabis indica
tatactaaattttatgctaggtactttctaatttatataaaagttataaaataaaaaaaaatgttattatttattaggtgagattattattatgtatatctaaataatgtaatttataatttaactgtaaaggctttccaatagcatgtccacactttctaaatagactaaatgagataattaatctcacatagatatcagacacaacaactgctacttactaccatagaactaacagattgatgaaagagagatatccactacttagtatgcaaacaatgagattgaaaaatatattatccgttcaagagtatatgattcttcctcatcatgtcagcaaatgctaacacagtaccaacatgatcaatctcaaatagcttctcaactatcttagtgtaggttgtctcgtggcgcttctcgtgtgtagctatggtaccacatatttgtgccaatttcaagtccccatgctcctttgctagcctggcagtgttaccatgggagataaaggtggctctttcttggaattgagtgcagatgaaaccaagataaggattgttctctgtccggcgatcctgaaaacaaagagacattagcccaagtaaaagacaggccctttg

SEQ ID NO: 246861 - DNA, 1061 bp, Cannabis indica
tgactaattatatattattattcttgtgtgttatgattaaaattaaagttcgtgtttaaatgtattagttacaacaattataatttattataactaaatatatttttaatcacaatacgattaaaattaaatttgtaacaacttgtatataaattctatatatttttttttttagaacataaattctctattaccacaaatcaatacaaaggattaggcaattttattagttaaaaataattttttgtgtgattaaaattaaaagttattactaaagataattttttatttgtagtgagtgttttatcataataaaaatagttaatattgattatctaattaatattgaaagagtaaataaagcaatgtggtggtaagctattaattaggttgattggttatataatattattagagagagagagagagagagagagagagcatggagtttggaaacagccacgccttatctgtaaagtcaataattaatatttagaaagtgaaagtgagtgtgttttaattaattaatacgtaataattaattacacacatataattaactaataattacatatgttatagcatgcatgaaccaaattatatatgtgtgttataattgcatttgcatggggtgattgggttgggtgttggggaccatttgttttgtattttgtatatattacaaaaaggatcgtcatcatcaccatcttttttttttgtatatatttttagctttttaaagctttatttaaaatttaaaaggtagctttgaaggagtaataagttaagacttggaaagtgagtcgaactggaacacaaaaataacatatatatatttgtggctggcactgccactgtcacattgattcaacattatatatatatatatatattgacgtacgtaataatattaataattaattaattaaaaccacatgcatattattatttcatataggaattaaaatgaaaatgattgaccctatcatatcaccaaaaggtttagacttatctgaattcaaattcaattcaatatttggaaatgggaatagggaatatat

SEQ ID NO: 246862 - DNA, 501 bp, Cannabis indica
atttgatagatttttagcttgattaactatttgtatagaagaaagacactgacatactaccaatgaatattgaataaatttgataagacttttaccttgaataaccatttctatagaagtaagaaactaacatactaccactcaactacaacaatagaggaaaatacaaggaaaaaaagagcacaaaattgaaaaaccaaaattgagtaagaaacttaaacacagaccaacaaagagaagcttagatacacatattgccattaagaaatcaaaatacaacctttacgccctaacaaaagcccaaaggaaattgacagagttcatttaagatcccatggcatgcccttttggtaagatcaatcacaaactcctcccatatcattatttggtatcaaaagctcttcttttttaaaatttcacttctccaatgggaaattcagtaaagcttttatctcaaatataaataaattaagaggttacaacaacaacagaagaggagag

SEQ ID NO: 246863 - DNA, 723 bp, Cannabis indica
actaaaaataaataataaattactattaacctaacgtgataattgttgtgagaataggtacctagttaaggttgcatttagaagtaattgtgtaactaataataattacactgcgtaattgtattatattttaaaatacaaaatgtattaggatgtaagtagtaattacatgaaaatttaccgtgaggtctaactcgtttatttatgtttttctttaaaaaaaattaaatgggaatttctaatgtcatatttagcaatacacttggcaattatccaataaattaatattgcctaatttttttatatattaaaagtggctatgcaacaacaatttttaatttaatggtattttatttttttattctgtcaaaataaactgaggtaattagctctcggttaacattttgaaaaaaagaatataataaattaaacccttaaatataaattaatcttttcaatcgcaatatattaaatcctaaaatataaattacttttcaatcgtttagatgatcttatacgattgattaaatgcttttattgaggattcttctacctccatctatggtgcaattctttctcctttcatttttctctggtttctacaaaagtaataactaagcacaaattccttaaagtttctaaatattctctgtttgttgggtacaagatttctattagggaaatttgaattttcatgcttaataaactcataaattggttttt

SEQ ID NO: 246864 - DNA, 810 bp, Cannabis indica
agggagcttagtcacatggagaagcaaataaaaaaaaaaatactgtggtaactcacaatagtgttgaagctagcataactgagggctcttgcttagagagtatgaactgttatggattagaggaacatatgaataattaaagcttcaacgaattgggcctttagagttgtactgtgacaataagtatgcaatcgacgtagcacataatctagtttatcatgattaaacatgtttgaagtattcaaacattttatcaaaggaatgattggaaaggagttataagtgtgtatattcctagcaaatgttaaccgaaggcaaaaggagtactgtttaactagctagtttgcaagctgggcatgtggaaatatttatgcaccagcttgagtgaggatgtagaaaatattttatatgtagcatttattcagtgttattattataaagaaacctagctgtataaatttagaaattattgtaattagattatactgttaaaggttagaacatctgtaattacttttgtatatttggtattaagtactagaatttagtgctgtacaaagatttcctaaactactaagcatgttttgttcatgactaagagttaattgacctttcttagaagcccaataccttattgtgttacttttgtttagggaaatttaaatggtatattaacttttgtcattttttctacaaaaatactgtcaaacagtatatttaacttttttactgtgtttttgtataagtttcatactgcactatattgtgttaagttttcacttgtgtactggtattttttagttgttctac

SEQ ID NO: 246865 - DNA, 589 bp, Cannabis indica
ttttttcctttagtgtcggtttaaaaccgagactaattggtatcagtgttgatttttaaccgacactaaaaggagtatttttgataaaaaaataattattaagtataaacattagtaattccaaaaacactaaacctatcaaactcattaatatattttctagcattataacgactgtaaaatgaacgtttcccatttttaaaaacctgttaaaatacataaaaaaaatatacaattctcataagaatatattaatttcacagctaatacaaaataaaaaaaaatacatacattaaactcaatatacaaacaaatcccagaaatatagttgctaaatacaaataattatcaaacaaaatcaataaaaattgaactaaaaattatactgaaatataaaaataaatctagaatctcgattttatggtacgcatggaccatggatgaccatggacgaccatcgtggagaaggggtgttgcacaaagaagaaggggtttgaggcttgggttttttggggttaggactcaatcgctggggagagagagatatatatggtctcagtttctggggttggggttggccttcgatgcc

SEQ ID NO: 246866 - DNA, 1185 bp, Cannabis indica
ggcataaaacccaacagttccaagagtgcagaacttagaaacaaaattctcaaagaagctcacaccactccataatcattgcatccgggcactaccaagatgtaccaagaccttaaaccctacttttggtggaatggaatgaagaagaatgtagtagaatttgtatctcggtgcctaacttatcaacagatcaaggttgaacatcagagatcggtaggtttgttgcaacctttgacacttcttgagtggaagtgggaggatatcaccatggactttttggttagattacctagaaccatgagtttgtacgattcaatttggattatggtagatcgattcacaaagtctgcacattttctaccggtaaaaataacctttacaatggatcaatatccagaattatatgtcaaggagatagtgagattacatggtgttccaaagtctatagtcttggatagagatctgaagtttacttctaagttctggcagattcttcagcgggctatgggtaccaaactgaaattcaatacagctttccatcctcaaactgaggaacattccgaaagggcaattcagatactgaaagatatgttacgagcctgtgtaatggatttcgagggctcttggaataaatatctaccactgatagagttctcgtataataacagttatcacagtacaataaggatggctccctatgaattgttatatggaagaaagtgtagatctccaattcactgggacaaaacgggagagaagaaatatctgggtcaagaatcagtgcaacggactaatgaagcaatagaaaagattaaagctagaaagcttgcctctcagagtaggcaaaagagttatgtagatctgaagcgcaaaaatgtggagtttcaggtaggaaatcacgtgttcctatgggtgtctccaatgaaggggatcaaacattttgggaaaagaggcaagtggcataccatttagctttgcctccaactctttcagcagttcacaatgtatttcatgtttccatgttgcaaaagtacgtttcagatcctgctcatgtgctaagttatgaaaatcttgagctacaaccaaacttgtcatacaaagaacaacccgttcaaatcctagacagaaaggataaggtacttcggaacaagaccatagctttggtcaaggtactctggagaaaca

SEQ ID NO: 246867 - DNA, 730 bp, Cannabis indica
aaactaagcggtctttacatgtgcactcacctctaggtgaaagacctagaatctatacaggaagtgaattaaatttgagtcctagtaatatggtggttatcaggtgcgactatccaatttaggatgatattttctatgattggtattgagagctaaatgtctagtggatggtgtgatatgcacgagtagcttgtatcttgtgattatttgtggtctctctattttgttaataaatgacgacgatgacgacgacgacgacgatgacgatgacgatgagatgtttcgtaagagccaaaccatgcaagagtttttattaaactactggtcctttaatattagttattttcttactgagctttataagctcaccccctatactttcccttctaggaactcaatttagtacttgtggatgggagagaatcgttggtggagaacaatgtagttggcttagtcctatcttaattattaataaattattcttttaaagaccaaatatgtatcagattattagtggatggtctgtatcatttaaatagctatgaacagttagagatgaagaaaatagtagatgttgtaagtattattttgatatttttcaatttattaatctaattatttggtatacataattgtaaaaatattattgttctatatatttagatattaaaagtgtctatctaacgacatttcttggtttaacagaatatacttaaaaataaaagaatat

SEQ ID NO: 246868 - DNA, 647 bp, Cannabis indica
gtaaatttctcggttgtatcaacttgcattggttcaagcgtggagtggggtgatcctctacttgagtagaagatgatggaacattagttggatttatttcttaaagaatttcctctaacactactttacttttgcggcttgaagttcttaatatagtcttcttcaaggaatgtggcatttggagaaacaaacactttattatccttgtcactataaaatagtccaccctagtctccttagaatttttgaaaaacatgtaaacttcaattcgcgcttatagtttcccttctttctttcttaagacatgagcagggtacccccaaatttgataatagcgtaaactaggtatacgaccattctatagttctacaggtgttttagggtctgatttagatgaaacgacatttagaatgtcattggccatctgaatagcatatccctagaaggacattgacagagttgaatagctcaacaaagacctaaccatttataaaattgtacgatttcttctctctacaactccattttgctgtggagtgccacgggcagtatattgcgattcaattccaactttaattaaatgatctttgaactgcatatccatatactctccacccctatcagatcacaagatctttaatgtttta

SEQ ID NO: 246869 - DNA, 512 bp, Cannabis indica
tgctgcgaaattttttggaattgctgctgcgaagaaggctgaagttgtgattgcaaaggagaagattgttgttgatgttgtggaggagcggcataactctgagaagacgaaccaccaggcgactacgattgactatacatttgaataaaattctcaaatcgtgggttatataaatgagcacattgtttaggcgtcaaattactcccccatgtggcacacatagttgagaatatttctgccatagtgctcatcatttcagaagttggcgaaggaggcagcgtcgactcactttgagtgaatgacttcttccctttgcctttgagccttttacccacgtctctttaatagtcaaatctttcgcctagaactgtttccaaaacgttgtactgatgtactagatgtatcgctctgggattgtcgttcaagtcttttcctattaagctccttcaccagttcctcctatttaaataaaaattattagaatatataattaatataaaatataaatttta

SEQ ID NO: 246870 - DNA, 625 bp, Cannabis indica
gtattaaaattaattaatcttgatacaattagaaaagaaataattttctatgttagtaatatttttctatagaatgttcttactaataattgattttaatataggaaaatactatgttgttgattctggctatccgaatatgccggggtttctagcaccatatcgtggtgaacgttatcacttgcgtcgttttagaggaagagggaatcaccccagaggtgcaatggagttattcaattataggcactcatcattgcgtaatgtgattgaacgttgttttggacttcttaaagctagattcccaattttgaagtcaatgcctccatatttgcttggaaagcaacgtagaataccaatagcatgttgtgctatccacaactggattaaaatgcactctattgatgatagaatgtttgaccaatactctattgacgccacaccattagaagatattgaaggcactcaaaaccaacaaggaggagatgaaccagaaatttatcagacaccggagattaattttagtcaagcttatatggctcagatggaaaatgtcagagatgacattgctggacaaatgtggcttgcttataacaataacaatagagcatagctattttattttttt

SEQ ID NO: 246871 - DNA, 875 bp, Cannabis indica
actcatgggtggagtagggtcctagaaaggtaccaactcacatggagagtaggtattttctatctatagtagatgactattctaggaaagtttgggtatttcttttaaaacataaaaatgatacttttgctaagtttcaaaatgtgaaaaccctaagggaaaacttgactaacaaaaaggttaagactctaaggacagataatttcttagagttttgcatgatatgtttgacacatattgcaaatgggtaggtattcaaagacacataactgttagaattgccctacaacaaaatagagtggcagaaaggatgaataaaactatcataaacaaataaatatgtatgctccttttcaagctaggttggccactagtttttggggggagcaacacttacaacaacttacttgataaacagatgtcattcaagtgctatggagttcaaaactcctgaagagagcaagttcgctaaacacccagatatgtcccatttaaaggtatttgggtgtgcagcatatgcacaccaagtgttggtaagatagagccaatagttctcccgtgatccgtaaggggaaataccaggtgtagtggccaaaaattgctctaagcccaacgaaaaggcccaacgatcgaagtacttacgaagcccacttataagtcagaaacaaggaacccgtaagcccaatggctcacatgggccatgcccaatccatgctttttgggtcatacccatattcgaatgtccaacccacaataaagcttgattttaaagtgtaatgttagggttgacgcgtggaggaagaagaacgttaagtttcccaactaacccacaaaatagcaatcttccctagcatagcggagcgagaatatcaacc

SEQ ID NO: 246872 - DNA, 1865 bp, Cannabis indica
tcactattgatctatccaccgctgggggcaaactatggaacgacttatagggtcgtccagtgaagaacatcactaagttcagcaagagggcttaggcgttcgtccgaaaagaggaatcttgaaaagataggaacttgctgaaagcaggcttgggaggcaaacccagcaatgtttcaacaagcactgtctcaactagagttgataactaaggggcctctgcctcaaaaagaaaaaacgattctaaggagtcatccaaaggcaaaaagaagcaaaagaagcacgataaatatgtgccaatttatactattatatcgagcttaatgaaactcgagaaaatatctacctggcgcatgagcacaaggttgccttcaacaagcttgagcccatgaggcatgcgaggcacaaaagagatcctaccaggtattgcaaacacaataaggatattggcagacgagtgttgtcaattgaaggatgtgatagaaagtctcattactcggggccactttaagcagtatgtaaagagacagggcaatggacatcaccagcccagtctgcctaacaacccaaacaaccaggggttacaacctcctcctagagaaggagagtacatcttggttattttaggaaggccgcacattgctggagagagcaataacgcccaaaagagatatgtgaaagaaataaaaaatgtgcagtcagtatttgctcctaaaccttctaagaaggtaaaaactgaagaatcttcaatcatattcttggatgaagatgagaagaacgtgaggtatcctcacgtcgatccattggttattactatccagctcgccaataaaaggacaaagaaggtgttgatagacaacgagagttcactgaacatcctttacaatggaacgttgaagaagatggggctcaaaaaggccaaattgaggccttacatggtaaatctatgcaatttcactggtgacagtatcgccagttagggcatagtcgatctcgcactaaccttggtagaggcacccctatctgccacaattatgtaagactttctggttgtcgacctgccatcagcttacaatatattattgggtcgaccaccattgatcagactaggggcagttagtttgatcaagcacctatccctgaagtttcaaacagcagagggtgtgggagtggtgcgaagcgattagatgctagctcgtgattgctatcgcatacaggtacaacatagaaaagttgatcaccagttaatggcagtcttggcagaagaaagtgaaaagaagggtgaagatctagatcctcaaattgaagatgaaaaaaacttgttaaaaccaatagaagaattggaagaagttgttctcgacccaggaaatcccacaaagtgtgtacattgggaagaacctagacgagcagttaaaatagcagctaataagtttcttaagggcgaaccaggatcagtttgcctagagtcatggagatatgatagggattgacccttgttatcccaatttttgcactctgacgtggcatcacacggtggtgacacgtggaatcaacctcaagtatcttctcagagagtatagcccgagcaagatgccttgctggcatacttgaagcaaaccgatcagcgatccgcacagaggaatcaagacttagcgaattcagctttcgcattatgagtcatcaacgaaatcccaataactcgaggatcagattacagggatatggcatacacacgatcccgcgattagtgtatacagcgtcaatcccacgatctttgtactcagcataaatcccacaatcttttctgtttatatccattataacgagaagggaaacacttcctctccaagtttatagccctataaata

SEQ ID NO: 246873 - DNA, 772 bp, Cannabis indica
ggtatggcgagagagggtccccctgccttattccacgagatggcttcaaatctctaagaactttaccattcaagagaaaagaataggaaactgattgaaggcatcgaagaataaggttgacaataatggttccaaaccccattttcaacatgatctgagcaatataattccattccactcgatcgaacgctttggacatgtctagcttgattgcagcatacccttgtgaaccccgttttcgattcttcagcgagtgcaacaactcaaaagcaatgagaacattatcagttatcaatcgttgagacatgaaggcactttgatattcagagatcaccaatggcaagaaaggttgcaatcgcagcacaattgacttagaaaccaatttatagagtacgttgcacaaactaattggtcgatactgagttataaactgtggcttcttaacctttggaataagagtgattattgtgctattgaagagagtaggatcagcaccattgttgagaacttccaacaccgattctgtgactaaagtccccacaatattccaatagttggtaaagaacatgactgacataccatctttcccagggcttttgtcatcactcattgagtggagagcattatgaacatcagatgctgtaaatggcgcagaaatggtatctcttgcattctcatcaagcattgttgggacaacttctaatattgaattaatggcatgatcatcaacttgctggcttgtgaaaatggattgaaaataatctgaaattat

SEQ ID NO: 246874 - DNA, 660 bp, Cannabis indica
ttctgtgcttggagcccccctcccgcgtcttggctatgctgcaactgtgatattgcgtctgatggtgactgtctaatagcagcaaccattgtctgaaatgatcaaggaacaatagttgcaataaaatctgagaatcgtcacatcactaaccctttgataggtgaagcttacgcggtgtgtatggcagctgaactaatggtggaaaggaagattgaacgtgtcgtcttccaatgtgataacattaatgttgtcaatgctttctcgatggagacagaaagggggatcaacttcaacttagttcacctcagaaggcgatttcacaagttctgcaaaaatttcaagaactgggagattgggcatgtcccacggaattgcaacttcatggctcataacattgctaaatgggcgagacagtttcgggtcactgggctcattcgaagcacagaactggataaatcagtgctggatgactacgttgaatggaagaaacatgcaggttaatctaattcatcctatggggtaccaacggcagcatgtcaagctgtctgattctcctttttcttatttttcttcagttagttagtctaatgttttgttactgtctgttttttttttcagttttctttatggcctcttaggctttgttgttttttatggttt

SEQ ID NO: 246875 - DNA, 849 bp, Cannabis indica
ttcaacttagttcacctcagaagacgattccacaagttctgcaggaattttaagaactgggagattgggcatgtatcacggaagtgcaacttcatggctcataacattgccaaatgggcgagacagtttcgggtcactgggctcattcgaagcacagaactggataaatcagtgctgaatgactacgtcgaatggaagaaacatgcaagttaatttactggggtaccaacggcagcatgtcaagctgtctgtttttccttttctaattttcttcagttagttagtttaatgttttgccactgtctgtttttcaatttgctttatggcctcttaggccttgttgtttttttatggttttgaactctgtattatctttttccgtttaatatattcctggggtgtgctaacacccccaacttcatcaaaaaaaaaagagcattgctacttatttcctaggtggcaccctacgattggttagctatatttcctaaatcataatttttttaagttatatgagatctgctacttaattacactaatggtgataccaagaaggattgccttttagcatctcataactaaaatatcacatttttacatatatttttaaataaaaaaattaaaaaaaaaataatcacttttctaaacatattaattaataataacaaaacaaactaatgaatttcctctattgtcttaaaattattaatttatatattactaaaattcttgttttaggttggttcatattattaagttgtataagctgtaaaagttattttaattaactaactagtatagtgtttagctgattggaatgttggtagaattggaatgactttttctaaa

SEQ ID NO: 246876 - DNA, 683 bp, Cannabis indica
ttttgccttcatatagtaattaaactaaaatgacaactaaatgtttatatgatctttagaggattttgcaagtacgttattcggatttctaatgtagttgtacaatagattagttagataatctggttaaaatagattagtttacttttgtctctggcatgtatagtgatttagcaagtatgtgttaatgaatggttggagtcctccttcgcttgattggatcaaactgaattgtaatattagagtaggaatggaggctatgtgcattgctgttgttgctagggatcacaatggatagttttgtgaggcgtttacctcaagacttgattttatagatgctctgtgtggcgaggtggctacttgttgtttggctttggagaaggcaacgaagaaaaggcaaaattttgttattgtcaaaagtgattctcgggtggcaatcaattctcttaatggaatggaatctcgatgggaaattgaaaactactcaagacattgtttaagcacttcttctttatttgcagattgtaatttttctaatgttgctcagtcttgtaattattttgctcataatgtgactaaatgggtttttatccacaatcgatacaattatttggaggctttcgatttaccttcgaacctattatgtaatgacctagtggtctaactttcttattaatactaac

SEQ ID NO: 246877 - DNA, 1000 bp, Cannabis indica
tagaagttcaatattaggttgttaaattaacatacttgcaaatagatctaagatcctagataaatataataccaacaaaacttccttcccaaaccaattcaataaacccagaaatcatacaaacatacacacataaacacataaacacaatatagaaaattacagaaaaataaaggaagagaatacaccagatttatagaggttccccaaaaacaattgctgggtacatcatcttgagctcgcctcagatagctcgattccactataattcttcaaagatcaagtgtacaaagttctggattccaaaaaataaaggtacgattcggaaatcccctttttaattacaatatgtgtttctctcttttctctctatttttccctctctgagtttaatctctaatcatcttcttctcctgattttgcatgatttgatccccctggtttggtgttgaacattcgagccctaaccctagggctccaaactcacccaatgtaagtctccttcaaccctttaacccctttggatttgatctgtgtaatttctgatctggagagaagaatggatttctgttgtatgttctctgctctgttctgttctgtgattgagattatttttgcttttaaatctgttgtagtagtggaatacagagaaaagggttagttaaaaagtgtaacaaacttcttaactaacttgctgatctgtcctaggtatttagaggccaaaggccacctagtattttcactgccttgtaaactctgagtaaatgttctggttttacagtgtacaggtaatatggggtttatttcaacaatttccacctaaaccccatatgaactgtgcactgtaatctctatattatttgagtgtatctgagggtcttagctcaacccattaagggttttaccaacctgtgtcaatccccaataagcttaagcaaagcttaaacttattgagagacacaacctttgtgcccatgtctgctggattcacttcagtagg

SEQ ID NO: 246878 - DNA, 910 bp, Cannabis indica
ataaatgtatgaaattaaccgtttaaatcctagcattggcattgtaaattgttgtcttatattattacattgtatattattatataaagtaataataattaaatttataactatttagatatcaaaaacaccaatttagggtgtattattgaagcaccacataattattgagttttcgttgattttctttcaaaatcctacttttgtccccctcaaaaaatttctacattttagcatgcataaatctttcaaaatagaattagaatatataataggacattaaaaaacaaaaggaataaatataataaaataaatatttatatattattgggagatggtgatattaagcaattggatttgatgatgatcattgatgatgacaacaatctataaccacatttggggatgaatatagcaaccactactccattgctaaaccccatattccaaagtgatatataaatatatattgtgaaaatgacaagtgacaactctttctatctctctcaataaccatacaaaaagaagagaaaaaaaaagaaaaactaagtgtcatcaatagcaaaggcacaccaaattgagggtccctcgagctcttctctaaaccaaagtgtgccattgttttatttatttatttttcttttaacaaatattattggtatgaattctaaataaaattgcaataccaacgtacgactgattaaggatataatttgagtaattgattacctttggcatgagttgtgttttggcttcaaaagtcactttatacccaatgccttgctaggttttacttttactcactaaaagaggtttttttttttattttatttgtttattttgaaatcaactaaaagaggttttgagcatagaaaagtgagatgtctaattaattcagaatttgctataa

SEQ ID NO: 246879 - DNA, 611 bp, Cannabis indica
ggtgatgtggcggtctaaaatcattctaaatagctttaatttattctctccttaaattctctcaattatttttaatttttattaaattaataaatattaatcaattaattaatcaattaatattaaatatctacttaaattttttaaaaaaaatttagcattactaattaataaaattactaaaatatcctccattcttatttcgataaatatatattatacatatatattattttaatttattactcaattattaataatatattatatataattttaaaaaaaaaaattcaacatccgccgcgaagcgtaggttgtttactagttaggcaatatagctgcccttatgcggtgttttatttgtttccctatgatagtttagatagtatatttatttttaatttatttattaattttattttatatttattgagttattattaatcaataaaatattatgaacatttaaaatgataaataaaagcataaattttaaattattgaatacatgtacaattgtctatactatacctcttacaaaaataaatgaatttgtattttattttttttaccgaaattttcgaaaaatagattaattagagcttaaggaa

SEQ ID NO: 246880 - DNA, 757 bp, Cannabis indica
gctgatcttgttcctttttcttattgtcattaaaattggttccgcctttcttagattccctcctagcagcattttccttccaaattttgttttcacttcacttagctgtaaaagccatttggacaattaagcataattgaattgaccccttgacacaatttctacatcccgagcaatcattggttttagacattccataaatcgatgtgcttgcactctatcagtaggtaccaaatttggagcaaatttttcagtctatcaaatttttgtgcatactcagtaacaataaggctcccttaggttaatctagtaaattcatcaacctttgctgctaacactgctgagttataatatttctcattaaagacccttttgaaatcatccagttcatagtatttacatcctttgtttgttccaccacctccaaccagatacgagcatctttccacaacatgtatgatgcacacttcactcagtcattcccatcgacctttagcatctgcaaaatattttctatgcgagtcatccactcttcagccaccactgggtctatgcctccctcaaactcgggtgagtgttgttttcgaaatctctctactaacatctcatgtctagcctttgcagcaggatataccacttgaactggcggttccagttgatgtctcagctgacgaagttcttcattttgcctacaaatagtttcttccagtgcagcaaagtgctcttcccatccctatggtggttgtggtggttcatt

SEQ ID NO: 246881 - DNA, 1344 bp, Cannabis indica
tcgagcccattccatttaatttctttttagtgtgggcccactcaaacaagaaatacttgatgactcatgggctgatccaatgggaccctagtaaagcccatttagatgttttattttggcctggacattacaaaagaaaacaggtgctaatgaatgagcaatcccacgtgatctcttccccacaactatgtttcttcatttacaatgatataccttcttcctcccttcattcatggcggatgaatgtttttcaaactttttcctgggcttctgttttaaaagtagcgataaaattgctaccgcagctattccaatctcgtcatagtatccttattcgatttagacagaagagaactcgagaaggctttacttttgacaaaggaaaatcaagcatttcttgttcatggggacaatttggtctgagcgattggatatggaagacgaaaatactcaaattttttgtgtggatttttgatagagggcgtgaatacaccaaacaaaagcatgaatcaaagcttcccatgaatgactcaactcaccattgtgggactggctattttatgctctcatctaggtgcaagggattatgcttctactggattgttgacaagggatggccaacgaatatttgggcatttactcactggttcagtcaccagaaattggagggaacaaccgacagctgctgggtttttgatagaggaagaacgaaagcagtgtctcgacctaccgtggtaggaaatacgaccttgctcggctggtttttcgagcgaggccggcttgttgaatggtgttttagcttgaacaacttgctggcttggttctttgacagaggtagagcaaagtttaggactacacgcattgaagttgatcttcttcaccttgaggacaaggtgaatttcaggcggccggtattgttaggccttaggataaataaaaagggtatatgggtcattgtaagagggatattgagagagtatatataggagagtattagaagagttttggggtgtgaatgattttagtaagtgagctcttagctcttgggagagagctgggtctctcgaatacccagcaaccttgttatcttttatcctctatatcaatatatcatctctattatctctattttgctactgttagtaccggaatgataggaaattcctatcagttaattctggtttacatacccaagcataaccatattttttcttctatatattactgttagtcaattggtggaataaaattatggacataccacaagctccattatctgtatatttttagttatatacaagtaatttaattatattacaaaaaaaaaatgtgcaaaaaaaacat

SEQ ID NO: 246882 - DNA, 1545 bp, Cannabis indica
aaatattagaaataaaaataaaagtaaaatgaatactaaattacctttttttatataagaataaaaattaaaatatagataatttgtgaatttatcacttattctaatatttataccaacaaaaataacatcgtaattaattttatatcagacttattataatttctacactattatttactaataaaaaaataagaaaaaaaaattagcaaacaaaattaaaaaaccaaagagaaaaaagataggtaaaaaaatgtacaaatgattaaaaaaatatatatttttttacaaaaaaaaatagtacatgagatgatagagattttttattaaaaagaaaagaaaaaaattaaaaaaaaaatggtcaacaaaattgaaaagaacaaacacatgaccaaaaagataggtaaaaaagtacacaaaaactaaaaaaacaatatttcttctagaaaagatagagtacacaaaaacttaaaaaaaatgtgaatttttttaagaaaaagatttatattgcttggaggtgatatcatctaaataagtatcacaattttcataaagtgaagtatttcagttttgtttagatgttattttgataaacattcaacatctcacagcaagaaccttgtagctacccgcaatgtaattaaggaccttgtagctactcatagtattaagattttgcattatctcatattacacaacagtgatgaatcatctcatataacacaacactgatgaatcacttcgtaagaaatagtagtgatgaatcacctcataatgtacaacagtgataaatcacctcgtaatacacatcagtaataaaatattctaacatactttttatcctattttttatttttctcgagtataaaaagtgggataaaatgtctcatttcttgtaatttggagaccaaattttcgatggtagaagtacgttgccattaaaagtgagaactgtaaaaagtgtgagacaagatcaggagaagatattttgtaaattgttaatagttataagtataaaagtttacatacaggtgtaaatgtattttgataataaaagttagctttttatatatttttaatataaaatattcagaaatatatacaatattttgttttaaggatatataattccaaaccttgtatttcgattaattattaacttaaacactacaatattttaaattaattatgttggacttaatgttttatatataagaaattaagattagaacttttagataaatacttaaatgtaaccaaggtacctttacttaattttgaaacacaaacagtccttataattgtttgggagagagcaaattattaagcaacaactggagataaagtgggcaaagtgaaaaatgtgaaagtattttaacatttacacattacatatatattttttgaataaagttttttaatatattgataaaattgaattatatatataaagggaaaatttttaatttcgttgttgttttggtaaaactttacaaaatataacattttttttgaaaaaaaaaaatatattttatgggaaaaaat

SEQ ID NO: 246883 - DNA, 4083 bp, Cannabis indica
tggacataacttctttgattgttatttgagggcatatggtgaagcaagcttccattttacagccctttacggggctccaaatgttcaaaacagtgccaattgttggacacattgaaagtgatttactgatgtttctcccattcaaccatggttatcaattggagatttcaatgaagttctttctaataacaacaaattagggggctaccttagaaatgagcaacagatggaaggttttcgaaaggctcttgaccatttcttgcttcatggaaccccttccgagggggaccctttcaattggattaaaaatcgatcaagtgtggatataattaaagaatgcttggattggtgttttatgaacaattattgggtgaaccacttcgacataccctaaactcaccatcttgactactaccattcaaaccatagagcgattcttgctctttttgcaccaataggcaataggtcacaacaggaaaaaagatgaagtcaattatgctttgaaaaaatatggttatctgaccttgaaagtgctgaaattattgccaatagctggaaaatatggcacatgtgcaaccaacttacaaagatggcacattggaaaatatggacaaatgaagaagcaaattgtagaaactcaatcaatagtggcagctttgaataacctcccttctcgaactgatgacacaatgaatactttgaagcaagctgagaaatacttgatgatctattggaacaagaaaaaaagtatattagtagcagcgatcatgtattgactggctgaattcaggagatcaaaacactaaattttttcattctaaagcttcagcaaggaaatctaataacatagttaaatttcttcatagtgttgtaggggttccgatcgctccaaaagcatacatggcagctactatacaagactatttttctaccatttttatagcctcagcaattgatgaagatgctctctctactactttaaatgcaattccctccaaggttacaccggcaaagaattacaatcttactcaaccttttcttattgttgaaataaagcaggcttttcattttatggctccagaaaaaagcctaggtattgatggaatgtctttgatattttaccaacaaaattagcgtgttgtgggagatttggtcactaaggctgttttaaatattttgaatgatgaagctgatccaactattttgaataagacacttatcactctcatacctaagatcaaaaagccttagcgactccaagactatcatccaatcagcctatgcaatgttatttccaagctaatcactaaggtacttgtcaactgattcaaagaagttctccctatggttatcttagacacgcaaagtgctttcttgcttaattgtttgatcacagacaatgttcttgtagccttctaactgatcagtgctatcaaaaacaaaataacgagtggaaacgacattacttccttgaagttggatatcagtaaagtatttgatcatgtcgaatggcatttcattgaaaaagtcatgcaaaaatggggtttgaagatagattgatatctcttattatgggttgcttgactacaaatagtttctattttctcttgaatggggaagtcacgagttcgctaactccaacaagaggccttcaatagggttgcccattatctccttacttaattcttatttcctctgaaggattacaaaggttgttgcagcaagaacagaacattggtcaactaagtgggttcaaacttactggacatgctccaccaatttcttatttattttttgttggtgacagtctcctcttctgttaagcaaacgagagatcttgtctttccataaagagagtcatggatatttaccacagagcatcacgtcaagttctcaactttgacaagtcagtaatgtcatttttgccaaacacaacgctagctacccatgttttctttcacaaacaattatcaatgccaatttgtgagttccatgagaagtacccaggtctgccttcatactctgggagagataaaaagaaatttttcagcgacattaaagagaaaatatggagactgatgcacacttagagtgaaaagatcttctcggcaggtggacgtgaagtgttcctcaaagttgttgtctaatcaattcctacatgcgccatgagttgctttcgcttgccaatttatttttgtaatcaacttgaatccatgatgtctaatttttggtggggtctataagagaatggcactaaaatacattggcgctcatggaacctattgtgcaagagaaaggataacggatgtatggaattttgcttgtttgtacattttaatcaggttctgctcgcaaaacaagcttggagacttcttactcaacctgactctcttcttgccaagctgttgaaatgtcgatactttccccatatcactttccttgaggctaatcttggacactccccctccttaacatggcaaggcatacattggggtcaagaattgctgtcatcgggtttgagatggaaaattggtgagggttgtcgagttaaatgtggtgttgacctttggatcacaggacactccactttttaaccaatcttctattcgggtcctttggatggtgtggtttcaaaccttaaaactgatgatggacaatgggatgtcacactcctaaatcaatggttcttcccccttgatgttgatcgtattttgacaatacctctgggtttcttcaggtagaatgatacacttgtctggcactatcactcatcaggtttctactcggttcaaacaggttatcattatgcagcatctcttgaagatattgacaatagctcatgctcctcttcggcaaaccagtggtggaagttctttaggtcactccagttgccactaaaaataaatttttttcttagcgtgcttacaatgatgcgctacctgttgctacagttttgttcagaagaaaaatcatcacagatgcttcttgcaccatttgccaccaagcatgggaatctattggccatgcttttttcagttaatatgcaagagcaatttggcgacactcaaaccgtgttcttgattggtctaattcgtccacaatgtgcaagggtgactatttagttcatttgtctacagtatacacacaagctaaaatggaacaactatttttcaccctttggtcaatctggtcggagaggaaccaggtggtacatgggcacaaggcaaaacctgccaaggagcttgcactttttgcaaaaaactatctgcataattttcgcccagcacaagcaaaatccaaatacaacaatggcacttcagcacgaccattctctttggcagctactaaaccagtcccatggacaccaccaatgcttagaaacctaaaattaaatgttgatgtagcagtcgattcagcaaaaaaaataattggtgtgggggctgttattcgtgacacctttgacatgtaaaagatgccctttcaaaactggttgttggtaattttgcgactcacgaaatagaggtcgtggcgatgtttcatagtttaaattgggcacttcaactcaatttgccaattactcaagtggaaacggatgctcttcgtgtctccaatgctttatgcaaatctacattttaattatcttccttccaagatttaatttcagatatttcttgtcttctttccttttccctaatgtgaatgtaagtcatgtcgaacgaacaactaatatggctacctatggattggcaaaatttactttaggggtggatgaagcttggttttggtcggttgtattcctccgcctataaactttgttgttgtaaatgacttatcatcttaatttataacaacaattttattctaaaaaaatcacaacaaaataaatggggatagaaatctagtagtatcatcttttaatatgaagagtgctaatgtcaactttctattacaactatttagttaatcttcgtactcaaaaatatatgtcttatttttttttaattttttttatggcggtgttcgttatagttacaacaccatttttatacatttttataaaatttgtagtgttaaaaatatatt

SEQ ID NO: 246884 - DNA, 739 bp, Cannabis indica
gagctgatcaattcttagaagtacaaaaaagtccttagggcaagccttgttgaggtcagtgaaatcaatacatactcgccattttttatttggcttgggcaccattacagggttaaccacccaagatgggtagaaagcttcaatgatgaacttattctcgcgcaatctctataacttttctttcagtgcttgcgcccggtctttgtctagcagtcttctcttttgctggacgagacaaaagtttaggtcatgtttagggcgtgagacatcacgttggggtcaatatcaaccatatcctcatgtgaccatgcaaaaatggccaggtttactctcagaaattttattaaagctaattttatttcgagtaaccaacccataccaattttgagtttcttggccaggatatttaggtcgatttccacctgttccagctcttcaattggcccaacatttgtgtttgtctccccaagtcagggatccatgtcttcgtccccgcctagggcaacttcttattgggcaatgctctttcccttgcctgaactctggctagatttattttccttcgtgaccttagttagagcaatgttgtagcattcccatgcaattctttggtttcctttgagacaccccaccccgctttttttttttttttttttagaacttgacgcacagataaaaaactgatgtaacacattttaagtcatatagggctggtcggcctagcatgacattaaaagct

SEQ ID NO: 246885 - DNA, 692 bp, Cannabis indica
tgggttgtcgtctgatagttacacacattatacaaaaaggcttatggccctatagttagggcaaaaaaactaagtattagttatgtaatctctctattaaaaagattaattattaagaattagtctttttttggacctagccagatcaacctattatttttagttacctataaatagaattagggttctcttctaatagaatccgaatttttgtttttaagtatatgcattgcgaaaattgccaaaaactttaaacaagtttattcattcctttcgataaaagcatgaaagaaccatttttacaaataatttatgttaaataataaatacaatttaattgaatgtcactagtaaacaatacttcatagtgtatcatttaattgtgtgtaaaaaagctaatttcataatgtgtcaagtcaattctcaacttacttatgactttgacacactatataatattatttgtatttgatttccataaatgtcacattaatgagatatggacttgttaggcagagctttctttgtcttaatttatttgctcaaaattaaggaatgaaaacccaaccctattttattaatttggggtaagttttaaatttttctttaataaatttatacagctacttaaactttatatttgtttggacattaattaatttctcctttttctttgtaattaattgaagctt

SEQ ID NO: 246886 - DNA, 1349 bp, Cannabis indica
agatttttggaaactaattaattagagcttaagaaagatacgaaataataaattataaataaataatttttacgtggtttgagcgtagataatccctagtccacgaatctattgtattagccttgctagtgactgtttgaatattacaagtatttacgacataaacccaaaccctatattcctttatttctcttgaagaagaagaaagctagtaggaattttagcagcagtttggtacgtaagaaattgttcaccctttttatattaaaaaaataagggtatttataggcacatgtgaataagggcataccctttacccacctaggatttcttactcaacatgccacaagggttgatactacaacattatgatctaaccgttggtcgatatgaagctttcccattgtgtggtgcatgactactataaggaatttcgtgggagtgaggacacgtatcgcttaaaggttttacctttaaaagttattgctttgacaagccgtgggacaaaaagggggctttagaggcacgtacacatactatcatggtttgacacaatggacaagatatgatttggtgtcagaagatatgcagcctttgccttgagctctagacaagatacaaccaaatgaattccacaaccaccaggtcatagctttttcggatcaaactaacctgctaccctcctagaatatttgtagcttctaaggactctgatccttcttaatagcggatgaatagtggggttcccaaagtccattctatccttgctaatatggagaaacttcgactaactcatagaatataacttcttccatgatactaataagcggaaggtacacactaattgtaaatagtccaatgtggcacccttccatgattgccacatattaggtatccgggaatatagataacacaactatattacacgtgtcagcaccatatactgctcaaaatatagcgtaaacacatatgctttaagattgagtcccttttcacaaaattcatgttgggatcttttgttaaaggctaaaaaaattaattgaaaaaatatagtcaaacatctgtcattttgggattagatcaacttattttaaccaagctattcttgctaagcaagctttgagagtttacaaaaatcctaataccctcattgcccagttgcttaaagttaaatactatacccatacaagtttcttagaagcaaagaaggatcactctccatcttctacttggcaaagccttatttggggaagggaactcttgagtaagagattgatttggaaagttagaaatgatcattaaatttaaactctctaagattattagatccctcatataaggcatcactt

SEQ ID NO: 246887 - DNA, 674 bp, Cannabis indica
agtcagcgataaagcttacttacaccttagataagtgttatgttcttttcaggacattggcaaagtatgctagtatcggatgtatggagtatacattggactgggaccgatattgatcttggtaaagataatataatattatcgttttgtgacagtcgtataggcgacggttatagaaactgatgggaatactttaaacgaatgtttaaaaacgtcgagaaaaattacttttgcagtagtgtttgtatcgaagaatttttattttattttattttttttcaacaaaagagatatggtcaatttggatgtactgtgagaaaaaataactgtagctgtattatgagaaaatgtagctacaacaaaattgtgaaaaaagagcagaactatagaaaaaagctaagtagagtatttggtaaattatcaattttaaaatagagtactttgcggcataaccctcataagtgtttagtttattgcaactaatccccaattttaaaattttggtggtaaaacctcctaaactcatgttctgtcagcacttagccctttccatccatttttaggtgttaagtgccacgttgtactatccaggtgtacacactgtattgtctacgtggacaatatgtacacatggaacaattttattggtctacataaataaatattaaaaaaaa

SEQ ID NO: 246888 - DNA, 878 bp, Cannabis indica
taattttttttttaaattttctagtttggtatttctaaaatggttgcagcgctagttgcaataggggtttctatacaattttttgttgcgatttaagttgcagcgctagttgtaatagatgtttttatataaagttccgtaaaaatgcatattatgaaaaagaagcaaagacatttcattaatctgagaaagttgtgttgaattacaagaatgaaaacagaggtatctatatacagagagatcactcaactagatgcttagctagaataggaagttagttatagcaactaacaaataacatagtaccgagaaagagggaaagaagtttactgaaataactacttccctatacaacagtaaaaccagtaaactgtataaactaactaatcataattcctaataccccacctcaagatggagcatatatgttggaaatggacatcttggatatgtgattagtaagaaggggagaagtaagaggcttggtgaatgcgtcggctagttgaagtgaacttgggatagggatgagtctgacagtagagtttttgattttatcacgaataaaatggcagtccagttctatatgtttggttctttcgtggaatgttggattatttgcaatgtgaattgccgactaattgtcacaatatatgaaagcagggtgctgttgtggaatctgaaaatcgtggagaaggtattgtagccatgtgatttcacttgtggtagcagccaaggccctatattctgcttcagcagagctcttcgaaatggtgggctgcttctttatcttccaggatataaggctgtctccaaagaaaaaatgcagtatccagtggttgagcgtcgagtaacagggcaagatgcccaatccgagccag

SEQ ID NO: 246889 - DNA, 1063 bp, Cannabis indica
attaaacctcttgacgaaagtgcagtcgaactattataactacctaaccaaacctttttgatgagaaaggggtcaaatcgttataagaccttgatcaaacctttttgacaaagaagggattaaacaactataattttttatttataacctatttgacgggagaggaaaatcaaaagttataactcgcaaataaaactaaatactaacaggtctcgcgagctaggaaagtactaaacgaggcatcacaacgccttgataaaagtacttaatctagaaaacgaatagataatataactattcatgcgatcaaattaaaatacacaaagtgataaaatccttaaagtatatttaagtttgcttaaggaagattataacttcaattgcgaggcaaaattgacaaccgctcgaaaatcataaagtttggtagattactaactacttaaacaagaagattacgaggaatggaaaaagtcaaaagtatatttgatcaaaatatagttgtttacatagtgaataataatgcaagcaaatacaattctattaagttcaaatgaaaatagtacaaggcatttaagataagaaaaacctaagattggttacaaacttgtctttacgaaaataccacaaggggcaaaccattaagtccttctcctaaacgaataatgagaggggaagccaatgaactcgagaaagaccgtctgcatatagcttgaaaaggaccgtctacacgtagcccagaaaaagaccgactacacatactttaagaaagaccagctacacgtagagagccttgatctctgcacaggcctcattcccctcatcatcagaagatcccatttcctgaagccgagatctatttcccagccataggaaatttctaaacaaaggagagaggctgacgcaaagatctcttggcacaggttagggtcttgagttggctggattctcttatagaaaccacaccaacttccttcccatatccacatgaaaccatgccaatcttcctctggaattcttcactagcctgaggaggatctttgagatcgctcacaagatctatacc

SEQ ID NO: 246890 - DNA, 614 bp, Cannabis indica
ctccagtattgatttcggtctcttaaattcgtacttctttttttgctgtttatttccttctgaattgcttgacaaaattaactgaagttcactccttatatagccattgagggactaaaaagatataaaaatgcacatgctgaaaatcttattttgcttaggaatagaaaatctattctgtttaggattagaagtagggctgtacataaatttttgtaaaccgtccaacccgaacaacccgcccaaaccaaaccgagataacccgatgaaaaatacaaaccgaaaaacccgacgaaaatataaccggcccaatctaaagattgggcgggttgaaaataatattaacccatccaatcaacctgaactaacccgaccaacccgattaagagagtttttatatatatgtttttattatatataatctatatattatataatttatatacatgtttataaaaaaattgaaagttcaaactaatatatttctttttatggcgaatgatttgaactttaaattcaatctttatatttatctcattaccacaataactaaaatataacaattgaatgtgaaaaaaaaataaacattaatgctcagtttagacgggttaacc

SEQ ID NO: 246891 - DNA, 834 bp, Cannabis indica
gttctaaaaataatgaatgaacttttactcatagtcctacaattgcataatgttgagtctgtttttgcagcttgttcggattcatagtcctacatatgcttatgttctcagcaaacatatacttttggaggaaataccaaatcaattatccattgatatttggtttgaaacaaggaacagatcttggctacagacaagtgtttcttctcagtgcaggtctttctgtactctctttaggtgctgtcatatcaaatttggatatgaaaatcgacccgagaacacgaagcttcgatttgttgcctgaattagtccccgtgggactcgtcgttgtgagtatttgcacaaaactcattcaacatattaaaagtcttttgttgtgtccagtccactactaaaattcaaaatctttgcaggctctgcttgtgatattagtcttgcctttcaacatactataccggtctactcgctatttccttattgtatctgcttttcattgtctctttgctccactctacaaggtaataatgggactaaaatcgtcaaattagcagataaaattagggctcgtttggtagaccgataagagttatattgtatgacataataaacctggacgtggatccagccacggttcaaggcagggtcgggattggggtcaaatttatggaaaaaatagtataattttaaacaacatattaatacaagtcaatatcaaacataatcttgtactaaataatattaatactatacaatacaatgcattacaacacagtgtaccaaacgagcacttagtgtattcttaaaccaggaaatacatattaaaaactcttttgt

SEQ ID NO: 246892 - DNA, 555 bp, Cannabis indica
tatattatgtgttggaggttgtattatatcatatacagtataataaacacataaacgtcgaaacatatgaggagttacaaatctaaaaatagattgtaacttaagaatcacatgtaattaagtgactttattacatatagaagttatggaatccatgcgataagtttcttgttgttagaaactgctacaatactcaattatatcatttaaatgagtattgggacgttggagaaagatttaattcggagaagaattaccaaaactaaattctgaattttctagaaacagttatttaatggttatttttatgttattttatgattgttttacgaacacttggaactatttttaaaaacgtccataaatgtatatgaatcgattgagcatgtttccagctttcttgtccaacgttttcatcccattaaacactaattaaagtgtgggtaacagccatgtggtgaaaaagactttaatttttatatgtgatcctcaaaatactataaataaaggttttgggttcattttgtaacatcccagagttgttttccccatgtc

SEQ ID NO: 246893 - DNA, 595 bp, Cannabis indica
aactagtggatcatcagtgaatcaactatggacaatagtgatcagcggcacgatcggagatcagaaccaaagtatttttatgactggaaaagcgacgccgaagaaacacacaacgaaagaaattgttgctaagatcgaagcagccacaaccaactgcggcggcggtaaaggcagggctagccgatcgctccggcatcgaaaagggtggtcacgctaagatcgagtgccctttctgtaagacgaccgcaccccactggcaatgacaaccccagtggatgcctccccacaaatattttaatatatcggatggaaagatagagagatcgatgactataataaatcctaattaatttagattgaatcatacaaattagtttggactaaatatttttttgaagcactcttactaataacagacacttaagtggtgtttaattgaaggtaataagatattaaaataaaattgatggagtgaccttttcaattttcataactttagtagaatgactattaatccattattaaatcgaaggaaacgtcattctaatgcaacatgaaaaaaaaatatataataattttttatgaattttttatg

SEQ ID NO: 246894 - DNA, 768 bp, Cannabis indica
gactaaaaccaagactcaatccgaaccgacctaggcccagactaggacctacgaacccgacttggatgggggacctagaccagggacctaggccctagaacccagacccagatctaaatccgggactcgaaccataaccaggacctaacctagacccgaaatctgaagttggacccaaccccgtacccgaaacctgcacaggatccagacaaggacaggaaccttgaaacgaacccataccaagacaaaacaaaaacccagaccaaaacgcggggcccaaactaagacccagacccagaataagacgcaaacctagtcctgcaccaataaccaaactcgaacacagaccgggatcgaaattaggacttagacccgaaactaaacccgaactcaaatcgagataaaaacctgggactcagacccgaacctggacccagacccagccccctaatcaacaccaaaagctcgatccagacctagaccgagattcggacccgaacccaaactcgaaccaagactccaatcctgacctaacatcgaaccgaaactcgaactcgaaataggaattggaactggaaccggactaagaataggacaacgaccacgacaaggacccaaacctgaagccaaacccaaatgaaaacccaggcagagacccaaactcgaaccgcaacgaggacccaaaccgtaacctagacttggacccaaacccaaaccagaacagggagctagacccaaaatcaagatagggacatcggcaacggaact

SEQ ID NO: 246895 - DNA, 1430 bp, Cannabis indica
tgtgaacttaacctgtaaaagcagcctccatccaagttccttcaaacgttcattcgtggatatctccaacatggcacacatggcaacatcagcgacactaccctggaccgaagtattaacggctgccctttcaatatgacctctttgagaataagaagcaccaaccaatgaaggaaaccagcgcgctcgtcctaataaggttcgaacacaccctttttcatgagcttctcttttacgtttttcttgccatcttagtacttcttgtctatctctgtaccatagagcaactgtttcttttgcttcctccacagaaacctgagaaagaccaataaataactccctttagtacatcaatttttttattggttctactccatcttattttatctttaatctggttgtgaagtaaacaaaatcctccgcgcttatacagatatatagaatattccattgataccttccaatcccgggaaagaccaacagacgtttttccatatgcaatagaaaatatataaattacaactcaatgtctggacctccttgatataattctaaaacgtattcattgaatgaatcaaaacagtgaaatgtctatatatacctttagcaagggcacaagtggtttatcttcaccaggttgaggattccattcaagaagaacctgcttatttttaacggcttcacgaatatgcgggtacatgttcaaggcagtccttgaatgaaaatctccaccagctttgaaggcatccaacatagttggcaatatgagccaaaatcctaagttccaactgtgatatgaacagatatcaatcaacagatgacattttattactattatatttatttatttattttataatttttttgttaaagatgaaatctcacttttcaaatttgtccacacaaaacttacctgtccatagtcagcaacaatgagggaatttccaagtgcagctataaatgcctgacgtatcttatatcgatcttctcaagagcaggttgattctaattttacaaagtggaaaaaatatacagtaaataccagctacaatccaatatagtttggatacagtcatccaattggattgaatgataatcgatcatttcgaaaatacatgtaaaagtaaaaataacctgcaaatttggtcgtctagcatataaatgtccagtttctgttatataatttctcataatttattatttaatttctcagtttctgttatataatttcttataatttatttttttttatttaaaaaaaatcacccaataatttctcataaactaaaaattctctaaaaattctgttatatagcacatctatataacagaattcttagtttatgagaaattcatgggtgactttttgtttatattaaaaagaaaatggtttattaataaaaataaaatagtttataagaaattcatgg

SEQ ID NO: 246896 - DNA, 754 bp, Cannabis indica
gtttgggtgggtgttttggaaggtattttagagggtgattaggaagtaatctggtcactggtttggggtgtactatttctagtttggatgggtgtttgggatagtgttttggtgggtgattgggaagcaatgtggtcactggtttggggtgtgctaattctggtttggatgggtgtttgggatggtattttggtgggtgttttgctggtctttttttttgtttgaggtggagttgcacttggggtttgggttggttgttttctggtttgggtggatgttatggtaggtgattggggtagggtttcagaaactttttgggttggtttttttctggtttgtggtggacttttggtttgtgcgtgccttggccgttttctggtttgtggtggacttttggttggggtttgccttggcctttttttggtttgtggtggacttttagttggggtttgccttggcctttttttgaattgggttttgggccttttctgtttgggtctctgttgggttatcctcagcagtagttccaacttctccaaataaaccttaaatttcatctaaattctctaatatctgtacacttaagtcactgcctacactattatcttcactgtcttgtttaatatctggcatgtacttgaaaaactcatcaacatgttgcttagcatcaccactactagcttctaaattatctactagttcctcctcaagattcttaagtgctgccttgctcataacatagtcttcaggttgg

SEQ ID NO: 246897 - DNA, 1007 bp, Cannabis indica
ctatctcatctttcaattgacgacactctactattgtatgccaaatatctgtatggtacttacagtatctagttggatccctttcccgtctcgcatccctcatgggcttcagtttactgaaagcgaccttgtgctcatgcgcgaggtagatactctcccgagtttcatcaagctcagtatagatagtgtaaactggcacatatttgtcgtgtttctttatttcttatctttggatgaccccttagagtcgtctttcctttttgagctagaagcccgtggctcgagttctccatctgaatcacaccccgattgttttccttgctccccaacttgatgcctcctgaacttatcctccaactcatctatgcgcgattggatcggatcccttcgctttgaaccaagttgttggtgaagatcaggttttttctggttcaagtgttctcgtagatccggttggctatgatggctggcagacctcgttctacccatagactgtgtcctgctcatggatctcgtccttgagtggcctgcagctttactcatgcctgtgtctccttgatcatcgtcgcgacgattgttttctcctcctcacactgattgactatgagttcatgtgtaccccgagggaacattcgtctcttcacgactcgttcttccccattgggcgtggctcatcgtgtttctcccactggggtttgtacgaaccccttccctatggatttgagaagaatatcagtgattcctcagtgacgacctacacgctctaagttgtgtcctaggatttccttatttctacgaggaatttcccgttccctgctttctggttgccttctattctcatttctatgagatggttctggatgattatctggctcctcatttttagggggagcatcaatttccacaggttgtccttcttgagtgttctgggggttcccctgagctgtctcctgcaccctagttcgtgagttgggaggtttgtcccgtggtcttctctctccagggtc

SEQ ID NO: 246898 - DNA, 673 bp, Cannabis indica
accccgacccctttactaatttcattatcaaatctaggaagacacgacccaacagttgctacatttgacaagaagtctgaacaaaattctacagcctcttcaacgatgtaggattcaacaattgaaccctctggcctgcttctgtttcttacataaccctttaggattttcatgtaccgttccattgggtacatccatctcaaatacactggcccacacatttttacctctctcaccagatgaacagttaagtggatcattatgtcaaaaaaggatggaggaaaaaattgttctaaataacacaacacttcaacaatttctaatcggagattttccaactttgacacatctaccactttgcaacaaagagatttaaagaataaacataacctggtgatggcatagcgaactttcttaggtaaaacagaacggatactcaccggcagaatatgttgcatcagtatatgatgatcgtgagacttcagtccggacaaaattaatttgtccatatctaccaaattggagatatttgaagaatacccttcgggtactttaacgtgagacaatgacgtacagaaagatcgtttttcttccttagtcagggcataacacgccggtggtaaaaaagttcgtttaccaataatttctggatgtaaatttcctctaatcccca

SEQ ID NO: 246899 - DNA, 727 bp, Cannabis indica
agaatccaggtatcttcctctagaaaatctcgtgttatgcctagtccatgcgtctcgcaaactatggccatacttccaggctcaccccataaaagtgttaaccgatcagcccttgagacaagttttatcaaaactagattcttttcgattgaattgggttagttcgacataacatacaatcctcgaacatccatcaagggtcaagctttagctgacttcctgatagaaggcataactctagaagaaatcccacctgattagcgagatgcggaaagttggaagttatatgtggatggcgcatccaacgaacaaggttcaggagcaggggtgatattattgttgccaaaaggcttttagtttcactatgctctgagattccaatttgaatttgaatatgaagccttgatcgccggcttaaagatactagaggccttgaatgtcaaaaatctcatatgtcatagtgattcacagctaatcgtaaaccaggtccttgggaaataccaggccaaaggcttgaaaatggcgaagtatttagagaaagtttggaagaacttggaaagatttgattactttaaaatcaaacaaattctgagaaaacaaaactctaacgctgatgatttagcagaactggcctcacagaaatatctggatgaactaaatctagttccggtagaaatgcttagagagccaagtatatgtgaaattgaagatgttgagatgatagata

SEQ ID NO: 246900 - DNA, 1485 bp, Cannabis indica
caggagagttacctgttaatattactaatcttagtaacttggaggccttctctattttcaacaatagtttcattggttcgattcctttagagattggaaacttaaaaaaacttaaacaattgtatctttcttggaactatctcactggttcgattccaacttctctgtggaaccttaaaaacatcatctttgtggtcctttctagaaacaatctgattggaactatcccaactgagattggaaatctagaattcctcacaaattttgttgttggcgcaaatcaactatcaggagagttgccagttaatatttccaggcttagtaacttggaggtgttcgatgtttttggcaataatttcactggcacaatccctagagactttggaaaaaacaatcctaatttgaccttcgtttcatttggaaacaacaacttctttggaaagattccacaaggtttgtgtagtgggttcaatctagaatatttgagtgtaagcaacaatagctttacagggacattgcctgagtgtatgagaaattgcaccaaattagaaagagtgaggcttgatgagaataaatttacaggcaacatcaccaatgtttttggtgttcacccacatctcgattccattttcttaaacaacaatcaatttgttggccatgtatcaagtacgtggggacaatgtcagaatctcaccagattacagttgggtcaaaataaaatctctggtaagatccctcaagaactagggagtttgacaaagttgaaagttttgagcctcgaatctaacaaattgattgggccaattccaactcaattaggaaatctcacccttctgtaccaactcaatctaagcaataatcatttgactgggataatccctccgagtctatcagacttgagtaggctagtagatcttgatttttcgacaaacaatttagttggtgatataccaaattggttaggtaattatgaaggattgttgagcttaaaccttagtcacaatatgctatctagtaaaataccaccagagcttggaaatttggtttctatacgttatgtattggatcttagtagcaatttacttgatggagagataccctcaagcttgtccaagcttacaatgctggaaattctaaacatctctcataaccacctctcaggtagtattccacaatcattttccaacctaataagcgtacgttacatggatttttctttcaacaacttgacgggttcgatcccaactggagccattttccaaaatgcttcaaaatgtttttatgatggaaatctagaattgtgtggaaatgttgcaggacttgagccctgcagaaggcaaagaaacaaaattagtaacagtcttattttggttattggtgttgtttgtggcctcgtagtgtttgttacaatcattgtaatcactctcatactgtgtcataaactcaaggtgttggacaagcgcaaaaaagattccaacaaaaatg

SEQ ID NO: 246901 - DNA, 582 bp, Cannabis indica
acgccaactaagaacgttcttaggaatgagggcaacaatattaaacttagattttatgccattatttgtgactaaggtgagaaaaatttggaatttggagcctaccccgcctactaatcctctccctcggagtgtggtatggtctttcgtttctgaaacagacgttgggattggtgtgaatgaagaggttcctaccaatgtagatcaacagcaagaagcagcataaattcaatttgaggagtttgatactccctctacaataatgatcctattgtaggtttgaatatgaatgatgaacatgatttggtagtcgatgaagccgtagcagtactttccttgaggttagagtttgcaccgagaaaccatggtacacagcgagaacagcaaccctgtaacgaaaatcgcaatacacctaaactagcagtagttgacaaggcagatctgaagaacatgatcctcctcatcatgcacccttctcaacgttctcgtcatttgaagtttgtaccaagttcatagctcctatgtggacaaaggaagatataattgaaaatcatgagcttactacttgtttacaaagtaagg

SEQ ID NO: 246902 - DNA, 1347 bp, Cannabis indica
tggcccgaacatgtacatacaccctcccgctcctacagtcatggcttatcagagatagatttactctttcctgcacagtagagcacccatgagccaagccaagacaatataaaatatcgataatcataattatcacattatataaacatttatgccattcataattgcctgtatgacacagacctgcatgttacactcacatgcctatttatgtctatgtgacatagacctacgtgttgcgctcacacgtctatatacaataaggccttagaacggttcatctcggttccagattaccgagtccaacccggttatggcttgaacgcataaccctaaatctcaatatactcatataattaacatggcatagcatttactcatcatatataactatagtaataaccccaggccgttaaaccactcacgttagggtaataaccctaatcccggtttctaattactcacgtataacatttcagcataagcaccaccatgcataactctacatgcaaccactgtcttacctgatgtcctgcaatagaagagattccaaatctccgggtgctcctgaccaagtaccgataatcctagtcacaaattccaggatttactcatatagggttgatccctaaatccacttttacataatataaacatggcattcaaaacacaaataatcacatatagctcggaacgagctttccaacgatataaagaacatcccaaacagagtcccgagtcaaaagttatggcaaaaacaaaatcgagaaaatggatggctctctgctggattttggccgctgccactgggttcgaaaaaaccagattttaaggtctaaaaatgcccactttaccatagattcaaacctcaaccaaaccatacataaaactcaaccaaaaccatacaaatctaattttttttaacttaaaccaatgttcatttgagcatcacaccaagctcaagaaaatcaaaacaacaaacaaaatcaaacatacatcaaacaccaaggttgcatacatatgctcaagcttgaagttcaaagcttcaagacaaaacccagaacttcaaagccttataccagaatttgaacaacataaaccaaccctaaaataaatcgaaccatctagatgcaatatacacaatcttaatagctaaaaactcacaacaaacatcaaaatcaccttcaatttcattaacatgcatttaagaacataattcatggccacacacacattttcatttcagatttacaataacaaactgttgggttttgtgccctaaataaaacccatttcaatataatcagattttcttattaataaagatcagaaataacattttatgtt

SEQ ID NO: 246903 - DNA, 551 bp, Cannabis indica
ttttttcccttaataataatgagtaataatttataaaatcaaaatatacatcaaaatacatgacatcgtttcagtccaaattatgctttaggtttgcaatttgcatccatgacttctggtgtcatcttgggaccgtggtactattttggtgtacattctttattaattttgttcactatttacattagagatggtgaatttggtgtatattcttttgttcatagctacttaatttaaccgatctatttattgctctcaaaaacattctcttgttaatattttattgatctaaattataattttaattaaaaataaacaaagtactatttaattatttttttttattcttttttaattttttttcttctttgtctagttttctcccaacctaacttgttgagtcttaataagttctatcgcccaccaaaacccaccacacgccgctacccacatctctctttgtctaccgtatactctctccatatcttttggtttcttgaaaactatgaaagaaaaaatcaaaagattcatcactctccaagatcctgatt

SEQ ID NO: 246904 - DNA, 772 bp, Cannabis indica
aaaattaaatatataaatgatatgtagaaaaatagaaaatttgatgtatgatattgttgacgtagttttttgtcaatagatctaggaagatcgtacacgagcaagatgaacacaagtaattttcaatcaaagtaaatcgatttgtagaaaacaaaattaacgatatgaacacaaggttttataatggttcatcccctttcagcgataataagttagtcaacttcaagttttattaatcttaatgcttaagaacaattctctagagttatgttatctaaaaattcagttctcaaatgagattttagagtgaaggaaggagcgaatgtaaatattttttagtttatatgaaactaattttattattatttgatatttgaacaatattttctgtttttattttaaataacggttctgacacacattattttattgttttcataactggtttttttttttaagtaattagttttcataactggttttttttttttttttttctttttttttatttgttgttcataattgagttataagttttaattttttttatttagttatttcaagaaattggtttttttttgtttattcttttatggtttttattaggactgtcaataaagtatccgatccaatccgtacgatccaatccatccaatccgcaaaatgcggatgtccgcacttaaaatgcacccccttaaaatggatatattgatgcacccctatctgttttagcatccgaaataatttttggtcaaattttttctcatagtca

SEQ ID NO: 246905 - DNA, 504 bp, Cannabis indica
attagctttgtggcaagaaaagggttttgtgagaggccaagaatgagaattcgagcatgggttttttgattgagtttcagagagtttttgatgattgagagcttaatgtaatggagaagagtcagaacctggtcgaatgccgcagcagaagtgtaattacggtatgataagttcatcatagctttagctcagttagagagcttgaaaatatacataactgatatacatatttatattgttaactaaatatttgttataaataatatttttttaaaaaaaattaactaatgacctgactctgtaagtgtggaagcatatatgaggcctactcttcgtcaatcatagcttttggatatgattttttgtaactacaaaatataaaaagaaataaattaattatataataaatataaataagggtaaatactattttagaccctgtgttttgcacaagttaccaattagaccttctgtttgttaaatgataaaatagaccctgtattt

SEQ ID NO: 246906 - DNA, 1119 bp, Cannabis indica
ctacaatcttgcatgccaaaccttttgagtactttattgatatagctcttttgtgataatcaagaataccccgacaacgatctggacgtatttcatgaattcctaaaacaaaagaggcgtcaccaaagtctttcatctcaaattgcttagataaaaatctcttggtttcgtgcaataagcatatatatcattagtgacaagcaatatgtcatcgacatatagaaccatacatacccgtaaatcaatatctttttaaggaaaattattgctattatgtatagttagtttacaataatagattaaataagtgagtgaataccaaatcaaaaaattatcacctcatcaaactttagagcatgttttaccaagccaataacaaccttattagcacttctgaccgtgacataataaataaccatgtaaattaattatttaatttggcaagcaaaacaaatttgatgtggcagaatagcataaagtttttgtgattaaatgtgacttttagttataacaaaaagttacttgtgataataatacatagtatatttagatacaagttgtcactaatttagttttagtcacaacaagtattgtgacaaaaaatacatgtagtcacaataaattgtgattttaatttgtgattaataattttatacacaaatttattagtcacaactttttacttttggtcataacttttattgtgactaaaattaagattttttgttgtgtgagctaagcatctgttttgggcccacccaatccactgtgtcctaaaaatatatttttcctttcaaaatatacaatgttttagtgactgtattttgcaataaaatcaaaacacagggatgaacaagaaatgactacgaatcgcaatcaaatgtcctggttatggtgacatgttgaacacttagtattcatgattcttattgcctttctgttgacaatatcatgccatttttcacttttgaactttttagggaactcttcttgttcacggcatcctcgcactcagcccagaggctctcaagctccagggtcatgtctgttattacctaagaccatcgttcgacaagaagagttctctaaaaagttcaaaagtgaatatggcaggagatg

SEQ ID NO: 246907 - DNA, 1212 bp, Cannabis indica
tgacgtactcgtgtataagagccattcattccgtgggtgtaagggcccaatggaggcttgaagcggggacgttacaactccaaattttgagtattcatgaactcatgtttgtgttcattaagttctttgactcactcgttaaaatttcttagagaagattattcttacaacttctgtcttgtaagcttaataacatgaatgtgtgggaaaatattatacaataagaggaatccaagctttccaaaatgatcgaataattaattttcttatagcgtgaatgctgggagtgactatagctgaatccaaatctataattataattatagattaacttttcacattgaattaatggtactaaaagaattcaaaatataactagaagggtaaaatagtaattttaaccaattctaattatgaactaataaattaaaggacaaactatatatatattgattatatcaatggactactaaaaagaattctttaaaaagaattcattaaatataattctatattctgaaagagtacaatcatatatgtatagtggagtaataataaaataaataaaccatattattctattgatgagttcaataaaaatccagagtttgttggagcttcaaaatataggtcaatggtccttagattacctttataccacattgtacaaggcatcttgagaaacacattcatattcttcctccttgcttggaacctcaactgaagtctagtgcatctttaggaatgtgaacatccatggttgattggtattgttcattaaaacttagagcaagaaatgagaaaaccttaatctataaggcaaataacaagtaagagatggcgttcttcaatggcctttgttggagtaggttttggcatgacagttcaatcatacatgaaaaggctgagtcataatgatacaagtcaagactaatcaaactttgaattgataaaaaatgaatacttacgaggagactggaaggacgagtggacacttgggtaaagaccagttgtgcaaaagaacttatctttaaaactctacaacttgttgggaaggttaaccattactttgtgctcgtcagtgtaagtagacaagtaataaaagtcccagtgtagttctttctggctggacacacttttaatgtctacaaacatgaaatctcataaggctgaggcattcaccatcccatcatttggtgctaaatcttatat

SEQ ID NO: 246908 - DNA, 1030 bp, Cannabis indica
caaatatgaaatgaacaccatgtatcaattatccaacatgtgtcaaatctatcctttgagattactaatatactagcactgtcatagccatctctttcatctccattagacactacatctacatttccacctttcttggagatgtaatcttccaaggttggacaatctcttctcaaatggcttgatttgttacaaagaaaacaccttctcttgaacttggcgtttgacttccctttgtttgcttagctttgttccttgttctccttctttgaacactttccttggacgaagagcacttcactagcactgtcttcttgctagtctgcctttctctccatctcctttgacattaatacactttgaactttctctaatgtcaaagattctctaccatacatcatggtatcaacaaagtgctcatagctatcagttggaagagaattcaacaggattatagcttggtcttcatcctccaccttgatcccaatattctatatagatttgggatcatcttattaaaatcatcaagatgatcttcaatttcttttcatgacatcattttaaaataatacagattctgcttaaggaaaaacctatttgccatcaattttatcatgtacaagctctccaatttcttccaaatcccagctacagattctttcttttgacacttctctgagaactttgtcactgaggcgtaaaattatggcactatgtgccttgtcaaaaagctcagtcttctccttcttcgataaacctttaggaagattcttctctcccaaaagagcatcttgcaaaccatgttgaaccatgagaactctcatcttgactcaccacaatctgaagttgttcttccctgtaaaaaagatttctagatcgaactttccattttccatcttcttgcatcgctcacctgaatcttgaaatcttctgatgacgattcttggacaccaaatgctctgatacttcttgttggagatgacaatcactatctcatacaccaggattggttcaaggaacatccaagaac

SEQ ID NO: 246909 - DNA, 1078 bp, Cannabis indica
gtgaaaggagtaatcaatctctttgattgagagtcttaggaaaccaaagccaactatccaactacgacaacaacaacaacaacaacatacgcaattttgaaataaaaaaaaataaaaacatatatattatagttcttttaaatgaagaaaaagatcacatttatttatagtttctataaagtatatgaataatgtaagactaagatataagcaaaagttatatatttttaattttatgtaaataattgtatataaaaattatgtggtattttatttttggtttttttttattttgataattctaaatatatatattttttatatttttacagaataattttatataaaaactcctattacaattaatgttgcaacctaaatcgtaataaaaaatcgtatagaaatgcaactagatatgaaggaaaaaaaagttaaaaaaataattattttttttttctattttgacaaaaaaaaaaaacttttttttagagagatccatttggatcttcttctactcttcctcttcttcttcttttttttcttttttttgaacaacactgtcatatgttattgattaatgataatccatttggatctttagcactatataaaatttgttcacgtgtccactctatcttattgttgataatcaaataaatattgatatattacaatcagtacacatgcgctcaccttacttaattttgtatttttataactttaatatgtacccaattggtcaaggaagtttttcgcctttaagaatttctgatgctttcaattttataattgtattctaagctgagcacaacataccatggacaagactatgtacggactcttcttcttccttttctgatcacaacctttactaaaacatggccatccatcatatatcttctttactcccaatggaatgagaagaagatgtaaggatgtgttgggtattggctctcaggaaggggtcattaaatatttgggtctgcctctgtttagatcaagacaaaaggatgcggatttcaatttcatccttgatagacttacaacaaaattgtagggatggaaagcaaagatgctt

SEQ ID NO: 246910 - DNA, 825 bp, Cannabis indica
ataatattatactaatgtgggagttaaaatcaagtaaaagaacgagacccaacaagtgatatcagagtcaaatgttcaagaatttggatagtagattgcatttgcaatgtgtggaagaagtctttaatgtgataacctcgcgattgaagatctattatgatgtcttatatcaaaagtctacctgatattgtggtggccattggattacggtagtgcaagaggaagattagtgtttgtttaggacttgtgtcgaaaattttcttgacaaagttgatggtcaggcgacgagttcagttggtggtagcggcaacacaaagtggttttgctgaagaggaggtcagaagtatgtggtctttggtttgaagggagaattattgaggtatcaacccaagtcctacattggaaaaataggcaagagttgcctaaaatataaatgttctacctgctctattagtttgagacactgctcaaaaataagattgtgaaagcttaaacccaaagcgttagtcaaaaacatcaaatgaaattaatcacattataaactctgatcatataagatcggattgtatttgaatttcttcaattaaaattgatcttgtattgaggttcttgtacggcaagaaattattagttgactcgacaatacctttgtaacctatttataaaaagatcattttaaaaataattcaatctatggtcttgaggttcttgtactgcacataattggagtattagtaattatgtgcatcattaacaactctctagtttattttcttgtaatttttcttttatttccaaggattgtaattttactatcataatgtg

SEQ ID NO: 246911 - DNA, 583 bp, Cannabis indica
gttataataaagagttcttagaatagtccaagtggattttggtcacagaataaaaaactcataatctatacattaacatacagttcggatcaattgttataaaatggacattaactacttgtgaaagttatactgcattgtccaatgtattctggaaactgaaatttaaaatttctatttggaatctaaaatttaaagttaaagacttaaatttataccaaatatttttctgagtaattattcttgcttggagcatcactgctaatctaactctaactttaagctacctttagtaagcatatactagtaaagagattttctgagatcataatttatatcatttcaggaaagaacatctgaaatatagtcacctgtgccacttattttataaaaaaagagagtgacatcataagcagatgatttataatccttcctatccaatgatatactatctgagcaatttcttatgaaatactaagaagaaaaagtaaaggataattttgattaaaataagaatccaacgatgtcacgtttaggcgagaatcaaaattgttcttattttataaactttttcattgtttca

SEQ ID NO: 246912 - DNA, 586 bp, Cannabis indica
aaaaagttatgaaagtttgaaaaataaggtccaaggtgtcgaacatggtgctcgcacgcaccaggtgttggacaagaccatgtctgaagcccgtgtctctttcacgtgatgctgcatgcaggccgagggagaagctactggcgccgagatgtgccgcacacgggaccttgcgatgcccctactccgcacgcgtgatgggctgcttgcagcctattttgggtgcacgtgcaccattgctggcacaaacaccccaagtgcgattttttctcaaattttgatttttttcaattttcaaatcctaatttcaaaaaaaaatattatttttaatatatttaaccttaaatatcaattttaaatcaataatatttaatttttaataaattattattaattctttgatgttttgaggtttaaatattaaaaaatgattattttattttaaattatggtcagattttaaaaatttgttaatttttttgatatttatatattatttaattataagatcagatattttaatatcaggcatattttaaattaaaagataatttatccttttaagttaaaatattatattaaaattatc

SEQ ID NO: 246913 - DNA, 695 bp, Cannabis indica
tacttttttttttagaaaaaaatcagtaactttcattaataagtaaaacttccataacaatggattgtacttcattggaacaattttctaactgaaacacacgacctgacttgaaacaagagccccttgcaagacaatgagcgactctgtttgcagatcgtttaacaaaacacaccttaatatgattattagataaaagtaaactacgaacatcttgaacaataagaccaaactgagacgacatagataaattactctaaatggcttggacagaaactaaactattcgtctcaataataacatgctgccagaggtgttgagcaacctaactcaaagcttccttaatgccaataatttcagcaatctccggttgaacacgacccggtttgccaatggtaaaagcttcaataaactacccacaaaaatcacgtgcaacacagctagcaccaaatcgagactcttgctcaaacaacacaccatcaacatttaccttgatctcatccatagcaggtggcacccaacgttctgaatcacagttcttatctaaaaatccagacaaggaaagacctttcatttcttgagcgtatttatattgataaagggataatcttgttaggttttgtgccctaaataaaattcatttcaatataattagatttactaattaataaagatcagaaataacattttatgtt

SEQ ID NO: 246914 - DNA, 971 bp, Cannabis indica
tagcattagggcgttacacatatagttcagtgtactggtccactatataagtaactttcactggcaaaaaatgagctgattttgtgaatctttccactatgacccatactgaatcatacattcctttggcttttaggaaaactagttacgaaatccattgcaatatcctcccagttccactcaagaagggctaatggttgtaataatcctgctggcctttgatgcgcagctatgatttgctggcaggttaagcacttggacacgtaatctacaacatctctttttatcctataccaccagaagtagggttttaaatcctgatacattttggtggttcccggatgtagtgaataaggtgtgctatgagcttcatcaagaatttctttcttgagttcattaacattaggaacacaaactcgagctttatactgtaacattttattattcaagattgaaaagtctttaggccgacaatcaattacctcatctcaaatcctgactagctcgggatcttctaactgtgcctttttgattctctcaagcaaatcagactagagtgtcaagttatgcaactttccaactacaaactcaattcccacatttaccatttcgaaggccaatttaggggctatcataacagtagtgaaaacctcctcgggacctctcctactcagtgcatttgctacaacattggctttcccgaggtgataaaaaaatctcacagtcgtagtcttgaaccaattccagccaccttctctgcctcgtattaagatctttctgggtgaaaaagtatttgagactgttatgataagtataaatcttgcaatgttcgccataaagatagtgtcgccatatttttagagcaattaggatagcaacaagctctaacatcatgcgttgggtagcgttgctcataatttgacgagaggcataagctgtaactttgtcagtttgcatcagaacacatccca

SEQ ID NO: 246915 - DNA, 943 bp, Cannabis indica
agaaaatagagaggcagctgttcatctttctccctatcgtccctcttcatctttctccctcttcgattgtccctcttcttcttctcgttttgggccgcaactattcatctctcctccagcgaacgatgacgtagccccacagatttctgatgtctgcgctagtatcctcaagctcatggacttcaacctaattccctctgcctcttccactgagtcgaaggtcttctatttgaagatgaagggcgattatcaccgttacttggctgagttcaaggtcggtgattagaggaaaaccgccactgagcacaccatgatctcttacaaggctgctcaggtataataatttctctttgattttaggatttttaactaattaattatttcgaaccgaaatcgactctaatcgaattaaaattcaactcatacctaatgatatcgacaatccgattagaaatttcacaattgcgtttcaattttgtgtgaggtttttctttttgccttgttttatttgcatttgcagattagggaaagttggtttatgttctaataataataactcagttgttgtttttgtgatcgaaggatatagcaattgccgatcttgcatctacacatccaattaggttggggctagcgctcaatttctcagtgttttactatgagattctcaataaatttcataaagcttgcaccttggccaacacaggtactttctttcaactcaaatcataatttcacatgtttgcttcgttaggccactgcgtagaatgttatgtgattattaatataatatttttattattataacacagagtatattgtttgtttaatgaattttgatttcaggttttggctgggattggggaggcaatgtttggatttgataatttttttttgttgtattgttcatgccaatttctcggttgtagtcatattttttttt

SEQ ID NO: 246916 - DNA, 1819 bp, Cannabis indica
gaagaaaaagttgagagagatgaaactcaaattctctgtattccaattccaattccaattcgattcttgggatatcaatcttaagtgacagagaattttgagttcaaagtggaaggaagagaaggttgttttctaatcagtagtaaggaccaaatttatacaatagaccttctcttttatagaactcaaaagcaaccgcttcaacggctctgattacataatttctttattttaatttttatatattttttttatttaaagaaaacgactttttatttggataaaattacagtaagtatcagtagtagtaacagtaactaactactttgttttctataaatataaaaaaaaaaaaaaaaaccccggaacggatccaaatcttagtcaataataattttagaaaattattaataattttcatttttggattgaaattgttaatttaattgatcgaggctccatcaacctccttcctgtcccccaactaaaggaaaagatgccaatcccacgcgttaagattcttccatacatgtaaaacagctgtaacagtttggaatttgtacgtgatatccgagagcgttatatacacgcgctgatgcagagagtagaatcaacagtccccaatgatagatacgataggattttttatcgtgggccgtctaacccagcgaaccggctattatggaggcccattatgagtttttcctatttttatttttttacgaattcagctcggcgcattcgttgaatagccagccgagcgaagccgagctgagctgagccataatgaccccccgccacgccgtgttcccgcacgctttaaaagaaaacacgcgcgcaatgaagcgttaccccactttcccgccgagtcatcatattgaaagatgctctttaatcgaacggctcagactaacccattatcggagactggctccacttccatcacttcccactttataatttagtttatcctaggattcatttttatttgttcttaattaattaaattagtactcataaaatccatattaaggatttaattaatgacatatattatgataaaattaattcttttttaccaaaaggaaaacttaagatgtatgtgtaaataattagtaattagtagcatcatatatatataaattgatttaataataagaataaatctttaggaattaggaggatttttttcgccatgcttttcaataagtaaaaattttaacgtattaatatgatttaaattagttaattattagtttatgatgtaattattactcgaactgttttgtcacaattttaggaggacctttactctttatgtaataatgcttgtttctctaaataattctcttttcttttcttactattagaaaaacgaaggcccatgcatgattcaattcaattatgaacactatatataaaattttactggccaaattagtcgaaacttttttgttgtcaccttaataaataaagtgaaggaaaatactaaataaataaaaagaaattggaagtccgtgttttatgcatatgtaatgttaatatatatattaaaacgaacttatcatggatttggcacacaatctatttaaagaaaaaggttgtcgcatgttgcatgcccaaataatcatgttcaaagaaattaggttcaaaagggtaacaaatttatatatatatatatatataaatattcttaattacattaaagagtgaaaaaataaaagaacaataaataagaaggtggctgccgcaaacaaaaggtggtgggatggtagcggtggagccacaaaaccacccatcacaagtttttttttttttt

SEQ ID NO: 246917 - DNA, 989 bp, Cannabis indica
ctctctctctctctctcttgtgagattagtcaactttggttctcacattgtaatattaagagagccacttcagatcccagcactattgtgatcaaagtggtattatctctagtattaatacagccaaaaggggagtaggtcattacccgctaactcagggacttaacctctagatctgaaatttaccaagtaaattccttaacttattacttctgactccattatagatacaaaatatcactcttgattgcatagaatgctcaatatagaaaatataaatacgctataattatccattgtttcatccaaaataataaatgatcctctataaacaattcacattgaatatggacaaaattatcattttacccttcaatgtattttatccttaaaatacttagctctttgtaaatgatattttattaatttattataactacataaatgagtattccaccatttaactcgtttgcccaagctttaagaaaactatcatttcactactaatattcatagaagttatagattctatttatatgattaacgctctcactcaattgcactatcaagctcccaacatgtaagtatgggctagtcctatgggtaagctagtaaagaacaagtctaagaacttgtgagcacaattaagttaaaacatagtcatatcaggattgagatcaattgacctaagatcatacaacggtaagtttataatatcttttctactgttaatattagtcaagtacaatgtacagccaatacatttgatacaaatttactttattaatgccatagaaaagacatctactattacaattgtaagtaaaatacattattttttattacatcagtgtaaatctagtgcactgataatacatgggactaaaatatttgaatcatattatcatgattatttttcactgtgtagacaacactataatcatgaatattagtatgatcagaatttaatagaatttatatatcaaaca

SEQ ID NO: 246918 - DNA, 614 bp, Cannabis indica
tctattttgaattgtcaaaatagaaattatatatttcgtaataaatactttttatttcaacttaattaaatagggaaaagacaaaagttttcatgacaaaagacacatctattgtcttaatttagactgagcgaggtgccacatgaaatgtctctagacacagtgcatgcgccccattattatagggtgtccctattagttttgtatttttccattaattaattaatttaaataatgtatatttaaatttgaaaaatagcttagttatgttgacaaaaagtcaatcactctcttattttgatgataaaaaaaaatttgattattattttttactaatcttttcttgatcattttgcaagcaaatcacaaagtatcaatatttgctcggtaaagaaacataatcaatgaagcagattcaacaagtatatcaactacttcatacttcataagagcaaaagttttatcaagagatcaagaattcaagaccctatccaaaagaggacttcaaaaggtcaaagacaaaagtcaaagtcaaagtcgactcttggagaaaagtcaacttttgatcaaaacatgcaaatcaagctaggaatcttatctacatcaagactaca

SEQ ID NO: 246919 - DNA, 1029 bp, Cannabis indica
ttttgtttttctatattttgttccctggaatatcttgtgctacacattgttacaccttatctcataaaacaaaattgtaattagtgaactcgctagaccttggtgacaagagaactagatgaagcctagcaaaatcattttaagtttttgcatatagtagttatttctttgttaaaaaagttagtgtttgtcgaaaaatctgggatcgttgttatccgagactttaggatgtaacttaaagcagctgctgcagcccaagttaattggctttatctcggagatagattgtattgtaccctatctattcagatttgcttctgccttcccccctcctctagatttagttaattatggtcatatattagtattttctggttcttctcctgtactaatgttttcatgttcacattccataagggacatatttggtttaggactaatgggtgtctacatcaaaagtgatagtatatttgtttaaatgatatttagaaacctgaagaatactgtgtatttgaagtttcttaacatattttttcctttccgtctggccctggtatactttctggtcctgttactttttctcttttgttgtaagtttagctatgtattcttatttggtgacataacgataatatgccctatttagtatatccacacctttatttcttatagtatgggattgtcgtttgtatgctttgacatttttcagtctttaaatggagcaaacatagatgtactttgtattatttttccttataaatgttacatatatttccagttctgtgcaaattggttaattgcctgattagtttctcccacttccccccgtttccagctttcatccaagtgtcaaaataggcttttctgcattaggtttcacttgcctaatatggaaatctatcctttctttgaggcattttctcctccaatacgtgtatttcacgaaaccgaaatactcgagtgtcctctacaatgtcaaaaaggtcaaactctgtcccccatcaagtatctcagtcacatggagtggat

SEQ ID NO: 246920 - DNA, 676 bp, Cannabis indica
aaacataaacataaacatgtacacatgcaagtgtgccaaactagtcttacctcaattttgattttaggtatacaggtcaacctaagtagaaataattgctggtaatcgaaggccttaagtcaaaatttaagaaaaaccaataagtgtttccctaacactttcaggacttaaatttaaaactaaagtttccctatcgaaagatatcatggaaataccctaagtattgagaaaacactcaattggagtcccgagaaaagtctcaaaaaagatggtccgctttaaaaacgggccctacattctacctaaatcggacggtctaaactccactgcctaattttaaaacttacataactcattcaattctaagccaaatctaaccaaattttgtaaggtatctaaaaatatcataattaacatttttcatgaagtaatctcaatcgaattctcaatagaaatcaaaataaatgacatcctaaaactgcctaaaccgggtgacccgaaacttctctgtctgagtttgaaaatcccataactcatccaattctaagctaaaccttacaaaattttgcaaagcacctataatgaacattttttatgaacacaccttaacccaattcgtaacagaattcaagttatcacaaccaagtcaagtttgaactcaaacttgcataacttt

SEQ ID NO: 246921 - DNA, 524 bp, Cannabis indica
aaacaaaagagagatgaaaatttcaaaattaaataacagtggggtgttataaattaaataacgctgccatgagggagttgctagactagacaactatattgagtaatatataaatattagcacaggatagtaaatgaaagaatataatatgtagttaatttaatatttagtactattattattattattattgaataattgaatcaagagagagaatataacattaattgtaggataaaagataactgtctgttaactttagttaatctatcttaacgttttaaatttttattgaagtattcttttttttttttgtaaaacagaattcatttaatcaaaagcattacaatggataaggcgagtccgccgaatagcttgactcgcacaaaggggaacaacccctacccacatggcactagctttgttaagcaaagcatcattggctaaattatgcgtaacttggttggcttctctaaatacaaaagaaatccctgtcacacattcattttgcagcagccatttaa

SEQ ID NO: 246922 - DNA, 1357 bp, Cannabis indica
ggaatgttttttcacacgcccctatcaactcaaattttttgtttcctctgagtacattgtagaagggtacgcatttctccatggatttggacacaaatcttcttagctcaacaatacctcccgtcaggctttgtacttctttgattattatgggcaacttcatgtccaaaaaggcttggatcttgtctggcttcacttgtattcccctggaaagaacatttgagggggttgagtttcatgttgtgctctcaaaggatcttcaagcattcatctatatcctccacatgcccccaacctttttagacttgactagcatgtcatcgacatacacctccatattgcggccaatgagatctttgaacattttgttcacaagcctctgataggtggcccctactttaatctgcccgaagcgcatgactttgtagtagtataggcctaggtctatcatgaagcttatgtgctcttgatctggtaggtgcatcttattttggttgtatcctaaataagcatccatgaagcttgcgatctcatggtcagttgtagcatctactagctggtcgatccttggatgtagacagcagtcctttggagatgctttgttcaggttggtgaaatctacacacaacctccacttgttgtttggtttgggaacaaccatggggttgatacccaaagtggatatagaattctttgatgataaagtcattggcacataaccttttgacttcatctcttagaacttgggcgcactctttttccaacaacctacttttctattgcacaagtcagaagtttggatcaatattaagttcatgggtcatcacagaatggtctattctacaaatgtgtctgtgtgaccatgcgaagaggtcaaggttttccctcagaaattttatcaatactaattttatttttggcgttaaacctttcccaatcttcagtcttttggttggaaaagtgtgatcaaccttcacttcttccagttcttctacaggtccaaagttgtctataggatgcgaggatctatgtcttcctccctacttttggctggacttaattgccattttctgtgctcttcatcagagctcttggcgggcatattctctttcttggatttagacaaggccaagttgtaacagttgtgggcaaactgttggtttcccctcaaacatcctaccccatgccttgttaggaacttcaagtaaaggtggtagatggatgttaccacctttaggtcgtacagggctggataacctatcatagcattgaaggctgatggcacgtcaattaccacaaattatgccttagcattcttgttgttggattttctccaaccatcaagggcagtcagatg

SEQ ID NO: 246923 - DNA, 726 bp, Cannabis indica
agataagtcttgtaatataattatatttttatatatatatagagagagagagagaaatgtacaagtaacaacacttgatagatagatgttgtggtggagtggacaagagttacgcaagaggtttcaatgaagcccaacattttcattgatgtgcgcacatttataagctcagctaactcagagccaaagggccttgtccctacctatatatacatatatacatatatactactactgtttccattattattattatacatatatgtaaaaatatatacaatgatcaatgtgctgtatactaattaataagaccgatcgagttgctgaaataaataattttatactattatatgttttgtttgaaataaagaatagtggcctagcttttgctgtgtacataattaattgcaataaagatatatgtatataaatttgaagagggcagttaatgattatgtggaaatatgtatgaattaagcttatcaatcacttttagatgtcagttctgatctggtgcacttttaacgccatgcacatctccgctcttatactatacaatacatccataaatatatatatatgagtaataagatttttcatataaatactatggagaacgtgcatttatacttaattatatgtttaatttaaaaaaaaacttaagagatttttttctattataattttattaagtctacaatttactttttattgctatttagaaaa

SEQ ID NO: 246924 - DNA, 568 bp, Cannabis indica
tccatgtgattctcttatgtaagggtattttgggtacaatacatataaaaaagagatagaggtaaatttgattaattgatgaataaaagaagtatttttcaacttacccctttataatatggaaggctaagcttactctgtccattaagaacgaattattcgtgctggaccaagcccgtatggtgcttaaataggctagcttgtttttgtgaaatggattgacctatatttataatacaaatcataaaacgtgccgcctcatatttatattagaagaatttatactgtatatttcttttaacttgatacttttaatttataccctttttttcaaaatgtattatgtttacctcttttttcaatcattctcccaattttacccatattacttcacgatagttttcattcttctctaattaaaattttgtcccaactttcccacaaacctacacatccatctataaaaaacacaaatctattatatttgaaattatgtcttaattatatgagtgtgtgaggataatttgggtacaatactcataaaaagatatatatttgaattaaattt

SEQ ID NO: 246925 - DNA, 906 bp, Cannabis indica
tctcagcgaccttttacaatgcaacttctccaggattctggccatcttggctccaaaccatcttcaacaccaatggaacccaataacaaactcagtaatgaatctggagaccttctcacagatcccaaacaataccggtccctcattggcaagttgatttatctcacaattacccgtcctgacatcagctatgctgtcaataaattaagtcaataccttcaggcacctcgacaaccacacttacaggctgcatacagagttctcgactatctcaaaagttcaccaggtcaggggctgttctatcactccactacaccagaacctctacaacttcatgcgtttgctgatgcggattgggcagcttgtcctgattcaaggagatccatatctggatattgtgtcttcctaggacattcactactctcatggaagtcgaagaaacagcagaccatttctcgatcttctgcagaagccgagtacagatccatggctcatgcgacatgtgaactcacatggctaacttcaatactcaaagacttcaacattcccatcaaacttccttccattctctactgtgacaatagcgctgccatccacattgctgaaaatccagtgtatcacgaacgcacaaaacacgttgagatagactgccacactgtccgtgaaaagattgccaatgggactcttcaaacaaaccatgtcaagtctcaaaacaacctggccgacatactaaccaaaccactcttcccaactcatttcaaagatcttgtatccaagatgggtgtaaaagacttttacactccaccttgaaggggactattagagttagtgagttagttaggttgttattttttccgttatttctgttatttctatagttagtcaaagtcggttgtattgctatat

SEQ ID NO: 246926 - DNA, 658 bp, Cannabis indica
tgtcaaaagtattattatttatgtgaaaaatagaacttaggctaaatgaattatatgtttcatggatttgttacctgcataaagttatatttatagatattaatatttttattaggttaaatagattgcatgcttcatggttctattgcttggttaaaagatttaattattgagtgcttcgtcttgattaattgcaattaaggagattaaaaacattggttgcttcatcattttctgagggagattaactcttaactgtttcttaatagcgcaatatctatttttatttgcttttctttttatgttatttgatcatcaattttaaaacctatttttaaattcctatataacattaaataataaattgaacataattttcgtggaattaacctgtatttgtcattatactaaagtaattaatgtataaataaatgaataaatttaattaaccacatttaatttttttaaaaaaaatatttgctaatcgtgaatggctttttaaataaaaaaaaagaacaaatttcacatccatgaaaggggcttttattgtgagttggatcgcattttaatatttttcagatccattaatcttagatattaaaaatacccttcttatattcttggatatcatgttcaacataaaatagacaagaaagac

SEQ ID NO: 246927 - DNA, 861 bp, Cannabis indica
atccaatgactctgtgagtaacaaaacaccctgggaagaactgcaatcgaatcggtttgctgatgagttctgtgcaaaaaatacctccatttgcagcattgaagtattgtttctctttcttccaatattctttcggaagaatatcagggttcattattgtgtatgatgctcccgtgtcaaagaatccggccacttttatcggcttggcatattttttgcacagaactcatactatcctattgacgagtctctgataccaaactatgagaaagaatattggaaataaatcgagagtattagcaaatgtgaaaaaaaaatatgagaaaggaatattaaaaattaaaaaaaaaattattaacaataaaagtaggtatattaaaaataaaaaaaaagtaaaaataataagaaatgtttaaaatattgagtgacaaaaaaaatgacaatggcatattaaaattaataataaaataattgacaactgtatataaattagttaggacaaaggcatattgaaaataataaaaaaaaaaaattaacaacaataaattagttgggaaaaaataggtatattaaaaataaattgaaatgactataataaatttaaaagaaaacatttaaaaataatgaattatttatgagataatgaacaaaataataaaatagctacaaaatgacaaaataaattgactaaactaaaaaaactcacttattcaaaaaaaaaaaaaaaaaaaaactaaagaaaactaacacaatctaaatttactacaaaataagacaaaataaaattagtactaaactaaaaataagacaaaataaaattagtagtaaactaaaaaaactaaacacaatctaaatactcac

SEQ ID NO: 246928 - DNA, 535 bp, Cannabis indica
aaaaaaaaaaaaagactacaatataaataggcaaaacaaacattacttattcaaatattaggtaaacatgatattgtccattttgataggctaattaggatttttgtcttctaaattttgatacgtattaaattgtgtttttaaaattttttcaggctgttaaaaattccagcagattattgacattattgtattgaagaacttttgtccaattatgctaacgaaaatctgacataaataaaaattcagggggcacaatttcgtacatgtcaaagtttgggggtacaattcggtagatatcaaatttgggggcacgatttagtagatatcaaattttagggttacaatttagtacatgggcaataaacgcgtttgtaaaattgaataaaattgaacagaaatcctcaaatccaacaatctcaatagttcagaagaatttttaactgcctgaaaaatttaaggggcatgatttagtacatttcaaagtttgaaaggtaaaaatcctcattagctttttttatatgcaaaagtatta

SEQ ID NO: 246929 - DNA, 1159 bp, Cannabis indica
gagtgagaagaccacgaggcagacctcatggctcacgagccaggagacaagaaaaggcccgggaagaacaacccgaggaaaatgagtcaccccctgagaatcaggatgagcagccagaaaggagacaaccggaaattgatgaacgagaaatccctcatgagaatgaggaggatcttggaactcagccgagagaacagaggtcgcctgcaaggaatcaccaacgttcttcccaaacccatagagtgaggactcgtacgtaccctgatgggggaaatacgacaaaccgctttatggaggaaagaacagagcttgaagaagcaagtgtgacttcgaggcgatccagattccatagtcgatcaactcgaagaggaaaaagcactcaatgagttaatgatcgggaaagtatgggaacaagtaaattcgcgagccacttaaagacaaagtctatgagtaggatgtagtctatgagtaagacgagatctgccagcacatgagcagaaggtagcctttggcaaacccgagccaatgaggaatttgaggagaaaaagagatcctaacaaataatgtaaatttcataaagaaattaggcaaacgaccgacgaatgtcactaattgaaagatgagatagagagtctcatcgctcgaggccattttaaacagtatgtgaaaagacagggccaaggatacaaccagcccaatcagcttaataacccaaacaaccaggggttacaacctattcttgtggaaggagaggacatcctggctcgcaatttctatcgcatagaattgcagcatagaaaggccagtcattagttgatggcggtcttggcaggagataatgagaagaaagaggaagatcttcgccccgagttcaagatgaaagaaatctgctaaaaccaattgaagaattggaagaggttattgtcgacccaagaaatcccactaaatgcgtgtacatcgggaagaacctggacgagcagctcaaatagaaattaataagctttttaaaagcgaacacggatcaattcgcctagagtcattgggatattgtagggatcaaccctaagattatcgtccatcacttaattgttgatcagctacccaacgaatagacaaaaaaggaggcccttcgattccgagaggaaaggggcactaaaac

SEQ ID NO: 246930 - DNA, 743 bp, Cannabis indica
aattaataagttaggaaatttaattggtaaattttagatctacttattgggagcttaattatataggcccatggacctcacattagttgagataatattggcttgtaaactcagttaattagttttaattaattagaattctaaactagactatgtcttgtttgtgaattttcaccaagcaaaggcttaattgagaagaaggagaagatttagggtttattttaattaaaagattttataaggtctaattaatatataagttaaatggtaattttatttggtaattatttataattattaaataaatagatttgacatttataggattagaattaaaatactttgtgaaagaaaaaataagttgttgaataaatggcaaaattaaaacctatagtgcccacatatatggctagccacttaagggtttaatttagctatgattttatcttttttaatttcatataacttaaatcttaaccctagatgaaattctataataaataatgatagactcttattttaataagctgataatgaaatcctataaatgataggctcttattttcataagctgataactcgaaatttgtcagacaaaataagagaggctcttattgaattcaaaattccttctcttctcttgtcacaacccgagacctaggtcgtggtagatatgtaatatccataatttgggtggtcaaaggtcacattttgacccttgtaagaagataaagcttataaat

SEQ ID NO: 246931 - DNA, 655 bp, Cannabis indica
tgtcataagatttgagcagccagagtcaactatctaatcattatagtagctaatctttttctaaacagaagctgtcaaagctaattcttcttcctcccatgcgaatgatgcttttgtgtcccattcttcattgtttgtcttttctacatttgatgtagctgcattgccttctgcagttttcttcttgaacgagaaaattttagccatgtggccatactttccacaattgtagtattttccatcaaatttattgttattctttgattggccaccctgttttaattctgagctccacctatttggaagcttccatgatgactatccttgtcatcattttttctagaatttctactagcattcggtaggggcctacctttcttatcactactaaagagtgcttcttcatcactccttaatgagactctagatgtttgcttagctaacacttcttggttagctagcaagttttctaattcaagaagagaaggttcgcttggccaaccttatattgcagcaataaaacttctaaattttggccttaatccatgtataattattcttctaattctagcgtctgacataccagtagcagaatctaatgcaaaaatttcacgacaaaggaattttaccttggtgaagtattggttgatcgtca

SEQ ID NO: 246932 - DNA, 1364 bp, Cannabis indica
ctgttaaggattttagaccaattgcttgttgcaatgttatttacaagattgcaaccaagctattgagttctagaatcagtactattcttcctgatataatctctcactcacaaggagggtttattaaaggaagattcataggacataatatcatgatctgccaggacttggtgaggcactatcacaggaaagcaaacaagccaagctgtatgataaaacttgaccttcagaaagcatatgatactgttgagtgggagttcctagaggaggttctaactgggcttcacttcccaaataagttcatcaggatcataatgaactgtgtctctactccaaagttctctcttatgtttaatggaacattacatggtttctttgaatctaggagagggcttagacaaggagaccccatgtccccattattatttgtgatcggtatggaatatttctcgagactaatggggaagattgcagataaagaggacttccaatttcatgacagatgttcaagcctcaaattaaatcatcttgcttttgcagatgatgttcttctctttagtcatggagacttcaagagtgtgctttacatgttacaaactttgaagctcttctctttaacctctggattacatcctaatgcatctaaaactgctatttattgtagcaacatgcaggaagaatgtgtgaacaagatcaggcaattatcaggcttcatgagacatgatctccctttcacttatctgggagttccaatctgtgctaagaagatttccaggaaagaaagtgagaccttggttgagaaaatgacatcaagaattagaacctggagttcaaggaatctttcatttgcggggagaataacattaatcaattctgtgctgattgctattcaggcttactggagccaaatcataatcatgcccaaaagaattttgaagtccatagaagctatttgtagagcttttttatggaaaggccaagctgtgttttatggtgcaggtgctgtggcttgggataatgtatgtgagtctaaagctaatgggggacttggaatcacaaagatagaaagctggaataaggcagccatgtctaaatacatttgggcaattgcaaacaatcaagagaggttatggctaagatgggtgaatagtgtatacatcaagggacagagttggtggagttacagtgcctcggttcattccagctagtattggaagaggttagtagctcttaaaaaccaaattccttccttacatgatagtgctgaatttcagagacataaatatgtcatcaagcctggttataaaatgttcaacaatccaaagccgactacccattggaataagaggtctggtcccgaatga

SEQ ID NO: 246933 - DNA, 752 bp, Cannabis indica
tatcccaaattttgtccacctaatgtcgtatgtcaacataagccaagacagagtacatgtgaatacggccttgccaatagcaagacaaagtctctttacaaggaatggtaaaaccatcaagcaacaagcaaaataagttaagcgagctatcaaggagctgtaccaccatgtctggctagccaagggaagtctatattctggctaggatgagcttatatggctggacaaggtttgagcacaagctggaaaactaaaggtgactttcaaggcaaggaagcctgacctctacaaggacaaggtgtacaaaggatggcctccacctacaaaggctagtgtctacctacaaaggctggccatcatcaaggctaaccatcaccaaggttggccatcacctactaaggctggccaacacatgcaaagacctatccaactcttgacaaagcaagcaggaacatgacctcccagaccctagcaggaacatggtcggccagacctcaacctacaggaattgtatggctggccagcctgcatcctgcaggtgcatggctaactagcctttggcatgacaggattttgatgtgcagctctcatttgtggacagcaagtcaagcaatggactgggccttaatagcccgcgacaatagagggaaaatatctatttttgagaggtaatttagtcatttatatttcattaattaattacataaataatggctttatttacctatttctaaggatattaggcatgtaag

SEQ ID NO: 246934 - DNA, 589 bp, Cannabis indica
agaaaagccaaagggatcaaattcaatagaaacttggttatcagtggtgaatttgcgaaccgaaactaaatttttaattaaatttggagcatggaggactttaaacactaatggagggtggggatgaggtaaattagcactaccaaaaccacgaataggaatagaatggccatttccaacaattataccacgaatttcgctcaaattagaataagatgagagattaccttccgcagatgtcatgtgagatgtcgcctcggtgtccatgtaccatgacggatcaggtggagtaagactgagagtatgaagagctgcttcaatatcagctggactgggtgcattggcattataagctgcatgttgaggtttcggtccaagaagaccatgttgtggtggtggagtgaaagtgggcctggcccaattgttgtaggaaagatatggggaaggagggcaagtccatggagcacactgcatccaagacccaagctgccattgttgtgggtgtcttccacgtccgctaccactaccgaacccaccagctgaaccactgtcggagttttgactgttgggaattattttaccaggatct

SEQ ID NO: 246935 - DNA, 832 bp, Cannabis indica
ctaactgtaggaaacattcaaatgggaaaccacaatgggttgtgaaacaggacaataggaagcaggttccgactgatgaggaggggtttgtgaaggtgacaaggaataaaataccagcagggaaagagcaaactgaggcacattctagtgctaaaaatatgactgctataaggaattcgtttcaggcacttgaagaaaccactgaagtagctaagaacttgtcaaaaatagaggtcaagataataagggggagaaccctctctttcaaatggataagttgctatgttggaatatccgaggagccaacaatcaacataaacagcatcaaataaagcaatttattcatgttcaaaatgttgactttgttggtcttctcgagactagagtaaaggctccaaaacttgggaccttgtactcgaatgtttttatgggttggagtttctcttctaacatagcatggcatgcaaggggaaattgtaatttcttggaatcctttgagatttactgttgatattattaaatgtactagtcaattaatatatttaaaaatgtcaatagtggatggctttaacagtttcttaactgtggtttatgcttctaataatcggcttgacaggaagcttttatggaaggacttgtgtgagctagctactatagacaattggttactcataggtgattttaatgatatacttgctaaggaggagaggattggtcaaagagttaaatcttatcctgattctgatttcctgcaatgtgtcaacacttgtaatttggaggatgtcaaagtttgtggtaacttttatacatggactaataaacagcctggaga

SEQ ID NO: 246936 - DNA, 563 bp, Cannabis indica
gtttttgtgtgccacttagtggtgaaaatggcattaaaaaaattgataattggtgtcatgggattctatgcatgtctcacttcagtttagggtaggattagctgatacttgtcacgttaggtggacccagttctcggttgaacgtggttcatgtactggagagagtcactcacacatcaattggagttgaaaatgagctgttagacacgtgttgagctcaggacttccatctgtgatcccatgcgtggtgtgaaaagcttcagacgtggtcatttaacttctccactttgaccaagcataacttatatgactcaattttgtaagggaaatttgaaaaactatccataaaacactctaaaattatttccctaaatctatatctagtaaaattgcccatatatgactacatttgatttttcttcataatactcatcccatttgaaaaacaaatcccaaacaaaaagaaatcaaaacttctctctctccctctcagtgaccatgcacgaccacgacttcagcgcccgaccacgcccggccaccgacgtgttgggttttatgcccta

SEQ ID NO: 246937 - DNA, 587 bp, Cannabis indica
ttttttttttccttatgagattgccttctcacacataaaaaaatcatgataagggagttatgctacaaagaaaaatctgttatccttccaacagaatgctgctgcttatttgagagaaaaatgtaggattgatactttaaacacttgtgataagttctattaacccttgcaattacagaataggataactgaaactcttgcagaaactttattaaaattgatggacaaaattacaaatcacgagctttcgagagacttgttctctccaattccaatttgttcaagagaattggggctctccccaatgagtctcaactcttaccaattttttccatacctttttaagagactgcctctccttatatactttatggtgccctaaaataattgccacagcccctaaaactaatacaattcagccactaatacacatcagcttttaactaaaacaaagagaattaacaactaagactaaagcctagtttaatctagtggcttatcaacaccgccccctaaaactttcaccttgtcctcaaggtgaatcccaactcaaatcctcaatcatgtcaaaaactatcaacacattc

SEQ ID NO: 246938 - DNA, 682 bp, Cannabis indica
gccactttgaccattgtctcgggtgttcatatgtgaagcagcggaggtatgtttccaagcatcgattaagcacttctgtttgaccatcagtttggggatgatacgccgtgcttcgtttgaggaatgttccttgcagcttaaataggtgggtccaaaaatgactcacaaaaatcctatctcggtcagtaatgatggaaatgggcagaccatgtagccgcacaacttcacgcataaaaaggtcagccactgttacggcagtaaaaggatgtttaagcttgagaaaatgagcatacttggtcaaacggtccacaactaccattattgtatctcctccttcagatttgggaagaccctcaatgaaatccattgtgacttcgtcccaaacttgtgctggaagtggcagcggttgtagtaatccagcaggtgaagtggtgaggagtttattttgttggcacactgagcacctacgaacaaagtcttgaatatcactgcgcattccttcccaatacaattcagctgcaatacgcttgtaagttttcagctcacctgaatgacccccaatcggactcttgtgaaatgcatccaaaatttgtaaaatactgttagatttttttggaatgactagacgatttttgtaatagaggctgccatctaggatggtaaacccatggtgttggtgttg

SEQ ID NO: 246939 - DNA, 564 bp, Cannabis indica
ttcccatcctccggtagagccaccgccatcataaaaccaccacacgggttccacgggccattttccagaatatacttcacctctcgtgggtggttcagacggaagatgaaggttttaggagcagggctttgaaggcgccacccacggctgagcttccacatacccgaaagggctttcctcaacgtgccattggaaaccatcttcttagagaagaaacgacccaccaccgtagacgccaccgtcgctcgagccgcctcgtcgtccgcttgaacctggattgagaaatcctccagactgaaattttcaacctcttcgatcatctcttccaccacagaaccagacagggtattcatattcaaactaaagggggaagcttttttagggagaagacagagaaaaatgcaggatgtattttgcaccagagccctaaaatgggtaaaatttctattgcttatgcaatatggttccaaaaaggaagggatgtaataccctggggcaccttgtacggtgtccaacggtagcaaaaagctaccctaagccatactagatctttaggttagcaga

SEQ ID NO: 246940 - DNA, 856 bp, Cannabis indica
cgtaaatacttaaatttaactctgagttacatataattacttaattttaatttttgatgataataatggccaagttatattagaactttcgtaggtatctaacccttaagtgtcaagtcattatccacatgtcattttcttattagtatatttaaattaatttttaaataaaaataaaaatttaatgacctagaccaatcaaaaattggcagtgtggccattaacttgacacttcatgacccggtacttacggaagttctaaaaatataatttatatattattatcctcaaaaattaaatttaaatatatatttacaatcagaattaaacttaagtatttatgtcgaaattaaattactcatattattatataactattaagaaaataaaggaaatatactcatttagtactgtgtcttttctttgaaaataaatttggtaccatgtatttttgataatacttatttggtatcttatattttgaaattgtacatatttggtaccttaaagtaaaatttaatcaatataattctattagttctcagttatatgtaattaaataattaaatttgaatccaaaatttgtaaaattgaagacaattttaattgtattgataacattttataaaaaaaatttgagtttagagtactaaacatgtattgcttgtaaaatacagggtaccaataaatattattgaaaatacagagtactaaatttgtatttagattaaaacataaggtaccaaataatgcatataagggtgttcataaatagcgatccaatccaatctgcacgatccaatctgcaaagtgcagattggattggattggaaaattcaaaatccgcacatgtgcg

SEQ ID NO: 246941 - DNA, 720 bp, Cannabis indica
taaatatatagaaaagaaatgtagaaatgaaatggattaacaaaaaaaaggtatagggtgcaatttccacttgaatgattgattgggaggttaaaatttgtttttgtgaaagcccacaaaaagaagaaagaagtaaaattaatctttataaaagcccacaaaagacaatcccaaccaataaaataaaactaaggtccatatggcaaaaaatgggataacatgacaaggacccccaaactatcatgcaaggagaaaggaacaaaacccaagcccaatccaacagcaatccaagataaaattaaaccagaccgagctcaagagaaagctgacttgattctagatcgaaatgagccagggcaagatcaagtcaaacagtgccaaaaataaataataacctcgggataaacacaggcaagatcaagacacatcggggccgagacacaaacttatctcgaacccacgagatagacacacactaaaaataataaaataactagaaacaaggatcgatacgacagaacaccaacaaatttcgaagatagaaagatcattacctcccgatccaataaagtaacgaattcgaaccagtcaaaactaaattaaccctcctgaagaaataacccccatgcaaaactaatcattagaaattagcacctcataaagacacgtgtccatagaagcatttaaggaatgacatcacaaccatacatgcatgggatg

SEQ ID NO: 246942 - DNA, 684 bp, Cannabis indica
cacattagtagcaaactctagaccggcattcacccaagtgatatctcttgcattttgggcattcagggtaaggctgccaaacctcatttctgccccgacgaaagctctggttaccttgaaactttctgtttggacccacaaccagtggtccatctggtttcctttttcggtcattggggctaaagcttttactcactccagtactagatgaggtcttccacacgtccttcctctgagtactctttttacgaatcaagctttcggccccctcagcagtgagagctaagtccacaatctgaggataagtcttcacgacccctgattgtttggctgccataaccacatctctagcaatatattcttcaaggcctctgataaacttagcctttcttgcagcatcactagccacttcatcagaagcaaacttggccagcctatcaaacttggtagcatattcagtcacagtcatgctaccctgaactaatcgtgcgaactcttcagcttgagcggcacgaatggattcattataatatttctcataaaacagtgccctgaatgcatcccaagtcatggtattcagattatgaccttgggaaacaatctcccaccatatctgggcatcatcccgtaacatataaatagcacatcgtaccccgatccattatcttctactcgcatgaaatc

SEQ ID NO: 246943 - DNA, 887 bp, Cannabis indica
ttttgactttggtagcctcggccataaacctctggatgtaatccttcagaggttcctactgttgctgtttgactttgacaaggtcttccagctatgatggtacaagtctcaaggacgagaattgtgtgtaggattctcatatcccaggagttgaatctccctgggatgagtttgaagtaccattgttgagctttctccgataatgtggttgggaatatacgatagcgcacatcaccagtaacattctagagatcgaattgcatcttgaagtatttgatgtggccagtgggtcttctcgtccggtatacaccttccataccggcattttgaactttggcaagggtaaggaatttatgtatgccgagaatagtgatccccttgactgataaagtttacggtctgaaggcttcaggccaattattccttagatcatgttcctgagttggtctaactgtgtttgcacagaaggatctgttgctgtggggacttgactgactgaccctccttggggaggctccaaattctagagagataaggacttgcggaccataccctgagagagtgtattgtgaaggtcagctagacccgtgttgaattgcagaccctggccggccattcccaagcatgggagttagccttggccggccaggcctacacctgaatgttttgcttagccagctagacctgcattgggtagggtctagccacccagtactcctccatggccagccagatctacaaagggtaggttctggccgcccatgatgcttctatggtcggccagacccagaaaaggtagggtttggccgcccgtgactccacagtcaactgatgttaattgtgtgttaatggtgggtagatcgtaccaattgctggagtttggtgga

SEQ ID NO: 246944 - DNA, 1472 bp, Cannabis indica
ttaaccttacgtatacatatatattattctattattatattcggacaaaaatacataataataataatcattgtgcatgcattgcatttacaaattatacgtatatatatatatgtataattacaggtaataataaaatgggacaatatagggacataatttcttttatatatatgtatatgtcccatcatgtgttactattaataggaagcattatataatatttatatagataatattctgtgtatttatatatttataggtagcgtataattcccgagaacgattaccaacaattcaccacataattaataataaaagcataagaataatgcacttgcatttgacacatctatcttagttgcttacaaactgaaaatcacatcgattctacactaatatttataattagtgtacgtacgtataaagagactcaaaaataaaagataatgctatatatacataattgtgggtaataaatgtgtgtacaaatcattactctattattattattatagcatgacggagttatagctaagcactctgtttcgagtcaacacgattttgatacgacacaatttcgctctagctcaacacaaacacgatcgatatgattaaataacgaagctaaagtaagtgtaaatatgtatgataatgtataattcaaacggtaattaataaaaattaaaaaggaataataaaagagaattaattaatgaaacaaaacttatcaagagattaggttataagatcagtcacccaattaggttgagaaatgttaaaaaatttacttttagtcacaataaaaattgtgactaaaagtaaaaaagttgtaactaattataaatcgtcattcttatattgtaattaaaaggtctgtgactataaagatattaatcacaaaaatcataatttattgtgactaaatgtggttttagtcataatacttgttgcgactaaaataaattattgataacttgtatctaaataatatgttttagtcacaaatagtttttgttgtgactaaaaatcacatttaattataaaaactatatgttgtgaaaagtaactattttttatagtaaaattaaatctaatcttttaattaattgccacattgatgttgtcaaaatttgtattcttcctaaataattaattgcttgtaacttttgcactcatggaacaaattttggaattcaagcttttgaattgaaccaattcaagcactaattaaagtctttctaactcaatatacataaactctcatatattgtaggaaccgtcgttaaatttatcctcaatatcaaatttataggcgacatgtcgcttgtactaggtgcgtgtatgctgctttgaagcgcctgattcataatttcaagatttcacaaatcccattctaggcagtacctctcaggcaacatgtcacttagtaccaagcgaaatagcatccaagcatgttatacatttccaaa

SEQ ID NO: 246945 - DNA, 687 bp, Cannabis indica
tcgcgacccaatcaaaactaaaatgggcttgaagttttgctagtaataaactcaaatgggctttaaggagtagcccacgtatagtattattctgtctgacttttcttacaaaattatttttttattatctcaaatattttttttatatgtattttttaaaatttattgtttgagctgtttcagtagtttccatgtagattgttatatgaattttagtaacgatttaagttgctccattgattgctaaaaaaatttctgtatcgaattccgtaaaaatacaaaatagaaaactattttaaaatgtaaaaataaaaaaaacaccccttcaattaatcatacttatattatattagtctaaaattttacaacaaactaaagatactcactctaggaaattagtgtctatgttcatttgatccccaaattacccttctcatttaaaaactcacccaaaacacatctccctctttcattgtcttctctttttccctctcttatctccgcccaaacccatgtctcctcccattgttgtaccaaaaaattattatctatatatttatatgtactagcaaaaattacgtgcaacacacgtatactaaattttatgctaatttttttctatattatttgaaagtgatacaattaattaaaaattaaagaaaaaatattattagttattaggtaaga

SEQ ID NO: 246946 - DNA, 1525 bp, Cannabis indica
gagctgtcttcaacttcaaaaatgcttcattgcattcagcggtaaactcaaatggcctattttgttccaacaagctacacaagggtttagacaccttagaaaagtctttaatgaagcgcctatggaaacccgcgtatccaaggaagctttttatgccttttaccgtggtaggagctggtaacttctcaatgacttccaactttgccttgtcaacttctatcccctttctagacactttgtgccccaacacaataccctcttgaaccatgaagtggcatttctcccaattaagcaccaagttggtttcttcacatcttgctaacactctttccaaattctccaaacacaccccaaatgaatccccgtagatagagaagtcatccatgaatatctccaaaatactttcagccatatccgagaaaatagccatcatacacctttggaaagttgcgggagcattgcacaatccaaatggcatcctcctaaaggcaaaggtaccatatggacaagtgaaggtggttttctcttgatcttccggtgctatagaaatctgattgtaacccgaatatccgtcaagaaagcaataaaactcttttcccgccaaacgatccaacatttggtcaataaatggcagcgggaaatgatccttccgagtagcattgtttagcttccggtagtccatacacaccctccaaccggtcacggttcgagtaggaatcaactcattgtttgcattagccaccaccgtgactcctcctttcttgggcacacattgaacaggactaacccatgagctatccgaaattgggtacacaataccataatctagccacttgatcacttcttttcgcaccacttctttcatgacgggattcaatcttcgctgatgctcaacagaattgctacaaccagcttctaaaagtatcttgtgcgtgcaaatcgttggactaataccccttatgtccgccatagtccacccgattgctttcttatgctttttcaacacctctagcaaagcaccttcatcttcaactaccaagtttgatgctataataactggcagcgtgtcattctcccccaaataggcatacttcagatggcttggcaagggtttcaactccaacatcggtggttcttggatggagggttttggaggcttgaaattactttccttcaactccaaagattcaaagggcttcttgaatttagggataggttgcacgagttccacccaagcaacttggttgtcttcatcttcactcaagttttaaagcgcatcaaaagaacttataaacttgtcatccttccaagcttccttgtgaaatctttcagccacaatagagtcaatcacacttatgcgggagcattcttctatctcattcggaaacctcatagcattgaacacattaaaggtgactttttggtcattcaccctcatagtgagctccccattttgcacatcaatcagagttctcccggtagcaaggaatggccgacccaagataataggcacatctctatcagc

SEQ ID NO: 246947 - DNA, 879 bp, Cannabis indica
agtttctgtgttctggcgaagctggtcaccagttcacgaaaatgttgttgttctgtaaaaatgagagacttgaaactcttcatttctgagtgagtcgaaaatgagaaatgtaaagttgtgaatttgacttctttgactttatggatctttgttattgtgaaaaactagataggcagtcgaaacgacatcaaaatcggaaaagcaaaacccacagcacacgagtccatctgtcaacctgagtgctgggtacttattctcgagctctcgggatctcgtttttgatactttcaaggcttttgaacttgatgacgaggtcattctatcccatttttgaccattccggatttagtggtcgtattagttttaatcatcacaacaggtatagtgactaaaaacacatttagtcacaacaaattatgatttttgtgaccaatacttttagccaggaccgtcttaaatattgtggaggccttgttctaattttcaaaattggctccttataaaaaaaaatgattttttacaaaaatactggattttggataaaagtttacaattttattgtcacgcgaatttttttacataaatactgtatttttataaaacaaccgtaaaataacaaaacagaacaattaaaacagtgaaacaactaacaaacaaccgtgaaaacttaacacggtacacagtataaaacttacacaatatttttgaaaaatatacagtatatggtataaaactaccaaggtcggcccaaacaatttgggagccttgggcgaagtaatagtttctttctaaaaaaaattgatcacattctcaccactagctacgcaatttgacaattaacgaatattagctatgattattctcattatgttatttata

SEQ ID NO: 246948 - DNA, 589 bp, Cannabis indica
aaaaagtagaaccatccacaacgcgaagcgaattaacccccataactcgaaaatcaccatcgacaactttcccaaccgtgcatccaccatggtaatgccatatggttgtcacactgcttcgacaaaattcttccattgccgactcatctgactgattcgtcggcaaagaaggcccaaaatacataaaatttctctcttcattagaatcaaccatcttaaatcgttccatagatttgctgcttaacacctcaccgatcttcttcactgcgctaacacactgggagaggtctttagggtgagagaagtaattgaattgcacatgtggagtgactctcacatcgttggatgaagccaaccatagagagccactcgacaagggatgccttagcttttcgcaaatgatggccatacccaaattcgcggtggaggatttagggtacatactaaaaggtaacggagttggggaattgggaagattagccgagatggtttccatgaaataatggtctgtaattcctacaacttgaaccgcggaaggctcagttggaaatgggattatgagattgatgttgttacgagggttatcagc

SEQ ID NO: 246949 - DNA, 1485 bp, Cannabis indica
tgggagcactaggtggaacacacattaaaaagttaatgtgcctccatagactagaaagggtgaaattgctactaatgtattaagtgtagtctcacaagatatggaatttatttatctcttacctggatcgtaaggaacagctgcagactctagagtgttgcgagatgctatatctaggccaaatgggttgaaagttccacaaggtataatttttcttccatgttaatatcatacatatacaagttaagttcataatatgtttaaagtttcgtcattcaatttataggatactactacttacgtgatgatggatatcctaattgtgaaggtttcttagtaccatatagaggacaataatatcatttaaacaatttggatgtcccacctaatactgttgctaatttttttaatacgaaacattcttctgctcgaaatgtagtagagagcatttagactattaaagggacgatgagcaattcttagaagtcgatcatactatcctgtcaaaatttagtgctgaattatttaggcttatttccttcttcacaatctaattaaaagagaaatgcctatagatcctctagaaaaagcattagaggaaagtgaggatgattcttctgacaaagatgaaagtttaggcaatgatcattgtacacatattgaaatatctaacgcttggacttcttagagggacaacatagctagagagatggttgacctatcgtgaggaatgaggcatacttagattgtatttgtttatattatttgtgtttgatttacttaaatttgtataaatctttatattgttggatattacattttcttgtaatatttttgcttgactttgtatgaatttttatattattggacatcaattttagacttataagtttgatatcaaatttatatatctatgcttttagtttaattttatttgttaatatatttattgctacacttttattacaagtagatgtaagatatacatatcttaggaaaatggatgctttggagcaagcaataggattctaggaaaaaagcaccaatggacttcaattaacaattcaaaattaattaagtgtttattggagttggtaaatgctagaaaattgaaagtagacaatgagactttcaaatctagctatttacaacaatttaaaagattgatgaatgaaaaaaaatcctcattgtgtattgaaaggacaaccccacattaagtttcatatatgcatgggactttcgagcagaaaaatgtttggtgaaaaatgtgtgtggttgctgcaaagagtgtctttgatgattggataaaggtaagtgttaacttgctattcaatttaatttacaacttgatcatatcttaattcttttattatgttttttattcattacagagtcatccaaatgcaaggggcttgaggaataaaacactttctcattatgatgactttgtttttatatttggaaaggatcgttcaattgggcaag

SEQ ID NO: 246950 - DNA, 489 bp, Cannabis indica
aaaaaagcacattactagaaaaccctaagacttgataatccctaaagctatttcgatgagagttcccttagtgtgagagataggggaaataagcttttggacaaaagtgtaataccttgttcaagtgatggtgatccccactaatctacactcaaggttgtgagtgagtgtattatacatattgttttattatttgttataatataatatagattaaaatatttaaatctgacatattgtatattaatatgagattaatatatattatgtgttggaggttatatcgtacctagtacaataatacacataaaaattgtaacatatgaggagctacaaatctaaaaatagattgtaacttaaggatcagatgtacttaagtgagttattacatatggaagttatgaaataattgagataagtttatagctattagaaactgttacaatactcaattaaatcatttaaatgagtattgggacgttggaggaa

SEQ ID NO: 246951 - DNA, 1036 bp, Cannabis indica
caaatgaattctactcatttatcaaaaataagaaaaactaagaaaagactctttctttcaaccctctctccttctctctcttgaaatccctagagaaagcaacaatatgttgtttctttctgaaattcaagctagtttcagcaagaatttggtggtctcaagttctaggtaagcttcttgtaacctctcctttagtttcttgaagtgtaagaaagtggatttttgcatgaaatatgtttatggtttatgttcttattgtggttgttggttattgatttcagaagttaaaatatgtttttatgtgtaattttgaagtgtttttaggggctgtagtatacattgagcaagctttgagtttttgaactcaagcttggctcattgatggtaattttagattctgagcatgggtagttgttctatcacttggaaaatgtattggggtgtattatgtaggtttggaaagtttggttgggttttgaatcgatttggttagggtttggatgttttttaattttctaggtaaaaccggttacccgaattttgtagcagggtgtcccaaaaaatccagctcgtcgatttgttctagtttcaagtttctagttggttctttccctgcttgtttagggttttgccataataagttgcagtagatagggttttagttttaaacctaagtcccgggtgtgatttagcgtgtcacttatccatattgttatcaatgtgatttaggagcctataatataccgagcagttgttccgctcaggttgaccggcacatctgaattcagaattgaggtaagattagtagaatatcatgcatacgttattacatgcttagagtaaatgttgtttatgcctgttagattacattgatagcagtaatagtatacatagagttgtgttgattactgataaatgtatgttggctaaaatactgatcgatactatcacctcaatatggctagagtatgactagcatattgagtataggctgacattatggtcgatagtgtgtcatatgaacgttctagactca

SEQ ID NO: 246952 - DNA, 934 bp, Cannabis indica
aacccaaaaccctaggttctgttatactctctagggattattctaattcaggaaatagagaaacacccaactaaggcacagaatggacgagatttgagaaaatgagacactcggggaaccctaccaaaattggctaaccggttttacaggtacatgtaaaaccggttacccgctttgcaccagttgacccaagaaatctcatttcttgctcaaaactccatcaaacgtaaccaaaccttccagagtacctaattagggtatacacaacatattccagccaatataaaccatagagaaacccactgaatcaaaacatgccacgaaagatcaaagtttaggttttcaaacccaaacttgcataaatccaattccatacatcaaaatcaattgtaataagctaaaaccaactcaaattaaccctacaattcgaactacaacttaacctaaccctaacaaccactaatactcaaaatcacatatttaaaccaagtaaaacttcaagaactaagggatagagaagctagggcgtaccttggctaagaaatcctttaatccctgctgaaacacccaaaaaccagcagcaattccccttgtcttgggctggttcgaagagagagagggaaagaaagagagctctttctatttttctgatcttttctttgatttttcctttaatttctctcaatgaagtaaaggttaaaaccttaaccttggctgaaataattaatactaggtgtcatctaattaggcagccacctaatcaccttaaataggaaattactaaattgccctccaagttacaacttaggtatttcgcaaactaggggtaaaatggtcgaattccatatccccgcacaacatcgatattttattttctctaaaatattttccactaaaaaataaggatctaaacttacccatgtgatcaaactag

SEQ ID NO: 246953 - DNA, 921 bp, Cannabis indica
ttatacataaatatgagaatatgtttctcatagttacagaaaatagtttcaaaaaaaaaaagaaaatctacgaatctccctaaaagggtgcacctatacattcttatcagttttagcatttgaaaatttttttaggctttttttatgtatatactaaaatggaaaaaatattacacaaatacattggcaagtcctataaatatttatacaccccaacaacaaaattacctcttgctttaaccattcagacgtacaaaccactttcttttacaacgacagcttccagcaaccaaactagcaggccaaccaaaaagaaaccaagccagaaagagaattaccgtaaatttcggggagaccgtaagaaatccaaacacatataattttagatttatgcaaaatcaggtagaaaaattggttcaaaactaaaattcaaccctgaattacgattaaaatcacagaaaattaatcctcttaatatcaatatttagattcataaaatgtagatttgtctgaaatggatatggagttcttgatcaattcaaataaagtataaaccgaaaaaaagtatcaatacaatagctaatgtttctctcgttgcattaacgttgttttttaaattttcaatggtgaatttattcatatcaaatcacgaataacaaagaaaattcaaattcatctagagtcacgtacataaaaatattgttctagtttttaagtttttgcaaagttaaattgtatttgcattaatattttactaacactctgaaactaggagggaaggcatggttttggtggggttgttcgggatcaccagggtcggttcgtggttggaattttgggactgctgattgggcaagtttttcccgagattgttgaagttgtggctctcaaggaagtcctttcgtggttgaagcatgattt

SEQ ID NO: 246954 - DNA, 729 bp, Cannabis indica
agtagaatggatattcagttttgctacatatttggtgtgaagaatgataacatggaagataatgagaagagaaaattagtagtagtagccataggataagagattgaatatctatatataaattaattttataaaataataaaaaaatgtaatagtacttttgattaaaatattatttataaaatttaacaaaaaattaagaagctccctatatttaaaaagttttctattcatttatttattataaaaagttattttttgtatgattgaaagttattttttcagtttcactttctttttgttttaactaataaatgtgtttgagtatgtggttgactggacatgcttttaggaacctataacaatgctctcctaaatgaccagaagagattttagagtgacaaactagagtaaatgagaatgaaaatgaatctttcacttcgatcttaaattcaaaaaaatcgagatattattaaatttggcaacttgtaatttgtacaattttacaaaaaaaaacttagaaagaatctattttctttaatttctatttcagaaattgatccatttgtttcaatgttagagccaaatgaaattaaaattagtcactactgaaaaaaaacttttgcatagattaacataatggttaacattggactaacacaattagtctattgattgcgttagttttaaaggacacatataaccttttttttaataaaaaaatcgctc

SEQ ID NO: 246955 - DNA, 1081 bp, Cannabis indica
accctaattttaatatgtcaataatttttattaaatctaaattggaaaaataaaaattcaataaaacaaggtacatgtgcatcgacacaaatctatggatagaaagtcaaattttctatttaaaagagaaagaaaaaaaaggtagcagcagaggtatatatatactattttagaatcaaatataaataattcatttcttaaaccaaaaatcaagtcgtcgaagaaaagtttaaataatatataaaattttaaaattaagcccgatatatcagattcttaaaacatagagttgattattttagtgcaatatattcatttgtttaaactctatgagtcaaaacaaaagataagattgagttcaagaatactttttcaaatcccttaaagccaaaatttaaaatctttaacaataattagaataaaacgagataaccaattattgtaaatatgttttacaattcaaaaaactgacctctaaatgtgtgagataattttttaagtcaaacccaccaaaacagagttaaaacatgcctgcaaaaaagaaaaagaaaacagagagagagatgttgagactcacaaatgcaactataagagtatataaataagaaagaaagacccaaaaagattcacaaagattcaatcacaaaccgagaacatacacatatatacccatcaaagcataaaacttaaatacataataataaatttcaccaaataaaaccatatatacatgaaagcatgacttaagtatacaacaaaacaagtctatataatgactcagtaaaccaaacctgagagtttgaagaagtaaaatcagagaagcaattacgtattctgcagcaaagttccacttcttaaaactatttatttgataagtttgatcatgttagaatagtatacttatactaacctttaaagagaggataactctcaatctcacaaatcatataacacgtatatgtaatgactcagcactaatatatcaattagttcaacacgtagcaaaatatgagataaaatcaaaaatttatcttcaaatactttgaaattctactaagagatattcagaaattatgaaaaa

SEQ ID NO: 246956 - DNA, 1823 bp, Cannabis indica
aagaaacaaggtatttctatcttcgttataaattttgtgttttagagaattattatccccttgggttattaattctggatctactaaccatgtttattttcttctaattttagctccagctgcttaagcttggattgatatcctagcgagttgagttggatggttggacagaagggtggagattgtccaagttgaagatgaagttcgtcttttatttaatttttgagttaattgttttagtccatgaacaatttgatttcaattattagtttgggattccattccctatttcatattttgcagacaattcattatgatatttttgagattgttaataaaattttctctttaaaaggtttcattatgaattgcttttatgaaattgagcttcatatttactttaacttgtatgttaataccaattatattcatatgtttatcatattttatgtgttttgtgttttattattgatgcaaaatctatggtatattattctctgcaaagagataataccacataaacacttagaatttaaaattcaatgtttatgaataattgtcatttcttaagcaattgataagattttgtttgatataaagatctttagatttgatagaggtggaagaagttaagaaacaatgtatgcaactcaaagatcttttatatcttttgaactctagactatattcataactccatatgatctctataacacttaggagtggaagaagttattgatatatgtagttcaaacctttttaactttgaactctagactatactcaatacatcatattatctctatggcacacatatttttttttattagacatggatataatataataaacaaactagcaaaatattagaacttattcttgatcctataagtgttccaattttcatgttactgtagtaatagagattgataccaagaagttcttggacatagtatcacagtactttatcttagtgggagaattttaaattctagcccattattatttggatgacactagtgatagcttactatgttatgatcgtgataggaactttagaataaactaagaaagtaaatctaaccattcatatggatagaaatgacttatcataattatagggataatattgaaaatttttgcaatgtctattcgaatgactaaggcaaaatacctaatcattatgaaaagttttatggcatctctattgattacttaatcttaaacaagtattttacattaatgttcatactagaatgctatgttgaagacttagtctagaagaaacttattgtttcaaactaagattgaatgtcacaacaagaggtccctaagaactaattgtaagagtttaaatgcacacttgtggacgaatttaactagactcctactgttgagtgggagccatgattcaaagcgtaggggtattgaatttcaaataggagactctgtatttcttcaagtatcacttatgaaagaggtgcgtagatttgaaaagaaaaaaggaaaattgaaccctagatacatctgtccttctgagatactaaagcggataggctaggtcgcctatcgattagctttaccaccctcgttgtcgggggtgtataatgtcttccacacctctatgttgaaaaagtatgtgtcagatccgacacatattttgagttactatgatattaagctccacacagacttatcttatgaggaagcgacttgggaattaaagtcgtagatgcgggagttgtatccccaaattattcaggtaaatttcaaggacgaaatttttataaggaggggatggttgtaataccccaataagccta

SEQ ID NO: 246957 - DNA, 498 bp, Cannabis indica
aaaggccaattccatcttcttatacttttcattgggaaataatatgttagaatatgaaatcagatcaaagttttgagaggtatgaattgagcactccattgtttccaacccttctctagggtattcactgatttggatggtatgagctacttgtcgttttgtggtgggcattcatgaagattggatcacttattgggacagccaagatttgcaaacacacttggaccgtaccacagattttgcgtctaatcttgaaattatatttttaacgatttcatctgataattctgaattacataacaccatcgccatttttatcaaatcaaaataaagagttgttgtagcctttataaatataacatcataaattaaaatgtatatataatcttttaatttggatcctattttatttgtgaaaaaggaaggagggatccctttagatgtgtattgattacttggaacggttaagaataagtatcctttgccaagaattgatga

SEQ ID NO: 246958 - DNA, 1336 bp, Cannabis indica
aggattgctctcagaaattttatcaatgctgattttacttcgagcaacaaaccttttccaattttaagctttttggccagaatatctgggccgatctcaatctcttcaagttcttccactggtccaacaatgtttcttgggtccccaagtcgaggatccacatcttcatccccgccttgggatgttccctatttagaaatgtttttccccttgtccgaactctggcaagaggatacttcctttttagccttggctatggcaaggttatcccgagcaacttgctggttttctcttagacaccctaccccattctttgttgggaacttaaggcattaatgaaatatcgatgtaacagactttaagtcatataaagttggtcggcctaacatgacgttaaggctgatggaacgtctaataccaaaaattgtgccattatagttatgcttgttggagcttgcccaacagtgaggggtaggcaaattttccctagaggtgtgactccttggccggagaaaccatacacgggttggattggagacaggggttaaatctttgagctggagccccatctaatgttgtcttgaataagatgttggaaaaggctccattttctatcattgttaggcccaccatcttgttggctatcgagatttccacgacaaccgggtcgtagtgtggaaatctaatcttgacaccatcttcatcattaaatgttatggtgggctcccctgcccgtgggatcttcagctttctttcttctacaacaaggactacttcttgctcgtgttgtactattcgggcatacctctcccgggctttgcctgaatctccagctatgtgcggacctccaataatgacttgcagatgtccatctactagtggtggtagcaagtcttggttgttatcgcccctttgattctgatcgaccttgacatacttctgcacatgttgattatttttccttatcaggaattcgatttcccactttagattgttgcattcattggtgtcatggccataatccccatgaaaacgacaaaacttggtaatatctctcttactgacatcttttttcatgggtgcgggcttcttgtacggggctaatgactgagtagccatgtacacactttctatatcttccgtcaacacagtaaatgcagtatacttggcaggattctcccagggaacttgtttggtcttgccattgaactttctctttttcccattcccttgcctattattgttgttggaccgtttaccacccgagcttgaattgcttgggtaatagaggagctggacggatgtccctgtataaggaacttttgactggctaggt

SEQ ID NO: 246959 - DNA, 2322 bp, Cannabis indica
tttttaaaattagtattatgtggaccactaaaaatttgccacgtgtttaagtgtgtacacgtgagcagtccactgtggcacttaactgtaatttttggacggagggtatagagcaaaacataatgggagcttaagtagttttgcccttaaaaaatccatttttcgtgattaattattaaaatatttaaaattcaagtagtttagatgccaatatatttcttttaaaacatactattttaaaaagtataaaatctcatgtcaaaaaaatatatataaaatgtaaattattatttaacaaaaaaaataaaaaatctaatcaatcacaaaattaaattaatatttatgacctatatatataaatataggcatgcatatgcatgtccgccattgatagcggcagacaatttgttaattgacttgaatataacacttatacttgtattgtagtcataaaaagccttctatgtgtggttcgtgaggtcccacaccaccacgaccctaaatagcatgataataatattctcactcctatttcataaatcatattcatcttgttagttgttacagtgactttcaaactttgaattaatagaattgtaacttttgaacttccaactaatttcttaccttcgttatatatagcttttcatattccatattcttctacagtgttccaaaaacaactataaaaagggttcaaacccaacccttgaaatcccccataagtaccacattaattcctccaaaactaaccacccttaaacaaaaaccaactttatagagagctatttccaactcaaacaatggctgccaaatttttcttgaaagccctctcaatcatcgctcttacttttgctctttgccttcaaggcaccttaggttggtcaattaattaataaaaacacatctttttctttttcttcataattaaataatacattatttattcatttatttggtgttttaacgtaggaggagtaacatgcgaggagctagaacaagatacatgcgcattcgcagtgtcatcagtggggaaacggtgcgttttagagaagcacgtgaaaaggagtggtgaggaagcgtacacgtgtcgtacgtcagatatagaagcagacaaactgaaggacataatcgaaaccgaccactgcatcaaagcttgtggacttgaccgtaaaacccttggaatctcatccgactcactccttgaatctcgcttcactaaccaactttgctctccttcttgtcacaactcttgtcccaacgttgttgacctttacttcaatctcgccgctggggaaggtcagtacattatatgtctttattattattattaaagatttatatatgaatttgttgaattatatttatgggatatataggtgtgtttcttcccaaactgtgtgaagcacaagctggaaatgacggtcgtcgaggaatggctgagatcaaaagctcaggttttgtggttgcccaaggaccgggcgtccaacctgccaggctaattgcagctactgcaccaatcattagcccagctctcccaccttactgattttccttaatatacataccaatatgttataagaatttatattattactttctagtattatatactcaaaatcctctctatatataatatataatatatatgtgtgtgtgatcagaagtggcaccaagttagctaggttttattcaacagccggatttgaattcactatccactcactcaatcttcttggatggtgtattcaattcatgtgcggagtgagtctatcaaatttataaggtgtaacttcataattaatgaaaaaaaaaatggtatattactactacgactcctttcgaaaaattatgctttgagtttgagtagtttttcttgtattgaagtggagtagtgaaattgtacgattgttctccccaaactatcaactatgtattattttgccttttaatttttcagccgataaaaagtaattcccaaataattacaagtgttgtaaattggtacttctttatgagtgtttagtaatttgccacatgttgacttttttttttttttaatatttagccattaatttttggttaatgattttctaaaacacttagttttattttatagttgtttttattataaattacagatgtgaagttaaggtgataaatgataatgatctaaacatttattttgttggccatatataataaaacttaacagtatgatactttaatagtttggggactatttttaagagagtcaaaaaaataggcacaataatataatagtcatagtttaaagaacaaaaaatttaaataatctaaata

SEQ ID NO: 246960 - DNA, 514 bp, Cannabis indica
aaagagaaaatcattgctattaggcaccttaagatgctaaatatgtagcatgttgcgagtgtagtgattttctatgttgtttataaattaaaaagtgagatttaatattaaattgtactaataacggtttgacatattttgtggtgtttgacgctttaagatccttagcatttctctaaaagcaacttcagttggattatgggagtgttctaggtgctgctcaatcactaactgggtctcaacttatttgtttttttcaacaaaattctctaagactcattttttaaatttatttaattgtgattcgatatttttaatcaatctccagaccttgcattggccttgcaagattttttgtacaaccggatacgtggactgcaagttacctatgaattgggcctttaacaacccaacaaactgatggaaattatttagggaaaattacatgtggacacgtttttttccatttaattctaatagtaacgttacttttaaattattgaatataccgtca

SEQ ID NO: 246961 - DNA, 511 bp, Cannabis indica
aaccaaaaaaataaaatgaaaattatttcatttccattctattctatttcattaccttcaacaaaacgttatgaagcaatacttgtttatttatttatgaatataaatcataaaaataattcttattgaacacattaattgctgtagaatttgtgccaattgtatttcttcctcttcctcatatatatttctgttttttgattaggagtgtaaatgggttggggtcggatctgatccggctatgattcgacctgatctagattatgtaaggatctgccccgtcccgccccgctagatcagatactcggatcggatcggatcagatctgactcgactctttttttgtttaaagaattttaatacagtattaacttacaattttatatccattttaattttgtattactattattaaatacaaaactacatttggtatgacatgtattaatagattgtgtaaagataatatatttttaataaactctaccccaacaccaacaacgggtcgggt

SEQ ID NO: 246962 - DNA, 1132 bp, Cannabis indica
aatcacgtaatacgcctatgctagttagggtgttacatcagccatcaaactcacccatcatagacccccctcacccaaaccagccctcacaccctatgattacaagggccaaggccggtatccgtaagcctcgggtgttcactgctttctcaccatctcctttggctctcattaccgagcttgaacccaattgtgtaagaacggccatagccaatcctcgctggaagtctgccatggataatgagtattttgccttaaagaaaaacaacacatggattctcgtaccgcgccaactaggtatgagtgttgtggacaaccgttggctctttcgtgtcaaactcaatcgagatggcacggttcaaaggtttaaggcgcgccttgttgctaaaggtttccaacaacaacaacctggtgttgatttcttcgaaaccttcagcccggtggtcaaaagttccacaattcgtgtcatccttactctcgctgccacaaataattgggatatacaagtggacattgataattccttccttaatggtgtcctcactgaagatgtctacatggaacaacctttcggctatgtaagcaagacacaccctaatcatgtatgcacacttcaaaaggccttgtatggccttcgacaggcacctcgggcatggtttgacgtctcaaacaagtgttgttttctctgggattttgtaactctgtatccgatccatcactcttcttttatcataatgctgctgctgaactttacctcattgtctatgtcgatgatatcctcttaacaggaataacaaccacaacgtttgcacaatcatcaatcaattgcagcaggtgttctcacttaagactctcggatccgtcaactacttccttggctttgaaatcactcgaggggcgtatggaattcacctctctcaaggcaaatataccactgatcttcttgccaaaacacacatgctgcactcggcgtcaagtccaacgcctctgtctgttggagataaactaagtccaatgcctatgattgggctggatctgtcgatgacaggaaatcaacaaccggttactgtgtgtacttggggggaaatctcataacctggtgttcaaaaaaacaaaaggcagtagctaaatc

SEQ ID NO: 246963 - DNA, 1444 bp, Cannabis indica
aaattgagatttttagggtatcaatgttatgtagtatagttttcttcaaaatatacactgtttttttttggtaatgataaataaacagtgttaaattagcacaccattagttttttttgttaatataaatgcaaggcttttacatttgaaattttgttaatttaattattccattaataaattggtatacgtcaacaacaggtgagaacgatattaagaaacgtatcataatcaataattgaacaaaatccaatatataatatataagatcatagaggccatttttctccaaacggatcgtcacaaaacgttttaatataataagaaaaaattgaaattagagttgggtacgtccataattatgtatcaattatttattgttatcttcgttagaaacgacatgagaggcatttaatttgattggtaagttaataaatataatattataaaagagataaattagatagagatgatagagaagaagaagaataaatataagtaagatgagagagaagcacgtgtgtagtccatacatacaacatgaaaacgtactctccatctccactattctgcctcaaatcgaataatgattggggtgtggctgcaatcattgaggtcgtgctctttacaacaacaatacaccataaaccactctctctcctattttattttctataataccaacctatcttcttctacttctactttattattattattattattattattagaattactaaaaagcattattattcttatttgtattatattattattggtgtaattaagtataaattctatatagtttaaaaaataatttttaagaaatatagttaactaattatagagctacacttataaaaggtgttggatactattaatactcaataataatgctctatctaatataattggtgtttcggatgagatataccatcataattcataattgtttaaaaagaaaatgaaaaatgaaaattaaaatatatgttttgtcatgactattagagtgcgattgtacatataaaaaattcaaaataatctggttaattagctagaaataagaatataaaatataattatttagaaatttataattatatttgattgttcatgagaattaatgtataattagattaatgttagttgaattattttgtttggtttaacacaataatatgataaaattgtaaattggatatgttaagtaaatttatatagatagaattgttaataagtaaattataaattagtttttgagataatattatcattataaaaaatcttacttttagttataataaaatttatgactaaaattaaaaatattgtgactaattataaaatatcattcttatgttgtgactaaaggtattagtcacaaaaattataatttgttgtgactaaatgtgtttttagtcacaatacttgttgtgattaa

SEQ ID NO: 246964 - DNA, 1217 bp, Cannabis indica
tcggttggtagaataagaatgctaaccttggtttcttaaggataagcttcgaaagagaattcaagggtggtaagggtgtatcttatctcgtacaggaaaggaggtattgttgaaatctattgctcaagtcttgtcagttatgctataaatgttttccttttgccctcagacacttgtaaggagttagagcggcttatggccaagttctggtggcgctcaaattcaagtagcagtaagggtattaattggatgacttgggagcagttgtgtcgccataaacatgtagggggattgggatttcaaagcttgagagactttaatttggctcttttggggaagcaatattggcgtttgttggttaatactgattctttggttagtaggctttataaggctaaatattattctactggtaatctgttttctgctgtattgggagacaatcctagtttcatttggcgtagtattcttgaagcaaaagatcttatccacgcctatgctcaaagaacaattgctaatggggaaaatgtctccagtcttaatgatccttggcttccacataattcaaacaactatgttgtctcgcgacaccctgctcttgtgaataagtcggtcagctgcctctttcaagtcggtactcgcgcgtgatatgaggatgttgtgagggacctgtttattgcccgggatcaggaccttattttgtctattcagcttagtgattcggccgctaatgatggttggagttggcgacttgagacttgtgggatttattcggttaaaagtgcatataaattcttacaagaatctaagggtacttggtgccgagatgccaatattgatttttggaagcggctttggtcattaaaaattccccctaagatcagtaattgtttatggcgagctgcttcgggtgtgcttccaacttgttttcaactccaaaagcgtcatgttcctgtcaatgccgactgccctttgtgcaactctagtactgaaactattcaacatgcgttggtggaatgctcgtttgcaaaggatgctcgacatcgcagcatagtggacgtcgaggctggggcagcaacattcagcagctggttgttgggaattttcaccagggggcacgaaattgaaatggaggaagtggcgatggtgagttgggctatttggcgtgcccagaatgactttgtttggcaaaagagagttggcttgcttcaaatatt

SEQ ID NO: 246965 - DNA, 874 bp, Cannabis indica
ccgcactccctctttcagtccctttccctgtttcccattcgcatactctctctcccttactgatctctcttagtcccaatctaacgcctatttcgagtcttttccattggtaatccttgtctaccagcttgtttgcacaattttcatttttgcttcacttattcaatctctagtcagtcttccctatgcacgacgttgactcattgtctacagtccagccacttcaaacaactcgacaacctttgggacaataataatggtatcctttctcttcatcattttttttaattgtatatatttgaagaactttattttggtattgctcgaatggaattagattttgtaaaatatattatatataaatgtttattgcaaatcatttcaaatattgttagtatttttttctctattgctctctgattctctctgtctctcctacaggtggccagtgaaggaggcatcacatattttgggtggaagctcattaggtggtaacgacaagaagaagaataaaaaaattggggtcggtttggtcgggttaacccgacaaaaccgactcacccaatggtcggtttgattttttttttttaattatttgggcaagttgcacctaaaattttgtaacccgatttatactttgggttaaataaaatgtaggataaaccgaccaaaccgacgatgtacagccctacaggtgggtatgagtgggggtcattttaaattatttataattaaatatatacttaaaataaattgataatttttaattaaatttttttctatgatttttttagctattaacatttataaatatactaggtgattgttacgtgtcaaaccacgtattgttagttttatttaatattttagtttt

SEQ ID NO: 246966 - DNA, 794 bp, Cannabis indica
atgagcaataacttttctttttagtgatagagagaaaaaattaattagattaacctttttaggcttcccaaaaattatacctaataattttgatctccttaatttagtttaatttaaattgaaataaatatttatctttaaaattaattaattaactcaaaaaaaccagtggggacaccttatgtaggtggcgcctacactgtgtctcgacacaatgtgggtggcatctgccttgtctcaattaagacaatagatgtatcttttgtcctgacaacttttatcttttcctaatttatttaatttaattaatttgaaaaataaattatttattacaaaataaataatcattattttgacaattcaaaatagatttttctaaactttcatacacatctattgttcccttcctttgatagtgtttgatagtggcaatccgggaaccatggacctataatcctaagttccaatataaactagatttatttattgaatcttatcaatcaaataatcttgtttattaattctatgattactttactattaatatggaattgaactcttaaaaattataaaattatatttattaagttttactatagtgtccattgatataatcaattccaatgattagccctcctagtgttggttcgtaattagttttggtcaagatacatattgacctcatatttggccaatcgacagcagaattgtatttaatgatgatgcttgccacgtgttacacaataagaacaataaagtaaaggaacacatgattttatagaggttcggccccc

SEQ ID NO: 246967 - DNA, 1215 bp, Cannabis indica
aaaaaataattaaaatgaaaacattcataaattatggcacctatatagtatgctataacaatataagacaaataagcttaacgtatacaaatacaataaattattggaaacttacgataccttgatttcgtaataatcaaatctacttgaaaatcttcgtgaagtctcttagttgtcctcaagtttatagtatttctcataataaaattatatctcagttaatgatacataaagaataaatttaacataagacattagacatactactaaaaattaatcaatcgacaaattcacatgcatatgaaaatgataataataattgggtaaaaagagaacaaaagtcaagtacaatataagtaagtgaaacgcattttcttttcatcattacagtcgtgtttctctgcttgattgcagtaaattaattaatgaactacactcacatatactcacacacaaatacatacatacatacatatatttaataactcaacacaactcacacacaaagttgtatttaaatattaacccagaaattatcaatttaaaatataaaaaaaaaatgctccattaaaattataaaatattatgggatgctagagtgatggtctcaagccgagctcgcatataactgtatgcgttttggtttctactttttgtttcacaaagaatcatggctcaaagaagcagtgacacagagattgacaatacgttattactcacaacttaaacccaaaataacatcagtatcagagcataacgccatcacaccacttaatatcactcaaaaatttccaacctaacttgtaagttttcgaggtggtcatcacatcaaaggtctatcaagtacatgtactgagaatttaaagaaatcccatctcaaatcaagtaccaatgaagaaatgataagaaaaatagcataaactccacactcttagtagtaattactaatttctacaccaaaaacaataaacaattaaaatcaaacaagaaataatgatattaaaaagtaactaattaataacaagtaactagtaatttaccataacaaccaatagagcagcatacatcatgatattaaaagtatacaaatggtaccaacaatgcttgcgagaatgagtcaaagataaagtcaaaaagggtgagaatagaaatgaaaacaagctcagcaaaaataaaaagaacaactttaataattttcttcttatcttagaagat

SEQ ID NO: 246968 - DNA, 2408 bp, Cannabis indica
taagatattatcaattttatctacatcggtgctcttctgataatatagtcatacatctcgtcacggtaactcttctaagaccatgtcatgtgttagttggtctaaaccaccatctaaggtggtgaaattcaactgtgatgaaaggtgaattctgagttgggtaagcccgaggttaggttgttgtttcgtgatgataatagtttcgtcctatagcttctggtacttggacttaaaatgattgtttctctcatgacgttgctttgggtatctatttcggggtcatgcttgcttgttgtcttgcctacaagagagtggtgttggaatctaactgtctaattgttatcaatgctattcttcatactaaaattgatcaatcttatcaacgttgtattgttagagatattcttttttattgtaatcattttattaatatttctttcttatattgtcctacaattgttaatactgtagctcactctttagctagcattttctttgaatgatcattatgtttaatggtctgcttattcagattgtattgttgctattttgcacacaaattcttatgattaatattattatcactctttttttttcttcgagattttcctaacttggtttactcttgaggttttaaggagattattattttttaaataaaataaataaataaattaaatgcaaggatgaaatgaattgactcatcataaatataacataaatttgtaccaaataatgtacccaccttataagtagccgtaagggaaatctggtgatctgaacagaattggagattggagtagtgtgtttgtctaacttaaaccatgcaatctcatcagaaatggggtagctctacctcatcaatattattattaattctatatataccacccttaccaacatatcaacacaaacattacttgccctagtcctaattttctcgagaaaatcaaattttcacgagaaaatgatggaaaaaatttaagattcctctttctcatacataccacacgtgtgctttatatcaaatccatttctctacacacccgcacgagctgacatttcattggattctcttgatattattattattattattacatgcaataataataatattcacaactagctacttctgacaaacacatatacacatatacatgtaattatatatatatctataatataataagtacctgaattcaacatcttagtggttagctttttcctagaggatataatactaatactaaagaaattttcagtgaaaattctttttctatgtgtatatatcaataataataataataataataataataataataaaaagaagaagaaaatgaaaaaaggtaaagaatccaaagttttctctttgatagtaagacaaaacaatctttgaaatattttatgagatcattaatattgtagtaattactatagcaaatatatatatgggcataatattactattattattatactttgtttggattgacagaattggaatactatgaatttaagtgtacttttaaaaaagttgtcggtgtttaaatatatttcaaggataatatataagagagatctagattctagatagaacacatgactatataatattatatatatagcttaattgaaagtcaaattaatattatttataaagtgaaaaaattcttgaaatattattgcaaagctaccatttttgtggaaagagacattaatgatacttttcaaacctatatgaaaatgaaaattttagagtaaaatgataataaattaaattgattttattcaatatttatccaagtgataagattattaactaacaaaacttatgaaaattatctaaaagtaaaataaataattaatagattttactttatacgataccttgagaaagacttgagtagggaagtcaatattaattctatgaaagggaaatttaattaagtttaatattaatgatccatcaataaatacctatctcaacgttcaaaactcaaaagtatacctaaaaggcatgcaaaaccttttacacctaattaataaaaaaaaatacaaaagaaagaaagttgttacatttaaaaaaaaaaaaaaaacaatttttttcacttttctctattctattatggttgaccctaggattctttaacattaaaattatatcaaagaaaatttgaactaaaaagatataccatttgcaactgatgagctatagtttatacaaattcaaaataaagtcaatattaatcttactgcatggattttaattttaacacattccataaatatttatatataaataaattcagatgttatagtaatggagaagagaaaaaaaaacaatagaaaaacacagaaacatggctttcatcataatcagaaacccttgataatattacaat

SEQ ID NO: 246969 - DNA, 912 bp, Cannabis indica
aaaaaaaaattaggcccttatttaaaaagaaatgtggtgtttttaaaatcaataaaaaccgtgtgtatatttaaaaaagagacattcttttgggcccctaggctaagtgggccctacgtgtgagcctagcccgcctatgcccaaggctaagcatgtctcaagcttcaacccaccccagtcaggcttgccttgcgagttgcgacgcgaccccatatcacaagctcttattactaaaaaactaggattttctgaatgtttttaatagtcgggtatagtattctcatcgttctctaagaccgacgctaattcgaccgtcgcaaaactggatagaataagcgtcagtggaaaaatgtcaaaaaatatttttctcgacactagaaaaccgtcgacaatactatatattgtggggtagaattttaattgtaatattttgtcaatagtaaacaatcataccatattatataagttcagttatgcttttcttatataggttaagctattaattattttggtgtatttattgtggggtagaatttttttagaaatactgtgtaagttttatattgtgtactgtgttgacttgttcgacgattatttttttgattgtttcactcatattttaattgtaaatttatttttgtaaaaatccctataattatctgaattatagatgtggattatggtggatttctctcgtcacttgctactagaaagttaagcagaagaacacgtaaggcccagttatacattaattctttgagcccatttgacttctttattagcttaattgaagtgggacgtaagtccatggaagagatgcatatggtttgggcctattctttgtatgatttgtacttttcacacatttttttaagggaaacttacaaaaatactggaatttgggttaacttt

SEQ ID NO: 246970 - DNA, 579 bp, Cannabis indica
ccaagtctgggtttgggtcaaggatcgaggtcatggccggggtccgaggttcgagttcaagtctggggtccagggccaagtctgggtctagagtcctcgatggggtcggggctaaggtcaaggccgggtccgggatggggtcagggtcgaggctgaggtcgggtatggggccaaggttgaggccaggtctggggccgagaccgaggtccgaggtctagggtctagggtccagggtccgtggctggggtttgggtccaaggtccaagggcgaggtctgaggtccggtgctaggtctaggatccgtgtttgggttcgggttcggggtctaggtccaggtcttgttcatatcgggatctcaaagtattgaagtgtttttcaaaaaaaaaaaaattgtttttagaaaacattaaccaaacacgacttgtgttttgaaaacttcacaaaaaaaattgtgttctcatgtttgataagctaggtgtattttattaagtatttttagaggtgtgttcaagttgattatattgattttgtgtagatttacgcttgttttctacttgtttcaggtttaaatggtaaaat

SEQ ID NO: 246971 - DNA, 1135 bp, Cannabis indica
gtatggttgttgttgaatgaaatagtcgatttcggctggagattggccttgtctcgaagaaggcattcctaacataattgatggaagattcaacacatatacggcagtggccaagaagagcctgagaaaaggaggcctctcaaaaaagcatctgggcttgagatcggaggaagcctcgcgaggaggtggcatctgggttcgtaaatgatcgaacacgtatgtattcttgatcgaaggcggcattttgaagaagatggcctctaggttcgtagatggtcggaagcatttggtgagagttgtctggtttacaagagaggcggctgagcattttcaagagagaagagagggattctacaaaggtgtttagggtttagtttgtgttctcatagtttcacttatacgtgtaatatattaattaatgataaaaaaaaatatgtatatattatacattttataatataatgaaatggaaagacacctaggataaatatgacaagtgtcacttatgtgtataataattgttgacacgtaagcatatctatttaaataaaaaataaaatataaacaaaattaaaagaaaagtgagcacctaaaagtaaaattgtttccctccaatataagaatgatcatttaaaaattataatactgaccaattacttacatatagtctctacaattagaatatttgtcgctaaaagctacttttacctacaaataaatatctagtaagtaaaatatttgtagataaagtcacaatgattgtcaatatatacctattccacatagttttgagacagtcggataggcgccaatcatagacattgatgacaataccatactcaattacttttaatagtcccaaaatctcatttttttttcaatagtgagctcaatcttaatcctccagtaccttcccatctaattcagttacaaagttgtagggctagttattaattgtatattgggtgtgttctattttattaatagactaaaataaaattgacataaagtgagatataagcaatatgatataaatacaatataaatggaataaatgaaaaataaatatcaagtttagaattcaaatatgatgcatgagcgcatttaaaaaacattgaataatttagaaatttca

SEQ ID NO: 246972 - DNA, 972 bp, Cannabis indica
tctagcagtcagctttccctcattgatactccaaccctcagctataattccagcaaattaacttctatcccatcgaatgtacaaggtgactatggcaatctataatgcataatccaaaaaaccttcacaaataccagctcgaataggttctccaaaatttgtcaattgatttcttcacatttggcatgaaacttcactcacattgaaatatcaccagactcctatgctccatcgagatgtttgattgcatccaagggtcttccttgtactttattaacctgacacgaatcacaatattttagaaaaaaaaaatgcaatcatctcatgtgatgcagtgtatcagtaaactaataccagtacctgtgcctctaattcagcaattctatgtagagatgcctgttcaatgcaagcacggagttcacgctcttcttctaacaagccggtaatatggtgcctaagttcagccatttcttgagctaaatcctctgcttcatcttttgctttcaacttttcttctctcaactcttcctgatgcataatagtttaaaggtactcgcgcaaagacaaaaaagaccatcaaaacttagaaaagtttatatgtgactgaaacctcactaaatcatgaatatagatgccttgtgttaaatgccactttgtaaatatttatacctttagctgctccaccataagctcatattcttcaatttgctttgccattgtttgcattttgtccataatatatttgtttggccccagaagcatttcaaactttgaaaccagtgagcttatgatttcttcacaagtgctacagaaataagttaaaatgttcaatgtaagatgaaaaccgtttaatacagaagcataactcgtttaaaaacctttaagtaataattagatacctcatttcttctgacaaagtgaatttgctctctagttcatcaaacaatggttttacattgagttgtgaagcat

SEQ ID NO: 246973 - DNA, 860 bp, Cannabis indica
taaactcttatgtgtttatttcattgttttagaattcatattaggatgttaatcaaacatacttggtagtaaatctagatcctggtaaaatatttccaacaacaatatgacaactgtgaggtaaaccatgctgggaatgttgtctttagtcttttaacatattcacgagtatgtgggtcaatgagctgttagctatttgaataattcattatatacccttttcaaatagtcattttgttgtgtattctatgtataatgagacggaccttctttgttttttgttcatctcgctggtctcatcagtcagttattattcatggctcgctgttatctttaaaagggtgagtttgaatatttctactaactgtattttccaagacaagttttctgaacgtatttattattgtataattcaggtttgttcatatttcatcttcattacacgtgttagcaccatattgctactcaaaatataggtgtaacgattgcccctgtaacgccctgactctcaggaacgccacgtgtgtgcttttacaaacttattatcactaagctattagtttaggaaaaaggtgtggctaaattttaaacttttggttaaattaaactaaaaactttcattataaatacgattgtaatatggggattccctactaataaagttcttttacaattaatttacaaaacatctattacaaaatcaaggtttacatttccaaatatagaaaaagggatcgatcctgcttcccggaagctaagacaccacggctgatattgttgggttttatgccctaaataaaactcatttcaatataattagatttacatattaatatagatcagaaataacatttaatgtt

SEQ ID NO: 246974 - DNA, 1154 bp, Cannabis indica
agggttgaatagccttttcttgaagcgattttgtttaggatggggttcgattctaaatggatctttctcatacttcagtgtattacttcggttgagtacatggttactcataatggatggagtattggccctattactccatctaggggcattcgacaaggtgaccctttgtcctcttatttgtttttaatttgtgctgaagctttttcatcactaattaaacactgtgagatcacccatcaaatcaaaggcattagagttgctaatggtgctccttttatttctcacatgttatttgcggatgatagctatgtgttttgtcgagccaatgacaatgattctgcaaaggtgttaactttattgaaggattttgaaatggcctctggtcagatggtaaacttctcaaaatactctgtatttttaagtgttaatactacaccagctgatcgtactcaaatctgccatagaatgggcatcctagaagcagatgattctagtctctacctgggactacccagcataatcagcaggaacaagaaggcaatatttggcttcctaaaagacaaattatgcaaacagattcaaagctaggaatgcagattttatcaaaagctggaaaagagattttactataaacaattgctcaagctctccctaattatgctatgtcagtgtttgttttgcctatgaacacttgcaaatctttggagtctgttatgagtagctactggtggaaatcatctaaacaaagcagaggggtttcttggatgagttggaaaaagctttgcaaacacaagagtactggcggtttaggctttaaagatttgagagagtataaccttgctcttcttggtaagcaggcatggagactacttgtaaatgatactactctagttagcaaggttttcaaggcaaggtattttcctaaaggttccttcttcacatcatctttaaggaataatcctagctatgtgtggaaaagcatctttgaaaccaaacaacatattcttgctggtgcaaggaaaagcattgccaaaggctttgaaacttctatcttagaggacccgtggcttcctgatgccacagatccttttgtccgtacctctcatcttgggcttgtgaatcataaggtttcttccttaatttgtatcgat

SEQ ID NO: 246975 - DNA, 921 bp, Cannabis indica
agacatatatgttatatcaaatgtttcatgtgtatgtaagacaacaccaaccaaattaattcttcctaataatgatagtgttaatgtgaatcaaagtggatctgttgttttaggaaacaacattgtcttgaccaatgttttatatgccccacttttcaaatacaatatcatctctgtaagttacctaactaagaattctcctatttctttttatttcactgctgatgagtttacaatgcaggacaaaaccagcaagaagatgattggaagaggtagtaatgtcaaagatctatacattcttgatactacaccaagtccatctcaagtcttctctgtctcagctgaagtttggcactcacggcttggacacttatcaaataaacgactgaatctccttaaaaatactctcaattgtaacatgtccgatttgcataaagcttcaccttgctatatttgtcccattgctaaacaaagaaaactcccatttcctaatagcaatacggtttctaataaaatctttgatattgttcattgtgatgtttggggaccgtatcatgttgtatcacacactaatcacagatattttttgactttagttgatgatttttccagattcacatggatatttttgatgcaacacaaatccgatgttaacttcattttgcctcaatttctgacctatgttcaaacccaattcaagcaggtttttaaggtgtttcgttctgataatgcaccagaactggtgtttaaggatttattttctaaacatggcattctacatgagttctcatgtgttgaaacacctgagcaaaatgcaattgctgaaagaaaacatcagcaccttctcaatgttgcacgatctctctattttcagtctcgagttcctattaaattctggaatgaatgtgtattgacagcagc

SEQ ID NO: 246976 - DNA, 565 bp, Cannabis indica
ttaaataactatagtacatgacctgagaaaaaatatgactaaaaaattattacgggtgctaaaatagataagggtgcatcagtgtatccattttaagggagtgcactgtagaatttttcgatgttattttaacataatgtctaataattgcagttaatttctttcaggaatcggctgctcggaacagaagactaattctggaaaatgaaaacttaacagttgtcttgaggttactgaaacaattgcttttaaattagtcccagtgaagtgcttttgtgttctgtcctttttctggggatcatatttggtttgtatgtcctttttatctctttgtgcaatttaaaaatgtaaaatgttcttttttgaaatagaacgtctattataaatataacttaaatttattttgaagaaattatattgtatattttgttggcggttgttaatatttttttaatcagttttctgtttttaaaattgaaaaaatgaaaatattttttaaaaatatgttctataaaactattttcattttttacttttttaaatgagaattaaaatttaaaaaaaa

SEQ ID NO: 246977 - DNA, 1100 bp, Cannabis indica
tataaataaaaattcaaaattccgtaaaaacaatttttttttgggtaaatctaaaataatcccaaaataaaaattctccttagccctcatttgaaaaattctatagaccaatccctaacaacattaatccttgaaaaatactacaaaacttaaacaagaggaaaaaattctatgacattttgaaaccctaatcctaaaataaaataaaaaatgaatagggtaaaacaaaaagtttttaaaatatgctaatcctaatcgtaatcctaaattcctaattgggcttttagaggtcatatagtagccgatgaagacaaattttcccgggataaatttagggattatttcataaatacacaaaaataataataaaaaaattataaaaaatacgtttaacggaattttatatatttttacaatatttttttattttatttacagaaaatacggtctttttatgctgtactcttattaatttgttgttgattttttgttatttgtatgttatttgttgattttttgttatttgttttgatattatttagatattatttttatgttacttttatgtaattttcttgttgttttcgagttgattctataaaaaactgtaaaaatatatatataaaaaaaattaaacgtaaaaattaatatttttactaaaaaatagtattttatgtaatttgtcatgtccatttaggcccttgattaaacttcaagtgtgctaattaaatttattgtactaggaaaggatgcatgcaattgtattgttaattttggcgtttaactaaagcataaatcttaattatgatttttattcctagttttatggtggaccaaatataatttatactagctatgacattaatagtggcacataatcataatggtgtgacttatctaactcgatcgattgtagagatacttgcaattaggtgatcatgcatgcaacgttcttgaccatctaatcacatacgcggtcacgtcactaaattatataaattaacacatatatatatactaggtaggagttacgtgccgaggcacgtaaatgttagttttaggtaaagtttactttttttttcttcttatttagattgtat

SEQ ID NO: 246978 - DNA, 716 bp, Cannabis indica
gacatcttggagacatgtgaatgtagaattggtgaagagagaggcttggtgaaggcatcagcaagttgtagagttgtggaaataggaatgagtcggattgatccattagtgattttgtcacggataaagtggcaatctagttctatgtgcttcgttctttcgtgaaaagtgggattgttggcgatatgaatggctgaattgttgtcgcaatagatgaatgcgggatgaggttgagggatgtggaagtcttctaggaggtattgcagccaagtgacttcactagtggcagcagccaacgctcggtattcagcttcagctgaactttttgaaatagttggttgtttctttgttcgccaagaaacgaggcaatctccgaggaagatgcaaaaaccagttgtagatcgtcttgtgatggggcaagctgcccaatctgagtcggagaagccacgaagatgtagtgaagaattccttgaatagagcagcccctgtccaggattgcctttgatgtatcttaggaggtgatgaactgcttgaagatgagtggtgcgagggttcgccatgaattggctgagagtgtttacagcataagtaatatcgggtcttgacaaggttaggtagagaagcttcccaacaagttgtcgataatgtgaaggatttgtcaaactttctccttcatcattgttgagtttttgcttaggatccatgggtgttttgct

SEQ ID NO: 246979 - DNA, 575 bp, Cannabis indica
ggtcacagggtacgggttcgggtctaggtttgggtgtgggactaaattcaggtcttgggctgggtcccagatctaaacaccgagtacgggttcagtccaagccctaggtcaagatccagatcccgatctcgagtgcttatttggttccatttcgggtgctgggtcacaagctgggtcctagattaaagtctgggtctagagtcgggtcttaggtctcgttcctagtttcgttgcccatgtccttatcctgattctatgtctaggtcttagttcttgtctatgttttagtcgcggtctaggttcgggtttgggtcctagtcgcagtttgggtttgggttcgggtgtgggtccttgtcctggtcttggtcctagtcctagtctggttccagtttcagtcgcgattttgagttcgagtttgggttcaagttcaggtcgaggttcgagtccttgtccgagtttgggttcgggtccggatctcagtctaggtccggattgggcttcgggtgtgggttaaggtcctgggtttggctccaggttcaggttcgggtctgagtcccaggtttcgatctcgatct

SEQ ID NO: 246980 - DNA, 2027 bp, Cannabis indica
aaccgtaaatttgaaaagaaaaaaaaaggttaaaaaatagtatatagagtaattcttttaatttttttatcatattatattagaatggtctttccttctacttcaaaatagaataataatcctaccaaaatgatgaaaaattttagtagaataatattctaatactttaaaatgtaactaaataaaagtagaatgaaaattattttcttttcattgtattttaattcattagctccaaccaactgacttaaattttacaacatgttccataactgaatgataaatctctgataatatatattgttaaacatagttgtacttttattaataagatcacaataagagaaattgcaattgtaataaaacttgaatggtagttgtatgttgtggtccacatgtacattaaccatggcaacaaatcaagcagctaatatttttcaaggctactcaagctcaaccaactattaaacaatggtcctaagctagggtggcaaaaaagtcattgttataccaaaatttcacatttataaattaaaatttggaagaacttatcaatgttgagcactatgtgaaatacaaatgaatcaattgtatttctaaggcttgcaaaagttataaacttagagatcactcctttatttatataatgagaatacaaattaattaggtagtttaaatcagttagagcaacaaaaaaagtcaactaattttaaaattaattacaaactccaaactaatcaatattagaatgatgttttccagtcctcttcaagtgaaatagtgtgggacacacattgagcttggacttgagatatgtaaacctgtccatggacaaagctttgatcagaatatctattgtcgaatcaatagaggggacatatggaaccttaagctgcttggtaagaatttgatctctaacaaagtggagatcaatctcgatatttttagaccttgagtgggaaataagattcgcagcaagagagcagctctttgattgtcaacccatacaataggtgttgtcggtaatgtgatattaagttcaaagagaatagagcagagcaatcaaatttcagctactgtgttggccaacgatctaaattcactttctgtgctgatcatagctaccacctagtgctttttggctgaccaagaaatatagcatatccaccagctgaccttctatcattcaagcaactagcccagtcagcatctaagtatgcttggaggaaaaatcttaaggcaagtttgatatgcaatccttcattgataatgccttttaagtatctgaacagacgtttacaagcttcccagtgaattgtggttggatcacggatgaattgacttaacttgttgatgatgaagactacattcggtctagtcaaggtcagattttgtaaagctctgaatgtgcttctatacaaagtttaatcaaagaaaggctcccattaatgagggacaatgtgtgagttgaaatggtgagacttggactaggcttggcaccttccatatgaagtttggtaagaatatctaatatgtatttggactgagataaaaacatcccagtagagttcctgagaacctcgacacctagaaagtagtggagagggtcgagatccttaacataaaactctttgttatgatcaataatagcattggaaattaaacttttgtttgggctagttattaagatgtcatccacatacactagtaacactataagagtagtacctaatccatgaataaagagggaaatatcaaactgtgatgccttgaatcctttggtgaacaatgtagcctttagtttgtcattccaagctcttggagcttacttataacgccctaaatcctagggacgcgacgtgtgtacttttgaaacgtaattttagagtagtagattaataatttaatcaaatttgtgataatagtaaaaacttcactaatataaaactatatcaataaacaggatgacatcactaaaacgttgtttcgaagatcccctgttacaaaagttttacaaaaggattata

SEQ ID NO: 246981 - DNA, 583 bp, Cannabis indica
aaacctttcctctacctttccttgtctaaacacaccgcaagttcggtattggtaagggagcaagggaaggcgcagttaccaatctattacaccagtaaaaccttctcaggggcagagggaagatacccaataattgagaaattagcatgggccttagtcacttcagcaagaaaacttcggccgtacttccagtgccatacaatcttagtcatgacatcatttccactaaaatgggtcttgcacaaacccgaggtatctgggagactaatgaagtgggcggtagaattgagcgagtttgacattcaatacctactcgggacggctattaagggataggcattagcggatttcctggtcgagataactccggagcctgtccagtttgagaaggaattcgctgggagcggttggctgctgaaggtaggcggatcctcaaatgtcagaggaagcggagtggggattgtactactgtcgcccgacggagaaatgatggagcaatccataaagttgggtttacgagccaccaacaacgatgctgagtacaaggctctgatccatgagataaaattggttaaggaaatgg

SEQ ID NO: 246982 - DNA, 847 bp, Cannabis indica
caaattgtttttaaaaataattttctgtttttaaaaacaaaaaacagttttttagttatgatgtcaaacatgcactaatttttttgactctttagaataggtgatattttttaaaagaattaatctatgtattttaaaaggatctaaattaccctatatattattagtttttaactttttctttttaaatttacggtttggatttctcaagtgatttttccagtagtttctatgtggattgctatatgaatttcgattacaatttaggttgttccgttaattgcaataggagttctatatttcgtaaaaattaatgcgaaaaaaaattattttgaaataataaaaaaaaaaaaaatctctttttttttttgggtttcaggtcttagatgcagacctaacttgcctaagtccaatactgactctgacattagtgtacgtttatggagcttgtagattgcttgatatggtaagtttattttctaatcatctttgatctttgaagatttattggttttcgggtattgttatgattggtttatcaaaactcatttagtaggaaattatttagtttattactctattggaagctttatttgttatttagcctaattaaactttagttggtaatatcacttttgggaaatttgaatttaatcttcaaacattttgaacataaaacatgttttatcatcttaaccatatatttgcttaactttcattcttaatatgtatagactttctaaattcgttcttatttattacacacttcaatattttagtagtattgttatttattactttaagatgacgaaatatttatcgatgtgtcactttataattacttagc

SEQ ID NO: 246983 - DNA, 552 bp, Cannabis indica
atagattgaacaacagccttaagaagaacttctcgagcaccagctgagaagatctttgcactccaagagtgcataagtttccaaatatgttccttgatattgctgaaaagttctttcttgtctctttccgaataagatggcaagccaagatatcttttatgacactcacggattggcatagagaggtgtcgatggaagaacacttaagttgccaaagtagtattcgtagaaaaagatatcacaaatttatcaggattaagaacttgactcgaagcacgatgatatgtgtctaaaaccctcttgatggcaaggcatgagctttcattagcttaacaaaatagaagactatcgttgacaaagagtaagtgagaaatgggtggtgcacgccttgtgagtttgaaaccatgtagattaccaatactctgttcatgttgcagcagcctagataagccttcagcacaaatcaaaaagagatacggagataaggggcaaccttggcttaagcctcttgtaggaattaagttaccagtgacttctgttgggttttatgcc

SEQ ID NO: 246984 - DNA, 1612 bp, Cannabis indica
tagttgagtctacaagatgatattatcccaaacaatgcggggatcatgggcttatgtaaccaagctcctaataagtaggtctaaaatttaccgagtaaatttctcgacttcttaattcctcctaactccactattgattcagaattacactcctgattacatagaaaactctatatactaaatatagatacgctatgaattattcattgttacaatttaaatagtcaatgatcctctatagacggtttacattgagtagggataaatttactattttacccttcaatgtattttattcttaaaatacttagctgcttgtaaatgatatttcagtaaactaatgtaattactgaaatgaacactctatcatttatcgtgttaagccaagctataaagaaacgatcatttcacttctaatagttatagattccatatctatgattaacgctcccactcaattgaactactaagtttttaagatgtaagtattgggatgttcctattagtcaactataacgaacaagtcaaagaacccatatagtataattaagctagaacttaactatctcaggattgagatcaactgacctaagatcaactaagtgacattgacttaaaaaatatataatggtaagtttatgatatcttttccactatcaatattagtccaatccaatgtatagctgataccttcgatactagtttactttgctaatgacctggaaaggacattccacttatacatgtgtaaataaaccacatcgctaattattacgttagtgtaaatcaagtgtacttataaatcgtggataactatatgtttaggatttaataaaagttataattatgattattttctactgtatagacaatactataatcatgaataactatatgtttaggatttcatagaagttatatattaaacatataatcatgaaattaatcatgtgaaccatgcaacataaaataatttttgatcttttattaattagtaaatctgattatattaaaatgagttttatttagggtataaaatcccaacaacaccatacactagggtaggcgctactcttgtcctgattaaaacaaggaagatgtcttttgtcttaacaacttttgtattttttttatttagttaatttgaaaaatagattattttaaaaaataattacaatttcgataattcaaaatatatttttttgaactttcacatagaacttttatcaccctttgacagtgtttcaatgtggcgatccggggaccattgacctataattctaagctccaataaactagatttatttattgaatctcatcaatcaaataatcttatttattaatttcatgattactccactataaatttagaattgaactcttagtaattatagaattatatttactgagttttactgcagtgtccattaatataatcaatttcagttattagccctccttgtgtctgttcgtatttagttttggttaaattatcattttacctttataattctttctttatcctttagtactgtcaattcctagtgaaagtttaatttaaatccaatccaaatttgcacacaacttttcagttctaaaattaacacttaaa

SEQ ID NO: 246985 - DNA, 1535 bp, Cannabis indica
tggtaaaatataatccaacataaataggcatgtgagcgtaacacgcaggtctatgctaaatagacaataagtgtaatggcatgatataacgtatgtgaaatgtacaattctgattattaatctttatactgtcttcctgggcttggctcacgggtgctctactgtgcaagaaggggtaaatcggtcactgatcagccatgagggtgagggctgggtgatgcttgtacatgttcgggccatactcgaccaagcaggttggggtttaccagtgttgtattttctaatcttgattttgttgcttaggtcgacacataaaatagacttgtaatatttagtgaaaatatttacgggatcacaaagcatgtatcttttggttgtaaagtttaaagttgttacaagtttaattttcattctatttcaattaaagtttaaattttctgcgcttatccttttagtaatcccggttttaggggattagggttcataatcgattagcgtagcgtgcctaactgttagggcgttacagtttggtatcagagcgccaaggtttttaaacttccagtagaccggccgaacatgtacaatcatcgtcagaaacaagctcgactcatagtgcagtaagtgttgagagtaaatgctttactgcttatatgatcatttatttactgctttccattttaggcagtatgtgagcatctagaatatttatgtgatatatgatgccatgcttaaaatgttatatgataagtgtttatttaattggagtaaatagttgagttagggtttaaggcaataagtgcataagtgtggtattggtgcttaactcgttggggttgttgattacaggggtacttgtaaaaatggaccctccgcaatcatctagaccaaagggcgaacaagtagagcctagtgtaggccaaaccaatccaccggcaccacctgcacctccatagaatctaggggataatgcggggggttggcaatgctaatccgcctactgactggcagcaaatgtttcaagaaatgcgaggtatcatgctttgtcaagaggaagagttgctcggttaaggcaaccggcaccggctattgagcaagtgttaccaccagcaccagtgtcagtggtgtgtaaccaggggtttatgttaccgcattgagattcagagtttgagcggttcgtgaagctacaacctccaacttttctaggaggcattgatataattaaagctgaatagtggatgagtacaattaccccatccttgataacatgggggtgatgggaacatagaaagtaaactattctgcctttatgttacaagatcatgcccgcgtctggtgggatatagtggggcagactcgagatgttagtgtgatgacttgggatgagtttaagagtctgtttgaagaaaaattttataacatcgccatgagaacgtctcatatggaggaatttgggaaactgactcaagaaaaaatgtttgtggtcgaatacactttagaatttgatcagctctgcaaatttgctagtgatttggtgc

SEQ ID NO: 246986 - DNA, 606 bp, Cannabis indica
atttatcaggcttaagcacaaaatgttacgaaggttgtccaatatcttgcactaacacatgggctcgtcacttggcaaatggacacaagatgtgttatatgggtcacagatggtacttggctacaaatcatcctgatagacggaagaagaaagcattcgatggtgctgaagagggagatttggctcctttgccactgtcaggggagcaaattctccaacaagtaaaacttgtagattttaagtatggaaagacgcaaaaaataagaaaacaaatggttattttcaaagaaagtcaatgttttttcgtcttccatactagaatagtttactggttcgacattatttggatgtcattgcaagaggatgctaaaatctcaatctcaattgacgggtccagatatgttaaggaagtagcaaacatgttcattccttggcctaaatacctaattgcaacatccgaggtaacttttgttaaaaattaattattaatgattagtggagtttgaatatcttaaatattcaaccatagtgaagtaggttctgcgaatatatgtgctgaggtgggatggatgaaaaaacaactgttatatctgtgttatttgtcat

SEQ ID NO: 246987 - DNA, 2547 bp, Cannabis indica
tgtaattactgtaactctagcataatggacaggaaagacccaaaaagggatttaggccttttcaacagcctagggtgagcaggcccaggtagagggtgttatggaggttttgtaaataatagaagggtattttcgtaataacaatgggtagctctggataacaggctaagtggctaaccaggcctccagttctttcttttactttggatatgataaaagccaggaaactttatacagtgctatcaagctcttaacaatggcttcctcaatcacctcatctttccacacctggtaacacccatataactttttcttattatcttactgcacctgctttagtttttctttttcatttctgatatgaaacctgcgttttccatttctcgctttttgggtttatttattttcgaataaatatgaaaattaataataataataaaaagaatgaatcctcaaaggaatagcctttaatttgtgtaatgtaggtagtagatttaagctatgttactctgcaccttaatgttttattccaattggctttactatgattttactatcatatttgcttagaaatttaactatgtttttgttattctagttttaaatatgaagaatttatctggctttaacaaaacagtataattacattatttgtaagtgtcagtggaaaagttgttactgttgtttttatcattatcccaaatattttgatttctgtaacatgtgctattgttcctacttacaaattatattctgaatacattggctgctaaaagtgatacttcacaaatatttaaattcaaaagaagaatctgtgcgatagcttggaatttgaatttatgtgaagttaacactaacggtccgtttggttgagagtatgggaaacatatgattcatgactaggaatgaaaatgggaaagagagttggaacggaaatgaatcaattatgagtgaaaaacaaaatgaataaaaaaaattagtaatttatttctgtgttggaattgcgatttaatagccattctactgtttctattggaatatcattccaatactttataaagaaaccaaataaaggaatagaatcaaaataatttccttttcattctattgcccccaaccaaacataccttaaatgaaatacttgttggtttcttgcttaattgcgtgtgcttttataagatgttttgaagtaatcaatgcttttattactattttatcagcaatgaaggagtcaagtgtttgattttcatgtagtagttaactcattgtttccaaatcatgatggtaaacttgaccaagttgcatttttttattgaggtgcaaagagactcttgagtatttcttcaaaattctaaatgtcttttcttgagacaatttcatatcagaagcttattcatagtccgttgaatgttcagattttgcattgacgtagttgtggaattatttttatagtaaacttgaaaatgttgaggaagaagttctgaaattttatgaaaaaacatttccttctctttcagcaatttgcaatctgtatttttgggagagagaagtggattatctgtttctagtgttcctgtaaaccgcgttgggtttttgaagaagacgatagaatgtaaagaatcacgaatagggaagcaaccaattgaagtgccaaaaaatgtgaccatcacattggaaggtcaagatttaaaagtaaagggccctctgggggaactcgcactaaattaccctcgtgaagtgaaggttgagagagaggaagatgggattcttagggtcagaaaagcagtagagactagaagagcaaatcagatgcatggacttttcaggtgagctctccattctctgctacctcataccttaactatttactagttttccttggatatgttttgaatggaatttatggtgcactatgattatgatgattcgatcggttgatcaatttattatcatttatgtatggcctatagtacagtttgtagttaatccttttgttttcacaagtagaaatattttcattcatatatgtcattcttctttctaccaaaaagaatgtcattcttcacttttcctttcttttattattttgttaacttggacaacagccataggtgatagaaccttgtttgtggtaattcaacagaatcaacaccagtatccttctcaatccatctcaaattaattatttgtaattctcaaacttatcttcagctaaggaaaaaatgctacttttaatcaaccagttggttatatgataagcaaaagccacatgaaactgacagacataatacataaaatagccaacctgagtgaagagttgtgttgcatgctatttctttgatttgcatgctatttttttgatgaaataacgtttctgtgtagaaatctgtcttttaacaacttgctagccccatttttaagatatcgtagaaaggattaaattctctatgcaaatcctgctagatattagctattttttatgcttgttttactataaagaattttatttcattattattctttgatacacaaaattctagaggtatg

SEQ ID NO: 246988 - DNA, 749 bp, Cannabis indica
tcctaaaaaattgtaattttttattattttttatgaaattataagtttaaaatatttttctcacccctcagtactcgcgagacccatttagatcggttgcctcggcacttgcttatgaatttgaagaagtcatcgtctgcctcggcaattgcttgtgaatttggacttgtactactcaatccattctcaaacacccattttccttaaaagaacgaaagccgaaaaccaaatccttactatagtgttaacactgtaaacccctcctcccttcactgtcttccatttcagtactcatcaccaccaaccaaccaacccactaccaggtatctatctatctttctttctttctttcttttctttttgttttcttctatggtttttctttaatttgatgttgttttcattattagtactaataattgtatttgcattattgagtgtgggaatctttgtagtagtctctatcttgtcttgtctttctgatctgtatttgttttcagtgagatttttcctctaatatctaattatatatataatgtcctcctcttgtttgatatttttcccaagtgggtttcatttaagaaccccttttgtgatggtaaagtaaagctaagatctttatttgttttttttttctttttctgcagtttttctcactgatttttggttaatggcgttcaatgataataacccatcttctataacaaccagaaagagaaagtttgaagaaaaagacagttgctttctca

SEQ ID NO: 246989 - DNA, 948 bp, Cannabis indica
taatgttaatcctcctgttgaccagcaacaaatgtttactgaaatacgaaccatcatactttttcaagaagaagaattgtgccggataggcaactggttcaagtagctctagtagaataagtgatttctctagtttttgctctagtggtagctaaccctggactagctctgcaaccacatagagattcactcattaaaaggtttgtcaagtttcaacctccgacattcctagctggtaatgatattattaaggtagatcagtggatgagtaccatcacccatatcctagataatatgggattagttggaactgagcgggttaactgtgccgcttttatgtttctagatcatgcccacacctagtgggatttagtaggtcagtcttgagacctcagtaccatgacttgggaagagtttaagaacttattagaagaaattttttacaatattgccattagtaaaactcatatagaggattttgtgaaactagttcaaggtgataagacagttgctaagtatacgctagagtttgatcgtatgtctaagttttttggtgacttggtaccaatagatttcacccaaaaatagaaatatgttactgggttagatttcacaattaatcaagacttgaagactaccactgatcatgacaatttgtataggaaagtattggagatatcacttattgcctaggagacaaaacaacaaattaagaaatagattgctaaggatgccatcatggcatcaattcctagtgctggtggtaatgtcagtaaggggaatggcagtggcatttctgatcagaaaaaaagaatgatatttttggatcatctgggatgaataagagattttggggaaacaaaggcaaccctcaaggtcgtggtcatacattcaagtcatacccggaatgtcccatgtgtaagaaacaccatcagggtgttgggctaa

SEQ ID NO: 246990 - DNA, 875 bp, Cannabis indica
attataataggtaagttgtgttttaatcattttgttagacattagtaatagtatgtagtttgctttcgttatatgtgtgtggtatttgttagaactagtattttctggtctgaaatggtagatctaattttctgacgaaatttgggttttccaagtattatcgacagtttgtcgatagaatatcaatacaatattgatagcatgcgaaggaaagtcagggatgacctttatcgacaagatatcaaaagttttttgatgatatgtcgataaataaagtaatttaaataaaatgcatatatttggcaatatatcgacaatttgtcgatataatgtcgatattttatcgataatgcacttaattaatttaaactgttgttgatatttaggaatatttgctggtatttatgtttgtcgacaatttatcaacattctatcaataaattatcgactttaagacaaaaagattgaaatttttaacacagtcaacacgaaataaatgaaattttttaaatagtatataagtaaagtcttaaacaaacattaaaacaatcataacataataatttaaaagtctttactgtgtccgtgagactcgcaatacgggcataaagatccaggcttgactagttcgtcattaaaataacctaatttgcaacagcgacaccctttgaggaatcctggtggtggatatggatatttcatccactcataatttatttgaatccgtaggaacctccattcgttcgctacccttttattttttaaaatatttaaaagcttctatatattcttgcatttcttgagtagtttcgtcactaggttcctatttgatcttttgggcagatagaagtttgtgtttactctctttactagac

SEQ ID NO: 246991 - DNA, 636 bp, Cannabis indica
aaaaaaaaattaaaattaaaatccaatggcaattataaaattaaagataactgtttttgtcgcactcgatacatttgtaattcattttaccctcagtcatgtaattctactttcttttagagaaattcgctttattcttccttctttgcagttctaaatatattgtatgtgtatcaattgatcggaaaaattgcaaaagtttaaaaattattgatcgttattggttattgatcttaagtacatgttattggaaaattttgaaagttaataattgctattggttattaatcttgaatatgtattattaaaaatttaaaagttattaattgttatttgttatggatcttgaatatgtgttcttaataaacttagcaacgatattattgattattattagttattgattttggctcgtctgtctttcacgagaaaatgtcttgccaaatgaagtcgtgttcactttggtttttgcaaaagaaaacattagttgctgaataaacttctctcggaggttcaataggggatgccttaagagcaaaacttacttatggagactgatattatgttggaaatagaagaggtgaaatcccactagtttaaaatttgaaaacaaaaatctagggagctttggtataa

SEQ ID NO: 246992 - DNA, 598 bp, Cannabis indica
catgtcccgtttggtttcggcactagtactggattcgccagccattccgcataatagacatctcggatcatgccactggtcagtaatttgtccacctccttttctatggcttctgcctttactgagtagagggggcgtcgtttctgctggactgatggcatgtctgggttaacattaaggacatgggttatgacgtggggacttatgccggtcatgtccccttggcaccatgcaaaaacatccgtggctgcccttagcgttttaattattttttctttcctttggctctagactttttcctagctagaggaccttggtgggatcgaggttgcacaccgatacttcctcgacatccttcataggttctacaacattttctgatcccacacggggatccaactcatcttcttccgccattcatggctcaataatttcacggaccatcagtatgggtaggtgggcgacaatattgtaacgctgcctggcctctccgtggtttcccctcacggtctctatcccagcctcctgagtagggaactttggacacaagtgcctgattgacgtaactgcaccgaaggtccggtcggccgaggattgc

SEQ ID NO: 246993 - DNA, 875 bp, Cannabis indica
ttggcccctcaacaaattataaattaacttatggtatctacacattatttccatgacaatttaatacccttttgatacccataacataattggtcacttaattttgtatcacactttataatagcatatacattatacatatgtgcccacaatagaattttaatccaacaatctcccacttgggcaacatatgttacctgataaatgtataaccttatgagctcaaaatttgctattatgtaaaggtattcacaacaatctcgtccatcaactatacccatataggatcaaagcgattttcgtcatatcaatcatgactaaacccatcaatggtcacatatacaaatatagccaaatgacatagatcaatcatggatgtgtagcatggaaattacatgcaatgtaccgaacatgcctatttccaactggtcctccttaaaccaaagtgaggtcaaacttaaacataacaaacagagtgaataaactgaaaactttatttctgatcagaaaataaccaaatacataaatgtcttaaacaaacataaagcaaagaaaatacaaactcccactaaatcatgatatcctcaagtaatactacacccatatgagcagtgtgctcatgaaagaccttgggtggtaatccttttgtgagcggatccgctatcatggagtttgtcccaatgtatggaaatctgtccactctgcactctttctttcacaactaggaactttatgtcaatatgctttgacttggatgagctcctattgttattggaatacagcactgctgatttattgtcacaaaatatcttaagtggtctttcaacattctccaaaatacgcagcctagtgacaaagtttctcagccatattcc

SEQ ID NO: 246994 - DNA, 12660 bp, Cannabis indica
gtgtgacatggtcgttgaccacctacggggatgaaagcccatacttgggggcgacacccccgagacctagcttgaggagggtgacaatcgtcatcttggggtgacccccgagaccccttgtacgttgttagtagtcatagtgttatgtagatgttctcatctacctttgagagtatccttatgtctacgatgggggtagtgtcatctaccccttagactaacttaacatgtaggtttgtggtgattgttcattccgcttacgaaggtgttagtctatttttttttttggagatgcccaccttactcaagctaggggtaagggtaaccgtctaacttccattctaacagtcgtgaccaccctttatgactaatggtcattccaacggtcatgactttacatattcttcattaatttagtttctgtatttttgttccatgtgttgctactcttgacatgtcatcatcgttaaaatttgggtaaacaataggtttaaagttttttaaatacgagtggtagactaaaatataagaaactctattttcggtattgcaaactatttaaaacttttcaaaaatttataggtatgatattgtaattataacgaataccgctatgaagaaaaatattctggcatgtaattttggacgtgaagattaactaataagttgtaattaatacttctctatgttaaaaagcacatcaccctctttagtatggtactattattaatgtaattagatattaaatcttatataatttaatataatacttgttaaaagaatacattactacattgaagacacatctaaaaaaaaatagtagacacttatagccaataacaatgcagtaaagaaatgtgctggttcaagcgtacagtacagtaataaatttgtgtgaataaacgaaatgagtactatctatgtctgtgttctgcatccctagtaatttctatagaacctaacctagtccctgctcggcagctacaacagttgaatttccatttcctatgagctactccacataaaattaatcatttcaccgacagtaaatatctggaccaaaacttaaaagcctgctatttttaccttatgtttttctttttcctctttctcctttaatatttttataggaataaaatgtcatctcttatttatttaatgtatttactctgtgtactatataaaatctttccttctgtctttatgtataaatatgttgtacttgtaattacaatgcacatactaaagtaaactacgccattcaacgaaagcttttctgctttccttctttttctttctctctttcaagtctggggtggtggtgtactggtgtgtgtatatatatatatattcatattatatacactgttggtctccattatcttgttcatgggtataactgagttttggcttagtgttgtggtaataggccttttgagttgtgttttgggtgccatctggaaccatttctcacccttgttctttcagacatgctctgtccctaaagggtcttttgggtggcctttggtgggagaaacaattggtttcttgaagccacactcttctaattctattggcaactttcttaaagaccattgttcaaggtgacaagtacaacccttgtatatatatatatatatatttatatttatatatacatcttgatcagtacaaatactatccataatcgtagttaagtttatttttgttttcttttcaggtacggaaaagtgttcacatcccatttgttcctttcaccaacggttgtgtcatgtgatgaagagctgaactattttattcttcagaatgaaggcaaactgtttgagtgtagttatccaaaatccatccatggaattttaggccagttctccatgttggtaactgctggtgacactcacaagaggctcagaaatgtggctctctcccttgtctccataaccaaatccaagcctgagtttctcaacgacattcagacaacggctattggtattcttcattcctggaaacacaaacgacatgtcgctttctctgaggaagccagaaaggtatctttatatcctatcctaccatataatggattaattcatctcttagttttggtttgccttttcatttctgggttttgagttgctttaaaattgtactctatatttgtttatttattttctttgcagttcacactcaatgtgattataaaacaagtgcttggtttgaccccagaagattcaaagacaacaaaaattcttgaagattttcgcactttcatgaaagggctcatatcacctcctctctatattcctggaactccttatgcaaaagctgttaaggtaaaatcattttcattttctttaagctgaaatacatattaaatggtgcataattcatgttagcctttgattgctaataaatatgtttaaataaagaaaagttaatctagctatatgaatgactttcttcttttctctttttgtgctgaaaataaaaaaagaataaaaaatttaaagggcatgtgaacattgtctttacaggctagacataggatatcttcaactgtcaaagcaattataaaggaaagaagagcaagttcttatgatgatagttctatgaaaaggaagagtgatttccttgagatacttctaactgttgataccttatctgaagatgaaaaagtgagctttgttttggattctcttttgggtggctatgagaccacctctctcttattagctatggttgtttattttcttgctcaatcaccttctgcattagaacaactaaaggtaatgacttgaaaacaatttggcctaaaatctatctatactttatatagaacaagtaattaaatgatttaacttgcttctgaattatgttataggtagagcatgacagtattaggagcatgaagcagaaagatgagcatttgaactgggaagactacagaagaatggatttcacccagaaagtaggacaaagttttatatcatagtttccttaagtactcttacttgttttacttgtattataatggatggtttgactgtttatttataaggtcataaatgaagctcttcgattgggaaatattgtaaaatttgtgcaccgaaaggccataaaagatgtcagatataaaggtactacgcattcaaaaaagttgattagtataaataaatacaatacccctttgacaaaatctggactgcatgtttgtcaaaaaataaaaattaggactgcatgacttttctttttattatttgttaattctgtactgtttagcactttaggacctttattttataaaatactaaactaaagttttgcttttcttttcctatattattttttagattacctaattccctcaggatggaaggtcctacctatatttagtgcagttcacttagactcttctctccattcaaatgctcttaagtttgatcccaacagatgggaggtaatagtttcttctcttaatacaagtaattcccattaaattctggaattgatggtagtttcttctcttaatacaagaatatttataaaactacttttatgattaattgctaattataatccaccattaaattgaacatgcagagccaaaatcaagtatccaaaagatatactccctttgggggagggcctagatgttgtcctggttctgaacttggtaggcttgaagtggcatttttccttcatcaccttgtgcaaaatttcaggtaattcatcatactgaatgtttgatcttatgaaatctttatttccatgcgaagtaagttagaggtttaaatgagcataaacttacttcacatactcttcccactgaatattataaatatgtaattagaaaaattatgtgaaaaattgcactattttttggttttgtaggtggaaagttgaagatgatgaacaacctacagcctatccatatgtagaatttaagaaagagctggtcttatatttggaaagttgctcataatttggtcaattagtggattttaagatcttatttggtagtttgaggtggaaaaaattaccagttcgagagtttgactaaaaaaggggcatattggactaaataaaactcacacagttcagaaatcagaagccacagagcagcagatcatttctcttttccttcttcgaccacagctcaccctggtcaagaattaggcacccacctcaatattcttgggcagaaggaaggaacaagattttaatttccattacacaatacacagtgataggctgtttaatgtttggtttctgtatacgtttcttcttgtaaatgtttttttttccctacttatattctttttttttatcaaaagctgaagttgtgtggtatcaagggattgggaataaagagtctgcttctgagtttcctttctaagtttaacattcagactccaaagccatagcataggttggcttttaggaattattaagagccgttggtttctttttcttttgggtttcagctcatgatttttttatattattattatttcaaaggctctattgcccctttaaagtgtaatgagcactatgaaacaattgtacaagtctctttaaattagagacacttgacaacattggaagaatacatagaagaagagaaaaagtattgctaaattataagcaactaatatttctttccactttcaccaatcattattcttaagttgaatcagcctaaaagtaagcatttttgaagaataagaacatgcaattagctgcccaaaatggcatatttgttttaggcttccttcaccacaataggactcctaacatggtgcttaccatcagaccatatcagttctccaaacgcataatccttggctgccttaagttttttgagcatgagtgtgactttaaacttcttctcttcaccaaccctcttgaacttcaagctttctggcttaacagaaactactactccggaggggtttttgattttcactctgtaagttcctggtgtgccaacgtttttcaaggttcgagttacagtgattgatttagagaggttagggacagtgattgaaggatagttgaggttggtgagtgtaattttcttggagcatctgtaaggcttctctgaaaaagtttcaatttgtgttgcattgtaccccagtgaacatagaaagttgagatagtcattgacagttaagtcataaactagccctggatccatggcttggttcggctggacatgtcccgctccaaaactgaatggagtagccatgatgttggaagcatttaacagtggctgcattctgttgtcttgagttcttgctgcgaaagacaatagcagataagagattcacaggagaactttcaggagcagattttcatttcttttgaaaaaaaaaactcaggcctttcatgtccactaatgtatgttagagtaagactgtaaagcaatatattatagagaagtttctcacccgtggtcatgattgctgacttaattgctgcaggactccaatctggatggagggttttcagaaggccaacaatgccagaaatatgaggacaagacattgatgtgcctgatacagaattgaacgcaactcgcctcttgtcaaagattagattcgtcggcccttgtgcttcgctataggctgctatgatactcactcctggtgcagtgatatcaggctgcaagtgcaaaccaaatttgatgattacccttaaaacaaaattaccagtttttctcttccaaatgtttttacttaggctggtagttttgatttttcagattccaatcaaataccagggaaagaataaaacaaaaccttaaggatttctggcgtaacagtattaggtccctttgatgaaaatgcagccatgaatggagctggttttgagcccaacttcgttctcgcaggtgtaatgtatcccttaggagacctgtaagaaacgttgacattgtactcttcatataaagcttataaaaaaccagacaataagaatgttgccactgtaaaatgaagctagaaccttgacaaaagagagtactgcagctactgctagtgctagatcttaacatgttcctctctacatgttatgcatgatctttaagaataagtgaacttaagattttatttttctatcatgtctgtatctattggttcttgctattagtttgtcatcgtacttagttgatctaatgtaagcaaagaccatgaggccatcagaatatttgatgtgcgaagccggaaggacatgaggatcagcaatgacttcatttccggtcaactcattgttggcaagaaccatcccaactgcaccagcttgtaaggcttgttgacctttgtccactcttgcattttctcctctaaggcataccagaatctttccctttacttttctgggatcaagtgttccaggcttgcataaaatactgcattatttggttcaaaaagaaaattactaaaatcattcttagtcaaacataatcaaataacttcaacttattattgttctgttcttacgcgtcttcgtccaatgcattagctgctttagcatctacagcggtaacaagtctgtagaatttgccactttgcaaagctcttgttgataaactttgtccctttagaataaaacaaatgaaaccattagtcaatgttgtaatttagtctttggagatccatgtttgacaatgatcaatttctcaaatatcaaatcctcctattcttttttcctttacccctattgagctacataaagaaaatgtgttggtaaggtagtgtggcaacaaattttgttggtaaagcatcactctcttctttcttttcaaggaaccaaataagttctctttggacacaaatagaaaagcatggaaacaaaaatgttgaattgactttcttataagctttatgagtgctaaaagggacagataccaaccttgaagctcttcttattgccaagggtgacgtaggttggaaactccctatccatagtgctggcaccaacagtgatctcccatggtgcaatgttagacacagtgccatcggttgggccagagttcccagcagaacaaactaccacaataccacgcctgatagcgtggaacgatccaatggagacactgtcattgaaatatgccgttggagctcctccaagagagacagacaaaacgtccacaccatcatggatggctatgtcaaatgcagccaagatgtctgcatcaaagcactcgtttccatccactggaggccagcacaccttgtaagctgcaaccctggctttcggcgatccacctttggctgttccattgccaaaaccgaaaacacttgctttagggacaaagttaccgcctgcagttgataaggtatgagaaccatggccttcactgtctcttggtgagttaaaagatgagttaagtggaccagcaactgcagcataaccgttattgaagtaccttgctccaattagcttcctttgatagaagacaatataccacagttattaccaataagtttgctgtaatgctctgtacataagataagattttcaatatctatgtgaaatttaggcaagagggtagctgttccaccatagcagactgacgcttacataattgattcatttgattggacaacattcaccacttgtaaccaataatttctcatatatttgcagataaaggtaaaagtttactttgattagacaacattcaccacttctgagcaataatttgccgagtgatatttaggtaaaagacacaatcttaagttctatgtaaagtttaggcaaaaggttagccgttaaataatggcgaataagaaaatatggtgagataatttgcgaagtaagaattcaaatgagatcataaataatatattcgtactagaaaaaatgtggacaaaactatctacatttcaggctttatggtgtgcaattatacatgattttgagaaataagatttcttaacttgtgaaaaacctctatgaaaagcagttggagagaaaaaactaaggtgagagtataatgtcaaagcgaaatttgattgagattcagaaattgccaaatttgttttctcttgcactattaaaaagtgtacattaatatattcaagattttgctactgctaaatctttatgatgatgtaatggtcttccccaaagactacagtacaatgttaatagcaatggaaagatgaaaaaataaagatgttttgatctgaagaagaattgtgcttggctttttgatgtcttctttatgggctacaaaacaatcaaagagttggagtaacagtactgcattatgtagtcgaattttttaaaccagggtaggattaacttaatgggattcttttgttttatgttacatgacaactagctttgccattaatgcaatatatttaccatggtatggttgaaacaaatcaagggaacttcgtagtgaagctcaagaaataaactctagaaaacaaattaaaacactaatctagtctgacataagtattacctcatctctatggtcagacaaatccaaatggtggtgctttagatggacaacccatcccactccactatctaagtaaaacattaaatattcaccactttttatatcacaagtttcacaaatcaccatcaccaaagtttggacaaaggtttttgccagaatggaaagtaactttgtataataatttatcacatgggtattgcaccctatgtttcttaatcaccaaatgaaaagggttgtaagaccttgattctagtaaaatatccaagaaaaactaaagactaaaaaagggtaattggaaaagaaagataatgtggtaaaatagtggatacctgttgcagtgaaaagaagaatcaatgcctttttggcatattcctttccactttgagggaattggtcccaacttctcatcactaaagctcttagattcaggccatacacctagcaatagcaatagcaataacccaattgtgacaaacagtaagcaccagaaagttataccccaataaagcaatacatacatagcaacatataatcaatatcacaccacttcatcttccaaacgataccaaaaaaaaaaaatcacaatcatatcatatgaatattgcaatatataccaagtgtcataagaattctatccacatgttaaattcttattgttgttatttgctataacaactagttcttacagatactgagctagcacagaagcactttttcccaattcaaattgtcggaagctttcaatcatttctcactttcatttatattttaataaatttagataatcaatgtttagtacagtattaaactttaaacaagcatccccacacgcaaaactaataatgataagtaataatagtatgcttaatttcacatgggcaactcttcattaggcttccattatatgttccctttggcccttgcaagccttaaattaatgtacctccaactaatattgttactaattctagctatgctataaagtacatgtgtaaggtactggtttaatgtttattagtgattactactttatagttggattaggcagcattttagataattagcttaagaattttttagtactggcttatcaacagtaccttatgggtccactaacactaatagcaagtaattaagtggtggatagttaacttagaagtaataataataataataacaaaatttcttaataagtgtgtagtttcatttcatttctttatgttgattttgaatttttttttttcataaagaaatcatgggaagaataaagaaagttaaaaagggaagaatcttttagtagctgtacacacaaatttttaatggtggtccaaatccaatactttatgagtttaacactaacaagaatccagaactcaataacacatatatatgagtttttttagtattttaatggaagacatttatgaccaatggttaagttcaaaaatttggtctgcctccaattgttaggattaaaataaaaaattgaatacaacggctgtgaactttaaaaccaattgctgataaatacacaattttaataatgttatcttttttcggtggaaaattttagatgtaggaaaatagctttgtatgatacagaagtcaacgattaaagatcccattcccatttttttttatcaaaatgattacacataaacgtgaggttgacttcaaagagaaggaggaacatattatatttgaaataaaacgtcacaaaatttaaataaaaaaaataataattaatttaattaatcatataataataataataaacactaaccagtatcaaggtttccgataatagtattttctccatatttggctttcttccaaattgaactataaggaacgacatcgtttcgttccaatcccaagaaatcccatgaacgagttgtgtgtagttttcttccttgattcaagaataccgatatcacattcggatgacctgcgttacaaatttcacataatcaatcaaacctttttttttttctgggaatcaatcagaaaacatctcaaaacagaggatattatatctttaattataatctaaataaaataataaaacccataccagctatcttggcagcaacttcttcatccaaggttgcagcaaagccattgatgtgctttgtgtaagagtaaaataaggaatttctagcaacttcatggctagcattaataagatcaaaaaattagaaaagagacaagatataagatagtttggataaggttttaagaagagatatggtattatatgagaaaagaaagaaaaatgtacaaagtatatgtacatgtactcttctttttttaccttcctaaaaacgattcaagaaactcatagtgagactgagtcacacgctccgagtcaagtggtgagtaatttgggccatgagaatgagctcccaagtaaaccacataagactgaaacaacacaataaaggagttgttatatgaatatataaatatatatattcagataacgaaatatcaatcagaacattattcaatatgtatatatttataaactttgactttaatatttatatttcatttatattcaatggtaatgaaaagaagagagatttagtgaaaatgaaaactatttactcaccttttgaatagctaaagaagtaggtatctgcaattgtagagagaaatgaagtaaaagaagataaagggcaagttttggttggtccatagctacaaattagaaatagaatagctaatcagatgtgcttttatagccaaaagacaatgttaattagtacttattagctagcagaattacagaagccataacaataacaatagtaataataaatttatttcttcttcttgatctgtttcttgctctctctcgaatggaacagagcaacagtgtgtacttgactgagtgggtttgctaagctctctccaaaataaaaaaagaaaatctttcttatatgagagaattgatatgtacttagtgtcaactgtgaacatcgggagaggcaagaaatgttattataatctttaacttggcacattatgtatcaatatcgttattaatatattattatttaggagctgcgctcattataatatttatatatatcttcttacatagttttcatattttggatatcagctgtattatattgtgttacctgatttattattaaaattgttatgtagttagtccaaatacataaattaatgatcgtggaagtccatgaaagattcaagtgggaattgaaagttgattaattgtataattcaattactttttgtttgactttgtttacaaaatgagtaaatattttttttgaacatgtgtttttgtaaaagttatttaacaaactatttgttttgttaaatcacaattcagatttactgtattttaaaaaaatggtataaaatagaatagaaaatttaaaaaactatctataaaacactctaaaattatttccctaaatctatatctattaaaattgcttatatatgactacatttaatttttcccacataatacccctcccatttgaaaaataaattctaaacaaatcccatttaattgcccatatgcatatgtatatcgtatggaaactacccacctaagacagctaatcacaagcagtactagagacgaccacccaccacgcacgaccatggcttcagcaccgaccacgcccggccaccgatgaccacccaccaccaccgacagcaacccccgaccatgcacgaccaccacccggagtcgcaaatatgtcgaaggttagtttttcctcggttgattttgggttttttcaaatttgaggttgaagacatcggacctcctattggtccgatgccgtccgatggggttgtgggttgggtccgatgggctgtgggttgggtccgatggggttgtgggttggggtctgatggtcattctcgtggggttggggtccgatgggttatgtcagtcgggtccgatggtgttgtggattgaagtttgagattgaaggttatgtgggtcagggcggtgggagtcgtctcggtcggatcggggctgtgggtctccgtcggagtcgtctcggtcggaggagggggctgggtcgtctcgtggtcggagtgggggtgagggggctgggtcgtctcgtggtcggagtgggggtgaggaggttgagggttcggttgggttgagggttattcttgagtttttt

SEQ ID NO: 246995 - DNA, 897 bp, Cannabis indica
gtccaagagtgttggaaagacagaatgtcccaactaattaacttaactgccgagattgaagctttgaggaatttacttgtcgaaactgaatactagctagacttaactaacaccacaaatccacatttagttgacgttagtgaagttaaactagtaaagaatagattgttcccagagcccctaagggcattagatgctggtgtcaatacttagcagccttaggaaatgcctgaagattttcacttcaaggtttccatgttggaaagttgttctaaaatgtgttgaatttcatagtaacactcagcaactttggccattatagctctcataaaggcttgtttgaccactggtgagaaaatatcattgtagtctgctccctctctttacgtgaaccctttggcaactagtcttgccttgattcttctatatttaaaccctggaatgccctctttcactttcattatccacttgcaatctacaagcttctatacaggtggtctcttacccaagttttgttcttaatcagtgatggtgtttcttcctgaattgctagaagccactttacaccatctctgatgtttatggcttccttgtaggaggttggttctacagtgttaatctcacctaaaaaagataatgcaaaccgtatgaagtctacgagtttagcaaatcccaattcgtctggagggtgtatctctcttctttccttatcgttggcaagttgatatgtctcaagttcaccttgagatgtaaaaagttcagtggatgtagatgcatctaatcacacttatgaccaaaatgtgtcctggcagagttgagtctgagttttaacattattgcatgtaccttgtgcactattttcttcagcagctttaagggaatttccttctcattgaa

SEQ ID NO: 246996 - DNA, 1432 bp, Cannabis indica
aataattaacaaaaaaaaaattacttaatacccataattaacaaaatattgtacttaatactcacaataaaacatatactcaaatccaatgcaataaaagattgggtgtttttttttttttcattttttacatttcaaaacagtttttttttttgtatttttacgaaattttacatagaacccatattacaattagcgctgtaacttaaattgcaacaaaaaatcgtacagaaacccctattgcaactagcgctgcaaccactttagaaactcaaactgtaaatttgaaaaaaaaattaaaaaaataacatatggagtaattctcctaaaaaaaactccctctttcaaattcattttagctcaaaaaaaaaaaatacttatctacacatttataaatttcttaaaatgtgtagatacaaacattatatatttttttattttctaattgtataaaaacaaaaggaaagtaataaaaagagcataaaagcataggcggacttaggggtgttgagggagcgctaaagcacaacttttttttttgaaatgtattgaggtaaatagttatataagtacttaaaatttaagttgtaagtggcataaacctaatatttattttttagcggcataagtacccaatgtctgtaaaactgtaatttttctctacttacaaacttaaaactttggatacttatgtcacaatttacccagtatattaaatataattgttgttttcatgtatatatatagtagtagttaaatagaacaaatttgttaagatgctttcacgtttcgaattcccttgccttttttttctatgtgtatctaattttatttattaagaaaaatatagcgaaataaatacttaaagtttaaggtttgtaagtggcataaacctaatatttatgtttagcggcataagtacccaatatttattaaattataatttttctctaatttcgtgagtatagtctctatgataatataagctaaaaataaatattagttttagtaagaaagtctaacatggatgaaagttcagatggcataatttagtacatatcaaagttcgaagggcatggtttggtagatatcaaagtctaggcaacatggtttagtacataaacaatcattgaaatagtaaaattgaacaaattagacaaaagtccttaaatccaacaatctcaatagttcagggggcattttcaatggcctcaaaagttcagaaggcatgatttggtacatgtcaaagttcagggagcaaaaatcctaattagcttttttttatgtacaaaaacattaaaaaaaatagtagcatcggacaccaaattttatctatttttttaattttagtaagcttgtgttcaaaaatttaatatacaccaatatatatttatagacaccaaattttacctatttttttaattttagtaag

SEQ ID NO: 246997 - DNA, 1474 bp, Cannabis indica
ttaaatttaactatttcaataatcgaaaaaaaaaattaaaagtataatttaatatatgtaaaaattatcataaacaaacattctaattacccttcttattatatataatttttttttttaaaaaaaataaaataaaataaaaccactactaataaagctagttcaccttcctcttgctaaaaatctccaaaaactctttctaaatatattcatatagaccctctcattttcatacacaacaacaactaaaacaatacaacaaatcttctcatttctcatttcgacattttatcaaacatgtatacaacaaacccaccgttcttctcactcatcatcatcatcatcatcatcaccacaattctcatcaccccatcggaatcttcaaccgacaccttcgtcttcggtggctgttctcaactcaaatactcacccggctcaccttacgagtcaggagtcaactcgctactcacttccttcgtcaactcagccatgttctcaacctacaacaagtacaccatccccgcaaccggcggcgctcccaacttgtacggacttttccaatgccggggtgacctgggcaacgacgcttgctcgcggtgtgttgcacgcgcggtgagtcaactcggtactctctgcactgactcgtgcggcggcgcgttgcaactcgagggttgcttcgttaagtacgataatacctcgtttctcggagttgaagacaaaaccgtcgtcgttaagaaatgtgggccctccgtcgggtacgattccgacgcgttgtcccggagagattccgttttggattacatgaattcgaattccggcgccggtgccggaggtttgtacagagttggtggttccggtaacattcagggagtggcgcagtgcgtgggtgacttgagccaatcggagtgtcaggattgtatctctgatgcgatccaacggctgaaaacagagtgtgggcccgcctcgtggggtgacgtgtacttggctaagtgttacgcgcgattctcggaaggtggagcccactcgcacggcggaaatggtaagataaagctggtttggtttggttttaccattccggtggttgtacggttgttcttaattttaacttaatgatttgttttatttatttaaatttaactaaatttgagaagaacccttctttgtgtaattatgattttactcaacaccctttttgcaaaaacaaaattgtttttaagtaccatgtaagtggtattatttgggtagatcataattaaccaaaggggtcttttttttttttttttttttaattttctacttttctttttagcttttttatcttttggtgtttaatttttatgttataatattcttgcttttttttttggtgtggaagtgaatgtaggtttggtttgtgtgcttaatcactaagtttgtgtgtgaatgttttaaatgtaaatgaaaatacatttagattcacatttcactttttgac

SEQ ID NO: 246998 - DNA, 1488 bp, Cannabis indica
acaattttaacaattacattatatacatactttatatctatgatgattgatgtttccatagaccgcttaaaattgagaatgacggtatattcggcagccacttaaaaaaaatgtagtaatataaggatatttttcattaattgataaaaataaatatttttcaagtattttttaatataaatatatttgatttgatttgattttgttaaacactttggtgtggcgccttgttggtaggatggagaagagaaccaatccccggcgtggaaacgaggtcaaactgcggttgaatcagttcctccagaggcggggccaatcggagaagcaatggacaaagtacatgacgtttcagattcagaattatggtaaaatcactatgattttgattttttttggtattaaagctgctaccaccaaatcacgaacgagtaccattgattctctctgcattttggattctttatttgtgtatatgttattaattttcataactgcttatcaattgtaattccttaaaatggtaattcttggttggttttgactgccacacaacaaaccaatgacaaaactttctcctccttttctctcttctctttcattatttgcttttctttcatctgtttcaaaaaattcattaattttacaatagattttctgtgagtattttgtttatcttgcatgatttgtgttagagtagatgttttacttctgagtatcatttagtttagttgtaagaatattagtaccggaagagtattccttttcgttatttaattttgtttgtcaatattttgttcactttgaaccactttctaaatgtactattcatgtttgtttgcagaggtgagaatccatcaagttttgatcttggtgaagttcttgttcttcagcctcccaggtaaaactttaatctctcattttcttctactactcttgatttggacttatttttatactttattatttggaaatagttgatacttgatgtgcctattttttgtttccttttgttctttagagtggaatttataaagtaataatagcagtgaaattagacttaatttgtggctctgtaagcatcattccaatacttttatttttttaatagaatcattccaatacttttgaactaacacagaaataactgacatttcataacagaggaggttggtggtgttataaaattgatagtaacttatgtaattaatagattccttcatgtagaaaatagtgattcgaattgtgtgtagatttcatagaataatacatatttatatacagagttaggagactaaatatctactaaatatctactaaatatctaactttcttacagctaatatacatctaatatctaacactccccctcaagctggagcatagatgttaatcatgcccagcttgttacaaagataatcaacccgcaccccattcaaagcctttgtaaaaatatctcctagttgttctccggtcttcacatatcctgtg

SEQ ID NO: 246999 - DNA, 1011 bp, Cannabis indica
tttctttgtttgatcaacagcaacccccagttccaacacttcttgtaagtttctcgcatccattactttactactgtgttcatggcatgctttactagttacttgtttttttggatttagtgtttgaagtttctgggaatgtttcaccatgaggacttacgtaatatgtctagatttcccttctctggtgttagggtcactctttttacacattattgttattttttgtgaaggctcactcattctctgtgtgtgatggccttcaagggcatagagaagacttcgtctttctcaattttccgcccttcttttttcccttttcttttatgcgcactgtcattatctgtgagacgtttgcacccgattattgtctaggaaatctttctaaggttttcttgttgacaaatgtgccgagggggcctctttccagcggttaggggacccccattccgttttttgatttagggtttggtatggggcctaattgctggaattttaactctttttcagaatcaaaaatgtctgcatccggttcaaaatcttccaagaagagcgggaagcgcctggccaccttgaaggaggtcatgatgggtcccgttgcccaggaggggtatagaccgcgtgctacgggatgggaagcggccgagcttcactccactctgacttgccctcaccacttggagaacattgtggaggtggctggaattaagcccgcaacgtccgggacgtaccaccggccgccccgagatgcggagacgcctaaccataattacggaggctttggggcttggagccagacgcatctgatgtccggtgccatgcttccccttcaagattattttattaactttcttgtatttgtcagctttgggccataccaactaatttcccaagcttatggcttgctttcaggcttatttattttttactccgcccggggatggggctctcccagtccggcggagattttgtatttttatgaacttgtttctgtccccaagaagggggaca

SEQ ID NO: 247000 - DNA, 572 bp, Cannabis indica
gggcataaaacccaacacatgttcgggccacactagaccaagcgggttggggtctactagtgacgtattcgtgactctattttgctgcctaggtgggctattgaaaacgaacttgtattattatttataaaatacttttgggatcccaatacatgaaacttttagtttataaagtttaaattattacaagtttgcttttctttcatttgtaattaaagtttaatttctgcgctaattttattagtaatcccgtttcggggattagggtgtcttaagtttattgggtagcgtgcctaatagttagggcattacaaacattgtcaattgagctttcttaaaaattcttgttatttttttgctatgtttcattattttcgtagacacaatttttactctatagtgctgactaatgcgctatgtgttctttgtggttttttcttttttgtttaacaaaaaaaaaaaaaaaaataacaaaaataggacttattatgaaaaaaatcaagaaaaaggggggcatatttttgaattgttgagcattttttcttcttttatggaaacatatttttattgca

SEQ ID NO: 247001 - DNA, 695 bp, Cannabis indica
ctaaaatatccaattcataagactgttaaattactattggtttaactcaaaaattattacaagttaaaatagtaaaatgacatactacaaatattattttagtttctaaaatttagatatttttcattttaattcttaaactaatcaaattcttttatgtgaatactcaagcaattattatttttttctcatctttcattgtaatagttttttattattattattattattattgttttaaaatagaatagccatttcattaaaatgataaaaaaaatattctattagaatgatgttttaatactttaaaatacaacaaacaaaataataaaagaaaaactatttcatttctattctattaagttacctctaaccaaactccacaatcttaaatttatattttctctagttaaaggaaaatcatttactaagggaaattgataagtacaattaattatttgaatgtctatacatgtttaacatattattgtaaatcataatcatggtgagccttagtatataggcgggttatatatctcaaatgtctatatatgtcgtgtttatggcttccacttaataatttttttaaaaaaaatactagtttgtagacaattaaataacaaatttagtattatattagacctcactcgccagcccttatgataatttatgacgaattaaaaatttactccata

SEQ ID NO: 247002 - DNA, 796 bp, Cannabis indica
aactgatccatacaacactccctggatccaaaaggtgcgaataagaatattaaaaacaattttagacaactttccaattcaggaaaatactaagacagaggaaaaacaacaatataatataattactattaaagatgttgatgaattagtaaaacatgataccttataaaagtatgtggcaactcgttgcttcgctgtaaatgtacatcctggtctttcggcttcaaagacactacataagagaagataattttttcgaaaataaattagttaaggataaaaagacttccgcatttgaagaatactgaagtccctacaaggtaacaccagatccatcatatatagaaaaggtacttaagagaactattgtgaaaaaactttttctcgaactgatccttccatttatataaatattacatgtattttggtaatgatttcagtcatttgttcagcccaacaaaggagcttaaaatgatgcacaagagactaaaaaagaagaaaacattaaagaataaagggaacatctatagagtgagaacagtagaagaaaaaatatccaagtgagcttcacttaacaagagtgaatattagagtgactcacttgaataagaacaaagggttcttgagttgccacataatagctttagctcaatacttctaatatggtgtatcttaatcattaataatttgataaaacataataggttaaaggggactaggaggcttaagaggcatagggacaaaaaaaataacagcataaatgtttttgaatatagaaaaaaaataaaacacaaat

SEQ ID NO: 247003 - DNA, 1802 bp, Cannabis indica
catactgttagaatctagaccctggtaaaacatattccaacaggttaatctctgataatattctggtttccttcgaaattctgcattagtttaaggaggaagaggaagggcaaagatgggttatatgggcccttaaactagatatgagcaaagcttatgaccgggtggaatggagctttttggaagctatgttaaggaagctgggatttgctaattattgggtgcaattgattcttaggtgggtgacttctgccagttacaaggttattcatggggctcatgagataggtcctatttttccgaccagaggtattcgtcagggggatccactgtctccatatttattcattttgtgtgcagaaggtttttcggcccttctgcagaagtatgagaatcggggatggttgcatgagtgtaaagttgctaatggggcccctcgtatttcacatatgctctttgcagacgatagctacttgtattgtaaagctacttatgaggaagcactatgaatcaaagaagttctacaaaagtttgaattggcgtcaggtcagaaagttaattttacaaagtcttcaatcttttttagtgccaatactacagatgatatgaaaacgaggctggaggagctattggggatgcctattgctgcagaggggagtatgtatctgggtcttccaagttctatgggtcaaaacaaaactgcagcattgggtttcttgaaagaaaagttgcgaaaacgccttcaatcttggggttcaaaattcctttctcgggcgggcaaggagatccttattaaaacagtggcacaagccctcccgagttatgctatgagtgtttttttgctttctcttgagattgttcgagacatggagagtatgatggccaggtattggtggaaattgtctaatcattcatcctcaggcatacattggatgtcttggaagcgtctttgtgggcacaaagataagggtggtatgggattcaaaaaccttcgagattttaatctctctctctcttgggaaagcaaggatggcgacttttgattaatcctgattctcttatgtcaaaggtgtttaaggctagatatttcccttagggatcgttccaaactgcaactattggtccgaatccgagttttgtgtggaggagtatgttggaggctcaaacattggtaaaaaaggggaccagatgggttgttggggatggtaaaagtatatctattcttggcaaaccgtggcttccggatgtcgagaatcctatgataatctctactcatccgagcatgactaatgctaaagtgtgcaacttgatgaaaattgatggatcaggctgggaagaggagatcctttaggatttgctgctgccccgtgacagattgttggtgcagtctatccctgtcttgtctccgcctactcatgattctctaaattggtcacttgatctttctggcttgtactcggttaagagtgtctataaacttttgcagcaacttaatggtgagtacaggctggatacctcagctgaagacaggttttggaggaagctgtggcaactcaaaacccctccgaaaatgaagaatctggtgtggcgcgcggcaaaaggatgtcctccatcaatgactcagcttcaatcaaagagagtgaatgtaaaccatatttgtccggtctatactgtggctcctgaaaccattgagcactctctcttatcttgtccagttgcagcagcggtatgggatcgcgtgggtattgataaggcaatgcagcaggacgtcttttttatggactggtgtatgcaccaatttg

SEQ ID NO: 247004 - DNA, 991 bp, Cannabis indica
aggagacattttattcagctgcaaccattgtaagatttttgaaacttttttttttatttatatcgttttagaagttcatgttaaagatgttaaaaacatacttgttagtaaatctagatcctggtaaaataattccaacaagcttaactggtcggatagccgcacttagtaggtttgtttcaaagtcaataaacaagtgtgttcctttcttcaatatccttcgaggaaataagaaatatatttgaatggacagaggaatgcgagaatgcctttcaaaagttaaaaagacaacttgcaaaacctcttgtactctcaaaacctcttaacagagaagaattaggaatatacctagctgttacagagcgtgctgatcagagaagaagacaacatccagcatccgatctattacatcagtaaaagactggttgaggctgatggacgatatccactgatagaaaagcttacttactgcctaatcttagcaacaaggaagttaaggccttactttcaagctcatcttgttcgggtatacactgaccaaccattacgccaaatattacaaaaccatgatgcttcaaggtggttactcaaatgagcagtggaattaggtcaatacgagataatctttcaaccccaaacaacaatcaaaggacaggctttagcggactttgtagttgagtgcacaggtaaagaagaaagcatttcaaagggcaacccagagccagtacaagatcctcagccaagcaacaagaagacaaaccaacctggaaattacacgtgggtgggttggctacagatcaactttccagtccagggattgcccttgtcacgcctggggggaaacacctgcacagggcggtcgaatttggattcagagcctccaataatgaagcagggtatgaagccctcattgcaggtctaaaacttgcttgagagttacatgctaaacacatcgagatctgtagtgactcacagttggtagtaaatcacg

SEQ ID NO: 247005 - DNA, 779 bp, Cannabis indica
acatatcacaaaacacaaaatatagttaatcataccaagcactcaccaatcatttattttatatttaagcacagcaagtgaaatttactttcatcatcttcaagcttcttaagtccttaatagtgaaatactatttgctcctaatagcattaatctcatttaatgattatgcaacagaacaccaagtcattctaactcaaagcattaaactaagctatggattttctgtttcaaggaagaaaatattgaaactaatcaaataaaatttaagttctatatataagcaaagtctactatcaattttatttgaacaaggataggcatatattaaaaaaaaaaaatggataggcatataatgacttttaatctaaatttttttcatagtcgttcacattatagttatttaaaacattctgtaaaaatttgagaaattttaaataatttacaatatagaaatcaatgtttaaaccctctatttcacacgcgtataaaataaaaaagtcacgcttgcaacagactttttgaacactattttcgacgtgttaaatttttctgaatttctcaaaattttgtcaaatatcttaaataactataatatatacgatcatataaaaaaaaaattggacaaaataattttttaaataccgaaatagataagggtgcattaatacacccattttaaatgagtgtattgtaaaatttttcaatattatttactctaaaatatatattttgtatgtaaagtaatttaagaaaaaattataatatatataatttta

SEQ ID NO: 247006 - DNA, 807 bp, Cannabis indica
cactttttttttttatgaattcgaaacaattcttgttttgattgattctagtcgtcttctagggtgaagttactggaattaatgttagttctctctttctggttagattttcgtttcggttgcgttgagttgctgcgtagttgcccaagaagcatggatcataggttgaagatatgtatttgtgtaatttttttttttattttaggcagtatatttatttattttaccaactgaaaatatttttgtaatattattattttttttggttaaaactaaaaaaactcctaaaattaataatttgtatagagtagttttattatgaatttatatatacatatagcaaagtagatgtcaaaattgataaagtagcaaaagtaatcttttattaccatatattttccctatattttttgggtgttaggtcatttatttttctttgaaagggtgtttaaggtcatttgagatggtgtaacactaatactaattaaacatcactttccagtgacttctcacaaaaaaatgcaatcaatcaaccagtatgtatattttcctccaaacaagaaaccaaggatttcctccattccactaactattcttttcttttcacttaaaaagaccaaaaaagccccaaagtcccattccattacattattatcccatctcatccccatctaatccactcatctttcaagcccagaatataaaacgttttattcctttacattacaaatattaactcttcattcctttctccattttatttagtaagaatttgaggtgaaaactttttaatttcttatctttttt

SEQ ID NO: 247007 - DNA, 2055 bp, Cannabis indica
acaacatcttaaaccctcctaatagttcctttaaaataaagaaatttaaaaaatttaaagaacaatagagcaaaaacataattcaacaaatgatataaattcattctctattttaaagtttttttttttctaaactactattctacttttaaatatattttaattttaataatactttaattatattttattctatttttattaatatatatataatatattatttaaataatatggagaaaatataaaaaaaaatagactcatatatgtgtattgtaaaaatttgatgtaaaataataaaaaaaatagtattttagtaatatattttaaaggatagagtagaaaaattgttgggagtacttgtgctgaaaccaaatttaaaaaagtttaagtgatattgtcgcataatttaactaatttgttgattctagtaaagtcgttctctagttttcagagattttgctagtgtgcgaaatcaagtgatttacggctacccaatttgcgaatagtttgcagatattctacattgttgtaaggtaaaatatcaaactatgaattatatttgccaacatttgtacatcttattagtgatggaaaactagcccgatgcccaagatggaactgaaattgaacatgtagaaccatgcacattaggttgaacgtcaacttgggcgctcgaagctgttcccaacccctccgggtgttgttttggtactttgatcttattttagtgtgaacatgaggtctcctcccccatttggaaccaaaatatgaagaattcccgaaacaaaattgatatttgacaaacaaaaccacgcacaccatattgaatgtcaacccgggcagttgaatgtcaacctgggcagttgaagctagtgcctatgtcaatttgggcgttggctagggattcttgccacgtttgttatttgaaagcagttgtatcttcattgttgatgaaaacaaagaaaatgcctacaataggagtgaggttgtgtaaacctaggcgcttggttccaggttgcacatacccaaaactcgtctttctagtgtttggtcttctttcttttggaaagtacttgcatacatttagtttcctcaaatttgcacgggtgttactcagaaaactttagttgataactcggtgtccagatgaccttctatgtcaacctaggtgctgggtatagcgtttgtccccatgtgtagagtttacaaaaactcaagtcctagctttgttccttgttgaatttgaggaatcaagatgcaaagaagttcttgaaaacccaagccctagctatcatgcttcctaggttgactgagattgtcaacttaggcgtcagttactccggcactccaaaccgaaagtgttccaatattggttctagggcttgcagcttgcttatggcatgtctctcatgtgtcagagtgcaaagattgagaagttttcacaaagataatggattcggggaccaaaactaatgcattctagagcacaaaatgtcatctagggtgctcggcaaggcccatggcaccatgttgattcctgggatgtcgaggtaacatgctcaacttcttggcctattttttggagtcttcttttcttatttgcttagacttttgaaggacgatacattagaaatagtgaaaacgactttgtgggaaatacctactcagatgccccttatgtcaacttgggcactgggctagggctcaactctcaagttgattatcttttcttgaaatgcgaggcttcaagatttttttccttcttgccacgtgtcaaaaatgatgtccacatcattagggctagttctgggtaaatatttgccctcaagttagttttgaactccctccatttcctttgaaactacctatcagacatcatttgttgacatctgaaaattatcttaggttgtcttgagtgattccctttgatctgggagactttgaaattttttcgaaaaaataaaaaattgcgcgatttttttgacttttttgaatttagatgaaatcctaatggacttaggaataggagagattctattataaatagataac

SEQ ID NO: 247008 - DNA, 634 bp, Cannabis indica
gaaattcatcatttatatgcttggttctggtggggggcgaccttaataaacaaaaaaatgcactagtgtacttggtctcgtttgtgttggcacaagtcgaatggtggtatgtgcttttgagatagtttcctctttaataaatccttattagctaagtaaattacgcgattttacaactttcctgattctttgtcggctaaggtaatgaaaggcttctattttagtaggagtaacatatttgatgtggaggaaactaaacgagcttcgtttctatggaaaaacatcctttgggggtcgggatttttggaaaaaagggatttgttggcttgtgggtgataggactcacgttcgtatatttgtgaagatgcttgggttaagtctattctttttggagtggtgctaagctttaacgactttgtgatctcaattttgtttcaggtcattggaatgtctctttgattaaagctctttttgatgagggtgaagctaaagttgttctgtctatctctatttctatttttactagtcaagactatttgatttataaatatgtatctatttttttcacatttcttttctaattttttaatattactcatctaattttatttgatttttttttcaaaaactttga

SEQ ID NO: 247009 - DNA, 844 bp, Cannabis indica
tgagctactgaggaacaacaggagattagatctcataaagttcaattctcgttctcaacacatgatccatatgagctcaaagttttctttgtaactctcagaacctcttcttcgtggctccgttccatgcctcatttcatagggaacctcaaggtggctctatttcattatattccgtccacatcgcaattccattcatttaagatccctttggtgttattgagataagagatgacgtttctagtttatctctttctatatatggaaagttcaaaaatcatcatatattaatctagaaatggaaatagaaaagaacaaggggaggttttggatgatttttcaatcttttatactaggtaatctagtatccttatgcatgaagataataaatttggtcgttgtcgttggactctattatggatttctgaccacattctccatagggccctcttatctcttccttctccaagctcgcgttctggaagaaggagaagaaggaaccgagaagaaagtatcagcgacaatcggttttattacgggacagctcatgatgttcatatcgatctattatgtgcctcttcatctagcattgggtagacctcatacaatagctttcctagctctaccctatcttttgtttctctcttccaatcttttaaatcctcagaccattcgggaaattgaaacaatagaatacgacccatatttttaactattatcaatgagggtaatataatatattttctcaaaatttattggattactaataaaagacttcttattatttgaacaactacaatgctatcccaggctttggctcgttctatacgttcttcttcttttt

SEQ ID NO: 247010 - DNA, 599 bp, Cannabis indica
tacaccttcctaacaccttcaaacataccattaatacaaaatgtaaaaatggtaattttctaaacttctcccttatatacgtccataaagaaaatttcactccttcccctattgttctaagatttctttcgatgagaccttcctcttctgaaatttagcttaccattaaagttttccaattttttattcttcgtctctaagtctataaattttaagatagacatgacttcatttagggtaatatataagttcttccatatttgattgttgtctttactttgtagaattctagtaatgagttgagaatgatgattgcgtggttttaatcactcaatgcttcacgttctttagaattagccaactctatatgcattctcatcaattcatctaaaatgtgttcaagactcttagatttgttcatcttgtagccaaaggtcctttccttaagaaagattttatttgttagtgaattctgttgaaattgctctttcaacttcctccatatctttactggagtttcttccttatcaaccaacctaatgattgcatcacttatgttgaatatgataattcatgtagctgtttcaagatactattct

SEQ ID NO: 247011 - DNA, 644 bp, Cannabis indica
gttgaagtcacccaaatcaactcaccaaggtgattcttggtaactactgtaatgcacatgtgatctgatcctaatttgacgtcgcagttcagtttgagccagtcttgaggaggcgggcaccaggtaagagttcggcttggaggaggagactagaaaaaggatgaacttaatctgcaaaagagtgagaaatagagtcaatacattgtatgatattatccattatgtggttatgtaccttatcattccgcactctccaaattgtgtccacaacagtggaggcaaataggaaaaccttatccgggtttacatcttggcgctgaaggttccagattaatttgacccaatcccagactctagtccccgtgttcaccatagggtagatttcccatggggatgagcgccacaggtggtaagcgaagttgcagtgtaagaaaaggtgctcaggcgattcatcatccatttcacaaattgggcaccgggtgtcctcaataaagagaaatttgttaagagttgatctagtcggaagcgcattagagagaatgctccaccacaaaatcttgtgacgctccaaattcttgctgttccaaagtttgttccaaaggacatcacagttgggattcctcttgagggcttggacaatataa

SEQ ID NO: 247012 - DNA, 1567 bp, Cannabis indica
gagatacgatacaaataaacctaatataatataaaaatataagtttctatcatcttttaatttttttttaacttattacattatttaaaaaaataaagtacacctccctcgatgtattttgttcttctcataaactagtaggttagattagagatgcacatttttttttatggaaatggggccatgtagggacccgcccgtaatgaggcaacaatttccttactaaataggaaacatggtaggaacacggatcatcttttgtccacgaatgttaaataggatggggacagtggacggagataatactccccaccccgaagtgcgagaacttgtttaataatttattttatattttttatattattttataatttataatttatattgtattttttagtatattagtatcatatgtataaattttaagttatattttagataaaaattagaatatattaattattgcaatacataatgaaaaatggtatgcattttttctttttcctttttaaaaaaagaaaaacattgacaatattcaaaacctatatttaaattataatggaccgtgcatttcaaatgtatttctatatataatggaccgtgacagcaattataggaaaaattatggactgatgttaattttacagtcttatttattttgttttgagttgagataaatatataatgtcaccacaactgcatgattgaatataattttttttttttctgttttagaaaaagaaatagagtttttttggttcttttcatgcttgttgaatttatcttcaatatttttttcttttccattcagtaaactaaaaaagagtagtgccagtttctatttaggaacatgacccacatcctaactttgttttatcacaatcactaatgtattagactttagaaaagttggatttgcgtttttcttctaattttatattcacattctaattattaagaagaaaaaaaacctactagtctactacaactttattgtataatttttcttaaactttttaaggaaaactttgttgtatgattgctaactacatcttcaaaaataaacggaaaaaagagaataagagcgtgacggttgactctacgacttccacatgtaccacaatgcttttcagttgtggttgtatgtatctctcaattttatcacttcaataaaaattcattatatttggtttttgaaaaagatttctataactataaagtttgctgcaaatattccttttcatttgctcaattttttaatctaaatgaattattctcattgacaaatttaaaacaacacaaaaataacaaaaaataataaaaaatataaaaaatataaaaaatatattttgtacgaattttttaacatttttactgtttttagagtttatttacataaactaccgttttttggtatatttttatgttgtacttttattttgttgttaattttttattttttgtatattactttttatgttatttttattatttgttactttcaacatgatttttttttttgtatttttataaaatattgcatttttttaaaaaaaactttaaactt

SEQ ID NO: 247013 - DNA, 649 bp, Cannabis indica
tggtagccatcggacccaaacaacaccccctttttggcacccatcggacccacgtatccccagacaatcagaccatcggaccccatggcagtccaaccatcggaccatctgacctaagacactcaaaccccatcggatccgtaccatcggacccctacccatgaccatcagaccctcttcttccccacatccgaaacaccccaatcatagatctgaaacacccaatcccaatcccacaaaaaaatttcttaaatcacaaacaataaatcttaaacacaaacaattccaaacaaaatcacaaacccaataaatcttaaacactttcttaaaaaaaaaaataaatcaaacaataccttcgatttatacatggttcggccggtcaccgtggccttgtcgtcgattgggtgggtcgaaggccgctgcgccgtgcaccgtcaccgtgggttgaggcttcgggtttttggtgggttgaggctcacgggttgagagagaggaagagagaggagggctgggtccgagagaggggggctgggtccgagagaggggggctgggtggtccttggtggtcgtcggaggtggtggagttgagccatggaggtgagccgtggagtgagtcgtgcgtttgggcgagagagaaagagacaagctt

SEQ ID NO: 247014 - DNA, 2521 bp, Cannabis indica
ttaagcattcaggaaactgaaaatttgagccttcccttttctctgtatagccgaaccatatagctcttcccttgctcttccaatttcaaaataccatagttaaaagagtagtgcccacacagagcaagcagtacctcaatcatagtttggaagattgtgaacgatcaaaatccaagagaaggacattcggattcagatcttgattatactctgcaacagaaaggatacaatagttagagatctgagtggaaggagacatattattccgctgcacccaatgtgaggtttctcatactttatatgtgtttattatcgttttagagagttcatatttaggatgttaaataacatacttgtgagtagatctaagatcctggtaatataaattccaacagatccttggtcacgggtcttgggtccaggtatgggtctgggtccgggtctgggtcctcaattcaagtaagggtcctaggtctcggtttgggttctggcctcgatcgaactgctggtcccggttcgtgtttgggtctgggtccatgtctcgagtctcagcctggtcttggtttgggtctctgtctaattcccattgagtctcgagtcctaggtctgggtctgggtcttagtccctgtctgggtttgggtcccgatccaattcccggtttgggtcccgatccctattctagtttgggtgtgagtccgggtctgagtttgagtttgtacgggttttagttctagtccggttgtcgagtgatagattttgggttctgggtcctacgttcgagttcatgtttgggttttgagttcaggtctgggtctggatctcgatctcggtctgggtccaggtctgggttcgatttggctctcattccagggttccagtttaagttccaattccaatttctggtctcgagcctaggtctaggtatggaacctggtctagaactaagtccgggtttgggtcttggcatgatgcccaaatccagacatcgactacaggttgggtccaagccctgggtcccgagttatgggtccagattcggatcccaacattgggtcccgatcatgttccagttcacgtcccaggttctggtccatgtttgtgtccttgtctaggtctgggtctgggaatgagaccggggtcgagtctagggtcccagtactggcttcaggacttgattttgattatgagtttaaatatgggtccccaattcaagtccgggtcctgggtcttggtccgggtgtaagtccgtgtctgggtttgagttcatgtccttaatcatgatttgagttttgatccgcgttcaaatcgtgattcaggtctaggtcttggtgctggtccgattttgattttgggttggggtcacggaccgggtcctagtgctggtcccgttctcgagtcccagtcagctgtcgattctacttttggtttaaggacataaggtaccagtctgggtctgggtccgagttcgagtactagtttggatcccaaatttagacatcgactacgagtatagtccaagccttgggtctagatctagatcccggtctcggttcccattcttgttccacttcgggtctgagttcaagtccaagtctgtgcccaggtgccaatctcaatttaggtctggcacttggttcgagtctgatttcagtttaagtttgggtctgggtcttggtcccggtcctggtcctattccaaggtcctagttgagttttgttttaggttctgattttgggtactgggtctgggttcgagtcctggtttgtgttcgggtcctggtctgagtcccagatccagacactgactacaggtctagtccaagccccaattcctggccctgggtcaagattcaaatcctagtcacgggtcctagtctttttccaaatcaggtcttaggtctgagtccaagtccgagtctaggaccgagaccagggtccagttctaggtcccagtcacagttgtgggtcccaagtgtggttccatgtttgggtctgagttggggtctgtgttcgggtctcgagtcccagtccaggtttggattcaagtttagggccctgtcggggtatggctgtggctccgagtctaggtgcaggttcagttacagttctaagtccagctccaggtcctcgtctcaatcctgttctcgggtcccggttcgcttccagttccaattcctgtttcgtgtcacgaggtatgggtttgggtccaagtttgggtctgaggtctgggttcgggtctaggtcccaattcgagtttgagtccaggtgtgggtttgcatttgggtgtgggtctgggtccaagatccaaacgccgaatacgggtctggtcaaagcctcgagtctagatctgaatctcggtctcgagtatggttttagtttgggtttgggtctaggtccaggtcggagtccaaggttctgatcccgatctgggtctgggttcagtttcgggtccgagtctcaggttctaatctcggtttgggttcgtgtccaggtccagctttgggttcgagtttaggtctga

SEQ ID NO: 247015 - DNA, 1262 bp, Cannabis indica
aaaagaccaacacaaatataaatgcaaattcaaaacactctattaaaagacaatgtttttcaaatctacacctaccatataatattctttggcatttcccataaaggtgagagtcatatgagccttcctcatatcaaatagtgcatgtgatatctcttgtaaatatagaaacacataaacacataataataataataataataataataataataataataataataataataataataataataataataataaactcttacggtaaagaaactaatagacacagtttaattatgttaaatagattcagtaataataataaactcttacggtaaagaaattaatagacacagtataattatgttaaatagattcagtaataataataaactcttaacggtaaaaaaactaatagacacagtataattatattaaatagattcagttatactttctcattaagaattactattaataaatgactttttactaagaattaattagagtccatgaatagttttacaataataattaataagattatatatttttaactaaaaaaatagaaaaattagaaaatcaaagaataattaacaaagctcaattagaatgccatgtcatcactcctaacaaaagaattatatatatctattctatataaagtgtgcctatataaccgaattcttggtttatgagaaattcgtgggagactttttatttatattaaaaataaaatgatttattattaaaaataaaatagtttatgagaaattcatgggtcactttttatttatattaaaaataaaataatttattattaaaaataaaatagtttatgagaaattcatgggtcactttttatttatatataataaaataaataaaataaatcccattaaatctaaaaaaaaaaatttgctgttgtacatttatgatttttctcttcttcttctcttcttctcttctagaattaccattttcctataaaaacactcattaaaagaaaaagttatattttagcacatacagtataactaagaagtcataaaatttataatttcgtcttctgttaaataaaaataatagcaacttgaagcattattataattatgctgctttgtacatgctgcgacaaaaaggaatgtcaatcttattaatttctccatgttctagctattaatgcaaaccagaaaaagaaaacatttactaaaacccaccaaaacttatcataattaaacttgaggcattagatgcaaaaaaaa

SEQ ID NO: 247016 - DNA, 541 bp, Cannabis indica
gaattaagaaatgtaaggagcacaataaggatgaaggttattataggttgttgagattcccatatgctctctaaatatggtttttcaagtgtttaccttctgttggtataagcttacgtactttgtattcaaatattgggattaggagttgtacataaattttcgtaaaccgcccaaacagaataattcgcccatatcaaatcgaaaaacccaacgaaaaatataaacagaaaaaatccgataatattataaactgcccaatctattaattgggcgggttgaaaataggtccaacccacccaattaaaccaaaataacctgcccaacgcaactagtgatttctattttttttttcacatttcacttctgttatataatatattctatctttgctattattgtagcttgtagtactaattgcatttatctttacatttatataatttattttggcacatatatgtataggtataataaactataaaacttaggctttcattatatttgttacaagtatatatgattatttatatatatatat

SEQ ID NO: 247017 - DNA, 1831 bp, Cannabis indica
tttttatcattttctagtatattagtatcatttttgtagtatattgtatatttgtaaggaaatggctaaactttgcatgaaatttttttaaaactttgaacattaataacttttgatctggttgtccgtttgaggtgatttttttttaacttgagtacttttttgcgttctacgcaacccaaatggcctacggtggtttggccaacaaaattttcacaaaaacgctgttttgtatattaaattcatgttatgcacccctttcaccaaattttttgtattttattttgctatttggcttaaaataaactaatagaattcttatgttaagtattagaatcaatgtttataatgcatttgttaactctaccacaatgaaaattccaatactaaatacctttaatgtctcttctaatatttaaataaaatcatagtatcaaatttatcaaatattgtattttggtatattggtaaagacttatcgatctatccttttggtcacaagttcaaatctcaattgaccaattttgtattttttttatagcttactatatctatctttagcactcaacaatatctattctatgtattgcatcaatattattctaaaattactctaagtatttaaagattatctaaatatatatataaaaaaaatattcttataaaagtaggttaaagaaagcataccttataccaagaattatgtacttgacttacgataaagtcacttccaataaaattctaacaaccaagtttaagagaaactagaataaaatattatcctaattctatcgaaatttcggcataacggctataattgaatgtttccaagaagttcaaatataataataacaacaaaacacaattcaaaataatataaaataatcacaataacatttagcaatgtaaaaatttattattcatccgactacagtacatgtatccacataacctactgcactacggatgaatatttaagatattcaaactcatctaacatgcatattactccactcatcgttccggcgcagtacaatatattgcagaacatacttcactacggatgaatatttaagatattcaaactctactaagccattataattaatttacaataaaagttagtaaatgtatacctcgagctagctagaaaccgatcaacaccaaataaatcggatccctgcaaattgacctgacaacctacagcataaagaaatactacaaacttataaatttctttatttagctatttactagttatataaattacgagtaactagttaataataaaaatacatgaatctgaatgaaaattagtaacttgctaagtacttgtaattaaatatttactagctactaaaaaaaataaaaaccaatgaataaaattgaaaatagaaaaaaattgatacaaattagagttaatttctaaacttttgtttctaaaataattttttagaaattaattctaaacttttattttaatactctcctatctcattctcattcacaatatttaacaaaactattagtttataatattcaatatatacatatacaatatataaaatactctcctatattacattctcagtcaaaatatatatatacacaatacatattcaataaatcacaaaagacatacatatctactattaaagtttaaattttggccttattaccgcaatccaaccaccaatgccgaccaaaatccagcaccatgcacaaccacaataacacaatcttaataatataaaaaatacaccaaaaaaaataaaaaaaataaaaaataaagcaatgtacattactaaaattagtagaaattagatttata

SEQ ID NO: 247018 - DNA, 1575 bp, Cannabis indica
tcagggggaaagaacagagcgtgaagaagcaagcgtaaccttgaggcggtcaagaacccacaatcgatcaactcgaagtaggcaaaagtactcaacgagctaatgatcgagaaagtatgggaaccagtaaatccatgagtcactcaaagacaaagtctatgagtaggacacgatttgtgagtaagatgaggtctgtcagcaaatactcccaaccggataagtgagagcacttgaatcggaagaaacctgaccttcgccaacaacttggtccaaagtaagaggatcccatccaattgtggataaacgagctggaggacaagttcaggagatatcaagtgagggaactagggagacaatctggatacgacttagacgaggagcttgagccgtatcattaagatataatgaatacccttttcctttcggtattcaaaaacctgcatgtgtcgtcatatgacggaaccacaaatctggtctcgtacttgaataactttaacacaataatgcgagggagtaatgtgaagaacaatttacgctgaattttgttccccacctcacttgttgaagcagtgagcagctagtttaacaagtttactcatcattcaataacttattgggagcagttgtctaggaatttcgagaaacagttccaagctgctagggatagacgacccaaagcgacctcgctaaccaatataaagcagtagcccaatgagacacttaaggcatacttaagcgtttttagcacgacttcgcctagggttatgaatttggatgacaacacacaacctatagcccttcaggcggggatctctactgttccattaaccgcaagaggcgagttgtgggatgacttacaaggtcatcaagtaagaagcatcactgagttcaaagaaagggctcagttattcgttcggaaggaagaagcccgaaaggaaatgaatttgttcaaaacaagtttgggaagcaaacccagcaatgtttcagcaagtactgtttccatgagaattgataactcgggggcttctggttcgaagagaagggacggtactaaggaaccgttgaaggataaaaagaagcagaagaagcacaataagtacgtgccagtgtatactatttataccgagcttaatgaaactcgggagaatatttacctcgcacatgagcaaaaggttgccttcggcaagcccgagcccatgaggaatgcgaggagcaaaagagatcctaacaagtattgtagattccacaaggatattgggcgaacgattgatgaatgtcgccaattgaaagatgagatacaaagtctcatcgctgaggacattttaaagagtaagtgaaaagacagggtcatggatacaaccaacccagtcttcccaataacccaaacaaccagggcttacaaccatttcctgttgaaggagaggacatcattgttatttcgggagggctacatatctcaggggaaagcaataatgccctgaaaagatatgtgaaagagataaagaatgagcagccggcatttgcctcaaaatcttccaagaaggtgaaaactgaggaacctcccattatattcac

SEQ ID NO: 247019 - DNA, 1002 bp, Cannabis indica
atgccgaaaattactctttatatatataaattttgtatggcatatttttttttatattttattttaactatttaatttaattaaatatataataacatatatattagaaccattaaaattataatgtattatctaaaaaaaattaagtatacaactctattacgtactttaatctagtataatgaaaatcgagaaagacctaaacatatttttagttatgcatgcataatttcatataatttttataagtagaaattacataaattatgggaaaattttaagtctttaattttttatggcatatttttttaatgcattcggcttatgtaattttaataatgtttacatttttgtggttttatttctgccacatttttgtaatatattttataattcccatattttagtttttctttgtaaattttcagcttttaatttttcattttcacacataaaagtccggcgatcgaggtgttgaacgaagttaatggttcaaacaaatcccctatatcaaagcaatcagcagctcttccttgggtttcttactaccactatcgccgttcatgccggacccactactgtcgatgggattccaatgccgagaccaaacgctctcaaagatttggttttgattttagaggcaaaagagatgaatatgaagacgaagatgaagaaggagaagattacgaggaaggatgctacaacggaaggaagaggcggtggtggtctgattatgagtcgctggagatggaggaaggtcctggaattttaaaagaagccattgatgctctatggatgattatgttttaaacaactataggtctctgcatcatcacaattaatcattttccatcaatttctcgggaaccaacaagcttacttgtaaaactccataacagaacagcctaaagcttacttgtaagttttcttcatactagggcttccattgacctctaataagcctgacaaatgcaacagcggccaagtttttgggtttgattt

SEQ ID NO: 247020 - DNA, 595 bp, Cannabis indica
tttttctcagtgttgagaaaaactagtgacaactttcaaaagattttgaaataaaacggttgagtgctgctatcctcctagtaatgagttgaacgtccttgattgattttggtgattaaatgttttgtatggagcgtatttgatctgggtttgctttgactcctcgctttgtcaccaaataccctagaaattcacctgaggaaacaccaaaagaacacttggcagggttgagtttcatactatattttaagtacctagaatgactgttcgagatgattaaggtggtctgttgctgttagtgatatgacgagcatgtcatcaatatatacttccattgacttccctagcatgtcagcaaacatctaatttaccaatctctgatatgttgcaccgacgttctttagtccaaatgacatgaccttgaacaaaaggtccctcattctatgatgaatgatgtcttctcttgatcatctgggtgcacaaggatctggttgtacccagaaaatgcatccatgaagctaagaagctcgtgcccatctgtagcatcaacaagcatgccgatgtgagggaacgagaatgaatcttggggcacgcc

SEQ ID NO: 247021 - DNA, 1064 bp, Cannabis indica
cttatttatttataatttttcttattttttattaattagtattaactatcacgtccctctatgcgtgattaaatccccaatcacgcatgaagcgtcactattatacctaaattttggctaacaaccagaagctgaaacgtgtaccagagaaacaatatgaatcagcttaataattgttttattaaatataatttaaataactcgcctcaagaattacggttgatagaaatatttaagctcgttgccacataggcagatgcaagatgagaatagtaactattaacaggtgagactagtgagacaataagtccatctcgggataaacagaatacataataaaagttgttcaagatgagtaaacaaagagcttacaactcattaacccacatactcaagaataagagctcacaactcattgacccacatatgtgtatgtaaaaagaataactacatttatccatctcgttctttctacgttgaagtaaccaccttgttaataccttccaaaatggtaaaagataactgtgagaagcattgtatctttatacttagccttttttttctacaaagacggtaaagaaggacaactcatacttagcgagaaacatccagtataatcaggataactatttaatgataataataaaagagcagttaaacagttatttaatattaccccatatgtacaataataaaacatgaaaaatgttcacgtttgatgaacgattatgaatgaatagatctcaaggaaataattatcactctatacccctataaatagggacagggtcacaggtaaaagggacgaccaatctaaagaggaaaagtaagatattattattcttgatattattgtattctgttaaccaaagattattcctaataaaatggattcataaactttgaagaatttactttataaccacgttaaaaactttttggtgtttatttatcgctgtaattaattttatagtatattcattataaaaaaaaaaaaaaaaaaaaaaactaatatttagttaacgaaatctacattaatagtatggtgctttcattgagagcct

SEQ ID NO: 247022 - DNA, 1109 bp, Cannabis indica
tatgtaggcataaatgactcatgctaatctttttggacttcagatgactttgtgttcaactaaatagattgatggtcatctagtgccatgtagcaaatcaagactcctcataagtatggctgaagaagccatctctgcatgactatgggatatcatgtttcggtatactcaattatcaaatataacaagtacttggagagagagagagagagagagagtgagagtgctgcagtgcttggttcaacacaaatggtctcttctaccaaacagtgcttgctacgccggattgctggaggtgctgagtcaacattgatggccgaaggaagaagaaaaagaagatgagcttgatgttcatggcaagaggtccagatgagtctttaaaatttttaagatttattttttactttgagtgtgtgactctgagaaatactctatagagaaacagagagagtgagagtgtgagacgagagaaaggatattggttctgtaatgggtggaagatcttcaagttcttattattccccatgattacttttcaaaggatattggttctgtaatgggtggaaaggcagggaagtttacacaggttgtgttacaagaggataaccctgcctctcggagtagtgtatcttctccggttacggtggccagtgacaatggagtgcagtttccacttttccgaccgtggttttctacgtcctctactttttgtgaggcgtcctcaagtgccatctctttctcgccatttcgagaactccctagatttgtgttgtttggcccctaccgtcgtcctctcaagccggtggtagctaggaacggggatggtggtgtctcgaggtcgtcctccttggatccccgtggctcgagacgtagcttgatggcgactaggcgttggacggtggcctcgggtaaagcccagcaggctatgtggatctccaaatcaaagcctgatagtgtttccccacagtttgctatttttgatattaaggttgatgttgggtttgatggtatgcgaaaggtacctgacactctaccaggtttgaagtcaactaattctgagcctatagaatgccgttccttggggaacgtgattaatttgaatatagcaa

SEQ ID NO: 247023 - DNA, 576 bp, Cannabis indica
tttattttcagtctgtttaatataaaagtttaaattccgcgctattttaattagtaatcccgattaggagattagggtttcataagcattttgggtaacgtgcctaattatttagggcgttacaaagatcctcaggagttaaaactcggactggtaggaagaaatgtaacatagtggcgagtcaaaaggcaactgcaaaaggaaatttagaagtgattttggctaactatgttgaggtggaagttacttataaacaaaattttggttcaagcgaggaggcggctgccggctgcaagcatgccctcgctgtcattatgaggtgccttttgtggaattgtcgcggacttcgtagacccgcgatggagagaatcctaaggggtttaattcaagagagtaacgctgacattatttttctctcggagactaaggtggataaagatactatggtgggtgtgatgaatagactgggatttgtaaattcctgttgcatactagcaaatggcattactggaggcttttgtgcggcttggagaacagattttagatgcgatattacggaagtttttgaagcaggtt

SEQ ID NO: 247024 - DNA, 1356 bp, Cannabis indica
atagcatgattagaattatttgagttaggggcagcattggtacctctttggtgttcttcttgagtgacaagatgaaacactctattgacttcgggaagaggatccattagcaagatgctcctcgaacttgagaataggaatctgaaagtcccataaggaaagacataatatactccatgtgatagtgatcttgaagcttcttgactccaccacatgtgcatccattacaagtgcatgatggcctgtaatttgttagctcttcccatatagttttaagccttgtaaagtacatgctaatggtctgattttcttgcttaagattcataagatccttccttagattgaatatatgtgggccatttttctggtgaaaacgaacttttaaatcattccatatggcagaagcacactcatcatagagaatgcttgaggaaatttcctttgatacagagtttagaatccatgaaataacaatgttattgtttctataccaagcattgtaaagattttgatcagaaatagagggtttaggaattgaaccgtcaagaaatccgatcttgtttttcacggatatcgcgagttgcatagctcggcaccaggagacataattgtcttgccctgtgagtggttgagacaccaaggaatttcctggattatcgccatggtgaaggtagtatgggctagctggatcttcaagcggattcttgactggagctgcttgaagaacacgatcacactgtccaggattaccaacatctgtaatggtggtttgggcttcggtttgatccccatctgtaaccatcgcaagaagacagagaacaggaggaacaacagagaaaagaaatcgaagaggagagatgaagacacagctttgtcggagaagaaaacacagcttgctggaagggaacgatcggacgggaaagcttaggtttcccgctctgataccatattgagaaaacagagaaaaagtgttttagttctgtattgagaagaatacattgtgtagaaaaatgaaagaactgagacctatatatacaagacttaacaagagtcggttagagcagtaagcaaagaaaaacttaacttacataactaactaactacttcaactaaaaaactaacaacggacaagagacaaacaacagtagagagaaaacagggaaaatagcaatacaagaagaagggatatttaataattttaatattaagtgaggttattttgcaaatcttagtatatgaaatagtttgtttggaaaatttctcaaacctagctcatcattcccaaccgcctacccctctctctttgttcctttcttagtctgggcggaaggatggtagacaatcaagcagacagcc

SEQ ID NO: 247025 - DNA, 817 bp, Cannabis indica
aatggaacttcttaccaaaacaactgacacttaattggcaatgaagtgactcaagttgcgcttagcttccttaatagcaatgttgatttacctcctatcaataagaccatcatctttttaattcccaaaaagagtcacccactttccattacagactatcagccaattagtctttgttctacaatgtacaaaatcatatcccacaccttggtcaatcgtctcaaaccaactctttaacgaattatctcttcggcccaaagcgccttcttgcccaatcgcttgatctctagtaacattattatcggacaagaagtctctcactctctaaaccattgcaagcatggaaaggttggttggatggccttaaaactcgacatggccaaagcttttgatcgtgttgaatggaatttcctttggagggtcatggaaaaatttcaattcccgcccaattttaccaaccttattatgtcctgcatctccactacctgattcaccttttcaattaaccggcagctgaatggttctgtaaccccatcccgtgggattcgccaaggcgaccctctcttccctacgttttccttctatgttttaagggcctctcttcgctcataacccaacatgtccatcaacgcattccctggaagcatgcccttagactcaagatctctcagaatgcgcctatcatctcccatctttttttcgctgatgacaacatccttttcagtgctgcctcccctattgcagccgcacaaatcaaggatatccttcacacctatagcttggcctcgggtcaacttgtcaattatgaaaaatcatc

SEQ ID NO: 247026 - DNA, 624 bp, Cannabis indica
ataagggcaatgcctgcaccggataattggttagtgaagcttccatcaacatggagtttccatgtcagttcttacagtttttactgctgctcttgctctcacttcttctgtgactcttgcttttctcttgaatcttaaaaaatttcaagagatgagtttgtgcactcagccacaaagtctgtaaggtcttgacccattatggccattcttggttgatatgtgatgtcgaactggccaagttcaatggcccacttgagtagtcggcatgatgcttcaggtttctataaaacctgtcgcaatggttgatcggtgtacacctttatcgggtgtgcctgaaagtatggccttagctttctgaaggccaagagcaagttgtagatcagcttttccatgagtgggtactaactttcaacgttgattagtcttttgctgatgtagtatatagggtgttgtacaccgtctttttccatcaacgttgattgtgtgaacgtgttgggttttatgccctaaataaaactccattttaatgtaatccgtattattcaatatcaataaagaaacaaaagtatttttcattcatttgtgtatgttttggctctctttgtcaattacttgtctatttga

SEQ ID NO: 247027 - DNA, 704 bp, Cannabis indica
tacattatatacatataatcatgaaataaatcatgtgaaccatgcaacataaaatgttatttctgatctttattaataaataaatctgattatattgaaatgagttttatttagggcacaaaacccaacacaggtgtgggcattctattgattaggtaggtagttgtcctataagcctcatcccaatatttaagaggtaatgaagcttgagcaaggagagtcaagccagactcaacaatatgtccatgctttctttccacaacaccactttgttcatgggtgtgtggacaagcaagcttgtgaatgataccactattttcaagaagatttgtaggcaattctagttgcaattctacttggattttgaacttagtgaatgtaggtaaggcttcatctttggttcttaagagataaatccaagtatatctagaataggcatccacaaaacttatgtaatatcgatatccattggaggacgtgacaggggcaggaccccataagtcactatgcaataattgtaagggagtgtcataaacagtggtagaagtaggaaaaagtaacttatgtgatttaccaagacaataagcatggcacagatcatgtaaatctttattgaatgttacaagaatggagggtctgtttaacaatcttattccatattccttttgttgtcttttctccgacaagctttctcctcacactgt

SEQ ID NO: 247028 - DNA, 1420 bp, Cannabis indica
aaatttgaataaaaaaaagttaaaaaaaaatagtatatgaggtaattccctaaaataatatatgttcacttttattatcttcctattatattttagttttattactaattactcataattattaatttaaaacaaaattaatctatcatgtgagtattttttgtttgaagaaatctattttaattaaaatcctataatcttattgttaattattgattagagatattacttaaaagttattttacgagacttaacacttaattatactaataacaatataacaaaatattaaatactattttgatgacttttaacaattctttttatttaactatctattcggaaccatttttcatcttaacccgcaaaaataacccattttattcaaatttgacatttcaactcaacacaaatttcaaaaattaataatttgaggatatatggtgtggcagaattttataggccaatatttatgaatggtatattacttcactcaaacacaaagacgtgagcaatgatcgttgtaaaacatcaataaattaaattatctcaaccaatcaaaacataatacatgtataaattattatcttgagcacaataacttagaattttttacaaaagatatggtagaaaataaaaggaaccattatcatgttacaccaaactcttcctcactaccttggtttggtcaaatttctcatgcataccaatccaacgtaaaacaactttctctttctcttcacccacccactttgaaaacctcaccttagtccaataacttctatataagataaggattctcaaaacttctccttacacttcaaaccaaatcccattaatataaagtcttcatacaattaataaaacttcttattacttctctttattactacaaatggagagtttgtgcaagactactaagccagcaccaatcgtctctaataatgacccacttaactggggtgctgcggcagagtccatgactggcagccacttggacgaagtcaagagaatggtcgcccagtaccggaatccagttgtccgtctcggtggtcagactcttaccatttctcaggtggctgctattgctgctggaggtgacatcgacggagttaaggtagaactttctgaatcgtcgagggctggagttaaagctagtagtgattgggttatggagagtatgagcaaaggcacagatagtaatggtgtcaccactggcttcggtgccacctcacataggagaaccaaacaaggtggtgcccttcagaatgagctaattaggtaattaatatgtataattgaaattggataaggaaaccaattcaagacttgtatcattaactagtctatatctcaattttatttttgttatttttttttctttgcagattcttgaatgttggaatatttggtaacggaa

SEQ ID NO: 247029 - DNA, 1778 bp, Cannabis indica
aaacttacacagattctacacacattgacaaatcaaagttacaaaatgacctttcatgcaactcatgtcatgaatcatgaatcaatagctctgtttcttcttcttcttctatccctagtagccatgttctccccatatctctgaaaaatatcagccaaatcaaccaaaccaacctctctcaacttcttccccacctcttcaaacattacaatcccatcctcattggaataatactgcaaaaacttattataatcaaatctaggtacctctaatcctctcttcattgttctctcaacatattttgtagcttccaataactttccggccttaaccaaaccgccaacaaaaatcgtatcgaaattcacaaggggatccaatcctttccttcctctctttcccaaatgtccctgcaataacattatatatgtatgcataattggctcacaacctctatttatcattaatctaaatacttgagtggcttcacttgctcttttcaatctcaaaaaccccttaatcaaaccgtggtacacactaatatccggtctctcaatcgcttccacaatcttataagccatgctcactctgcctctagctaaaagcccacatactagtgatcccaaagtcgagttatcaacttgaatccctcgttcgagcatctcttcaaacattgcataggcttgagaaaccttgtcccttttgcacatccaatatatcacaagcctataagttgagagccccaaatcttccatcctcttagacctcattgcctggaaaagcttaaacgcttcatcaaattgatttgccttaaaaaaggtctccatcattttctcaaccgcatcaatttctggctcgaatccttcatccaccatcaagttccacatctttgaagcctctatcaaattacccacatcacaaaaaccctcaatcaaattcttgtaggtaactccatcaggcttaatccaatctttcaacttgaaaaccaataatttagcttcatcaacgagcttactcccacaaagagtctccaccactttgttcaaagtccccacactatactcaaacccataatcattcataacatgaaaaaactcgacacatttcttcaactctctcgccccagctaaggtcttcaatgcaatcctgaaagtcttgtcattcaccaacctacgacgtcccatctcatgaaggacttcccaaaagagatcaatgttccgggaatgaccaatgacatccagcatcttgttgaaggagaccgatgaatgtttgaaaagtggatcggtttgagtaaactcaaagaacctgtaaacaggtctccatgagtaagggaacttgttgcagacctgaaggaagaactcgtgggtgagttggaactctgaggcagataggttagagtggaggcgtgactcgggcgagtcttgttgttggtagaggatggtgcagactcgaaggaggtgagctgggttaactggggacggactagtcttagcaagtggtagtgggcgagttgattcggttgttgagaggcgaatgaagttgagaaggagagattttgggaaggcttttctttgtctaataatcatcatcattgatctcaattggctaagttgagccaaatgattcctttaaaacatctggtatatacattcaatcatccaattaaacactaacaaattaaccaaaaacaatgcaaaagcagaaggagatggcaatcaattttgaattcttgtaaaactaatctattctaatgcaaaaagtcagttaggcttaatcaaacc

SEQ ID NO: 247030 - DNA, 780 bp, Cannabis indica
cgaaatcctagaccccctcgatcttttgggacacacatccgatcccaactcatccaatgaatgcccttagtgctcttgttcgaagtacgccaccagaaactacacatcatgctttccatctcttcacacattcctttgttcaacaagaacacactcattgcatagttaggcagagattgcgcaacagtctttataagcacctccttcccagctcgtgagagaagtttgctatcccatccctcaattcttcgttgcattttctctttcaaaaagcccaaaatagcattcttgtttctacccattgtattcggtaaccccaggtaagtgctttgttcgtttgcctctgacataccaagaatagtgcatatattgtgcttcaccctatcatctgtgtttttgctgaagaaaatagaagacttcataagatttaccttttgtcctgatgccctctcaaagcaattcaacaactccacgatatattgggcgtcctgttcaagagcacgacaatacatataactatcatcggcaaaaaacatatgagatacagaaggggctccacgggcaaccttacaaccttttaaccaaccccgaacttcaaattaaatcaagtattagttagtagtgtaatccttccttagtgagaataatggatattaactccctaatgagatattaaataggactagttgtcatttctaaatgtgaaaattaccttcagtatgacttttttaaatgttttatgataaatatggcataatttagtttggacactttttatgg

SEQ ID NO: 247031 - DNA, 1499 bp, Cannabis indica
atggtccaattaataatttttgcaaaatacatgattcaaaatggtatttacccatatatttatataaaagaaagtactaaaaaaaaatgaggtgacatcctacaatattttaatctattttaaaagaattttagtaaatttaattcattttacatatttgtagatgttgagatatatgacttagtaaattttttttgttatttgtaaaaatcccacatggattaagaactaaattattagtatacttctatactataaacaaagtattcttacatttattttgatttgttcaaaaatatatgcgtgattgataacttgatcttgttcaattagttataatataattttttattattattttaagtcatcaaatcaaatttatatatttatataatatatctatatatttataaggcaaaaatgtgagttagcaatctatttttttttttttttatttatttcacttctaagtgatatttgatatacttatccaaaacaattatataaaataataagttaaaaataatagaatagaatataattaaataataaaactaataaatctataatcaattcatttatggtaattaataataatataaacatgaaaaatattatgttttagattatatcacttattataagtacaatatatatttatatataaggattaaaaaaaatttggtaacaccgcgcgaagcgcggcttagttcactagttattaatagagtaactcacattcatttacattaaaaactattagtgttctttagcacgaaatatttagtctatattaaattttaatatcaatatgtctatttaaattccacacattcaattgtaataataataataataaatttctcatatatactaaaagaatataaacatctattcatataccatattaaattctatattcaatttacaaataataataataataataataataataataataataataatatgttaactgaaaaaaaatttgttgtaaaaaagtgaagataaaccaaactcaaataattataaatttatatatatactagataaatatttcgtgccaagtcacgtatattaattttattttagtgtttaattttttttaatatcataattttaaaataaataatgttcaatgtagtgataattgaaattctaaagcataatattaatttaaataaaaacaaaaattactattattctttgtaatagtaatttaaaaaaattattattcgtcctaaatttatcttcagaattaatgaaaatgctcatctagttaaactaactacatgcatgttgaccttttacgtggcaacatctaataatttgttatttttttttattttaaaaaaaagtcacctaataatttctcataaaccaagaattatgttacatagacacattttatatagaatagataaacgagaaatattagacggtgatgtggcagtttaaaatagctttattctgctctaatatttttatcatttttt

SEQ ID NO: 247032 - DNA, 835 bp, Cannabis indica
gggtgtaggcctctgatttgtctagatggaacattcttgaaaggatattgcaagggtttgttgttggttgctgttgggatagatcctgagaatgccatctaccctattgcctatgctatatgtgagaaggaaacaactgattcctggacttggttttgtgaactgctaaaccaagatctagacaatgagaggacagatttgtacacactaatgagtgacaagcagaaaggtttggagaatgctgttgggagggttttcactggttcagctgttaggcattgtgtgaggcaccttcattccaattttaagaaggaccatcctggtttgttgatgaagcagatgttgtgggcagctgctagagcaaccactataccagagtttgagaggaaaatggcagaaatcaaggaagttaatcaggctgcatacaattggttagctgctaagccaccaacagagtggacaaaggcctatttctcagaaggtgtcaagtgtgatgtcctcctcaacaacctgtgtgagtctttcaacaatgcaatacttgaggctagagacaagcccataataaccctgctggagaagttaagatattggctcatgtgtaggtttcaaaagaaaagagagagtgtgaagaaatggaaagaggaatatgggagaaacatatggaaaatcatggagcaaaacaagaaaattgcttcaaattgtctagtaacacagtcaacagaagtaattttccaagtggactgtcctggtacagttagctatgctgtgaacttaattgaaaaacctgcagctgcagaaggtaccaacttagtggaataccatgtggtcatgcatt

SEQ ID NO: 247033 - DNA, 778 bp, Cannabis indica
atcgtatacgagagccatttcacgatcattcaaaaaaaaattcacatatgtgtaagtactatcatggtaaagacaactttaagcagcagtgacatactcccaatgatcgagtttcttaagacatggtaactgtgtaagtgttaaatggtcaagcattaaccataaagtaaaataaaagagcaatgtgagaataaagtttttattaagttggagtaatttctaatttaattaaaataattttgataacattttactaaggcttatccacatcgaaaggttgcccgagacgaccaactaacacactaaagctaaaagcgaaaaataaaagaagaacaaactcaaacaatgccctagaagcctattatatcaatggtagcttcatccttatcctcactctctacaactggcacttgaactgcaaaaatgggaaatggggatgctcggggctgtagccttcaactcttctagcttctttagccactggctcaccaccgttcaaggtaaaaactattctctagagagcctcttcactgaaacgttgctaacaatgccttatgaactttgggactttagtatcagcgaaacctgaccaatcaaatgacgacgttcctccattagatgaccaagcattaaagatggcatcaaagcataagccatcgtagaaggtgacgttaatagcagcttgctcttcgagtttagtcacttgctctttcaagaccttgacttgatctctaagttgagtagtcgctaaggtttgctcatcaagtgcaagaggaga

SEQ ID NO: 247034 - DNA, 5604 bp, Cannabis indica
gtagacttgaatacagactcaagacaatacaaatacaaataaacagagtaagagtcgaacaagctcttctctacaaaacaaaggtagtctttccttaaaatatgaacacaattcaaagtgtatgaaagagaaactaaacatagctgctataaggtgtatttataatcaatatacaccttattaacaactcacacacggcctgaacatgaccacagcccactagaaaattccctaaaaaagatcttcaatcaacccaggaatttctatttctgcacctacagaatcgtgagcagtttgtgcgactttccttttatagaaaaggaaagtttagctccggttttctcctcaagaaatctgatctaacaaaatgggaaactcacacaagatcagaatatcacagctggttagataggaaagaattgagtaaccaaacttaccatctttaccttaatttctataaataggaaagctagacaactttcattccaaagatagattgactaatataaaagttaaatacacaaaataaggaaaccaatattaacacacagtcgaaattaataaaatatgtttgtcaattaaagatgcccaaaatagaattaacaagaacaaaagataatcttgctgatgttgggactaaggtcataacagtaaacaactttaagcattgcttggacttgatcaatctcagaagttagtatactatgatttctggaacaccaaccatgatggctaaattctttcttcataaccctcaatatttttaatttgaagaaactaggtggaatttttggtatagtttctctaaatgaaaagatctccaaaagtagttctagttatagaaagttagatgtcttctgaaaggacattcctagcctaacttatccatctgggagaagtctcgtggaatgatatttgtcatccggaagggagttcccaaatatctatcatgtccacccagaagaagtctccacgggaagccaacctagcttcccccaaaaaagagttctggatggttagatgttcccccttggaagggtgtcccagatagtcgactccagctggcactgttcctatccaggaagtccctttagtgtgtgttttccaaaagcttgcatttcacctggaagcactattgctaacgtgaagatacatttacgaggagttagttaagtttgtaagtcgtaactaccaacacttatcattttagaagataacgagttcaaacgagttttgaagagagagattgagaggtaaagagataagcgtacggagaaaagagagagattggatttgggatttgtataaagaatcttatgtagatgaagaagattcttgggtaagagtgtaagagttaaacacttcgagagaaatccaacaaaaaaaaaaatctttctcaactgtagtataccctgttcttcaataaaaaagatttggtggtgttccagaactggagtagagtcatagatcacatataccttagtgttgattttattgttttattactttaagcattttgcgttttaatactttgttcatccttatttttcctctaattattgtttgtgatttattaattttattattgctaattgtttgttgattaagttttagttaatttgattatgcactttaattgtaaatttcccacatcactgtatatagattattaatttgctttaattgtttttctatacgagcttttcattttaaatggtgctttgatacgataaagccttatcgattttgattcgccaaaacgatttcaatattttacgatgaatggtcattggaagatttttttctttcctaaatggttaatcgttaacgccaaacattaacattctgttagtgttttttattttatgaaatattaatttcattaaattaaatacattctgaatacaaaaggacctgcaaatctcgccaaatatgatgttccaaaatactacaatcagggataaaacgagcatgcgtagcaacagcatcagtaactcgatttactgatcggttaataaaacgtaaattcaaactatatagagaagacaataaactttgacagggaaatcatgttaaatatctaaattttatataaaagattttgtatttcttttttcagtcttatctagtaatatgagcaatgaaagaatcccattccataagagtgacacctcctttttcagtagactttctaacttcagcacccaattcctcagccctttttctcacctcaccaccttcatttgaagccattaatgttctaacagctctcctaatggtggatgaactcacagcctcatctctctgctcccattccataacagccacacccactttgagcacatgtgtgattaacagagaattgataggttgatctgaatgcaatggccaagttgctaaaggcactcccatacttatactctccatacaagaattccacccacaatgagacatgaacccacctgtagatgagtgccccaagatctccacttggggcacccattccctcaccacaattcccattcctattcccttcattctttcctcaaacccatttggcagttgggttccttgttcattagtacttgaaagaacagatttatctgcttctctcaatgcccatataaatttaaccccacttagctctaacccaattgcaatctccttaatctcttcctctgaaaaaacagttgtggttccaaaagagatatacaacacactatttggctcttgtttgtccaaccaatccaataaccacttgtcttgatccctccttagctcattacgagtcaatgtcgtttggtgtaaaggcccaactgcccaaatcttgttcttctccacaccaatgtcgtttacaagactttcaagaaaagctccttcaactgctctacaactgttgaagatctctccagcttgaaatttaaccaccccaacctctctctccacaaaaccttttaacgcagcaggaaaacatgactcccaaggtggaatatccattattgggaacatgtcgtttcgtcccaacagattacacatgtttgcaaagaaaacaaaagatcagcaattgaatgagtaggcttctccgtttgggatacgaacgacatcttgaaccaccgaagccatcataacatcatgaacaacgacaagtcgttttgtggtttgagagagtgattggagaagctgagcaacaggttcgcgaaggttcgttgagcattcgaataaagggatcgagttttccacgaacttggaattgaagaagtggtcttcatcattggatataggtaaggatgatgatgaaaattgaagtgggtaatcatggaaatggattttggtaagttggtgaattgggtttgaggctcgagacttgacttgagagatgtgaagagttgagctaacgtagtggactggaatgtcgtatgaggaaacgacattggccaattgaaggaattggtttaggtgactctggcctaggaatggaaccattactaccacaactgataatgttgatgaatctttcatggctgcaatagtctccattaatgggctttaattttctttcactgttttattggaaagagattacaagttctttttgctttataatcattggtaactctcgtgagttataaataagcttctttgtaaattgtaaccaataattgtgttctcttttaaaataaaaataaacccaaatgagtatggcatggtattaaaataacaataacaataacaataataataataattaaagttttgagtgttctgcatgattaaatttaagtagttgaagagtctcgtatcaaattaaataaaaatttaaaactaggtgtgcaagttagaatatatgtgatgtgagtaggggtgttcatccaattcaatcagtattattttatttatagtgcattcgatttacactaagtgtggatttcattttttagatctaattcaatccgcacaatagctcaaatccaatccaatctgcaaaagtacagattaaatcggttattttgaattagttactttttaatattaaattatttaatatatataaaaatatatattttttcaccgtaataaaataaaataaattataattattttatgtttctaacaacacattaaaataaataaaataataaattcaaaggtagaaaaaaattgtatgtataaaaaatgtttatttttattttaaattgtatgtagaaaaaaaactatatataagaataaaaaaatacatttcatctattaaattttgaaatataattgtattatatatattagatttttaaattactattttctttacattaaaatattatttatatatataattttttttataaagatgtgtgaattgaattggatcggttacttttacaaatcaatcaatatccaatccacacaagtgcggattttgatcttctaatccgcacaagtgcgggttacaagaatggcgggaaagtgaacagtacccgacgacatccaagcggattgaattgaattggatcgtacatattagattgaatcgattattttatgaagacccctagatgtgcatattttattttttctcaagacattataattcttataaatttttcaaaaatttgaatagtttacactgttaatttttttctatctacgtagttaattgaaataccaggacactgatccaatagtaggacgagcaggacactcacccaaggttttccatcctcacccaaaattaaaaaggatggtttgagaaatacctcttttatatatttattaataaaaaacactctcatattacatttcattaaaatatgggatttttacaccacataccgaaatttctaacttttttactgtggggcgatttttttttttaaaaatactgtgtaagttttatactgtgtactgtgttaatttttcactgttgttccacttttgttttaattgttctgtttttttgttttataaaaaatacatcattttagtaaaaaattccgcgtgacaataaaattgtaagcttttgcccaaaattcaatatttttataaaaatcccttaaaatatactcacttttgtgagtgggttacccaatataccttcaacttttacttaagtttatcatattatttacattaacttaaggggtataataagaaaagtaaatatatcttaaaaaatatggaaataaagataaaaaaattaacacagataaagtaaaaagggtatgcaaagtaatttgagaaaattacattatatacccattttaagtaaaccattttagtttttaccttcttttttctatagttcattcattcattttaacttataaaagtagttagattttaatagattttaatgtgtagttatttttgattagttgataagaaaggtgttattcctcaaattcgtgctacatattaaatgtctacttttttttttttttgaaagggctattaaatgtcaattttaaccgcacatttaactaaatgggttggcataaagagacccaaagaaaggccaaagcattcaaataaatgtaaaaacccataaatatactttttttttttttgatttttttttttgaaaataaaggaagctttattaataaactt

SEQ ID NO: 247035 - DNA, 4932 bp, Cannabis indica
atatatttttttttcataaatattaaataatttaatattaaaaagtaacaaatccaaagtaaccgatccaatccgcacttttgcggattggattggatctaaaaaatggaatccgcacttagtgcggattggatgttgtttgactaaaaaaaaagtgcagattggatcggatgaacagccctagtagtggtggtaattttggtgggggtttgattttgatggcagtgggtagtggctagtggctagtggtggtagtgatagtgttgagttagaagatgaagaagatgatgaagatgatgaaagaaggaggaagcatctggaaaaagaaaaaagaaaaaaaaaagtaagatacatagatagaaaagtttataaaagaaagaaaaaaatattttttattcgtattttgttttatttttcttaactttttaattaaaatgatttttagattatttattttatttttttagtattttaatattatttttttaaaattattatctatttgaactaataagattgtgccacgtgtacactgtgtacatgtggataatctaacatggcagttaacaggtaaaattagataaaatactaacagaatacgagttttgagagttttgccgtcaaaatttaggtttttgaggttaattgttagggaagtgaaagttttgggagttttgccgcagttaaccctagatatatatagagagtagtttcatataccaataataaatatatgtcattttagaccctatgttttgaaaaaattattaattagatcctctattttgttaaatgacaaattggaccttgtattgttgacgtggtttttcgtcaacaaatctaagaagattgtacacgagcaagatgaatgcagatatttgtcaatcaaagtaaatcaatttatgaaaaaaaaaattaacaaagacgaaaggtctttatagtggttcacccctttcaatgggtaataggctagtccacttggagtgttattgacctcaatgcttgagaagagttctccaagagttcaatcctcatgtgagtttttagaatgagagagtgggagctcgagagaatgatttcgtgagaatcaaaaattaggattttatgccctaaataaaattcatttcaatataatcttatttgttatcaatagaagattagaagttatttatgtttacatatatttttcatgtttaaggtttaatctacaatttttattaaatccaaaacatatagttattcacaattatagtaatatcaacacagtggaaggtaattgtgattatatgcttcaaaagataatgtcccatgagtcatcagtgcactggatttacagtaatgtaatagtcatcgataaagcttacttacaccttgtataagtgttatgttctttcaagaacattggcaaagtatgctagtatcggatgtatggagtatacattggacataacttgtataaattaagggtaaataacggcataagtatccaaagttttatgtttgtaagcggcataaacacaagtgtttatttttaacggcataagtacccaatatttataaaactataattttcttctagtttcgtcagtacagactctgttttgaatttatttaaagaacatttagaagtaactgatactacatatttctatctagacccaatgatcagagtctgtactgacaaaattagagaaaaattatagttttacaaacattgggtacttatgccgctaaaaataaacattgagtttatgccgcttacaaacataaaactttggatacttgccgctatttaccctaaaattaattagttataacttatatatgtcgattttgtcatgaattttgattttttttttcaattttaccaaataaaagatcaaaaatgatgattattgtgatgagaattgataattataattaattagttataaatgcccttttgtaatgatttttgacactttttcttttcaattttacaaaatatatacaagaagattaaagatgatgatgaagaagaggtgacattatttttgatgacgaaactgaagatgacattgttcatcatataatcatggaagttttgcttttcgaagttggtatttgcagtcctgaatttcctattatgcttttaaatgatgtgattttctcaatgtcaaagcatcttgaggtcaatgtcttcaaggaaaatttttaaagaattgaatataagataaatgtggaagaaagacgttgattttattcttaaagaagatagtgatgatgatgatcaagagataaattttttaaggtaagtattggaagctagagtttttgatgcatggactcgtagtagtgtaagtataaaattagtaatgatttgagaaattaattactatatataatctccagctatatgtacgaatggattatcttgttttggatactaataaatattgagattttttcattattacattcagaactaaatctaatttgcaacaaaaaattatatagaaacccttattgcaattatatgtataaaaattcttattgcaactacaaaaaattgtatagaaaccctattgcaagaatatatggaataattccacataaatattttggttttattataagaatagtttgaataattattattattattattattattattattattattattattagcaaatagaaatcaaatcttagctactatcatttcacttgtcaaatatgatcaaataggttcaaattgaatcaataaacagagtatattgagaaaaataactcaatgcaacacttggcaactcttacaagtttaaaaacaaatctgaggataattctactcaacctagcaaacctgtcaagtcacaacaaaattaagctgagaagctctcttcttaacattatccttcctctatctaaatagtcttgatattatgagcaatctcagcacatgcagtaggtcctgttgtgtatgatgaaaaaaaattccaactctttgacaatgttcacaacaaattttttgggaaacatatggttggttttcatgaatcaaataataccctttgcctttggtctcaagatcctcttgaataacatcaacacaacagagtcatcttgtctgaacttggttgctcatctctttcaccctcatacaagaccaaagatgagttgagctgtggacggtttcaatttgtccaattgctgtttcatcgcgctgaagttacaggaggaggggcctaaagctgttatttgagttaaagcaatgaaactaatggcaaatatacaagataaaaaaccatggttgaaaattgtaatgtatgtgataagattcaaaaggggttttctttgaaaaaggaatataaactgggaaaaagtaacagaaagcctatgaacaacaagacctctaaagactaaagagattcacattgtaaattaagtcttgaacattagataccatgagcaaagacaaattgaacaaggacttattattataacaaaatggacattttaacctcagccgaaagatggtgataagtttgataataatcacttatgaaatcagtacatttaacacttttgcatcataggttgtgtgtaatttaataaaaatagcaatccaaaattgaaagaagaaaaaaactgaaactttatgataataaaagttgaatttgcaacaaggatcagatggtgatgcatgtaaagaattcatcattcaaatacagaaaatgttgggtagttatcctcatatccaattgcaaaaacagaatactaaaaacttcaaaaagaaaataccaattttacaaaatgaaattgaatttggaattgcttgaagaaaagatcagatagtcgatcattgatacaccatgctacatcataaagatgtaagtaagactgaacatcaaagattatcttcatatcataacacaatttaaattcaattccagttaacaaaaacaaaatgttagtaagctcagatcagatatgaatgtcaatcaccacctagcaatcagaaaaattgcaagtaagactggggcgacaaaattacaatcatcacttcgttaaagcctcaaaaaattcaatcttcaatacatatatgatatatacatacattgacatagataaaccctcacattaaaaatgatattttttcgaaagcaaaggtgccgccattgttgcttactatctataatacgagggagcaaattataacagttagctaaaattaatcgaatcaatatagataaaccctaatagaaatgaaaacctagaagaaagcacaatgacattgaagtgaaattgggagaacactgagagctagggttttagtcgccgcttaggttgagggtttgagattgtaaaagctccaccttttataggctagcagaacaaaggaaacgaatgcttattagggaaataagaaaattacattttaatttttaaaattctttttttaatacaatttcgaattgaaattttatattttgcaaaaattattgcttgaattctttttttttttttttgttaaataataaaatagatgtcatatttttcaaatgtcataaataagattctgaacttaattttttggtatttttttttaatataatcagcttgaaaataattcttaacacgaaaagatgccataaacgtaactagttttgtcataacgcatgtagatcgagttattattaagttccattttgatagaaaatggtacaaaatagaccatgaacttacttttcgtcaaattaaaacttaataatttttgtttttcatggtccatattagagttagaaaagtgaaagcaaatttgataaaaaaaaaaaactaatttcatccaatatgaattataagttcaaggatctcaacatagtgtatatagattaaatctagactaaatgaataaagagacaatacctcttgtagtctatcagtggtttc

SEQ ID NO: 247036 - DNA, 2775 bp, Cannabis indica
gtcaaagttcgcggggaaaaaaaatcctaattagtcttttatatatatgtagttgcattatagttggtcgtctgtaattaacgctccaataatagacgtatcaataattacgaatagatacaataatgttaattttatttgtaaatatttcatatcgataattaaaaaaatattttctaaaaaaacatttatggtatggtcagtatggtcagtataaataaataaagttgattatatatgaaagccaatttgcttatcataaataaataaaaatattatttataaactaaaagttttatgaacacaaaaaccgcctaaaacttaactcattaaaaataaacaaaattgtttatgaacataaaaatatctaaaccataaataattaattataaataaaaaaacacatgataaatcgttgtagattaattaataaacaaaatgtttattatatgcaagcccgtacaaaaacacaaaatattgtaaataaataaatcaatgtattcataaaagtccaatacaactgaaaaacatacaaataaaactcaaacaaaaaacaaatactatattaattctacaatattaatgttaaaatccaaggcaatagaattaagaaatgacacatgacattatatatcattaatctagcttaatattttgttaaggtaatagccataataaactcatttcaaaagctacaagaagagaaagtcgcccataaaaatctttataattatccttcaagtgtaataaggagagacttgtcccccccccctaatgtgtcactcctaatattttacccttaatacttctttttataggagcaacaaaacaaaagaaattaccccaaagtcaccctaaaagtaatttaattaaatatttaaatttcttaaattataataataaactaatattaatggatattactttttttaaaaaaaactaaattcattaatgcagttaattgttacaaaaaaaaaaaaaaaaataggcaagtctttctcaatagcaagttgagcacaagggagtataaccccaatccacatagtacaagtttggcattccaaaaatataattggctaatacatgagctacctcattacattctctatacataaaagatagtcctgtgacagtaggacattgcagtaagctcctaatgtccaacaacaatccatcatactccctacaactcatatccgtattgtatacaagttggtcagcttatctgcaatctgattcaacaccaaatttgtgtagcttctattcaaacccacatgcaatccatccttaatggccttcaatttcgccactaacagcgaacaaacctcatcacgtcgcttagcaagagcgaaaaccacccttccattgtcacttcaagtcaccatattataccagtactcgagctgctcattctctctcgtatgccagcattaaggctgttcatcaaagccagaaaaccgtagtttaaattcggaccgcgataatttgaaccactataaaccataactggggaaaccatttttggtggtctggttaattcaaaacgtttaccgcgtaatggttcggttgcggttcgtaataaataattaacagttaaaccggaccgaaccgtttatgataaataattaatttatatatatatatattttatatatgactatatgtataattttaaactttaatgtgtgttagttttttattgcatgaattttggatttttatgttacgtttgaattttgagaatgtttttatattgttatttacatgttatagatctattacttatcatgttaaatatatattgtgaaaataaaattaaaaatttagtaaaaatagtacaattacttaaaatatatgaataattgtaaattctacttaaactgtgattttgaaccaaaccaaaccgttcttaatggttcgatttgagaaatttattggtctggtttggttttcaatattcaaaccattatactgatttggttaaaaaaatataaaagcctgggccaaaccaatctgtgaacaaccctagcaagcatcaacatttacggtgtattcacctacattaggcaacttccatttggttgtagcacgttgctctttaagcttttgttatgtcccagcatctcaaagttcctgtgcatactttccacaccattctaagatgtcatttcattattattaaatggttaaaccataacattcaatagtagataatataaccagtcatatgcatagaaatatatatgctcatgtatttgtattgcctaatcaggcaagcccgtgtcataatgtaacatcatatataatatcactgcaccacctaattaggtgagcttatgccacaacctagcaccaatatctcgcatcgcctaattagacgagcccttacctacgctcggtactcacatgtcacacatgctacaacttgacaccaatatatcacatcacctaatcagacgagctcgtatctatgctcggtacttacatgtcactgtcgctcgtacctaataaggtacgatgcccatcatatcgcatcacctaataaggtgagcctgtatatcatatccacggtatcgtcacattgccattgcctaatcagacaaccgacaattacagagcctgtcatgccatgtggtacattatacttttcttacctcaagttctagttcaagtatattggccgacttgcttggagaacgatcgatgatcccaggtcctatgtcgtaacaataataaatcaatatgtatttatcccaaaatactacttaatagttg

SEQ ID NO: 247037 - DNA, 838 bp, Cannabis indica
tgattaaccataaggaaattattatttggaagtatgagtttggttggagagatcttacatatgcattggaaaagtttgatattagagcaaatatgtcttgttgctccggtatcaatgatccaagagttgtgtaatggaagtatataattatgtgataggataatacttgaatttccagaggaagagccaggttcattgacgttgttaccggtttgctgtgaagcgagcaagttcaataactgctggtattgaacattggttagttgcggaagcatagcatgattttctgaggcagtagtgtcttcttctgttccagtttgtacctgatttgcaccagcttctttggatttattttgcttgttgaaaccggggggataactgtggattttgtagcacttctcgattgtgtgtccaagaatgttacaatgggtgcaaaatgggcgatttcttttggggggatgtgaccgagaggcttgagtgtcatccttttgattccctttcttgtcattttgaaaggcaaaagccatagcatggctggaattgttgggattagctgctgagttagtacctctttgatgctcttcttgagtaactaggtgaaaaactctattgacttcgggtagaggatccataagcaagatgcttcctctaacttgagaaaaagagtccgaaagtcccattaggaaagacatgatgtactccatgtgataatggtcttgaagcttcttgactccaccacatgtacatccattacaagtgcatgatggcctgtaatttgttagttcttcccaaatcgttttcagtttagtaaaatgcatactaatggtttgattttctt

SEQ ID NO: 247038 - DNA, 756 bp, Cannabis indica
taaatacactccgagataataagaccaagaggtgacggaatctgcttgttgctttgaatgacttgaaccaacatgagacaatcagtctccataaccacagcagcaggaatatcacccataggagtaaccacccctccccaattacttttcacccaacttagagcctccttcaacgacattgcttcagtaacaaggggatcgagctgcccactcttttttacagcatcaactgcaataaaactaccataatcatgatttcgagcaatccaccccatatcgtggctcttctctcttgcaaaaagagcaacatcgcaattaacttttaactccccaatagacggtttagaccggtgctcaatacaggtcaaattttgaccagaagatatcgggacatcaactctattaacctgagcaaccttccaaagatcaaggtaagtaattgcagcagaaaccactctttccacatgtacattcttcttattccaaagcatgccatttcgtgccccccaagtaccctaaagaatcgtagccatagagtacctatatagtttatgtagcatttaagatttatgtttaatgtctcctatgtatttaaatttatcacgacagtagaaaatttacatataagttgagatttatatatcctagcccgaatataatttttttagtaaatccactatcacatgaaaattagaatttgagaattaaattatgttaaaccatatatataaagtatatgtaatcgaaattaatcac

SEQ ID NO: 247039 - DNA, 746 bp, Cannabis indica
agtccggttcctgggaccaaccggtcgaccggttgcaacagggtcccaggaaccggaattccggttctgagctgggaacccaaaaatccttccccttaattcaaaacaatcccaaattacacaaaaacttccagaacacctgtaaatatcataatagatcaatcccaattaacataactcagcaattcgcacagattctcaaatcaccattagagacctaatttaggttttctaacctctaacttgaataattcataacctagggcttaaatccagcttaaaacagtagaaataaccattattcaacttcacaattgaatccaaactgaatatacatatacagcccctaaattcaacctaaattcacctagcttaactcaaaattcaactaaaacttcaataaaaagttaagagggtttaccttgattcaaaatattcaaaacctagctgagattagagaatttgagcagagaaacaatcttctccttgctgggatgatggttcgaaagaaagagagggagaattgaggattttcttgaaattttctatcttcttttcaccataaaccttgctcaagcatttacttttaattctacataatctatggctgcttctagtgtctactacaagccaaaataagagaagaaaagacctaaatgccccttagcccaagtaaaaataattataactcctcaagggcaaaatggtcaaatactaatccccgaaaattctaacgcctctaccat

SEQ ID NO: 247040 - DNA, 1306 bp, Cannabis indica
actctgtttatgtgcttgggagtgtgtgtgacatgctcttttttgctgtactcgtgctaaagctgtatggaagatatcaaagtgccaagttttgatgcccaacataggtaaccttaaagggtatgatattttttcctatcttgctactgtcaacaaagatgctgatttggagagaattatatgtattatgtggtgtatttggtctgaaagaaataaggagattcatggttctaagcctaagattgcggaggtgatttgtagctatttagactcatatcttgctcaatatcgcaaagctactgctgctaccataccgtcccaaacaactgctgcaataaattgcaataatcagtcgacttcttcttccttcaaacagaccatttcgaaatggcagccaccaggaaaagacatgtacaagttgaatatagatgctgctattgattcaaatggtgctatcatcggtgtgggcactcttattcgaacagatgaaggtgttgttgttgcaggcctctccaaagctctcaaaggctgctgctcaccaaaggaaatggaagccttggccatgttttacagcttgcaatgggcattgatgcatcaatttccacttcatttcattgaatccgattctctcttattgattaatgctctaaattgtccatcttctactaagtgtataactctttttcatgatttggtagaggatattaattatcttacgtccttttttcctagaataaaggtatctcatgttaaaagagatgctaaccaagcggcccatgatttagctaagtttgatcttcgattggacgaagatatgttttagttgggtgaaattccatccccaatcatctctgttgttgttactgattcttcacattaataataacaaatctttctcaaaaaaaaaaaaagttcaaggggcatgatttagtacatatcaaagtttaaggagcatgatttggttgatatcaaaatctggggagcatagtttagtacataaacaatcactgaaacagtaaaattaaataaaattagataaaagtccttaaattttattcatatgcttaattataaccaataatttagagaacacaattctctctgttattacaacacatacatataacccaataacatgattggtcagagataaattgaaagcaaacttaaggtgttcgatgtggggcattttttctgatgatcatggcaaagtagcacctgcagcaggaaaaattataaactccattaatcaattaaatgtatatataagctaattaaggtacaaagacaaccgaaagagtataat

SEQ ID NO: 247041 - DNA, 776 bp, Cannabis indica
tagaaaaaaagtaggtgggcacgtggaaaatgttgcgagaagtaggtgacgattttttaatgggcccttatacccaacggtttaaaactgtcaggtatagtataggcaacagttatagggtatagtataggtgacaattttttaatgggcccttaaaccttcgcctatactatactgacggttttaaactgtcagttataagtctctcttaaaaatttgcattttattataaaatgtcacctagtttgtttactacgattttaaaccgtcgggaatactaaatttttcctgacggttttaaatagttagttaatttttttagcaatggtccccaaaaaaattatttttaggaccgtagcgaattctgatatttgtagtaatgtataattggatatacagtttaaaaattgatacaatccaattattaattggattggattggattttgaggtctaaatggtttggatgggatgataattttctaaatcaaattattaattggatcgaattagattgggaaaaagcttagatttgaataggatgctcaaccctaatcaaatatatttatcactactacaaataaccctttctatgtccctttttcatgtccaacaaaaaaagtgttggacataattttttttttcaaaaatttcatgtccaacattaatggactaggaaaaaacacatatcatgtctaatattaatggactaaaaaatgtgttatgacataataagttaaaaataaaaaaaataaaaaaaaaattaccaaaagagga

SEQ ID NO: 247042 - DNA, 672 bp, Cannabis indica
actcaagaagtaagtgagatccaaataaatattaccgatttcatagggaattggacatactaccaaagaatgtcgccaattgaaggacgagattgaaggattcatttctcaaggatatctcaagcagtacgtgagaaacaagggaaataaataaaattagcccaacaactagaatcaaaactagggtgtacaacctccctcaattgagggtgaggacattctggttaattttggagggccacatctcgctggaactaggaatagtgcccaagcgtgcaaaactcaaggaaccaccaataatcttcattgaagaaggtgtagtgcatgtgcagttcccacactcagatcccttggttatcataattcaactcacaaaaaaaggatagaaatagttctcgtagacaacgtgagattgattaacattatttacaaagaaaagctagatggggctagaagatgcaaaattaagacaatgtatggtgaatttttgtggcttcatgggggacattgttgcaagtctaggaaccatggaactcccacttgctatgggagaacttccattgtcagcaacccaaatgcaagagttcatagtaaaggatatcctttcgctatacaatatattgatgggtcgtctgaagttaacatgattggggcagtaggctcgataaagca

SEQ ID NO: 247043 - DNA, 1151 bp, Cannabis indica
gttccactattgttttaattgtcctattttattgttttactttgttttataaaaaagtgtaggagctaatcaagacaaacaaaattaacagagtatagtgcagagcaaaagaacaatgccaagaaaagcttaacccttaatggttagcttgaatttatttatagagtagttgcagatacaagatgaaaaacaaaccaacaaagaagacagtaaaaacagaaaaatacagttggcataacagaataacagcatttgactgtaacaaactgcctttgactttaactaacagattcttggttaatatcccccctcaaacgaaatggcgatgaagccatatgaagtttgttcttcaagtagttgaaccgatctgttgttaaaggcttggtcaatatatctgcagcttgatcaaatgaagggacatagcaaactaggagctgttttgctaggatttgatcacgaacaaagtggagatcgatctcaatatgtttacatcgagcatgaaacacgggattggcagcaagggcagtagctccttggttgtcaacccacagaacaggtgcttttaactgagggatttgaagttcagacagaagagatagaagccactgaacttctgctgcagcgttagcaagagcacgaaattcactctcggtgcttgatcgagcaacaacatgttgcttcttggctgaccaagacaccaaattgtcacccaaaaacataagataacccccagttgatctcctatcatcaatgcagcttgcccaatctgcatcggtaaaacctgtcaagtgaagattgtcagttggtctaatccagatgccttccgtgagagtacctttgagataccgaagcaatcttttgcatgcttcccagtgtttgatagttggtgccttaagaaattgacttagtttgtttgtaatataggcaacatcaggccgagttaagctcaaatattgtaaggccccaatggtacttcggtataatgtgatgtcttcaaaaggatctccatcatttagactcaatttagaacttgaacttgtaggattaggacaaattttggctccctccatgtgaactttggtaagcaaatcagtaatgtacttactttgactgagatacatgccattttgatctcgataaacctcaacccc

SEQ ID NO: 247044 - DNA, 830 bp, Cannabis indica
aaaaactattaatctttattattgagagtaaaaagctcaatgattttattaatgaagaattaaggtatttatacatcaagggctgatggaaatcagcaactaattaataaccagttagttaaacaattaactaaccttaacaaccttcttaacagcctaataggatataattaacataactaatattgtttaagactccccctcaagatggagtgtaaagattggaaacactcatcttggacaacaaagtttggaattgagtagggaatagaacttttgtcattatgtcagcaatattgtgccgagagggaacataggagagcttgatgcgatttttgttgacttgttctcgaactatatggcagtctatgtcaacatgcttgatgagctcatgaaagactgcattctcagatatatggatggcggcttaattgtcacaatgaatggttgttggttgagatgtgtagatgctgaaatcagtaaggatgttgtgaagccacatgatctcacaagttgtattggcaagggacctgtactcagcttcggcagagaatttagacactgtagattgcttctttgacttccaagagatgagggattggccgatgaagatgcagaaaccagtaatagagtggcgtgtatcagggcaggtgccccaatctgcatcagagaaggcttaaagttggagaagtcgttatgtaggaagctctgaggcatagttggaatgaaatatgagtccttggcaaggagtgcctttgagatattggacgatccgataagcagctttgagatggggttgtcgaggatcactattgttggaaattatttta

SEQ ID NO: 247045 - DNA, 504 bp, Cannabis indica
gaattctgactactacccagtgagttacttctatgcttttgattcttagacgtgtgttgatgagattcctgtaattaatattattatcaggagagataaggaaattaaactccaatatctatatataatgctaaaataaatatgattgatttttcttcagaaatattatcacatttgtaaattcaaacatacttacaaatgtcttgtttattatagttatattttataattattattttctgaataatcgatatgtaggaatattaatgtgacactatttaatttggcaaagtattcaatgatatattctataagaatctatattaatatttgtatgtttagttagctaaagagatattaatttgtattgcaacctatctatgatcatgatgatcacataagtaaatttgttttaaaaaataaacaaaaaatgcaactaaatgagaacattcacaatatcagttttacaatcataggaaaagttttcaaaaaaaaaaaattaaa

SEQ ID NO: 247046 - DNA, 536 bp, Cannabis indica
tcttatatccaaagcataaaagactttagctttctttaataataatgtcatatgatttatattcaaatcatatcatttattaagtttggaccatttctataatgaaaatgaaagagtcttgtatgctataattaataattgatccttttgataaattcattaaatgtgtaagaaatttttttattttctttgttaaagttattaagcataatatagtaatatttttaagaaacggcaaagcgcagagccagagtcaattctactgctacaagaattcttattggcattcaaatagaaatgtaataagtgcaagaccacatatttatatatacatacataaaactctgtttggataaaatataaataaataaataataaactatatattataattaacttctaaaaaactataaccacttgaggctagctcaagtagccataaatggagccataaatgtgtgtgtgagtgttggagatcctgagttcgagtccagataaaacatgttataatagataaacgcttaaaataaaaaaaa

SEQ ID NO: 247047 - DNA, 2483 bp, Cannabis indica
gatagaaatgcagtagtctaggaaaaaggacctaaacaagaattggtgagatggcgacgaatagtagtgctcaattattgtagcttttcttcacttaacaataatcatctctctctctctcccacacaggcccaagaagtcagaacacaacacataaaattaatttctctcttgatatttttggtactcatcattaattaaaagtacaacaaaccatatatcagtcatgagaccaattcacttgtgacacttggcattaactccatacaaacaattactccataagagtcagactcagacatatatgtgccatgcatgcacatactctttttcccatatgtgataaatataattatttattatacagtctgaaaatgtaaaaatatctataaaagtaaaatgtgcttttcaccactggcgcctatgcttctttctttgtatgaaggtaggtaactaactcttcattacaatttttttttccacataaacacgatattcggcggctgacaagaacggtaaataactttcacattttatacccacaaaaaaaaagagagaggggaggagaagttctatgcatctatgtacacatttcaagttaattttttgttttttttatatatatgtaatatataatattgattgatacgtataaaactggaaaagtcatagtagtactgcattgtctctttatttttttttcagcattatagtgcatattaaaggtaaagtggcaaaggggctttggagtttcatgctttttaggccacttagaaggagttacaagacttattaaagccataaattatgtggtgctcaaaatctagtgctcacctctactatgaatagaataatgagttttagtttctttacccaccaaatgaggcttgaggtggcaatttcaaacacatatattgtgttacaaaaaaagtagtgttttccttttcttttattttttttatagaacaaacaaaacaattatagaacaaaattattagttcagatgtgaataagcttgtgggggctagctaagaggatttatatcataaaaattataataaatatatatgggctcttttcaatagtgtttggtaggcgcatgaagattgaagagtattaattattcccttcaagtcatatatagtcatgtacggagtgttttgataccgtatatacaagtataattattagcgacctttttccgacctcaaataaatcccaataaaaaatcaaaacttaatctcaatttgcaatttgtttagtttagaattatatttaaagcttagatgtctataaagggtataattcgcatcgtttgggatagatatgaatcttcattacgctcaagaaaaccttatttaactatggatatatttatgtgatcacttttttgttttataatattattttaaatttgttcgattcatttttccaaacagtaactgtttcgtcttgattaagcttgttccccaatactcttactttttattatatgggtatatgtacatatatataaatggctaaaaaacatctcacgttattttctatcaaatctaattaactctgtaaaaattttgggattgaagttgatgaggattgtttctttttttctttctttttttaaataatgaggattgtttttggttcatagcgaaattaaaagttggaagaggattaagtggtacaacaaattgcatatatattactgaatatacttagctggtggcctaccaacatagacgaaacgacaaggcttctatcaaacgacaataccaaaagcattatacaaaacgacaaggttattatgaaacgacataaacaaataatgacagcatgtactaatcgacaagttttcaataaaacgacataaacaaagaacgatgtcaaaacgaccagtttagacatataactatatgtacataagtgaatagagaaaatcaatacttatcctatgtactaagttgtctcttgaacgacaacttaaaaaaaaagtaaaataaatcattaatttttatcaatgaaaacgacagtcgatatacaaatcacaatgtgtgagatttagacgacaaagtaagatatcactattggacgaccacttaattaaaaaaaaaaaaaaaaaacctgttttcatttttttccagcaaaaaaagagttcacaatttttatgggccgatctaattggaatggaaatagattaagcccaaattaacctaaattaatctaccagtgaaaacgaacttacaaatattttacatttatatgatttcagtagatattgtgatagttaacaaaaaaagaatatagttcaaggaaaatgaactccacaaattaaatttaaggggtatgttgaaaaataccacttttattgatcaattaatcaaatttacttttaattttatatttaattgaaacatgtattgtactaaaaatatcctgacttaagagagtcacatcgagagtatcttgaagtgatagggtcaaaa

SEQ ID NO: 247048 - DNA, 1405 bp, Cannabis indica
cctttgaacattagtggtagacgcgaccgtgttgggagtggattgattggctactaaattggtattcccagtctcttgcacgcttggtgtgatcccagccagaggggaagtcactccatggcccacagtgggtggttatgtattgacctgctcaaggtttgtccctgttggtcctcttgtattttcaggagtctgtacgttgggatatgtcaccatcgggtcgccttgatcagcaaggcctctacgagtttgtacaaccatgctgtatgcctgttaaaactcaagacaaaaagaaacttgagtttttgctctcaatgaaagtaccaaaatattgacctcgcttttagccaacaacagtgaatccattaataagcgattaataatataattgaaagagaataagaacaataaagtaaaaagaacaccagattttaaagaggttcggcccgtgagtgtggcaatagcctactctccttgtgttgtattaacttgagagaaggaacaaagtgttttcctctctaaaagctcttacaatggatctctgagtaattctcttagatctttattttctctttagaatctctctttgaagcaattctttcgatatcttttacagtaaggctaagccactatttatagggacttaatgcatgagggatggtttcccttttgcttacaatgcgtaaaataggaaattacaatacttacataattacgatacaagaaataagaaactagaataggttgccatatttctctgactcaatcccacgattgtagggattgtcttcatgtctaggcattacaagatcatcctgaagtaattaactccttgtaattggctcggcatcgcaaacttctacctggtaggttgctctgtcttccaccctgctcgggtaaccgataattatggatgttgatgtataatgtgcctgctataattcgggacacttacctcagcccaagtatcaaaaatacgagacacgtttcgctcagtcctcttgccacgtcaaagtgcaaaaaaagggataacaatatccatgaaaattaataaacttaaaaatgaaatttgaatattgttttattatatataaataaatgtaacattttttaaataaatattatatgtgattggatttaattagtttttaattggattttgaaattgtcatccaataatcggtccaatccaattaaaatttaactattcacatccaaaccaatctaattataattgaatattcaacgttttttttttttaaatttgattgaattaggttggttcggtgtaattaaattggttagaccatctctaatgagagatgtaaaagttaaattattttatacaaaaagtagtttagtgatatgtttacatcaatttttactattgtactccaatgcataa

SEQ ID NO: 247049 - DNA, 978 bp, Cannabis indica
catacgaagctgaatgtttaacggctcgcattttattggaatgtattaaaacgaggcaccaagatgccttaaaaaatacttaacctaatgtatgaataggaggcttaaccattcaacgagcaatcaaaaatatacaaaacaatatagaaggtaaattagtaaaagtatgttcaagtttgcttaaaacagattataactgtttacgcgaggcagaattaataactgctcgcaaatcaaaagcataataaacaataactgctcgcacacatagtatattaccaactacttaaataatatcaaagaaaaataagagtaatggaaaggctcaaagtattttaaatttgataaaggtataaatgtttaagttgtgagtagaaacgtaaacaaataaatatattaagtttaaatgtaaaaatacgaagtaataaataaaagataaaataaaaagtaaagttggtcgtccaacaatgcaaatttgtctttacaaaaattaccacaaagggcaaaccattttctcggccatatggctattttttctaaacaaaaaaatatatataaccaagcctacatagtaggaaactttgataattcttcttcttcttcttcctccaccttggcctcctcttctgccttcttggcttgctcgcagtaggcaaggacctcctccatacccttacccaggaaactcaactccatttctagatttgccatttaggctcggtagatggaaaggcttggcaatggcattgcatcgttatttggtgtcaaccttggcccctttgagctttgcagtagctgcactgagttcttcctggatttttggcatattttagacttgtccttggcctccttttgagctgccttaagttcagctttatgggacttcttcgcctcctcaacctccttatttaggcgagagttctctgactgggccatgttccattcccgagtaatagtcttgtgttgcctaatcgtttt

SEQ ID NO: 247050 - DNA, 1267 bp, Cannabis indica
attttctaacttcttaatggaaagttctccacgtagacattgaaaaactgccaactcttctattgttgcgccactattcgttcccacaacaaaagttgtcaacatttggagattcctcaatttacttatttgacttggcatctcaactagtctacttccacttacaataagatgcctcaaattaatgagacgatgcatatctttaggccaagttttaagtcgatgacaattttctaacttcaatgtctgtaaattgtataatacacttacagattcgggcaacatcacaatcttcgtgccagaaagatctaaatagcgaagatgttttagttcaccaattgaatcagataactcagttatatgaagaccacagaaagatagaactctcaaacatttcaacatcggtagcaaattctccactacttccttggaaatattgacttcaaaaaatcttgaacctaatgttaaaaaggttcgtaaacgagtagcttcaaaatcatagctagatatcttgttatcagtataaagttccttgacacatccaaggtgacgtgtcttcttctcaagcttatcaatgtccccattttgctctaacaaacaacaactgtattttccagatatagttctagccaaatcaacaataagatcatgcatgacaaaagatgtaccactccaggtctttgtctttacaaaaaatgacatagatactaaatcatcaaaatactcacagccaacttcttccatttttctactcttttcagaatgttgcacaagattttcagccatccatattaagaccaagtcctctcttcgaaattcatagccttttggaaatattgaacaataaaaaaaacaccctttcaagtgtgggggaagatagtagtagctcaattccaaaacagctggaacaattttgctccttcatgtgttagctcccaaatattactctttgctatttgttcccatctctcagcatcccatgttgatctcaagagacctccaagaactttaacagctaaaggtaaaccattacatttcttggaaatttctttgccgatcctttctaattttgggttcacaataaacattctagagttgccactagaagtatgcttcacaaatagtgcccaacactcatcttttgataattctataagatggtgcgtatcaacagttcgaatgatatccgcaactttttcattcttgttgttaccattattttgcagcctcttgcaccgtctataaaaggcttcatcatgtctgtcca

SEQ ID NO: 247051 - DNA, 831 bp, Cannabis indica
atggtgaagagtgttattgtggatttgcattagcccgaatgcatctcgcaaattctgtagtttggtgccatctctgactcgcctttgagaatttgtagtggacgggatcccagttccaggagaagtttgctcaattgcagtactggtatttccagtttcttgcacgcctagagtgaacccaccaagaggagtagtcaccccttgacctaccatttgtggacctgttggtggttgagaattaatctaggcgggggccatcctaggtggatctcttgggtttgtaggtgcctgcactctcggatctgtcaccattagatcggttgtagcagtttgatttccccttcatgtttgcacaaccatcctgtgtcttgacaaagacttaagacaaaaacttgcgtgtctttgcttttaatgaaagtaccaaaatattgacctcgcttttagccaatgacattgagtcaaattaaagcgattgagaataattacataacataaagtaaatagtttaatgtaaagaaaataccaaatatatataggttcggtcccgtatagttggtaatagcccactctcctttttgttgtattgacttgtgagcaagaataacttattctctctcgaaagcttttacactgatatttgagaaatttactcttaggtcgaggtttctctcttgagtgttctctctctgaatacttttgggtccctaaatagtgagataaaactactatttataaggattaattacatgaaattagttttctaaatcaataggaaataaaatgggtaattagtttatttttacaatttcaatgaagaaaatagaaaactta

SEQ ID NO: 247052 - DNA, 626 bp, Cannabis indica
catgaatttctcataaaccattttatttttaatattaaactattttatttttaatataaataaaaattgacccatgaatttctcataaaccaagaattctgttatataggcacactttatatagaatagatatatgtttttttaattatgaatttgtaagtgtgttaaattgttaatgtgttagtttatgtttactgagtttttcggaaactgaataattttagagcttaagaaagtaatgatggtatgaacaatgcaataacagacaaaaaatttttacgtggttcaggcgttaactatccttagtccacgaatccattttattaagttctttaaccggagattgtttatacaaatacaaaataatagactttgcccctatttccccgtgttcttcttgaagaagaagaagcttagtaggaatattataaagctaataagggggcgtatagaacaatgtgttttcttggtggagaaggggtcgtttggtcttagtgtgagagcgacgaagggatggatttgaatcccccctcttgtgcatcagttggagtatttatagggtcgacgtccatggcatgggcccatcttggatagatcttcatagggatgaacctccacccgttgga

SEQ ID NO: 247053 - DNA, 539 bp, Cannabis indica
aaatagtgtagtgctattttagtatttaaaaaaaaaatagctctccaatggtatgttaaatcttgtacaaaattcagttgatgctaaaagttgtaccaagttttgtacaagatataacattgggctaaatttgaaacacaataaatgtatatttttttaattacaactttgtcattgatcattaatgataagctttaatatatattttttaattacaatattatcattaattattttttaaaatatttaatttattgataatcattaatgatattttactttttgttatgattttattgtttattggagcacaatagcaaatattgtaacaaatatagcatttgttagatcatctctaagagaagatatataatttgagctaaatttgactaaaaaataaaataatattatatttagtacaaattttacaatagtcctccaatacattacgagcaaaaataatctttttttgattgaaaaatgtaaaaacttaacaaaaatattaaatttttattgaaagtatataaaaatcttattaa

SEQ ID NO: 247054 - DNA, 798 bp, Cannabis indica
ttcttagaaaaataaaactaaatgaaaaaataaacgaacaaaacaaaagttaaatcataccgaaaataaaagaaagcaaggaaagatagaacctgattagtcttggcaaaccggagacaagtctcctcaggtaggcttaccaactcaatattcttgactatccagtatcaaaaatgaattttcttttatcctgtgtctcaaaaatagaagtattagttacattttcaggaaaaagaaaatgggcattgtctaagtcgtaaaggaaatagtgtaaatgactaagtaaaaataattttctaatttcctcaacgactttgtctatcacatcagtatgatagcatttcgtttcatccagaagtaggggaagaatggtagaatgagaaagagtttcattctgaatagtggtggtatcatcctcctctatgaataatgtgggtaccacatcagtatggtagttctcatatgtacttgatagagtggattcttcaaaattttcaccactagttgtagaggtgacacttacctcgtcaaaattgtgaaaggtagtattggagattagtgcttcattcacctgttgtagaggaaaactgtcagcatgcgaacttaccaggtgaccagataacttgctcaattcctccttaatttgtttcagctcagcaagtaagtctttcatcatcttacaatttgtcaccatagatgcttgtaactcaagaatagtgtcattgagggaactgacgtatagattctgagaattataagaaaactaagaatctttctcttcacaattccactcatata

SEQ ID NO: 247055 - DNA, 482 bp, Cannabis indica
cctagccctagacccaaactaagactggaactcgggcttggagacagtcgtgtagctagaccggaccgataccaggagttggacctaaatttgggattcgatcccaaacatagacttaaacctagaaagggatcctcataagaacctcaacttggacccaaaccaaaacccggattgaaacttgggaccaagatcttgtccgagatcttgacccaaacccaaacctagacccacacttgggacccgaacttggaccttgacctgaacctagatccagattgggattcagacctagaccaaacccagacctagactcggaccaaaattcataccccgacacagacccaaaatagatcctgaaccaagacacagaatccgactgtgggtcagtatttcagtctgggtccgagtccctatatagttttgggtctgggtccaagtccttttcttggtcatgttcgcttctggtttcagttctagtt

SEQ ID NO: 247056 - DNA, 845 bp, Cannabis indica
aactgaagttaaaattttacatcagcaatgagagttacatcatatatttattggtagtagggtcgcaaatgttccacgttccagtagttctttattagcgagccattgagtcgagcaaatttgtaaactccaattccaactactccttcgatgacatatggaccttctcagttcgactcctgcagatgcatctctcatatttccaaatactcgccttagcaccaagtctccaacattgaatagtcttttcttgactcttttgttgaaatatcttgtaactcggtgttgatacgctgcgttagtgatttgcaactcagtttgtttttcatcaagcagatcaaaggacaattttaaaagtccctagttttcttctttgttataaaactctcttctgtgagtcaatatgttcacttcaacaggcagaattgctttcgaggcaaatgctagcaagaatggagtgtgtgccattgtcctcctcttggtagttctgtgagcccagagtaattgaggtagctcatcgacccacctgcctttggcaacgtctatgttcttcttgatagtatcctttaaggttttattaactgcttccatttgtccatttgcttgaggcctagatactaacgataagcttttgataattttgttcctctcacagaagtcagtgaacaagtcgccatcaaattgggttccattttcaaataatatcttcatgggaattccaaacctacagacaatgttcttgacaacaaagtcgaggactttcttccaggttatggaaactgatggctcggcctcagtctttttggtgaggaatttgactggtactactgcatacttagctcctc

SEQ ID NO: 247057 - DNA, 632 bp, Cannabis indica
agtttttttttttcgtaacatgatggttatattttttttaacagacttccaatagctaaaaatatcttttttagaattaaattaattattattaattttgattttagccaatcacaataaatcaattaaagtgattagaaataataataataataataactaagcaatgagaacacataattattataaaggtttgaccctgtgatagtggtaataacctactcctctttctcttatattaacttgcgagaaaaaaaaaaacaagaattaatcttcctcgaaagcatttacagagatttgagcaacttgagtgctcctgtaaatgaataatttctcctcactcaatattgaaatgactccactctttttagtgaataattacattaatttagttttccaaaacaatttaaagataaaatgggaaactacttactttcccataatacaataatgacatgtagaaattctatgaaaataggaatttaattgataaacaaaagagagaaaagtatttttatagtttttaatgccgcatagtcatccaagttgacatatgcagagtgcctgcgaagtggatcttggtcagacggtaaaacataccttatccgaatattccaatctcttcttcaaat

SEQ ID NO: 247058 - DNA, 717 bp, Cannabis indica
tttatagtttttaatgccgcatagtcatccaaggtgacatatgcggagtgcctgcgaggtggatcttggtcagacggtaaaacataccttgtcctgatattccaatctcttcttcaaatcaattgtttacgaatgacatattactttggacgatatgttatggagggtacgacccgtccaagtcatggaatattctcctcgtgtcactcagtggatgcaacattaccctctgcgaaaattggatgactatgttgaccacgcttctagccaatgatcgataatgagtcaattaaaaggattagaaataataaataataattaagtaacgagaacacgaaattgttataaaggtttagccccgtgatagtagtaatagcctactcctctttttcttgtattaacttatgagaaaagaagtaaaaagttcttgatttttttcgaaagcttttatagagatttgagcagcttgagtgctccgctgaatgaataatttctcatacttgaatagtgaaatgactccactattataagaaataattacattaatttagtttctaaaacaagttgaagataaaaggagaaacaacatattttcccacaaaacaataatcatgtgtaaaaaatctcataaaaatagggatttaattgataaacaaaagagaaaggtatttttaaggcatttactgtcgcattcatcctagacagcatatgcgaagt

SEQ ID NO: 247059 - DNA, 2411 bp, Cannabis indica
tgttgtattttctgaggattttgaagcattcatccagatactctatatgcctccagccttcctggatttgacgagcatgtcatctacatatactttcatattctgtctgatatgatttttgaacattttgtttgctagtctctggtacgtagccccagcattcttcagacctaatggcattactttataatagcatagatccatatttgtctggaaacttgtatgttctttgttgggtgaatgcattctgatttatttatatcccaaataggcatccataaagctcaggatttcatgtccagttattaaccccacgagccgatcaattcttggaagtgaaaaacaatccttgggacatgccttgttgaggccgatgaaatcaatacatacttgccattttatattcagcttgggcaccagtacggggttcgccacccaagccaggtagaaagcttcaatgatgaacttgttttcgtgtagtctttcaacttcttccttgagtgcttgtgcccattctttttccagtagtattcttttcttctagacgggatgaaagtttgggtcaatgttcagggaatgagacatgatagtgggattaataccaaccatatcctcatgtgaccaagcaaaaacgtcgagagttgctctgcaaaattttactaaagctaattttattttgagcaataaaccttttccgattttgagtttcttggctgggatatttgggtcaatttccacttcttccagttcttctattggcccaatattcgtatttattttcccaagtcggggatccatatcttcgtccccgccttgggtgacttcctattgggcaatgcttttacccttatatgaactctggccggaggtattttccttcttgaccttggttagagcaaggtcgtagacttccagtgcaattctttaatttcctttaagacatcccactcaactttttgttgggaatttaacgcacagatgaaaaactgatgtgacagcttgtacgtcatatagggtcggtcgacctaacatgattttaaaagctgaaaggacatcaattatcaagaactgtgcgattatagttatgctcctcagagcttgtccaatactgaggggtaggcaaatttatcctagaggtacaatgctctagccggagaaaccatatatgagcttggtgcacgagatcaagtctttcagttggagtctcatcttctcataagttttcttgaaaagaatgtttgaggaagctccattatctatcatagtccgtgccaccattacctctacaaccagggggtcgttatgtgggaagatgacgtggctggcgtctacttcagtaaatgttatggtgggctccctacacgtggtactttaggtttcctctcttccacggccaagattgcttcattttgttcatactgcaaggctcgggcatacttttctcgagctttgcctgagtctccagcaagatgtgaacccccaataatgacctgtaaatgaccgtccactagtggaggaatcaattggttttgattgttgtctgcttgggcggcccacattaaagcgaaaaaacttggatgtgtctctcttacttacatcctttttcctggcagaaggttttttataagacaccacggactgagtacttccatagattgtctttatgtcttctgataggagttagaaggcactaaatttagaggtattttccctaggatgttggtcggcattgcaagtgaatttacctttctttccatccccctacctgttgtttttgttagacctcttcccatttgaatttgaactgctaggatactgtggattctggacggatatccctgctgaagtggcacgtggttggtttttcttttgtccgacaatatccatacgccgaatagcttctttgagcttaatgaacccatctccccaatctaggaattcagccattgatcatacagttagcgtttttatatccttccacaactctccaagcggtttaatgcccctcagtattgcaaccaatctcccttcttcagtcagccccttaacttttgtagcctcagtcatgaacatgctaatataagttctgaggggctcccctggcatttttttactttgaccaggtcttcaaggtgcgtgggaagttgacgagaggaggaaaactgtgcgtggaaatctgatgagaaggcattccacgagttaaaccttcctgcaggcagtttgaaataccattgttgagcagcctctatgagtgtggtaggaaaaattttgcaccgtacatcacctcatacaccctgcaagtgcatctgcatctcaaaatactttaattgtggtaaggatcttcttttcctatatacatcttccaggttggcattttgaacttaggaagggtaactcaagaacttcaattt

SEQ ID NO: 247060 - DNA, 985 bp, Cannabis indica
gaagggtataatccaccaatgaattatgatgatcaaataaaacagcgggtttggaacatatgatcccatctattccgttagcaataaattggcatggggatataaataacacatctttgagtagaagattgttaggagcaacaagatcgcacgaagaagatgcaagtgtgagtttttctgaaaagcgagttaaagtgaatgatgatggtacgtgttttaatttttggtaatttatgatttcttttgaatgcataaggtttcttattattggttttgtgattatttttaggaaaaggatttccctcaaatgactttatggaaaaaggagagcaaagtgagaataaaagagtaagggaagagactaaaggagacaaggaagaactaaaagctaaagaatttctcttgtctgagggagatcaaggaaatgaggaaatggatttttactctggaattttccagtatggcaatgaaggaagcaaatgaaggatttaatgttattttgcaagattttagtttattaaaataattttcaaggaataatgattagtcggtttcagttatttggattattgttttgaatgttttttggaagtttttatcggttttgttgacaatggaaataagtatctccttaagtataagaagagtgtttctagttttcatgttaatgaatttttgctcaagtaatgtcttaaataaaagtttggttttgcatgataattattctttcagtgttgttttttacttaaaatataactttagtttattataatcgaatattacacttaaaggtcattgagactgttgttgagcaaatttcgcaacaccaaaaagagaattatttgagagatgacaaatgcgagtattcaacctagaacggcgagtactcgattgggagtgtaagaacagacaacaaggctggaaaaagtaaacaagacgatgaattatagtggttcagtcagattttgttctgcttagtccactg

SEQ ID NO: 247061 - DNA, 1034 bp, Cannabis indica
atgccatatatatcaaaacttatctttattttcccatatttttgtaaaaaacccaattagtaagttttttttaaaaaatgccatatttaaggtgattaagtttttatgccatatatattaaaacacatctttattttcccatatttttgtaaatagcccttgtgtaaatgggtagaacataagatgggctttccagttcagcccataaatgaacaaagtccaaatcgacattgatacaaaacataacgaacagctcagactaaaccctctccttctctttctcctctgagaaccctaattcgattcgattaggggaaaccagtaaaaatgggaggaaagtgcccccatagaagcgtcaagaagagaagatactcacacaagactcatcgccgtgacaagttcctcattaatgatatcctttttcactttctcgatcgtccctagggttttggctttttttctgtttttttttcatttattttgttgaattttccttgacttggaatgagtacgtgatgatatggtatatgatgccctgaagaatccagagggaattaagcccttgcctgttgatgaagacctccctgggatgggccagtattactgcatacactgcgagtatgtttctttcttttttttggtgaaaattgtttgtttatacaatttcttcatacatatgaaccttatcctgttttggcgcttgttcgattgctttgctttgtttccgagaaaaatgtaggaagccatctactaaaagaaaagttctgcttaacttggtattgaattgaaactagattgcggtttgtttactatttagtaatggaaagggaataagattctgacaatttgatttagaaaccaaaatcagggttttgaaacataagactttaacttttagatcatgtttactaattcgtaatggtgatggaaataatggtagttattctcctttgcttaattaggagagggtttgatgtgatctttgcaatagttggttgaaatcaggaaaagataactcagttacgattcatttt

SEQ ID NO: 247062 - DNA, 981 bp, Cannabis indica
atatgaaccttatcctgttttggcgcttgttcgattgctttgctttgtttccgagaaaaatgtaggaagccatctactaaaagaaaagttctgcttaacttggtattgaattgaaactagattgcggtttgtttactatttagtaatggaaagggaataagattctgacaatttgatttagaaaccaaaatcagggttttgaaacataagactttaacttttagatcatgtttactaattcgtaatggtgatggaaataatggtagttattctcctttgcttaattaggagagggtttgatgtgatctttgcaatagttggttgaaatcaggaaaagataactcagttacgattcattttgaacttcttattgcgattttattagtaaaaatagctttatgttatcatagctatatgctatgagtaaatgtcaaatgtatatggaatttgttgagttaagtacttggttttcatatgcagccgatactttgccaacgtgtccgtgagagacgaacatttcaagacaaaacgtcacaggaagcggtaagggttacctgttctcttatccttttaatgtattttttcttaatacttctagatgtttgttgctagtttacttagtagtattaagagaaccacttatattaaagaataaagattgtaaattatttaaattgatgactttgagtttgtcaatgcctttacggtgggtagtagcattttgatgggttttacctagtccaggagtcacattttcattttgatgggtttgccaccatgaactttcccacaagacctgttccagttagttatgtaaccttctacttctatatggttgtgataagttacaatcacttgggttttaagatggatagtggcgtttttgaagggttttattgaatccatatacaatacaatttagcatattccttatgttgggcatgtgaatatatttgtattaacttttctagtaccaagcat

SEQ ID NO: 247063 - DNA, 2589 bp, Cannabis indica
aaatagaaatgatcaatgataagttgttagccctttaaaaagttgggttcattaaaaaataatggaaggacattaaaaaaaatatatatatattgggccctttattttttggggccctgtgcaatagcacatcttgcaccccataagggccacctatgttaatactaattgattatttaatcaattagtattcgcattattatttttttaattttgagaatattccactaagtttgtgaaagttagaagaaagaaaaaaataaatatttaaattatgtttttacttaaataattatctcgatataattatttatttaaaacaagtatttaaacacaattttttttattaaatatggtagaaataaaaaagataacaagattttagatccatcgggctaaaacatacaaaagagaaaactcaagcctaatattgattgtaagggatggctatggcatagaattttccttttgtattttctttttattttcttattaattaatcattagagaaaaataactcttcacttggctataaaaggaaggctataagagagcattttacacttaaattttcaatcttggaaaccctaaaattttagtctctctctcccccccccccccccttcctctctctctaatgtcaaaccacaagtgtggttgtaacaattgccaacataattctgttacaacacctacatctttgtggaaggatgtgaagagtttgaagctgttcaaggttttctgaagactcaggttcagtgattgatcatactctgtaacagaaagaaataaagattagatcactaaatgggatgagtcatatttcgttgtgcaacaactctataagtattctatactcaacatgtgaaatagatattatagggtatttgaattttttacttaaatgttaatttacatgaaaaatacactgattcgttaagcatgtattcccaacaactgtctttagagtcttggttacatattttatttttcaagtattagcatctctgtttgagtattacatggttttagatgatatttttgttttgtttgcatgattataaaataaagttttagaaataaagtttggttgaaagttaaaaagaaaagaaataaaaaaacaatggtaaaaacgaggctcaaactcttaaaaaatagtattttttttatacttaaagaaatcccagcctgtcgacccaaattggttgattccttcctcaactgatagctacaacatgtggctctctcccatttgtgcgctggccaccaacaggtaggggtgaaaatcggtcagttatgatcggtttttacaattttataaccgcggttacggtttttattttatgaaaaccgtaaccgagcgtttagaaattataatcatataaatccgatcgtacgatttttgacagttttgggcggtttattgcggtttattgcggtttttggcagttttggccattatttggtttaactattttttaattttaaaaaccgaaatcgaccgccatgttacgaaaaacgaaaccgaaaccgaccgctaaattcggtgatgacgtggaaccgaaaattcgattatggtctcgtcgatttgatggtcggtttcaatttatcgatttttatgaacacccttaccaacaagggcttgttcccctcctcctttcgcatgtacacatgacgggcacgacctatctcgagccttccatttcttccacctcccaagcttgagagtggggctttctccaccatggtccacaagccacaaaaaacaatacacctttttattcgacacatgccacatgtcatctaattgtccactttctctcatctttagccaatcaatgattgacacgtggtcgaggttcaccacatccaccaatctgagcacatcatgtggcactctaaaattaacttatgtgtatttatatatttaatttctcatgtaatttgtaataagttcaaattgcacattattcattttaccttcctataaatagaagcttaggtttttaaaatttagtgcagttttagacagagaaatttagagaaaatgctctaagcattcaatattagtttatcgatttttcttaattaattttcttatgggtttctaaattctcttattattaaggtagacgataaattttactgtatataattaagtatttatttttatgttgattctcagcattatacatatgttaatgatttttgcttttttaaataattttgttcatcattaatatcatgtgtttttgatagttaaaaattattaatgtttgattttttattttatattaaaataatattttttttgattatctatacttgcattaaattgtttcacatttaatgtctagaagttataattttaaagcgaataaaaatctatttttgttagaaaataattagtttgattactaattaattatgaggatcaatataattataaatctttctatatacacttaggtggaatctaaaatctgaataatttctctaaatatcattaaaaatacctgttacttgtcattttcacctattaaaatattttacttataagaatatttttatttaaagaaataaatttct

SEQ ID NO: 247064 - DNA, 1545 bp, Cannabis indica
gcacagtctcaagttgagttcgcgcatctgcagcttcctttcttgccaagtccacatccctttgcagtgtgttggaagtggcaagattcttgaccgcaaccgacttagctcaggaaaaggcatacaccattttcaaaccagtttgtgcagagaaaaggcattaaaatccaaactagacaaagaaggataaaagaaaaacgttagaaaagacatacctatgaaagctctttcaggacttctcccatgaccagctccaaagacaagtcattgtccgccccagccagctgttcgttcacctcagggaccgaccggctcacatagtgattgagcatgtctctgcctcttttggtctccatgttcaatgttaaaagtggggcaggagccttaacttgtttagacccgcttctaatcagctcgggtccacctttcccctgcccagatccatccgaactgcctcctcgggaacttttggactttatgattttcaaggcaggagggtccacaacagtttattctttagaaaggtcaatgactactgcaggtggtcccttctctttgggtagagtctcaccgcctttggacttcttggttagaggggacaagcccgagcttccccccactctcttcttcagtgcctcaatcatgttttgggacatttctgcatgaaataaaaacaatacagtcagaaaaaagtataaaataaatgaaggcatgagaatcaaagaaaataaatgcaagatgaagtactctgcacgctggcaggaacatttgcccgaacaagtacagatggggcatcatcatccgaagagtcttcctgctcctccaggacggccttcccctttccctctataggggtcgatggccgagcagcccggccagccttggacttcttcttcctccccttcacaggttggggtataaagtctgctggataaagcttgtacttcacaaagttgtcctccgaggtcaacaaagtgatattccgagcaggatctgacagttggacaatcttttgagccctgtccctaagtgccaatgtgaagggtggacgacagtatattgggatctattgaaaccgagtataggtggtgtccatgccttccataaaatagtactcgtcaacaaaacccacaatcttgcttacatccttgtccacagtacctgtcagccacttgaactctggctgagagaagtagaagtaccccgaccggctctgcttaggggtagacttcaagtcaaaaaaccaattgacctcgtgtggggacggcacatcccattcttgaatggcgtagaggacgaacagggccgacaaatacttaatgcccttgggagtgaactgggttggacaaaggcaaaaataatcagcaaccctcttgaagtacgagtgcaaaggcaccatcgccccttgcttagtgtgagcacccgaccaagcacaaagccctttttgtgggtttgttgcccggtgattcgaagaggggatgtaacactccagtccgcccaggttcccagccttatccaaggtcttcatacgtgcctcacttattt

SEQ ID NO: 247065 - DNA, 1088 bp, Cannabis indica
cgaagttggggtttttatcctcccagagcattagttgagaaattcggtcagttaatggcctcttagcctttcttgattaaaatccacgtgtcatgattacgaaaatgcggataacatttacccccaagcttcctgggcgtaccatggtctgagagcttgtagtatctcctcctaagtgactccctggcacgtgcgataaatacgaactatttattacatcacgtcatcagccaccaaatgaagtgtcactgttagaaggtatcatctcctttatttttttgtcagggctttaaatgctgacttttaagttttgcgcgggtgctgggcgcgtgttctgtgggatgccaaaaaataggggcaattagatttgagtagactttccatttgttgagcacttctcacgatgcatgcaatgatggaggtcaaccgttgggagtcgacacaccttcataacttctcactcattcaatcgtcagatgtcccttaggtgaacgagtcaaaccattcgcttctcgtggagggcacccgttcctggtacccaataaatactttcagcatccatttttcactttacattctttactgcctgtcgtactagagttctagcatttggtttcatccatttcttttgtcttataaagccatcttcttaattccatacccaagcacacacttcgctggctaagacgcaacatcaggatcacccaccccatttcctcttaacaaccaggaagttttcttttatcaccacttacttgatgtagcattctttgggagttgtgatggtgcatgttgtgtgcgactatctacttgggaatattggcatcgtgcctacggtgtttgagagtcctgggatcctgcgttatgctgacctattttgttttgtactaatgtctggcaggtacattaggtctgcgatggagaggaccagttcttctaaagcggcatgcgacattacccctaagagaaaaaggcaatggcttgagataaccacttttgaaacatgggcccatccccagcgccgtgatccaccattgaggctgggccagccacgatcgtactacccttctaccattccaaaaataccc

SEQ ID NO: 247066 - DNA, 1487 bp, Cannabis indica
caatattatctcaactagtgttggaaccatgggcctatataatcaaactcacaataagtagttctagaatttacagagtaaattctctatcttatcaattcttcctgactccactatagattaggaattgcactactaattatatagaacgctctataccaagtatagatactctataaattatgtattgtttcaatccaaataatcaatgatcctctattgatgatttacatcgagtagggacaatgtaacgttctacccttgaatgtattttatccttaaaacacttagctacttgtaaatgatattccattaaactaatataatttctagaatgagtacgccaccatttaaactcgtttagcgaagcccaatggaaatcatcattacacttctataaatgtttatagaagctataaattttgtctctatgattagcgctcccactcaattacactaccgtattcccaatgtgtaattattgggccaatccatttggttagctttaacgaactagtcaaagaacacaagtaatacacttcaaccagaacctaaccttctcaggattgagatcattaatcaaagatcaattaagtgatatttacttaaaaaaatattacagtaagtttatgatatattttccactgtgattatcaatccaatccgatgtataaccatacatccaatacaagcttactttgtcaatgccttggaaaaggcattctactatacaagtgtaagtaaaccaaattggttattatcatattagtgtaaatcatgtgaattgataaatcatgggactaattagtttaatcacataatgttgattattttccactgtgtagacaacacaataatcatgagtagcaatgtgataaggatttaatagaattcatatatcaagcatatgatcaaggaataaacatgtgaaccaagcattatactaaataagtaataagataattttgttcctttactgataatgaaattcaagataacattgaaataggatttaagttagggcacaaaacccaataaaaagctgtatagaactttccataggctaaataattatctagtagccttttaggccattttaacattcaatctagctggtagagttagagactctggataggtttttacacttctccaaaaatcactactccaccttgagagtaatcagcatcccaaatttagactttctagcattaatgcaaatatagaaatctgagttggtgtagtgtaaagggtttcgataattttacccttatagacttacatatgtcctccttaaccttaagatttatttgatggtcttccaatgttcctttcttggattaaactgatacccactcataactaccactgaacaatatgtgtctagtctaattcatactgaagcatacatgagacctctcactattgatgcttaaggaattattccttggcttttatcttttttagaatagttgaaactgttcctt

SEQ ID NO: 247067 - DNA, 1853 bp, Cannabis indica
ttagacataaacaatgatcaacacacacacacaattttcagtttgacgaatttaattaaagctacctgcagtgcacaatcccgaaaagcattaagagaagcctcagttagcaatcttgaaaacaccaaatcattgaaaatctgctgacttagtcccttgggagcattgagaaagtggtatatttatcaatgtcctgcaacagaagaagaaacatcaggaccaattggcaaaatcccagatataaaaaagagcctgaaacaatcaaaatctttctatttctttatgcataagtccataagggataagcactttccatttcccatttgaatgtcactagactgtctactgaatgaagttgccaaccactttgaactcccacttttcccatatcttctgtaaatcccaccacctatgttatcttcttcttctctttggtctctcttcctagacaagctccccccattgatgaaattcttgcaatcaatatttgtcagaaaaactgcaccagaagagtgctgcaaccaattaatcaccaccaagaaaagggaaagtaaaggaaaaaaaaacaacaaggaatcatatcatcatcaatcttactattgggggagttcaagaagcaaacaagattacttttttaggaaaccccattgatccgatcaccactaaaacagtagtttcagtcttttacaccgataaagctaattaaactaagaaaatttccaaccccactaataaaaaaacaaactttatcaattacaatggaaactatatgtactgttctcatctgggaattggaattagaagctcagtcaaactatgcattaaaatttaacaagaaatatataaaaaattaaaaaatctttgagaaaatttctattactatctaggagaaaataacaataaaagaaatgagagaatctttggatggagttctacctttgcctttggctaccaaacatggtaatgatgaattgaattgtacagagaaaaaagctatgaattttgatgaagaaggaagatagtcttattttattagtgtgtgtgtgtgtgtttgtaatgaccgagccagagtccaagccaatcgatgatggacacgtatgagttaggttcggagtttggtgggtcggagcggaggagataagactttaggagtagaggagggtgggtcccatcagttgaagctttatccattgccaaagtgggtcccactcactctttggattttttatgacttctttattgtttattactatcagtgcacacgcaaaccaaaatcttttctcatttttttaaaaaattaatattcttaaggatggatgataattttaccttctttaattaatatattcatgcattaaccaaccaaaaaaataagtataattaaatatggcaagaatacataataaaataaattattttgtttggtaaagaatattaactacaattaaaatattgaaaaagttagattaaaaatttaaaaacaattcaatctaattttaggtttattatcgatgtgcttttagaaagctacaatataattgaatttgtatgtaattgtaggtaattacacaatttagcatatttgtctgaccatgtaattacatttgtaactgtgtaattggaagtaattcgatgtgcacatttgggcccgaacacccgccccgacccgccgccaaaaaaacgaccatgggaaaacccgtatgatcgggtcgggtttaacccgaaaaaacctaaaacgggtttcgggttcgggtgtgaatatataattttcttttggtcgggttgtaacccggaacccgaatccattttttaaaaaaataatattaatattaatacttaattacttattatta

SEQ ID NO: 247068 - DNA, 638 bp, Cannabis indica
ccacgtgtacaagtgtgtacacgtggacagtccaccgtggcacttaactatgatttttggacggaggtgtgcagaccaaaaccgaacaagggtttaggtagtttagccgccaaaaattcggtttttgtggttaagtgttacaaatcgtaaaattcgagtggtttagccgccaatatcccttataaaaaagaggcaagaaaaaacataatctttgcctccttctatctacatcaactcttgtctctacacacactagcaatcaagcaataacaatcaatatagataccgattatatgaagaacattaaacacttaattatatttgtatttgaaataaagtgttctacgagattaagtgtttattgttcagagaggtgattgactcaagaagattcacgttactcaaatacaacgattgtggctcacagggaaggagaagcaaatgtggggagagagaaataattaaaaaaagttttgctttttctttataatattaaagatttaattttaattattttaatttaattagctttttatttttattaaataattagaccaattagaaattagcatgtggcatttaaaaagcaattataacatctattaaaaaatgtatctacatatttaacggaaattaag

SEQ ID NO: 247069 - DNA, 1270 bp, Cannabis indica
cctcgtctttgtgccagtccgtcctcatcatgtgacggtctttccaactcgagctttgaggattgggagataagtagcgaacatacgccttctccaaaatgtgaggtgcaacaccatttttgtcttagcgagatcgttgagctatggacattttatctgggggcttaagaaggggttgaggcaatactttccatctaattggacgtatattttccgactagataaaattgataccattcccgtaggccgtccaaacactgctgctgtaggtacgtccataactgcgtttgctgttaccattgccaaacataccgatcaaactccgtctaagaataggatgatggcacgcaccaagcagatagtgcgcagatcttctctgactgaccctcatgtttctcggatttccacaatgtcgagcgctgaataggcccgacctgctgccgaggaggaagacaatgacggggacgccgaagtccaagagctagaggatcagggcaaggtccgtcttgttactccatctgaagctgaggaggaaggagttgctcagggatttccctttaggggaatccatgtccgagactaatgaagtcatggtagagggtgaagactatgttaccgaggaatacaccgaagttgttcctcaaagaagataaggtgccttaggagctcagtgggtttcacctcaatccatagtaacccaggccaagatgaagaatttgtagaagcacaactatttgggaaatttcgaatgcttcttcccctctccaaatcacagggcaactagccgaagacatgggttttgtgcctggtcgggcgctcataccaagcaaggtgtaatgcggcctttgcttctgtacttcaagaggactgtatactactacaacctttgctcgacccagttcagtctgaagggcatcaaatatttatccaccctgttcatcttttacgcctcacaaagatggggtgagccatccccgcacgacaccaactggcttttcgatctgagttaactcccaagcagagtaggtcggggtagtttctacttctctcaattggatgagaagtggctgaagggcactgtagacaccaatgtcagcaaaataggacattttttggacgagttactaccgtttttcagggcatggatactgtctacactcaattccagtagattccctcatactgccatccctctttcacataagggttcagggggatggaacaaaaaattcttcaattgccagaagcttctctaaacatcactttcttg

SEQ ID NO: 247070 - DNA, 1303 bp, Cannabis indica
aaaaaaaaaaaaaaactcttttggtgatatctttttttcccatgataatactcatgattgagtttgattttagtttataaaaatttgaatctttcttaagctttgtgtttaattcttgagtcaattttgcttaaaaataaaatttagaaaaaattattcatcatgatataaatattttattacaacaatttttctaaaatttacataataatttgatgaatagatatattaataaattattcaccattggaaaaaagctgagacagggaagcttctggacagtcggcctgagaatgcatgccctaggtttcaaaatgcctcttttaccgtcatcgttgccgtcgtcgtcgccgtctatcggtgttcaagtccgtccgtgggttcatccatcgtgtgacggttccgtctcgagcatagccttcatctcactgaagcttttggctgttaggagacggaatttaccattcgagtcctttgtcttcttcctcacaggtaaacctctaatctgcaataactttgggtttgtgtcccatctgcgattaaatgtccactatatcgatctcttcatcttgtatattaattagatcccatccccctgaaccaccttggcttatgattacctctaccttcgtagagaacgctagaaatcctgtaggacccactgtcaacattgcaggaacaatcattcgtttacctgacatgaagaggttttccctggatgttatgttgccctagtgatactaattttataccctaatcactataaaactgaatatcctcggctattcagtgtaacgaatattttcctgcaaaatttccttatcggtattccttatacagaaatatccctttccttttatagctttcgtccttcctgttgccactgcaaaatggatgacttgtccaacactttgaatgctaccctcaaccttactgatttagaatcccaaatccactccttctccgcaacccctgatcgccttgatgatgatgaatgcgttgaagcctcagctttccttgctgtcaagctgttgatcaacctgttgggttttatgccctaaataaaactccatttcaatgtaatccagtctattcaatatcaataaagtaacagaagtagttttcattcatttgtgtatgttttggttagccttatcaattgtttgtctatttgatttataaattcatccaaacccctttcacatacttgatcatgtttattgtgttgtcaatctacaacagagtttatgactatgtgaataaaggattccttgatttatcagaacactgggttttactgata

SEQ ID NO: 247071 - DNA, 840 bp, Cannabis indica
cctactagattaggcacgttatcatattttgtaattaatgtgcacttctttactaatcaaaagttaataaaaacatgaataattaaaattttgtaaataacttaaacttaaaacatacatatacaaatgcatattctgagatcccatttaaaaagttacatttagttacaaaatacgagagttacaaaagttatcacctagtgactatcaaaataaatctctactgtcacgaagatttgaacactccaggtctaaccgcctcgatatatacaatcttcatctagcatgatctcactgctgctcagcctttgctttgtctttacctacatatgtaaacaatatttgtgagtcaacagactcaataaaaagagcataaacataaacatataactaaattatagtaaggcgcccatacacctaatcacaaacctattccacatccaatgcgtactaggtctaaagcgttcgtacaacaaagcctagcatatatccttcggtatctagtgcaactctatgtacactgataccgctcttactaatatgctaaactagtggctttaaatttttcttaacatatatccattgatattcagtgcagatttatgtacactaataccgctcttactgatatattatctaataggaaactataaaacatgtacgctaaacttataaatatgcatatcattatactaatcttacctcaattctgaattcagatgtgccatcaacctagtggaaactgctactcgaagatttagggcccctaagtcacaatatacataaactggtaattgatgcactaaatcatttttcagggacttagactaaaaactaaaa

SEQ ID NO: 247072 - DNA, 1092 bp, Cannabis indica
catctttctttcacaatcaataagtgaattaaacttcacaaatcaatccattcctaattcatcctctagatcctctaatcatagctcaattattacaaccaggcattcccttcttcccccacaactctggaagggatttgaaccacttgctggagaataactagttctacagtaaaagtagagtaccgaaaccacttagtaacacatccttaactttatacaatcttccaatcatccttcttgaaatataagaatacgttgcaccagaatcaattaaaactattaacaaagtatgattcatagaagttcaacttatcaccgtagaaagactagcactagtcttagtttaggtcaagcaaacacccaaataagaactaaaatgcctcacccctctattccaatcgctgtaatggtaggcagtttctttctaaatggccaactaccccacattagaagtaggctcaaatttagcattcactttgctgatgtctcttacatctcgatcctctggatgggtttgtaaatcttcattcccacccatcagattctttggttaccttaaatactctcactagaacccataactggtgggttgttagtctatttccatgagttcattaaggtctacacccttatcagatccaacattggccgttctctttcattaatctttcttcatactatatcccttttgatctaatccttactccctcagcagtaggtgttagctcaaccacttgagcgtcaaatggaacaactcctaattgtttaaccactatatccacattccgagcgatactctatttctacctttgattggattcaaccttcctagtagtcttaacagccgcttcattaaaacaaaactttcccaattggtctagcttagtgatattctctctcaccacgctatccgggatcattcatgtatgctctactaccttaccattcaggtaatctcttacttcatggcatagatttactcctagtcttgttgtaatggaaaattcatacccacactaccaactccgagcctgataagcgcgccattatccttactagatcgccccaggtacaccttccagtacactc

SEQ ID NO: 247073 - DNA, 860 bp, Cannabis indica
tttgttttctcttcaactctaatctgggaaaatctcaggcaacaagtttcgatccagttagttccatcctcgtttgattttcttggttcattaatatttttttttctgaaacaaatttctgtttgttcaatttttggtgtttatgtgatctcaatgagtttgttttttgatattgtaaatatataataattttatcaagattgctaagtaaggtagtgttggtttattgttatacaagtcatgaacaagtttggtctagctttatttttgtttattttaaataatttgagtaaatttagtttagattgaacttgatatcataatgtattgggaatgggttagaattttgtattaattatttacaaaatcgatattatcactataggttagcaaaaatgtattcaacaaagaagaagatccttaaggataacaatgccgagcctactgagtttgaagaaacagttgcacaggtataataatatatgtttatatgatatatgtatgtatgtattttttgtatcgttttatagtgtttatcatactgaatttatcggtcttgatatgttgcagaacctgtttgatttggagaacactaaccaggaactgaaaagtgatttgaaagatctttacatcaactcagctatgtaagtattttatggggtttttgcttcatatttttgttaggaacttttactaaattggagtttgtttatttttttatacaagccaagtagatatctctggaaaccgcaaggctgtagttatctatgttccctaccgattgaggaagggtttccgaaaaattcatttgcgtcttgttagggagttggagaagaagttcagtggaaaggtaacatatt

SEQ ID NO: 247074 - DNA, 652 bp, Cannabis indica
aaaaaagtttgaaaataaaaatataattaaaaaaaaatattaaaacttaaatcaaatataataaatcgtaaattttgtttatatgcatacataaaatattgatcaatatataaatctatatctatatatttatatgtatagtagagacataaaacggtgacatggcactttaaaattttttaaagctatttttttttctcataattaaaacatcatattttttatatatatatttttttaattaagatatttaaaaaataataatcactttttcaaaacatattaattaataataaaagaataaactaagtgaattttctctaatatcttaaaaatgtttaaaattcgagataaaatctaagatgaaaatacagatttagaaaatacaatagtgacgactgcaagtgaactacggtaatgacaacttgacaagggatgccatacaatgataacaacaggtgagatacggtgatgaaaataagtgagatacaatgagacaataagtgagacacaataataacaatagttttaaatgatcgagatatgaaaataatgcattatggaaaatacaataatttttttctatactatcttatttatttatttatacaaaaataatttcttttaacaaaacaatttaaaatactacata

SEQ ID NO: 247075 - DNA, 1400 bp, Cannabis indica
cccacataaatcaaaaccaaaatgttttaattaataatccatcgaataagagagaggccttgttgttttgattaataaagcaaaaaccagatttgctcaaacgaaccttaatcaactcgtccaaggcctctcctttgttcgcattcggaggtccatgataaggataacaccgagacattgtttgtctctctgtatcttttttctctctggtccgatctaataatcgatatgatcaattattagggttccgattgcagagaaagcgatttcgcaaaccctaagagagaagtagagatttgcgattaacctaaaggctttggctttatatatatacatatcgagatccactgaactttccgttattatacatttcttaataccgataatacccttattatagggtcaaccacaactgctttccagcaaaacgcgggaacggaaaccaaactgaaacgacgtcgtttttgtttataatgtgcatatacgacgtgccgtttctctaatgtaacaactcttattaatatagagttagttttgttacatttgattttttttaatcaattttattaatagataaaaataatgacatgaaatttaattgagacatttttttattagagatcgtttggtaaaaaaaaaaaaaaatgaaaaaaattacatcatcacagataattttaagaacacttatattcaattttatctactacatagaagacacaatagtagaaacaacatgttcattcaatctcgtagcttgaacactcaattattgtgcaaagtaagtaattgcactactaacaaccccttcagtcatagaaattttgttattcccaaccactaataatgatttaatgtaagtcatcgaagaataaaagaagaacaaacaataaaacaaaacaaaacaaaatcatattacagagacaagactaaaatactcaaaaccatattaacaagacaagactaatcatagtagaaaaatacaaccccgaccaagccactcttaaacctaagaaaggcctacgggccttccgagagaagtaagacagcctccaataattatagatttaagaacgagaaaccttattttttttttctttctatgatatttgttttatatttttaagttacattatgtatattggttttttttttttttttttttttctacgtggcatcatatcatgttatatagtatcatactaagaatttttttcttatttctcatggaattccgtaccttgtttgataaagaagaaattaagggaaaaatatttaaaaaagaaaaattgcactttcatttattgagaaggaaaaatatcgtggtatcaaataagataaaggtaaataaaagaaaaaaaacaaacccacgtaacaaagaaaaccactacataattataaca

SEQ ID NO: 247076 - DNA, 747 bp, Cannabis indica
gtttgcaagttgcaacaacttttttgaagacttcagggatgacttctgtcacactctttaaaaaaaataattcttcttcttttttataatgtattttacactaataaaaagaacacaacaatagatggatgcatgggcatatgacacaatgtcatttgaggttcccgcaaagttttccccatatctattttcttatccagaataataaacacatattatatatcaaatttaataatttgaactaatggagttcattaaggtcttaaaatttaaaggcagattttttgggtttatatccctaaggaatttaaaatgtctatatgtgcataattaaaaataattaaaagaaaagttaagtgtaatcaatttttttgttattttacatcgagtttgggaatatttattcaaaaatgtgatatatgtatatattaggttgatttatgtgtaatatgcaagtatagttttttttttttaaattttttttaaattaaaatacatcatctttattaattgtcaatccatagtggttacatgattaaaatactggagtaacatcactactcctgataacacgaccaacaactaaataggatgctcgagctaagaagtgagcaacactatttgtcagaacgtctaataaaattagacattaacatctctcaaatcatttatcatcatcttacaatcagaaataacacttccaaacgtatgaaaccataggaagagaactacgtaacgcttgcacca

SEQ ID NO: 247077 - DNA, 590 bp, Cannabis indica
aagtcactattgtccatgttcttgtacatagtattcaacaggttatatatattatataattatatagaaatctattttttaattataaatttgtgaatgtgtgttaaattattaatatgttagtatttttcgaaaatattgcatatttttgaaataagtagtctaataattttattttttttaaggcctgtccaatcttaggaccgaccttgtaccaacactaacccttgtggagacaaccacacaaccctgcaaagtcccctttcgagctagatttcggtgatgatgatcaacagtttcaatgatcctcctagtggttattttcaagttggccaacactataaattcaaaatactaaagagaaagaaagatagagtatccttagttttctaagagtactttgaaccttaatctttgttcttaagtaatgcttataccatcctaggatatggtgttttttttcccttattaaactcaattcctgcaaaaaacacattggtactacgtggaaccctcaaacaccttaactttgattattcctcgtgtagaagttgtacatgagaatgtgtgatactaaatagcattggaag

SEQ ID NO: 247078 - DNA, 1332 bp, Cannabis indica
aaagtgttggaggccaagtacctcaggggcaaagattttctctcgtgcaaatacaaaaattctgattcctggttctggaagaatgttgtgaaagctaactctatattaaggaaaggggcttgtagactagtggctaatggagagactactagtatctggcaggacccctggattcctcacttaaaaggtttctgtccgaaaccaagagggggccgccccctccaacctcaaccatgtggctaatcttgttcttggcaatggccaatgggataaccaaaagctgaacgactattttgaccatgacacggtaactgccatcctcaaaggagggcaaccctctggtgtcggggatgatagatggatctggactctggagagaaatggacaattctcgaccaagtctgcttaccttgctcaagccttggacagagctccccattgtgttgtcgcccccaagctgtggaacaagctctggaacagcaaaattctcgagagacataaggtcttatggtggtgcatcctatctagtgccctcccggtaagagctgtgctaggcactagattccttgtggaagatcaaagctgtcccctctgtggtagggggggcggaatccatcgaacacctgtttctttcctgtgaggtggctctccatttctggcgttcgtctccttggggtatttatccagtgtgtgatacaggaattcgagtctgggactgggttaagttcatttgggatctaaaacataaaggagtttgtgttgatgatatattcctctacgcttctattgtagtagataccatttggagagtgagaaacgagaaggttcataataattaccctgttgatgttaacaaatgcattgctaatatttgtaattcttatgcagatatgtatgattccttgctccatagtcctcccccagctttaaaggaaacttggtcccctcctcctcaggattggatcaagctgaattgtgatgtcaaggtgggtttggacagcatgtgcatagcggtagtggcaagggaccatctaagcagagtaattagtgttcgtactgctcgagagaatttctcggacgttttgtgtggtgaagcggcggcctgttctttggcggtgtcagttgctctggatcttggctataagtatgtaatagtggagagtgactcgagtgtggttatcaacgccatcaatgggaaagagtctcgttgggcaattgataattacatctccttttgttctaagtcatcccacgcttttagtagttgttgtttttcctttattagtagatcttgtaatttcgccgctcataatgtggctaggtgggcgttct

SEQ ID NO: 247079 - DNA, 960 bp, Cannabis indica
acttaattataataattatatgtaaataaggacactttagtctatacaaaaaaaattattgatcaaatctaagtttaggggtaccaaatgggtataattttaaattataaagtactcaaacatcattattgaaaatatgaggtactaagtttgtatttcaattaaacatagggtaccaaatgagcatttactttttatcttataaggtaattttaatataatatttcaaattaaaaagataatgctatctttttttttgaaattaaactcttattaacaacaacaaagagtttaatacatatcaataagaaaagaagaataatcttcaatctaagctaattcaccatccaccctaagtgcatgcacaactaattcatgagaaacgaacatgaactaaggatgccttaggaaaattggaaagcaaactagcaaaaagaaataataaaaacctagctcatatcaaaagaaagagcactattgaataacagataccaaaactaaataaataggctctacttaacaaagagaaagaacaacatgtaaaaccaatccagcactatcattaagactgaagcttcagcttgaatgactaagaagtaaccaataagttcagatcttctgcaatatgtgaacttttcgcattttgaagtatagataaacaacctacaaaataccaaaaaagataaatgaggtaaggaatttacttatagaaaataaatcaaatttaagaaccaaattttcaatatatatatatatacttatataacaattaaaagatgaagaaaaacttatctttgataatcattgaccctccaataatctgtaatgtcttcaaaaatctatacacttaaaaaataataacacaacaaaacacataacactacaaaaatacactaacaaactgagaaaaataatttaaaatatctaaccttttcttgtcataatttaaaataaaataat

SEQ ID NO: 247080 - DNA, 771 bp, Cannabis indica
cttcagcaagtaaatgtaatgttatgccttttcggtcaacacttctatggccataagaacacgccaagcatttggcattagatgactgggagagataccatgataggagcatagttcagatatcaatctagggagaggaaatctgaaaccatacttgaatggaagcttgtacaaacacgtccaacccggtatcttccagtcagcccattccccgctagccggagtgtacaaactaatgtgtatgggaatattataacgacaacgaatttttgggaagtcattcaaggttaatactgaccttggattaacacccaaaagtatatcgcctgactcactatcactcctagggcgatcagtgtctactccaaccccagacgcatagcgatagacatccgtatcctcatacccatcatccaacacataacctaccaccccaataggaatattcgaaggatcattagacaaactggtcgtcttagtagacgaagtggcacaactaccatggttgctaataaacatagcaaaaaacccacctagaacaaagatactggactaagagcgagttcaccaaaaacataatcatatagaaagcaaaacaccggctagacataacaaaaagatatgcatatatacatatatcaaagctcaaggtggctaaaaataactagacataaaaatggacgccataataatgctcaccatcaggacatacgtgttctaaatagaccaccggttatggtcctctaattaactaaaggaagacaatattct

SEQ ID NO: 247081 - DNA, 796 bp, Cannabis indica
aaatggaaatctatcttcaaaaatattagcatcgtttgattccacaataacatgtgcattcagatcataaaacccacatgctttgctattaatagcataccttaaacatacatattcataggctctacttgctagcttaattctcttaggatcaggaatatgaacataagctaaacaatctcaagctctaaaatatcatatgtttggttgtctattttttaatatctcataaggagaaatttttctttttgatttaggtaccctattaagcacataacaatcagttaagaaaatttatcatcaccaataagaagtagcaccagaattaagtaaaatagcaacaatagattcaataaaatttctattctttcatttagcttttccattcatttcaagtgaatatggtgcagtggtttcgtgtatacttctatgagagttaaaaaaatcaacaaataaaccaaaatcatattcatttcttctatcgctacaaaacctcttaatcttcttatttaattgattttttatttcaattataatcaacttaaacatatcaggagcatcacttttatttttcattaagtatacaaaagtatagtctgcacagtcattaatgaaagtgataaagtaatgttttccattccttgttactacatcatctaattcacaaatatcagaatgaattaagtttagaggctcacttctctagctaccgatttatgtggtggttttttttatcttagcctagctacaatagtcacatttttcaaagttatttagtgataatttaggaattaag

SEQ ID NO: 247082 - DNA, 850 bp, Cannabis indica
ttaaaactttgccataagcgacttataagtatgtttcaactatgtatgactcttgctaattgctaccttagttatcttgagattgtatatactttatggttagtttaagaatatgactttgcatgccaactttgcttaaaaatggggctttgtttttcttatttttggttgtaaattagtagatatgatatgctctattatagcagattttttttttcctggtttgatgcaatttttcacaaatctacaaactttacttcatactgatagaactgttacaaaggtttgtagtttacttccacatgtaatggagtcacctaatttgttcttaggtttctgtattgattttcctgtaagcctaaaacttggcagaagtattttcattccttactgcttaaattgaaacttctcaaatcttaaggttttgaaaacttgagagataccttgtgtagtgttggatttagtttttcatttacaatattcttggtgcttgctaagtttgcaaaaagtgttgattggaattttaaaaagttcaaatctaatgaattaatacatttatgatgtgaatgttttaatttaatgggatatgattgctttggattggtgaatactgaatattagtgactcaaaaattaatatttggactcactcaagacaaaaaaatataaaaaaaaaaattgtatttttaaaattttccatttaaaaatttggtaaatgtaaaagttatcgatcatataatcactctcgttaaatagaccctatataataccctgaggttaatttctattaggcaaatttgaatttttatccatattttattacccaaattaattctctaaacatatactta

SEQ ID NO: 247083 - DNA, 705 bp, Cannabis indica
tgacgtactcgtgtataagagccattattccgtgggtgtaaggacacaatggaggcttgaagcggggacgttacaatgcaggtacggcgaaagatcatcgatcgatttggtcagatatgagtttggggatcatcgatttggtctgagcttttctctggtttgggtacgtattttactttgtgggtttagagaagacaaagaaaagttaataaataaaaggaaataaaaaaatccacggcaaaaccaataccgaggacatatccacggtacaggaacttagccaaaaaaaaagcgcgaatttctcccgcttgtgggaaaatactaataacgacgacatgtccttgttcaaatgtcctctttacagacccaattttttgtagttatctaaatactatattttcgttacaagtaagtttttgttatgaccaaacactactacaaattatacaaattattatcaatatccctcatgacaagtcagtgactttctccaactcaaatctaatggtctctttctgattactacaaaaaggttcttttatagtctctttatggaaatggaatgatatgatatgatagccaagtggtagtgcaagaaaaagtctgagtgaataaagccaaagtctgaacctgaaattattcttagcatttcactccatggtgtttttagtttattaatgttttattttgtcttttgtgtgtagc

SEQ ID NO: 247084 - DNA, 612 bp, Cannabis indica
ctgaagcctgaagtcgtatattgaacagataaagcataacaaataaagactgaacagataaaggtatatgtcttcacattgggttgggcttttatacaattaagatattgatatgcgaatgatatatatattcatttatctgaagccacgagtaaaaaaaaaaatttgtcttatatgtatatacatgttccgattgaatgtaatcagaagcatatatatgtgttttaatagaagtataccgatatatactataaccattaaatctcagtaaccgaattaatccaataatttcatgaacaatttctgaaccaagaatcacaccatatatataaataaaggtagatcagaatcttaatttttgaaatcttcaaatttcataaacaaaatcatcaaattttcaatcaattcaacaaaagtagttctggtaccacttgttagggtttataaaacactcaagaaatatataattacagatttacacatattcttaaaagtgctttaatatagaaaaacctaaatcataaatctataaagcctttgctaaattaaagaaaaagaagatgataaaagatgagcggaagcactaacctgaagccattgttagagattgca

SEQ ID NO: 247085 - DNA, 837 bp, Cannabis indica
ttttaaaatagaatctttgacggtttacaaacatcggctatactatggccaatgcttttaaatcatcgactatagtgtagctaacgtttaaaaattatcgaagattctgttagcccaagatatgttttcaaaagaggagtaaattagaaatttaagctaatttcggtaaattaaaacttttagcacacaactatgttaaacttatcaaataaatgcaagtaatatgacaaacaataatgtatagcaaataatcaaacttgtaaaataaagagtttaagggtaagaatttgcaactcttgattcttacaaagttgggtagagctaaaccacctataatgtccttgaccttcaaagctatggacctagttttgagtttcaatatcgagccaagttaacgggcttgactaaccattacgatggttgtaaaaggccactattgttgtgtttggtacaccatacttggcacaattttccaactctgacttagggcataattgcctactttatgatgggttttaggctacccataggagtttggtgggatgttatatatcccttctttatgacttgacgactcatttatgcagtcgtcgattaatgtatagaagttcgtgaaatcagggaataatgggtttaaacccttaaacacgtttgacagagtaggtgcctgatgctctttctcatgacgcattaaatgcatctatagtgtctcgatccttgagtgacatgtcatcttttgttagtactctcgactcaatctccatatgtacttcactcgtggagcgaaaggggtgagagttgctcacggagcaagtggacccttcggagatgactaac

SEQ ID NO: 247086 - DNA, 561 bp, Cannabis indica
ttttagttatattatacttgtaatcatagtatatttttagagtattaaatttaaataaaagagaaattttttaatgatttatcaattcaagagtaaatatttcaagtgaatttagttacttcatgagtattattaatgatgattgagcgtgaagaaatgcattgcataaaagatgaatataacacccttggaaagagtgggatgcatgttcaatgtgctagtctagagtagcaattttggagagattctcgcaagacaacttgatatttggtgaataagtgtcttttaattgctattaactttctcaaaccacaagaaaaataagccatataaaataggtcaaacttcagctaaaagttctcaaatgttattcttagaatacttgggtgatgttaatggttataaattgtggtgcttagtatatagttcacagagatattgtgtttaataagaaggaaatactgatgaaggaaattctggtggaagaacactcagcacccgatgcagcatggaacgaaatacatcaaaaatttatatagaaatatctcaaggtgtactgga

SEQ ID NO: 247087 - DNA, 679 bp, Cannabis indica
aaatcataattggcggaaaaaaaagcatcttctatgagcttgactattggtgttcaaatgttcttaaacacaatattgatgtcatgcatgttgagaagaatgtttgtgatagtttattgggcacagtcttggacaatgagaaatccaaggacactaccaatgcaagacacgatttgaagaagctgggagttagagaatggttgcggatttatgaagatgagagggggaagctattgaaatttcatgcaccttacgtgcttaaatctgatgataggctccaattttgtaaatttattaaggatgtgaaatttcctgatggcttttgttcgaatttgaaaaagaaagtaaatgaaaatttaacaaatgtcatcgaattgaagtcacaagactaccatgtaataatgcaacgattactttctgttggtgtttgcaagtgtctcccgaacgatatatcgaccaccatttctgaactatgcaattttttcagcaaatttgttcaaggactttaaatgttaaagacatggaagttgctcaacaagatcttattttaatcttgtgtaaaatggagtccatatttcctcctgcagtttttgacataatgattcattttgtccttcatttgcctgaagaagcaattttgggtggacctgtttttatgaggtggatgtatccattaaaa

SEQ ID NO: 247088 - DNA, 603 bp, Cannabis indica
tcatcaaattcctacatggtctacgaggcgacattcccaacacccataacccggaacatccgagtaaaacctcctatctattacccacaaaaatcccacatctgagatactcctcaaagtgaagttccactatgcggaaaagtgctcctagcaataaaaaaaaactcttaggactgcaaggatggactacacccaactgtccaagaagagagtacaagcctgaaggtagttccacaagaaagggccctcacaatgatgaggaggtggctcttcaaagttagccctgaagcatgctcaaggaaacgaataaaagttaaataagcaaaagattgaatcggttcatgaaaccttcatctcccttaaatatgtcaacaacaaaaggtcgaatcgattcatgaaaccatcatcttccttaaaaacatcaaaaacaaatgaaataacggaaaataacattgtgtagtaaaaacaaaccacgttgcttttacatacgtcaaaacaatatttttttcgaaaataataaaaaaaaaaaaaaaccaacgctatatttttgtaaaaaagaaatacataaaaatataaaaacggattcataaaaatatataaaaa

SEQ ID NO: 247089 - DNA, 513 bp, Cannabis indica
aaaaaaaatcataaaaatataaaaatggattcataaaaatatataaaaaaattatcatttttatatttattatgaaataatttccaatctattttatgataaaaagtagtccaaaaaaattaaaaataataagatttactaatttatacaagtggaaatacactttatttggcccataataaagaaaaagacacataaatatgttatgtatttatatttataaagcaaatgagttaacagattattcagtcattctcaaatctaaacaaaaacttaacaacttcaagaacacagacagatcaaacagagaagaaaacttcagaatattattacaaagagttccacaaaatgatccaaatgccaaatatatattgccaatgttcctgctgtgatgccattatacataaactaatcaaatatgacagatatgaactctcaatagtaaatgagtaaaagactactaactaatcaaatagttctctttatgtttgatttgtatatttacaatataga

SEQ ID NO: 247090 - DNA, 965 bp, Cannabis indica
tagagaaaacaataccaaaacacttgtaaacctagaaacaaatgcaacagctttctcagaaaccaaacagcacacacagaataagcctcttaaaaaaaatgcacaagatctagcgatctaacactacaaaaaccaacacacgagacgcacaacaaagaacacacataaccaaaaaaaaacaacaaactcgaaagcgcaactaagatcagacagaataacagcaatcacggccagaaacagcagatccagtcagaacaatcacagtcaacacttccataatcatgcgataatcgcaatgagagaacaaagaaaacgaaaaaaaaaacaagaacgaacaagaaaccctaaaactactaaatgaaaaagagtatgcaccaacctcagaaaatatctaccggaggaacgccggaaaacgtacaaccaccgctggtccactccctgcttttcttgggggagggcttgagaagagagagaaagagagagagtccagttgagacgaagaggttgagagaattgcaaaacgaaatataaattaataaatatgtaattttcaatctttgggaaaaccccatcaatgtcatccacactctgcttatatatacaaggaaaaaggtaggtcttcgaaaatgacaactctgtccctattctctctcttctttctctctctaactcgtactaccacttacctgtgctgctctctcccttctaactaaaaaaattaaattaaattaaaatagtaaaatgaagataccttaattatgtcacaaaaatattcgttaatccaacgcaagattattttttttttaattatggtaagtcattaatatacaaataaatttttaaagaaatttatttttttttagaaaattcttgattaagaaggaaggcaaataaataatagtacgatgttgaagttttcttttatttattttttttttcttgtaaataatttgttttaattttta

SEQ ID NO: 247091 - DNA, 589 bp, Cannabis indica
cttttgaatcatatcttgagagaaatgggatctctcacagattgtcttgtcccacaacacaccaacaaaatggtgttgctgagagaaaacataggcaccttatagaatctgcccttactctcttagctcaagcttcaatgcctctcaaattttgggatgaagctgttcgaacttcagccttcattatcaataggcttccctcaccagtcattaataatgacactcccttgcacaaattgttcaacaaacaacctgattacagtcaattaagggtgtttgggtgtgcttgttatcccaatactaggccctataacagacacaagcttgaattcaggtctgtcatgtgtacctttctcggttacagtctaaaacataagggttataaatgtcttgcttctaatggtcgaatatacatctctcgagatgtaatttttaatgaacattatttcccttatgttgactattccaaatcaaccaactcatcaccatcttctagtaccaataccagcatgccacactccattccacctatctttcacccctcaaattttgtttcttcttcaccagtctcatcttctcagccccttcc

SEQ ID NO: 247092 - DNA, 1520 bp, Cannabis indica
acgaaaattgagaaacaaacattcggggaccctgccaaaaccagctacccgatttttagaggtctggtaaaactggctagtcggttgcaccagttgaccccaaattttttcatttctgctcattcttccaccaaacacaaccaaaccttccagagtacctaattagggtatatataatatattccaaccagtatgtcacaggaaaactcaatgtaaataaatatgccattagagaccaaagctttgaactcaaagctcaaacttgcaaaagataataatagcatctctcaggcgtgtgtagctccggttcctcctcccatggcgaagaggagaaaaggtgctgcgaagcctgctgcggctgttgcgaaggggctgaacgagagtcaagagctgccatcaatccaagaggacgatgttcaacctgaagtcttcttggacccgtgcgaagaactggaaccagacaaagagcaggttgctgatcctgcgttgtcatctccgtaatcgtcaagatgggcagatgaatcagaggctatggacttcatggaatcggccaagattgcgtggagcaaatttaatgtgaatcaggtgagaactccttcttctcaactattgtttactgaaccactaaagattggggatcaggtggtggcaaaaattgatatcgaagaagttgaaattgaagcttcgttttggaggtcttcaattgtgtgattgtgttgggggctaaccctccgtttagggtgtttgagggctttatcaagaggatttggggaaacttgggtgtagaccggatagttaggatgcattccggtttcactttagtgagtttcaaggatgaagttactaggaatgtcattcttgaaacaggggtaattcaatttgaccagaaaccggttatacttaggccttggtcggaagatatggatacagcccgtatggttaagtcagtccctgtttgggtgagattgaatgggttaggtctgcaatattggggcaagaagaacctgagtgcgcttgttagcacaatagggaagcctatcatggcggataaagttactcttgagagatctatgataaaatatgcaagagttttagtagatgttgagataaaagatgaaccaccaaaaacaatttcgtttgttaatgaaaaggagcagcttgtagaacaaccgattgagtatgaatggcttcctaccaaatgcgcggcttgtgacttacttgggcatacggttgtgaattgtaacaaaggaaagcctgtcatttggaggaaaaaccagcaaggagccaaggccaaaccagtcgaaaataatgcagaaaaagagcagcaaccaccagagaatcctactacaattctgggtgatgataaggggttatcagaggggaatcttgatggtagtgagggaataaggtagcagaaaagagtagctaaccccgagcagtaatgaaacttgggttactccaagaagagggttcgaatctattgttaaaccattgccgagagcagattgtagcaagtggtt

SEQ ID NO: 247093 - DNA, 4007 bp, Cannabis indica
aaatgcccttttaataaaaagatgtggcatactatgctcactctgagatatgaagagaatgtatagtaacaatgacaacatttatattgtaactcacaatagcatccaattccaaacatagcagaaaaatgtgcagtagtaaaataccttacagacaacctctccaaagctcgagttacagataacttgaccgcttgattcttatagtctagaagcctaactaaattcctaactgctccagcttccttgaatgctatcctcatttcttcactaatagatgcatcagcaattgaatctgcagctcttgataaagccgattcatcttcaagttcaagaattaaaaccaaacgagccactccatccacccaaggcaaaatggtaactttccgaccagatggaagctcggattctctttttccatcttccatttcaatagccccaatacgcgcaaggaattgttgttgtgtccttccaataatggcattcaccttgacttcctcaatgttaaccttcttgtcatcaatatttaatccgaggagtaattcggaagcaccaaacctggaaggagttttagaagttcgctcaagctcagtaccatcgggtaagctaggccaggaatacaaacctggtctgaatgacttgtaagcagctgttccgattaaggggacagtaacaagaccttcctctataataagaattctgtaataatcatctttggatagttccaacaatgcatttcttgcctcctttctaattaccttagatccctccgcgccatcttttaacaactttgcctgcatttgttacataattgcgatcaatttacagaatagtatactcaaacatcttaacagggttactttttgaaccaattgatcgatcgaacaaaactctacataggatgatagagcaagtctcaccagtttcggaatagcaccttcttcgaccaagattttgtggttgacttggctcaacgccaaattcgctaaaacccctcctgctgcttccttcacctttatatcctcatcatctagagacttaatgagtattggcaagatatcagggttagcaatttttagtctaatcttctcatccactgacaagttccacaaagtacataagctttgctccttcacctaaagagttcaaacaatattaagcatcactttccacatacattgaatttttcttttgaacagttagaaattaaccatcttctacctcagaagtcaaggaaggttcatttagcaaaccagttatttcttcaatagctccactttctaccaccaaatctttgtatatattaaccagagaaatcgatcgtaaaagaccagcagcagcttcacatgttgaagtagattctgatctaagtagatttatggtaagattaagacagccaggaaactgcattatggcatcaacgtacttctttcctccaagtgaatatttccatagtgccactattgcctgctctctatcaagtgggtcgttgtctagtccaagcatccgaacaaacaacgaaacataaccatcaccaagagaagaactgttcaattcttcaacatcctgaaaagtggcaagatccatcatttaaaataaagaagacaaatatgaacaaacaatcattatacttgatgaaacacatgaactcacacaaacttaacaatcagaactgataaaattatctcttaggtggtgtttgtctatgtttggtatgattttagtggaaggcttgtgattgtataggccctatttaaaagtttatttttcgggtaatttcaaactcttgaatcacttgagtttgagatgattcccttaatcttaactcttctcaactaattaaagcccacgaagcaaaactcatacaccaaacatccccttagtagagaacaaagccaagaggaaaaactcaaagccccataaaattttgctaagttcaggacacagctaagaaatgtaagtgtgctaaaatagttaggaaggaaattcatggaaaaggttagcaggggtggtaagggtccaaaacagtagcattcccaaactttaagatagacacaaaataatgtcttgctacattttgaacagcatacataaaaaaaatcccaaaaactatggaagctacaacaagcaagagttgtcagatttctaagagttcagcttctcctactaacttaatctctttaatattacaaagtgattttcactaagaacgtgtttggaaagtcatggtggaattggatttttgtgtaattgaaggtatttatacaatgtagcacatttgtctgaccgtacaattacacactacacagtaaccatgtaattgaggggtgtaaattgcactctccaattctcatggcctctcatcataattaagtaattatactctgtaattactaaaaacttttcattttaagcattaactacttttgctaaacaaaacatcaagaattcatataattagcatctcatatccaaacaagtcttatattttaaaatattatgtaatttacagtgacttccaattccaaacacagcctaaatctacaaacaagtctattagtttcacttaagccaataatcattacactaaaaaaaggcaccacaacttcaagcaagataaagtaaaatccctcttggaatacaaaattatatttctccatatcaacattctaagttgaacccaatacacacaaaaatctaaatcaaaaactaaacctgaaattatgcatggccaagatccatatgcatataactatataatacatacagaataagggcagtttgaggacttacaggagatgctctaccaccatcattactgacccttgtgaggactgtacgttcaaatactgatttggggtcgaggctatgaagttgaagatgatgacgatgataagacaagttaggaagaagaagtatggactttctttttctgggtactctggtttcaactccattaaaccccatgtgagggttttgagacccaaggtggaagagcacatgggacaccttcaaactcaaggttgctggaactaacatttcttgacttgttgtgctgtgtctatacaagaaagaaaatcactactattggattttggtcagatagaattcttgatgggattttgattttcttgattggtatcagctcagttcatcagtttgagtggcatatttgtctgaaatggattctgttttctttttctttggcttgaaaatgaaactggagaaggaatgcgctagaagtttaaatactgtgactcggttggctcagtgactcagtccgagtgtatgtgaaagtaattattattattattatcattattattattgttatcattattattattattataggaatattatttttacactttgttagcaaaaccataaataaataaaaaaagtttagcctaaataattaattaaatatctataattattagcaattaatttaaaaggagagttcaataaacaattgactatagatgacaaactgtccctaaatagttcgtcttaagtactatcacttgccaacttttatctttgatacaactgagagtcccctaattttagccaacttaagttctacattcccaccacgacaaatggtacgggcttcatcaacaagattgcctaaatgatcccgagctatcataccgattctaaattgattattcaaagtgaacaatacattgtcaacatttatattgatttgattttcttgagactttattcaactttatcaccaggtgccataccactaggtaatggtgtgtattcatcatttatttgggcattatttcactgttcaagatacaattttattaaggtaaccacatcaaccatacttagtgttgctcctaaaatcgcccaatgtacgtggaccaatcaggaagggacacgtggatcaaattacttgagaagaactactaagtctttgtatgacaccaggaagcgttattcgcatgggtcccggaagatgcacccggagtacaaggtactcccgg

SEQ ID NO: 247094 - DNA, 1050 bp, Cannabis indica
ttttagtttttagaattgtgttttcaaaattaaaaatagaaaacagttttttgttatttcaaaaatttaatggtgtttggtagaagttatactatgagctacttcaaagttactacgagcactatcaatatcctacaccgtatggctacaagattttggttgggctgttcagaacataacaagcagattcattaattggtgtaaatggacatatttgtgtaaaccgaatgagaaaggatgaatggcggtttagggaattgagattgtttaaccaagcactattggctaaggaaatatggaggtgcattcgattccctaactctttatgcaacagagttttgaacgcgtgttatttactgaacaaagatgttttggcagtaaagagtggggctcttgcatccttcttttggcatagtttgacatggggtaaagaaattatcatgaagggttgtagatagagagtgggggatgagaatatggtgagggttctagaggatctgtggctaccgagaccacacacctttaaggtctatgataagctatttctgccagaacagatgcatattgttgacttgagactagctaatggttcgtgggacactgactttattagagctttgtttaatagtgaggatgctgaccttattttgaccatgccaagtggtgtgggtatcaaggataaaattatgtggcacttttgcaaaaatggtgagtattcggtgtagagcaaatacaaaacggctatagcaatgcaagagaaatcactccaatcaaactcttccaaagctgaagcttggtggaacttgtaatggtggtggaaaattctgtcaaagataaagcattttgtttggaaaattattcactcatggcttccaacaaagtatgctttatccaaacagggcattcaagtggaacctctttgtagtcactgttctaaaggggagagaggttgagttccctgataggttcaaaactcgagcaagctattgtcattatcataatcttgttcaacctaactcttattcagcataacacttgaagtttgcttaa

SEQ ID NO: 247095 - DNA, 853 bp, Cannabis indica
ttttttttttttgaatgaagtaaagaaaaagcaatatgaaagaaaatcttaggggaaactagtacaactaagaagaaaatcttagaaaaacatgcttctctttcagttgaacacgaaatgatatcgattccaccttcactaaaccaaatgcacatgttttacctcaacaaccatctcattgaagatagcatagcttagccataggtcattctcttgtttcctttacatgatcgatataggattttcttgatgccatttaggctgctttacgagttcttccttcctacataataacaagagaactttcagcacatacatctggcatgaaccaagtaatccaagctcaacaaaacaataaaacagtagccaaaacagcagcaagaatataccaaatcagtaggaaattagtattagattgatgcaaatactcaaaactagtttcccaatcaaagacttatttaccctcatatttatcctaaggcctaacaacaacaacatcaacatcaatatgttcatattgcaagaatttctaacctcttttcgattttggataagattgtctgtatttcttgttgaatccagatcagaacaatgctaacatggaaatgctaggcaaatttaacagtgcaatcttaccattgagagacgagttcaactctttaacaataaattcaaaactcgtctctctaaaacatccacattgactttttaagctttcttaattctacacaaacataccatagaacaagttaagcagatgtacataacagattactcaaaacattactcactctaaagtaaaagcacaagttctgaatttttactattttaatttcctcattaaaagttgtaa

SEQ ID NO: 247096 - DNA, 690 bp, Cannabis indica
cttcttattagggatgatgatttggatacagagtacaattttctcagttaatgtaagatataatttttttctctcaaattttcaatccctttctcattgaactctgtccctattcataggtgtatatgatgacagttattattattgagatctaatcatttgcaactgttcatgaaacgtggataatacacgtgggataatatttaataactatcaaactgctcttttgtctttatccttaaacggttatgctaattttgcgggttgttccttactaagtatgagtagtccttctttaccgtctttgtaagaaaacatgctaagtataaataaacttctcctcgcaatattcttgtattataatgatattagcgaggtggttgttctatagtatatagagcgagatgaatgaatgcagtgattatatccatgtacacacatgtggattaattagttgcaagcttttactcttcagtatgtgggtcaatgagttgtaagcctttactccccagtatgtgggtcaataagttgcaagcttttactccctagtatgtgggtcaataaagttgcaagctctttgttatcttgtcttaaacactgctattatgcattctatctatcccgagatgaatgtattgtctcgtcaattgtacccgttaatgttaattattcttatcttgcatatgctta

SEQ ID NO: 247097 - DNA, 832 bp, Cannabis indica
aaatgcttagattatgaaataaaatgcaataaacagacatattcaattcaaacataagatacgagacattaaaagtaaagataaatgcataaaaaagtaaagttggtcatccaataatgcaaaattccttacaaaaaataatgccactaggggcaaccattgtctcggccaaagggccactttcctaaataaataaataaaaaagataaaaagaccaagcctacatagtaggggatttagttggttcttcttgatcttcttcaaactcgtctgcatctgcagcctcatccttcttggtcttctcgtagtatgcaagaatctctttagcccctttgcctagaaagctgaaatctatctcgggattggctaaccaggcttgatagatagaccgcctagcaattttgttgaccctatttttgtgtcaaccttggccttatcaagctttctatcaacctcagcttggatagccttgttagcatcctcgagctcttttattttcttttagtcagccctttgttgctcttgagcttccttctttacccgagagagctcagactccgaatcattccacttcttggccatgacatcatgatgctctctggtctggcaaaggtctgtctcgagcatctcaactcgttgaagccccctatgttgagtagcaaaggacaaaatagatgccaacgaggaatgaaaccagaaagtaagagagtataaaaacaatgggagtgaaagaaagcaagtcagaaaaaagactaacgtgctgcataagatcgtaactcctctgcgccaagttttcaaaacctcctttattgagtaattcccagtcgttgga

SEQ ID NO: 247098 - DNA, 1531 bp, Cannabis indica
gtaaaataatttccaacaggcaatccgtcgggccagggtatggataaatggggttggaccttagagtccagcgggaggtttacaagtaaatctgcgtacctcgctcaagctctggaaagagccggccactgtgaggtggctccttcgctctggaacaaactatggaatagtaaaatccaggagcggcacaagattctttggtggtgcatcctctcatcggcgcttcctgtcagagcttattgggaggagattccaaattgaagactccagatgccccttatgcgaacagggggaggaatctattgaacacctctttctaacttgtgatgtggcgttacacttttggcgatcttccccttggggcatatatccgcgcagtgacaatggaattcgtgtttgggactgggtgaagtttctctggagtcttaaaaataggggtatctgtgaagaggaggtctttctctatgtatcgatagtaatggataccatctggagggcgcgcaatgaaaaagttcacaataatctctccccggatgtttcaaaatgtattgaccttatttatacttcttttgcagatttacatgcttctctagtgccgtcaccaactccgactttgacagaaaattggaatcctccacctgaggattggatcaaacttaattgtgacgttcgagtgggcctggcaagcatgtgcacagctgttgttgctagaaaccacctgggtgaagtgattcggatccacacagctcagttggacttctcaaatgctttgtgtggagaagcagcggcctgttgttcagccatttctctagcaattgatttaggtttaaagtttattattattgagagtgactcgagactagtaatcaatgtcctcaatgggaaggagtcccattgggcccttgagaactatgtctccttttgttcgagatcatctccatctttttctagttgtaattttttgaatattagtagacaatgtaactttgctgcccataatgtggctaagtgggcgtttacccaccagatatttggttgtattccgatctctgctttgccggagaacctactttgtaatgaccgagaggtctagcttttggattcaatgaagttcttcaccctatttttcaacaaaaaaaaaaaaaagatcattacattcatcctaatcctctattaatggttcataattaaaggaaataaaattactattttactgttttaattatatcttattcttagtgttgactgagattttcgataacttaactaataattataaaataaagaaaaatagagcttaaaatgaaatgagatgaaaatttttacgtgattcgaatgttaatgaatcctaatccatgaaccaatattattgggagttgttgtatgagcacaacaatagtggttctctctgttggattttgtgccctaaataaaatccattacaatatgatcagttatcaatctaataaatttgaagtgatttatgtttgcatgaatttttcacaataacagtattgtcaacacagtggaa

SEQ ID NO: 247099 - DNA, 566 bp, Cannabis indica
taattaaagaacaatatttcaactcatttaaaactgaaaggaaatgcagagagaaagggttgttcttgacctatttcatgggtgtgatgcttcgaaaaggaaatgcagagagaaagggtgcagatgaacagggatggtcttgacttacatatgtgtgatgccttcgattgtaaagctcgagagatgcctttgattgtaaagctcgagaatgagaagctgaagaacgatggagacttaaacaagtacgagtctttgtgctctacttttatttttttatttaaacaaaatttatttctattttgattattatctatatatttctattttctttttcgtctattcaggttcttcacaattattgtgttagtctttgggatcctgtgctcattagttctctccggatgtaactagtattgacaactcacttgaaacttttggctctaatttaatgtctctactatgttcaaattgtgagtcttttttgtttttctttggatgatggtctgcagcaacaatgctcttcggaccatcaagtagttcagctgctaatgagtcattgcagcatt

SEQ ID NO: 247100 - DNA, 1584 bp, Cannabis indica
atcttaagcaaacactatcattatcttacttactagtactacaatataaaataacattgatactaatttggataataacattttacaatctacaatgccaataactacacttcaaattcaaacaagtcattacccaatacattcctacaattactgatgaaataacagagtcaattacgtattacaatgtgattacaatttctaacttgaaatctaaataatatcaacataagctaaatctaaacgtcttcctaaaatcttaagcaaacactatcattaagtatcttactagtacaacaatctgaaacaatattgatcctgatttggataataacattttacaatctattttaccaataactccaattcaaatttcaacaaaaagatttggctaatatattatatccatttcataagctcaataaactagatagacaagtataatttaattagagaaataaatcttaccctgatggtgtcataatggttccatccaacctctgatgataaccttcccaacaagcaatatttatggcccttttgcaacctcaacaccctaaaatttcacatattcaatagaacccatatcacaaaaccaatcaaattaaaacaaaattggaataaatcaaactgtaatatcaaaacacagaaaaatacttacttgagagcatcagggataaccatcctcttggtcctatcatatggcgcaggaacaccttcataggccttcaatctctcgagtgcagctgcaccacgcttagtcttgtgtgggatcattctacatagccaaaaagaaaaacgatacccaaatcgatttcagcgaaatgaaactttacattactcaatttagggcaaaatgaaaggggaaatactgaactgacccacgaactgtacgccagaagatcttagcgggagcacggaagtgaatgggaccatgggaaggcttcgtgttcattcgcttacggagaaacctcaagtacttcatcttctgcctcactagacctcccgaaatacaaagctcctcgcatcgaaccacgaccactttctgaccattcaaaagctccttagctacgatcgacgccaatcgaccgagcatgtggtgccttgcgtccaccaccactctctttgcgcagattcctgagcctgacaccattttgtccctctcgacactctggtttttctggtgtttctctgtctaagctccatttttagggttatggaggagattataagatggtgaagaacactagggtttctgggagagagactaacatcgaattagattatttgggtttgggccatctattaatattggcccaaataattcagttaatcccatcaactttaggtttacataaatatttgagatttttcaaaaaagaataagtagtattgggtgtttctacaacaccagattcaccatatatttatgggttaattttataaatgcaaaaaaacaaacaaaaaaaaaaaaacaacaaaaataatggtttcacggaattttaaacattttaacgatttttttgattttatttacataaaatacagtctttttatgtttgaaattttgtttcatttgttgtt

SEQ ID NO: 247101 - DNA, 575 bp, Cannabis indica
ccttagatgaggtggttggtgttttctagccaaaacgtgcttattgatagattatcgatgattatgtttatgcatcacaattttgtcaatttgtcatttatcaatatgttatagatagtttatcgatgatttttatttgtgataaacaatttgacatttatcgatagtttatcgcgatgatttctgtttgtacacaaaataatggtgtacagataaaaaactatcaatgacccatcgataattacgttttggctagaaaagcatacccaccaccatctaatatcaaacaaacacaaattcaaaaaaaactcacgaaaatctaaaaaacagatatcacaatacatacaatgatcaatttaaactaaatcgattaaacaaattcttaactcacacttttttagaaaaaaacaacaaaaatttaacctttcgccgagggagtgggtcgacggtggggaatggcagtggttgggagctctgggtcgttgaatggtcgaatgatggagtgggtcgtcggtgggttggagagagagagagagagagaaggttaaaattgataatggttaaatttttaagta

SEQ ID NO: 247102 - DNA, 712 bp, Cannabis indica
aagagacttccaaagcaaatgcaacttgtaaagtttctaataagaacaagagtatgaccaaaaagagtaataccttgggtccaaagtctaatccaaaccaattcaaaggtagacattgtccatattttgtgtgtggtaaacttggacactaagctaaggattgtaagctaggatagaaaagacttcaagggacccaaagtgaatgctatcacggaggatatcattgctactcttagtgacgtgaattttgtgcaagggaaagtgaagggatggtggtatgatacatgtgacaccgttcatgtcacatatatgacaaataattgttcaattcttttgaagagtcaaaaggtaaccatgagatctaaataggcaatgaggtcaaatcaaaggtactaggcaaaggtaccattgatgtgtttttcacctccggtaagaaagtcacattggtgaatgtactttatgttcccaacatgaatgtaaacttgattagtggtgacttacttagaaatcctagcattaaggccgtttatgagttcagtaagctcatacttaccaagtctaatgtatttttgggcaacgggtactcttgtgagggaatggtgaaactgtgcaccaataatgtaactttcaatattagcaataataaagcatctagttctacttgtatgattgagcatgattctttattttgtggcatcttagattagctcat

SEQ ID NO: 247103 - DNA, 822 bp, Cannabis indica
attgtctcaatcggttcgtgatagagtcttctacagaaacgctctgaatgtccaatcaatccgcatatataacagaatgtggggactctttcatacttgaatgaaacccagaatactgttccatccgtcttcgtgcattggagtcttcgtcgtaaaggtttgtcgatattgaacgtaactctaactcgaaggtaatctcgccaaactcctatgaaattctttggatctgtttcaacaaaagacccaagaatgttacctatattttcgacaaaggtggcagtcatacatcctggtcgcacatcccagatttgaacccacatgtcaagcttgttaagaattagacttcttggttctaccccctcctgtaaccgctcaaatattagttgcatccggttaaaagtccaaggacttccttccatcaccctctgtatatctacttcatggtagaattgaaataaatataagttaggttgcaaaagtttgacaaacattcccatctctggttgccataacgcagcgagattattctgcataatgtcgaaatctaccattcttgttgataaaaatcgtcccactaggcaccatctcggatcaattccatcgtcctcttccaaacctccaactctcaggctatcatcattctcatctgccacttgtaaattaaatgtctcttcctcgatctcactgaagttccaactgctagaagccatttcaaccgatactatgaattactttttcagaataccaaaacgagagaactagaataacaccatgtcataagacaagactctttagtttatatatatattatttattttctaa

SEQ ID NO: 247104 - DNA, 2042 bp, Cannabis indica
acatgaaagcgacacaattaacctactcagttctaatacccccatattatccaaaatattagtaatagtactcatccactgctctacctttataatatcagtaccacccaagaatgttggaggttgcaacttaataaaccgtttaaaaactaaatctttatgtggttgcagagctaatccaggattagctaccactggggcaagacctagagggatcactttctctatcaaagttggttgaatcggttgcctaattcggtgcaactcttcttcttgatagagtatagcattttgcattttagtgaacatttactaccaattggtaagaggattagcattattcatctctacagtattgccagaattatgcagaggtgctggcagtaccagtggattggctagattatcgtcctgctctacagactcgctctgggatttagttgatttagtaggatctattctttcaaataaccttgaaatcatcaatcccatcgagtcaggcaccaaatccacacttacacactttttgccaaaaccctaactaacttacacaatttctttcccaaatatagcaattattactcacatttaataatcattcttttcattaaataaattatcttctagaagctcatatgatgcgtattactaaaaacaataaatatttaaccacataagtaaataagtatttactctcaacacttactgcaccatgagttaagcttgtctttgaagatgattgtacatgttctgctagtcttcaagaagtttaaaaaccttggtgctctaatatcaaattgtaacgtcatatgcaggggaacaccacgtgtcgtgattaaacatactaatcacgttaatcgaggtctatacactaagtgatttgaaataaataataaacttaatttaatgaataacatgcaataaacatacacatttttactttaaaccaaaataatttaaagttacatatctgggatcccgtaaaatttattttcaaaatattacaagttattttatatagcccgacctaagcggaaaaatagaatttctatacaattcctgttggacccaaccattgtgatctagcttggtcagaacatatataacccaacccttgaactcatggttaaccagacactgctttacccttgtttgcataatagagaacccatgagccaaggcccaacaaaacaaaaaataatacagtatgaatatttttaaaatttcttttcatacattatgcatctgcatatataaatatgtcaccgcacaacatattacattatttcatatactataataccactataattaatgtctatatagtatagacctacgtgttgcgctcacacatctcttttacatataaggccttactaagatttatctcggttatagttactgagtctaatctggttatgccttacttgcataactctatttaaatatctatttaacatattattgcatctttatcataggacgtacttagggtaataaccctaaatcatgatttcacaatagcaatcaaatatcatataattgtgccaccacgctatactctatgtgcttagtttgatttcttacctaatttctagtgtatgtggagaaatcctaatccacgggtgattctaactaagtactggttcctaatcataattctcgagtttttacacaatacggttaatcccaaaatcacattcataaatatccacatataagactcaaattaaagaatgtaatagagctcaaaatgatctttccaacgatatatagaagttcataattaaattttagagtcaaaagttatgctcaaaacaaaatagcaaaaattgaactatcgtcatcatctagtcgcgaccaattatcgttgtgaccagattaaggctcaccacgatcagagcttgggcaggggctatccatattctaggttcgagcttcatcacgacaaactctatatctggtcgcggtgacttggcttaaaaatccagaaatgcccaaaaaattaagttttgaccaaaatcgagcatttaccaattcct

SEQ ID NO: 247105 - DNA, 996 bp, Cannabis indica
tggatatcatttgttggacgaaagtaatatcagaaaattccctctctcatgtgaaataatatactagtaatgtttcaccagtacactaacaaatttattttggagggtgtctctggttttgttttattatttttataataataagtttttttttgaatatataattaaaaataaacaggaaaaacattcgagagtatagatccaagaaatggagaggtcctagcaaatgttgcagaaggagagaaggaagacattgatttggccgtgaaagccgcccgtgttgcttttgaccatggtccttggcctcgtttgtctggttctgtatgtactatatatatatacctaacttaatattattccttaattttattttcttctctaattaatatactttaattaaagcattaatgctaacattaatgtaaggagattttgcagttatacgaccgctataatttttaaaaaattaatcataattatacactgtcgaatttttaacaaattatgattaattaatcaacttatcaaatcaaacataataagtgcatgaatgccgtataaatatttacatgtaatttttacagtttaaccaaggcaacaattacacattaggctaattaccggataaataagctaactttgacatgtatcatattattattattattattattattattattattatatatgctcttgttgtttatataggtaagttctcaaaatttgtttacgaattacattaaaagacaaatattattatcaattaatggattatgaaaactgcatggattgtccctgttaattatttaaagatctgattaaatccaatagtttaatgaaactaaatactaattaacaatatcaaataagaaaacattatatttccttgataaaaagcattaaaacaagtccttacaaaaaaggataaatacaataaattgttgtagtttttttttttttgaaacaataaattgttgtagttttttttttttt

SEQ ID NO: 247106 - DNA, 743 bp, Cannabis indica
tttcgaaacaaccagccatttcttctcggaaaatcctagcctcaaagtggatttgcgacccttgcacttggaaggacataacctagtatgtagaaaaacattgctcttataaatatatgttttaataataaatattgcatatgtctttcaaatgttaaatttatacgtatatcatcttgaataaagatatatcatgacttctttatgtcaaaattgttgctttatttttttcttttaatctagcatagcatcaagagagtactagtaacaatgaaagtcaatatcaactcttctttgtgcagaatattccagtgcattttgcaaggcaacaccttaaagataagactcaaactatgactctttgggttggtgagagatgttgggatgtgaggctattggctcatagaaaatatttttctttttctgctggatggaaggaatttacaagagacaactccctaaagccaggagatgtttgcatctttgagttgattaaggggaaccaatctgagctgaaagttaccataatcagaaaaagtggtgagaatgctagtatgtaatgatcatgttagaaagtgtttactttgtttagctgttgttgttgttgtcatgatgatcttctaaactattttctctgttcttggtttctttatgatcaatatttctgtgtgttaaggatgtaggttagttaagacagttagttagttaggttttctgttatttggttagttaattctgttatg

SEQ ID NO: 247107 - DNA, 456 bp, Cannabis indica
ttttaaaatttatcaaaattgtatattttaatatactttaatttaatttttttaagataaaataaaaatataatttaaatggttttatatatggacaacacttccacacgttagaaactcaaaaagtcgcataaatctcacacaattcaaactattagatttgatcataataatttatcataaatatcataacagttccccaaccaaagacaatcatgtattcatatagtatataaatagtataatataatagatggcatcaatattataaatagtataaagacactcatggtatcttacgattaattgatgatattttttaaaattattatcatgagatcgatatttaattgcatcaatattaatatgacatcaaaagatatactaagtattattatgcctttagcatattgtgacagtcagtagtcccgtgatccgtaaggggaaacaccgggt

SEQ ID NO: 247108 - DNA, 1034 bp, Cannabis indica
agattgtctccctaatccctactaatatctcctaaacttgtcctccaactcgtctattcgcaattagataggatcctcttgctttggaccgagttgttgaccaagatcacatttcttccgattcaagtgctctaaaagattcggttgggagtaaatctggtagacatcattttactcacagattgtgtcctactcacgaaccttgtcttagtcatagacttcgtcctcgagtgactagcggatttactgtttcccatgctttctcgatcattagctcatcgagtactttctcctcttcgagttgatcgactgtgggtccttgaatgccctaaggtcacacttgcttcttcatgctctattctttcaccttgagtgtggtttgtcgtatttcccctattagggtccgtatgagccctctccctatggatttgggaagaacgttggtgatttttcgtaggtgacctacgttctctaggttgagtcccaagatcttcctcattttcatgagaaatttcttattcagcagtttctggttgtctcccattctcatttctatgagaaggttctggctgatcattctgattttcaggggaatctcattttccctaggttgttcttcctagacattttcctgtcccctggttcgtgagccaggaggcctacctcatggtcttctcactctaggttcaggttgattttgagtgttagtctcctgcaccgccctagctgtggctacatcacgctctagttcagcgttccgccgctgtgcttcctccagacggcgtctacggcagtggttcttcatttcataagtaccctctttgtgagctaagtacccccatgattagactcctcatcgctcattctaggattctggccattcccacgctgagttctcctcgagcgtgttattcgcgtgctaggaccaacgtcgagttgggtcctccgggaatgtgtggtccgagtgctgaggccacctttaggttgagtcctcctggagcgggtggtctatctggattgtgggttggaagacc

SEQ ID NO: 247109 - DNA, 501 bp, Cannabis indica
tgtgaaccatgcaacattaaatggtatttctgatctatattaataagtaaatctgattattattgaaatgagttttatttagggcataaaacccaacagttctacgatccttctggccatgggaaacaccaaaaccccactggttttaggaagaaaaaggcctctaccccactggccttggctgggaaaattatgtttatccaaaatgtgatcagaaactccacaaatattggagttttcacactaaacacaaggcatttatgattaccttgtcaaaagatggtggctctgtaagaatatgtcagagaacaagactattcgagtacgagatttgcgtaactatcgatgcagtggattggatgattggaaacttggaggaactgaaaaagtttgatggacagagacggattgctttcaagagatcattcagaaacagcaacgagagttttttttaaggaatgattcgtcaacactaaaggagcttttctgaagttatcagtt

SEQ ID NO: 247110 - DNA, 540 bp, Cannabis indica
ttgatggacagagacggattgctgtcaagaaatcattcagaaacagcaacgagagttttttttaaggaatgcttcgtcaacactaaaggagcttttctgaagttatcagttttgaagaataataaaattagaatggtaattataccagaagaggaaaaggaaaaaggatggtctgacttggttgattgtctcaatggggtgataaaaaagacgcctagcagaattcaagtcaaggaataacacaaggaagtgaagagagaagaaggtatgtttaactcacaatcatgggctaacattgttaaaagatcactgcaacctgtcactaagccgcttggtgggaacattaatcttccaaaaaagagttttcctccttcaaagaggaactcaaataaattgggatattgggattttctaccaaaggggaatggaagcttcaagccagggaacatgtttccgaaaaagagaatagagcgaaaaaaatttcatgagtatctacaagcagaaaagtgtgacaaggactggagtagggctgtgatgatg

SEQ ID NO: 247111 - DNA, 950 bp, Cannabis indica
attctatatattggcctactgtacacgacatattgaatatatattatttaatatcaaattttctgtacattttgaagattatgcaaaaataatactcacaaaatttttaaaatattataaaaaaaattgttgaatattttcttatatatacggatgaacaatattttattaatttttaagaaagttataatcatgttcaacttgttcaaaaatattctttgaagcaaatttaaataattaaagaaactatttactcctcgaatattttcagaagaaattgaaaaaaaaatatcacacatagtcaaagtgcatgaagtaaacattttatatgtggaattaaataagagtggtcatgtacctgtagaacatacatacttataatcaatgtgaaataatatttgactgttgaatcaaatgtgaattatacaataaataaattaattttattttatattcagattattataatatattttcctgaagagaatgaatggacataaaatagtatttcaaagaatatagattgtacatatattagcgttgactgtgaatttagccaccgcgcagagtttgactagcatcgttgcttttgactggtactcgtggaacaataataaatgtaaagagatacacgaatttatagaggtttgtccccttttacttaggtaatgacctactctctttttagttgtattcactcttgagataataccgagtagattacaggctaagacattataatttctagctgggctctcttcagtattacaatgtgcttggcaggtgagaagtatgagaaaagagagaagacttattgctatagtgcttctgagcgtgattaaaacttagaacgtgagaatgacttaggatatagggttcatttcacgtgtgtatcttgccctttatatagtagtagggcttacatagtgtacatagagatattcttagaa

SEQ ID NO: 247112 - DNA, 537 bp, Cannabis indica
cactagtggttttggtagagtggatgctacctgcctgtgcgcctgaaaatttatgtgactgcaggatggcttgtgacagcctattattgacacgccaattctgggcctgtcatatagcttcttcgagttttataaagccaccagctctatcaaagaactctttcatgttgttaattgagaccctccggatgtctttcatgaagtcactcaatgggagtatgccccccagtatgattatatatcggccctcctctagaagaaatttgtgggcttaggcaacctctagatgtaatccttcaaaagttctccttgtcgttgtttgacatcgacaagatcttctagctgcgatggtacaagccttgaggacgagaatcgtgtgtgaaattcacggtagaactcgtcccatgaattgaattttgctactgcaagtttgaggtaccattgttgagctattttcaactaattgatgggaatattcgacatcacacattccaaaaaatcttctacagttcgcgctgcatctcgaagtacttgatg

SEQ ID NO: 247113 - DNA, 458 bp, Cannabis indica
ttttttggttgacagaatgttttcctatgttaagaaacactactgcattagaagctgaattatcagttctgtttggcttgttgctgcaaaataccatgaaattctgtttttaatttctatgtttagtcattttgatgctgagtttttgcctagaaagttaaatgtagtagctcacacaacttcccaccaaatttgacaccttcagttattattaatcaatcccatcaaattgtcttatttaacagaatgagtagtagggtaacatgatatcaaactaaataaggataattttaatgcaagaaagtgaccatatcatcacatattattacatagatgagaaagaagaagaagaagaagacaatgaaaatgaatgaagtgaagtgaattaattagtcaagcaaagtacagactgaatcggctatcgacaaaggagatctctcagctctgtaacagcatct

SEQ ID NO: 247114 - DNA, 745 bp, Cannabis indica
attctgccctgtcgagatcactctggctctgcactgtaccctccatatcgtcgtcctctcagagcagcagggaacatccatggcatcgacggtggtgctgggaagtcggttcccaatgtttcccgtggttcgagacgtggaaggatggtgactagacggagctcttcgaacggtggtactgcccagcgtgcggtgtggatctccaaactaaagccagctggtgatggtacgccggttgccatttcgggtattgagggtggggttcaagctgaaacaaatggaaaggctcctgctggtttgcctggtatagtaccacctattactatccctacttatgaccgttccttgaatgatgagcctcatttgaataaagataataaaggtggaaatattgtttctgtgggccgttcacttcatgcatctctccaagaagctgggccggtcttttctagtgggccagacgtcatgaggcctagtgggtttgggccttctaatttaaatgacaaggccatttattgttctgaccttgctgagaacgtggtgagagaaacgggtgggttacttattggtgggccgagtgatactaatggtaatggtaagttagtgtctcttgggccggattacacattctccactgggccggttaatgctaatgagccgcaactctctaatgggctggagatcaataaggcacctttagttaaatgtgataagaatattattactacttctagtggaaatgggg

SEQ ID NO: 247115 - DNA, 617 bp, Cannabis indica
atagaggaaagtatgaaattaagaatttttaaaataaaatgattagaactttactttcagtaagtaaatatttatcatctatcttgaattacttttcaatattcttgaccattaggggaaagaagagtattttttacttataccattacggctgcagttcgcttcataaagataaaatttcaagaaattttttactgtggtaagatggaaatcaactttatgtatgaataagagggagtgaaaaacaagcaaagaaaaaccaaagtaatgtgatgtttaatgcaaatttttacaaacaacataagataacagaatgtgaaaaccacttcacacactcaagattttcaaaaacaaattccctcaacacacctcacaatagaagatgacgaagacaatatccgagctctaggagaggctgcttggagctttccttcctccagcagaacagctctatcatcatccttaactggctcttttaccaccacctccaaagggatgtcaaaatgcctactgtgtagaagagcaacctcaatgagaacaaaactttaagttttttcttcctcattctttcacttgaaaacacattcgaagtaatcaaccattgcttgacattattg

SEQ ID NO: 247116 - DNA, 3924 bp, Cannabis indica
ttaagatttacattattcaaatcttattttcctaaaaagaataaacgaatcaaccaatttctaaaaattacaaaaaatactcaaaagcttgagtaaaaaaaacttgaaaatgaaattaaaaaaaaaaaaacaaaaacaaaaaaaaaagaacaaaatcattttcctctcattctttctctgattatcttcaaaccaacatatctgttaagacaaacaaacacaaactttgaatcagtctctttatatatttaattagatttataccattttacaccattaatttttgttaaataccatattgagtcttaaaacataattctacaaaatttaaaattcaagaccaacttaataattacttagagagagagagagagagagagatttatgaaattgtaaaaactttaaacttatatatatggcatttatacaaaatatatgtttataaaatggtatgagtaaagcattttatgaaaaattcctaaaacttaaacatatatgaggcatttataaaaaagatgcttataaaatggtataaatctaaaataaaacaaaaaataacaaagtaaagagtgttggttattagttactattaccttcagagaaactcgacttaatatatatgtggcatttatgaaaaaagatggttataaaatggtataaatgtaaatgaaaaggaaaaaagaatagtgaaaagtaaagagtgtttggtttggttactagttactaattaccttccaagcatcataacggtagcttgaggattggtgccaggagaaagaataaaagttgaaccatcaacaactctcaaagaattaatcccaaaaaccttgaaatcactatcaacaactttgccaaccaaacatccaccatgataatgccaaatagtactaactgtccttgtacaaaaatcagccataacttgaaaattagtgtgatcattaggcaaaggaggtccaataaacctaaactccctattcccaatcccatctctaaacttaaactcatccattgaactactcctcaaaacatcaccaattgccttagtaccattcacacacttctccaaatccaaagggttatgaaaatagttaaacctcacaatagggttgaccctaacatcagttgaggccaatgaaaatgtcccaattgacaaagggccattgatctttgacatgagtgttgcaacggtcaaatagagcggcgaagagggtgttctaatgaaaaccgttcgtgctggggccgcgaaaggtatcacattggaagctgcttcgatgtaagcacccgaaggagtaatgccaacaacttgaattagtgattgttctaatggcattggtggtacaattgagatactatttcggggattgtcatacaagaatcttcccacgtagggaagatcatgggcaaccgggattcgccacgaagaaaggtagtttcttgggccaataccacttaacataagaagttgtggactaccaattgcaccagctgacactaaaatctcaccattctttcttaacattgcattgtgacaccttcctcttctgtctctaaaaacaacaccacttgctgatttttctgagtaactctttggatttgatattataattttctcaacacttgcatagatcactactttcaagttacttattcttgagtagaatagtagatctgctgcactgtgtcttcttccataactgtcaaatattgtaccaccaatttttgtaccaattttgtgctctaaactaaatccattgtatgggtttacacctgtttaacacaaaaaagcttccattcaaaaactaaaaatgcaaactttcaattactatgtaaataaagacactaactttaaatcaattagtaaaagcacaaactttgaattactaaataaaaatacaaactttaaattagtaagtgaaaatactaactttgaattactaagtaaaaatgcaaactttaaattattaagaatgcaaactttgaattactaagtataaatacaaattttaaatgattaagtgaaaatgctaactttgaattactaagtaaaaatgcaaactttgaattagtctctcttcttcattatataattataaaggtttttgtaacacaaaatttcataccaaatcaaacaaaaatctcaaccataacattttcaaatataattaattgattcacacttgttaacaactaaaaacaagtgaaaaaaacaaaaactttaaatcatttctcaatcttaactttttttttctaacacaaaatttcataccaaattccacttaatttcaataaatcaaattcaaataattaattaaaacactaacttgaatcaatcttaactcaatttaaataaaactctgaaaaataacatatttttattcaaaaataagaaaattaccagcttcttgtaacccatctcgaacacccatttgccaagtcttaatctcaggtctaaacacaattttcctctcaacccattcatatgaatcgttgaccattttcctatcccagtcaaccccagatttctcaaagaactcttcctcggctcggctatagaagccggcgttaatggcgctactcccgccgagaactctcccacgtgaattaggaaccccatcttccgacgtaaatgcttgagccgccgactcgtatgcatcggcgtcggctaaagccgtcaagaaaccctcttgaaacatcacatttcgatcggcgtacggcgcgccgccgcgttccaaaacgagcacgcggaacgcacgtgacagagtcgccgctaatggacaaccggcggtgccgccgccgacgattatgtaatcgaaatattcctcggaggggaaacgagtggcgttgattacgaaacttcggtaattggcttctgcccatttgaaattagcaaaacccatgtgtcaaaatttatactttttctcgagaaacaaacggaaaatgaagtgagaaaattaaattaaataaaaaaagggtttttttttttaccttgacgagggatttgctgtgttgtgacgatggtggcgaagaaagtgaagaaggagattaatatgaaatgtggtttgagattgagaattggttttctcattattgggatgggattttcttgggttttcttggaggagtgagaaattttcttggagggaaaaaaagaaagaaagagagggaaatcataggtttggttagttagtcgttaaatttcagtttgaaaaaagaaaacaaaaaattacatcctaacatttaaaataattaggtttgaaatcatttttaaatatcactcttaatttttttttaaatattttatgttaattttaatatttactataattttattttttttcgtaatttttctaaaattatgtatttattttttaaaataaaatttcatacaatttattattttgatttgttttgttataatgtttaacatataatttatttttgtttaataaatatatcttttaaaaatataagttagaagaaaaaaaatttgtaagctttcgacaagcatctagactaaatttgtaagtgatgccccaagcaaaacatttctagtcagttagggtgcgtttggaagtaaatgtgtaattactaagtagagtaattattaggatagtaattacacagtgtagtaattacactatattttaaaatgcaaggtgtgtttggatatgaggtggtaattacatatgaattcataatatcttatttggcaaaatagttagtaattacaaggaaaataatattttcttagtaactaatgtttaatatggaaagtttttagtaattacacagtgtaattacattcaattctcatgggggccatgagaattggagagtgtaattggaacccctcaattatttccaattacatagttacagtgtaattatatggtcagacaaacatgccaaattgtgtaattacct

SEQ ID NO: 247117 - DNA, 623 bp, Cannabis indica
agctcaggatgtttgggcactggtgaaaccctagctcaggatgtttgggcactgggtgaaaccctaagtgctcgggttggctttcgggatgctgattcgacatttttcagttctcaggcttcagacttggagtcttcttgacttgttggttcaaaatactgaaggatggtgacttggaaacactttggcggggtccaaatacccattctggagcccccgaagtcaacctaggcatagggctaaggacccttccatgagttgactgctatgacttgggacacttaactccatgaacgttttccttcttgtcatgtgttaaatattgatgtccacatcatcaggattcattttcgtgtaaacataaagatccaaaacttttacgtatttatttcatcgtttaacaaatcatattttagaatgttaaattattatgttaataattaaacatacatggtagcatattaaatcctaataaaataaatttaaacaattataataatgtgttgtaggcttggttatcatgcagtgatcattgaatctaattgtgccaatgtagttcgtgctatcaacaattatattatcgatcaatcttatctaggatatattattaggaatattcttgc

SEQ ID NO: 247118 - DNA, 1164 bp, Cannabis indica
catgcctttggacaagtgatccacaggtagggcaaaataatttgacaccgatctccacacatgctttgacttttggaggcatttcaagcccataaagcacgccaaaaagtccggactaatagaggagccgctggaaggtttcaaatcttgaataagcttataagccgacttaactgaatagatccccgaaacctccttactccaataccaactatctgtcacatttgtagcagatataggtatttttataaatcaactccttatccctattattgaataagtcagcaataacttccacatcccattttttgtcattcatttccaataaacaactcgctttttgatcgataagggtaggatgagatgaggtaacatgagggttgtcctcatcaagaagccaaggatcattcataatagagacattctcacccgagccaatgaggagccgaccccctttagtgatcaggtattttgcttctaggatgcttctccaaataaaacttggattgttacctaactcagcagtgatgaatgaaccacgaggataataacgagccttgtacaacttgctaacaagagaatcaatgtgagtatgtaatctccaagcttgtttgccaagaagagcaatattgaactcatgtaaatgacaaaatcccataccttcttgatccttcgaagcacacatacgatcccagttcatccaatggatacccgagccttgtctagagttgatgtgtaatttttttacttttagtcataataaaacttgtgactaaaagttaaaatgttgttactaattataaattattatttttatgttgtgactataaaatccgtgattaaaagtattagtaacaaaaatcacattttatttgtgactaaatgtgtttttattcacaaatattatatatgttttagccacaagtaattttttgttgtgagtaaaagtcacattttagtcacaaaaaatttatggtgggaacaaaaaattattactaaaagtagctatttttttgtagtgaattgctactcgcgcgactaatttaattttttttagtactatattaattaataaatagtaattattaataaaaagtaattgttaaaataataaatatgaaattacttattaaaaaattattctaaaatataataataataaaa

SEQ ID NO: 247119 - DNA, 743 bp, Cannabis indica
agtttattatattaaaaaaaattatcgaaaattaagctgaaagtcttagttttaccattttaaaaaatacaaaattttattttatcattaagatgctttattcaaaaaattttgtaaaatacaagatctaaaatgatatttatccttttgagttttaaaaaaatttatttactttctctttggtattaagaaataataatataagagagatagaaaattaaatggaaaaaatagaaaatatatttttcactaaattgtttgatgggttgaaaaaacataaaaaattaaatgattatattatttttaaattattatatatttttaataattagataaatattatatttgatgtaattaaatttattaatttttttttttttgaatgaatgtaattctctctttttctattacgataatatgataataattcaataaatataataaggaagaggatggtgaagaagaaggttttgtttgtagtctttgttatttagcttattattgacatcattagtgcatttttaaattctttacgcgtaacatatacttttcttgatgtcatgcctaccatcatttcctaacaccaatgagtttataactttgttagttaaaaattaaaattaatcattttgtatttcataaaatttaaaatttttaaaaataatgctatcactttcaatttaaaagtgttaaactttaagcttatattaagttgcaaaatgcttttcaaaattctaaatgat

SEQ ID NO: 247120 - DNA, 756 bp, Cannabis indica
gaaatgctagaaatctccatctttcacacctaaattttcagtcaatgcttgttctactccctccaaatgttccaattgaaaataggatgatccaactgcatgaaatacaaaaaaaaaaaatagtaactaatataaatcacaaaaactatttctaatgagtttgaatgtaccaaaaaaaaattcgataaaaatagttgttctctagcgaaccaagcttatcatttgaagtcgcaaaactcaaaaatttccattccaataactctttaacttcaataactcaatacctttataactctaattaccaataactaaaacactcgaaaaactcataaatgtcataaatttagaataaccattataggacttattaaaaagataccttagagaaaataaaacataccgattcataatgaaataagagaaagaacttctactatatatgcctaaatccgtttaaaattttatatgtaattgtataaatggtcatccataattctggaaaacttactattgtaagaatcaaataagttatcatatatagaaagaatacaatgatatatattcatatagtatatagactaatttataaaagtgaaaccataccaatttataagaaaaataactagagtttatgatgaaaagtactacactaaataaagacatatacaaataaggaagaggtttcaatggttacatttttattgtaaccatcatggttacatttttttaaagccattggattactattaaatggtt

SEQ ID NO: 247121 - DNA, 906 bp, Cannabis indica
tactcaattaattcatgtattgcctttatagttacagaagctttaggacaataaccctaactcatatttttaactaaggatttcacataacatacaagtgtgtcaccgtgctatactctatgtgaaaggttcactttcttaccaaaattctaaagtatgaggagaattttcagtccacaggtgatcccaaacaagtgtcggtatttctaatcacaatctcgggtttatacaaaaaagggttaatcttaaaatcacatttaatatgtattcatatttaggactccaactctagaccaaataatagagctcgtaatgagctttccaacaatataaagaacgtccaaaatgaagattagagtcaaaagttatggccaaaataaattttgaaaatcgaggtcaaaaatgaattatcgacgcgatgttgccaagttgaatccttatagggagcatcccctgttttcagtcaaggcctcaccgcggcgaccttaagcctgactgcgctgattgggcctgcaaaacccaaaaacttagtttttttaccacattgaaaatacacccattcaaatcaaactccacacctattacaaaattgcttcccaaatccaataaagagcataataagtaaagttcgtatcaacatatacatgccaaaaacacatataacactatattcaaaatcataaaattcatgttatcaatctcaaagaacaaaccaagtaatatttcatgctcaatcactaaattgacatcaaaagaaaatgacctaacctaagttttgcaaaccttaaataacatacaatctctagtctatcatccatgaatttatctccataaattcatgtcaagagcatcatatacccatatcatgcaagcttcaaaatttataaatgaaattacaaattaaaa

SEQ ID NO: 247122 - DNA, 720 bp, Cannabis indica
gagtagccactcttgacattatagactccgtctctatcatagtgccagtaccaaccatcttttgcctcacacctcgctaatggaatagatagaataatgtccacatccatcgacaaaaaaacctgttgaagcttccccacatcccacacactagatggaaggatgaattcactcaccctacaatcatcattaattctcctcgtgaattggctaaaaaaacctcgaacgcgggatccaagggtccttaaaagccctaacttgcgttccatctccaatggacctccgaagaccgcatttaagcaaatccattccccagatcaaactcgactaaagatgagatgaaccatcttttttagtggcctctaggatggagcaatttggaaaatatttttgtttcaaaattcgagcaggtaatgtatctggatatagaaatagcctccatacttgcttagccaaaagagcttggttaaaagttaaaaattcttaaatccaagcccgtccatcgtcttaggctggcataatatttcccatttcacccaaggaatctttcttttatcaccatatgaaccccaccagagttgtcttacgatagactttaattttttacaagttgtcactaggagcttaaagacactcatcatatatgttagaatagcttgaagaataaatttgtataagcacttctctcccaccagttgaaaacgaaatttttgcttccat

SEQ ID NO: 247123 - DNA, 899 bp, Cannabis indica
taatttagaatcagcatccctcatgtttattctaggtaaaaattgcttatcatttagctaatactgtttttctccctctgacctcttcggatggtgctttcactatgaaatggcggaccaccccgtggaacttgtgtctccctcccaaaatcaaagttttctcttatttatcttgttgctcctcttgtaactgtcctaatgaaacagtcactaatgataattagaaaattcatgctttctctagttttattcatttacaaaaaagatgatctgttattttgttatccactccttcagccacctggggcaatagaaataataatttatttggaaaatctcatgtgtacgtctcctacttgatgttgtagtttggagtagctctttcctcacagaatatagggaagcccacaaaaactccatcatcaggaagttgcagaagcaaaaagcttttaccaacttaacactgttgcagccttgaacgttagaaatggcaagcttaactttgggtaagttcttaaagattggagaggcaacactgttgcaggtctgtccattcctgcaacaagctgtgctaatccaactatggccgaagctttagctttgagatcaggcattaattggtgctaccatataaggattccactcgccattatcgaattcgaaattgctcaagctttatcagatgttattgatgactttaagcactcattgtctttatttcttaaagtttgtattagacatgttcctagaaaccattctaatgctcataatttggctagaaaaactttagggctagatgaggagttaatctgatatggtgctgttccagttatgtaactttcaataatgtacacacataaatagtctgaaactctaaataaataagttaaaaaaaaaaa

SEQ ID NO: 247124 - DNA, 545 bp, Cannabis indica
ccagcaatgttacgaataacttacgttgcattttattccttacctcgccagttggggcagcgatcagctagttcaataaattcacacatcactcgatcacctcttaggaacagctatctaaagacttcaagagacagttccaagcagcaagagacagacgacctgaagcaccttcccttactaacataaagcagcaaccgggcaagacacttaaggcctacctaagtcatttaagtacaattgctgcatgggttagaaacttgaatgacagtatccaacttactgctcttcaagctgggatcatgactgatctctcgacagctggaggcgagctgtgggatgacttgcagcgagttcaataagagagctcaagtgtttgttcgaaatgaagaggcaaggaaagagatgaagttgttaaagattggcatgagaagtaaacctagcaatgtctcgacaagcactgtctcgacaaacactgacaatccaggaggctctcgtataaagaggaaagatgactctaagaaataagccaaagataagaaaaa

SEQ ID NO: 247125 - DNA, 1412 bp, Cannabis indica
aagcttgagtgatccttgctgatgaactttttctcgaatgaagtggcagtcgatgatctccacatgtttggtgcgttcatggtaaacgggattctcactgatgtgcattgcagcagtgttgtcagagtataatgttgctagaactttgggagagatgccaatgtctttgaggagagcaaggatccatgttactttggaagtggcatctgccattgcacgatactcggctttagcagatgaccgagatacaacctgctgttttttagatttccacgagacaagtgattggccaaggaacacacaatattatgaaatggagcacctagtatcttgacaactgctccaatcggcatcagcaaagaatgaaatttgaacattggatgttgataaacttgtttcagcatatgctgagattgttggggaggtgttggcagggaagaagagtccttgaccaggggtgctcttgaggtattgtaagatcctgttagtagcttgaaggtggggtactcgtggttgttgaagaaattggcttagatggtttactgcataggagatatccggcctagtgatggtaagataaattaatttactaattaggctacggtatgtagtggggtcaggtagaagggcccatttatctttgttgagtttgagattatattccattggagaggaagcaggttttgctcctaagtaccctgtatccttcaaaagctgaagtgtgaaagggcgttaagaaactgacatgccttttttcgttctagcaacttcaagtccaaggaagaatcgaagggagcctatgtctttgtttaaatttattgtccaaaaaaactttgaagtgggcaatagcattgtcattgttgcttgcaacaataatgtcgtcaacgtagatgaggacaacagaagcatagtgctagttctcttaatgaagagggaattattagataaagattggtggaagccatcttcgaggagtgtggaactaagcttagagtaccactgtcgagaggcttgtttcaaaccgtaaatgctcttttctaagaggcaaacataatttgggggagctttgtaacctggtaggagtttcatgtacacttcttcatggagatcaccatgaagaaatgcattgttgatgtctaattggtgaatgttccaattatacatggcagcaagagctaacaagatttttaaggtgttaaactttgctatgggtacaaaggtttgggaatagtcaataccttgtcgttggttgtagcctttggctactaacctcgctttgaatctatcaacaacttcttctttggtatatttaactttgtatacccatttgcatctgatagcctttgtcctggtggtaacttggttattatccaagttttttttttttttcagggcttgagtctcggtgtcca

SEQ ID NO: 247126 - DNA, 872 bp, Cannabis indica
ataaaaacacagtattttgaaaaaaaaattcgtgtgagtgacagtattttggtaaaagttaaccaaaattcaaatttccaaatataacttattttataattgatctgcctaatatacccttatattataagttctggctttgattaattgagttgcaggggactcctattcctccatagcaaccgaatgtacgcaagctccaccgcaagtcctccattgccagcgtccctccgattactccaccaccgacatcaatgctatacttttgcaattacaaccgcaaccgccaccatccttcaatattcaaatgtacgtaactttcttttttctttcagttttaatttctctctctaaatctttgtttctccctcgtccaatcctctatttattctggtttgtattgtctatgtatatgtgtataagtttatgtgtgcttttatagtcattctttgcatgacaatataatgtcttccaagtgtttggtgaaataactcataaaaactcttcttttatttcttcctataactaagtgcattcaaattgtaaaaagattatcttgttctagcgtgattgatatctcattttcatagtgaagattagcatagcacaatataatatatatacagatatgttatacaaaaatgattgagatggcatactctttccatgctgagtatgagcttgtttatacataattggaataaggtctctttctattagaatgtcaaagaaatatactacaaactttctgccaagaattttattggattggaacttatttttttgcttacctgtacttgtacatgctcttagtctagatttctttagtacttgtccatgctcttggtctagatggtgtaaatgtaccttat

SEQ ID NO: 247127 - DNA, 1004 bp, Cannabis indica
taggtcctttcgagatgctggatagagttgttcaggtagcttaccgtttgatcctaccgccaacattagcaaaaacgcataatgttttccacatttccatgttacggaagtatgtatctgatctgacacatgtgcttaagtacgagaacttgaacttgcaacaggacatgagttatatggcacaccctgtgcgggtgatagaaaagggaacaaaagtcttacgaaataagaccatacccttagtcaaaatcttgtggagtgatagttctaatagagaagcgacttgggagttagagaaggacatgcagaatcagtatcctgaattattctcaagtataaatttcgaggacaaaatttctgtaagaaggataatttgtaataaccaaaatattttattattagtttctattacattaatctagttatctcgatgtggaaataattattacatagaatagggtattttttattgttagaaagtggcacgtttctttacttcataaataaaatggtatttatttcttatgtcttgtaattttaagtaagagattacagtagttaagtgattaattttgttagaaactatatttgaataattttaggtgtatggcacaccaaggagcaattcaaattcaaagatagtttatacatgggagtaggagggttttgaatctctaattaatttacaagaaaagactaagttatattagtttctatgtgttctatcatcatcacatttagttatttttttttatttaaatcttcttttttttaaggggttaaatgcgggccactaagggttaatgaaacttttttttcaatatatatttataacataataggaagaagttactagtggtagtaaaggacgtggacatatgttaagaatttagagtttgagtaatagtatggttagtcacataatagaacggtttatgtgacaacaataaatgagagaggtactccatattatacgcagttatggatgatattctctacatggt

SEQ ID NO: 247128 - DNA, 907 bp, Cannabis indica
ttttttaattgataattatcattaaataataataattattaaactgagtcaaaaaattatttaaaaatcatagaaaaatcagaaattgaattctaagcacgctggaaaaaagaaacgtcgaaaaccgacgccacacgtggccgcacgcgcccccacgcgccacccccgagagtgggcatcgtagaggagggtcttcttcttcctccagccggatcctcatgcgggtcacgcaacccggttcgtgcaccggcaggtctgagctgttttccgacctaaaaatggctcgtaatggacggaaaaaatagggtttggatcgagattgaaaatctaatctatctatggattcaatttggagtaaaacatccgaaaaatctagaaatataatccaaaaatttcaaactaaaaaaaattcattaaacctacaaattttcgatcgaatcggtaatggaaatatatagtactattataaaacaatgtagaatcatttatgcataatcaatttcagtcaattataattataataaaaaacccaaattaaaacacaccaaccctaaaagtttaatcttaaaattctcttaatttactcaacgatttcagtcatataagatatcaatagaaagagaatttaatgaggaataaaaccccttaacttttaagattgaaaaataaaaaattcaacagaaaataataacgatattaatatgtaagtgaagaaaattaacatatacatattaattgttatgcagattatagattctaaattatatataataggcaatctgataccacatgttagaaaaattaataataaacccaaaatcaatttgtatataacatagaacacaataataatatataataattaggtatgcgtacctgattgatccataacaattacctcaattcg

SEQ ID NO: 247129 - DNA, 1108 bp, Cannabis indica
tctattacacttatcttagtgtatgtcgatgatattttgattacagggagtgactctcaagttgtctctcaaattgtgactgatctgaatgcaaagttttcacttcgagatcttggtgaattgaattacttcttggggatagaagtgaattataccactgagggaatgcatctctcccaagagaagtatgccaaagatcttctctgcagagccaaaatgcagaatgccaaaccttctgcaaccccgatgactagtggaacaaaattatctgcatatggtagtgatcccattgacaatgtgcaggagtatcgatctattgttggaggactttaatacctcaccattacaagacctgaacttgcattttgtgtaaataaagtttgccaatatatgcaccagccactgcagtcacattggattgctatcaagcgcattttgaggtatgttagtggcactgtgaaacatggtctgcatctccgaagaccttcatctcttcaatggatgttgttgcgttctgtgatgcagactgggctgcagatcccgatgacagaaggtctacttctgggtttgctatctattttggttcaaacttagtaagttggcagtgtaaaaagcaacacacagtgtcaaggtcgagtacagaggcagaatatcgaagtttagcaagtgttgttgctgagttgacttggatgaatagtctgttcttagagctaaagatatcactgccccgagttcctaccatctggtgtgataatctaagcacgattttgcttacagccaatccggttcttcatgcaagaacgaaacatatcgagcttgatctctactttgttcgtgagaaaattcagagtaaaatggttcaggttaaacatgtgcctacaattgatcaaattgcagatggtcttactaaagccatttcaagcaagagattctattcattcagagacaaacttagaattgaggacctttcaattctaagtttgaggggggctgtcaagaaaagtgatcaaccaacttcagttaccaactgattctaactgtttctgttagtttgttactccagctgtacatcagctcaatcattctcttttcggttgtaactgatttt

SEQ ID NO: 247130 - DNA, 690 bp, Cannabis indica
aatatgggtcgtgtcgtgtcatctaagaattttataggataggtccaacacgacccacaagttcggtaattttgtgtcgtgctcgaattcgtgtcgtgcttttattcgggtcggtcattttttcttaaatagatcaacatgttttcttatacgggatcaaattcgtgctctatatttttgtatttttattacaattgatgagttaaatcttaaaatatgtgtattttatagttttaattacttttgtatcttttttcaataatagttacacacaatcatataaaaaataattataattattataatttgaatattgctattattttaatattagggtttataaaacactcaaaaaatatatataatcacagatctaatcatgtttctaaaagtgctttagtataaaaaatcataaatcatagtttataaaatatttgctaaatcaaagaagaaaaatatgataacgagatgagtggaagcactaacctagagccattgttagagattatgcaaaaagtcatgatctttcaagaatacattatttctctaaagtattttctctaatagggaaggagagaatacaagaactcttggtatttcttgaggactactatctatttataggctcataatagaatgagtttttggtatttataatttggctcctcaataaactataaattaacttat

SEQ ID NO: 247131 - DNA, 704 bp, Cannabis indica
tccccttcacgatccacctccacttggatggctggatcttgttcggcgctgggcaaagtagcgtgccgagccacttgagcatcagatgcgtcagccagacacattgttttctttgtacgagccatcattcaatggctgggtacaagatctgaagaaggtgggctagaacgaagatgagggtggtcctcgttcagaagttgaagcaggtcttggtcgatccgatgttcgctctccaaaaactcacctgtgttaatctacaaaagacaacacacaagatgagtgtttggtcagaatatcgaacgataaacaaagaaaatatgccgaccaggagtactcaatagattaaagaacaagaatgttcaaagaaaagtcagaactcaagaagtttgaaattttcttgagttagggcaaaaatttcatgaagcttagaataagcaagatggaagaccggcgtaatgcagttcagaaagaaagcattatgaactataaatcgcatgaaatcatggcaaagaagaatcacagagtttctaaacctagggttttctacgaatgtcctacagcaaagcaaaaggtgcatttgaaatgtaaacatgcaaaaataagcataaagggaatcgaaaacttactcaagagtcagatatctgggtttgagaacgtcaatccaacgagtagcttcgatggaggcacttcagcagacttgaagc

SEQ ID NO: 247132 - DNA, 860 bp, Cannabis indica
agtcatgatgagaattaaaaaaaaaacagttgaaaacttcattatgtttcccatgttttaccaatgtgaaacttcatttataatatgtgaatcataaattgatgtagtattattcttcgagacataactaatcttcaataggaaaattcctaattttcattcataatcttttagtcaaatgatttcacatatttataaaagcaataagcgcatataatgatttcacataagtcctacctgaaaagtcaacgttcctgagattgcaccttctccaattattattcccacctgtgaatctatacaatattacattatactaaaacattccataccaaaaaagcagagctttgaaatcctaatctgaggagcatgcaacttattatttaagacaagctgttgagattgaaagggagagaggatgaaaggtttactaatgttttgaatgcttaggcctgaatcatcactcatatggatttgttgatcacctgcatagtctttgatcacatgcacacaaccattttttggtattcattctactgttagtttctatatcactcataaaatatgcaacaacaaaattcaattctatagataaacatattacatataattataagtgtataactatagatctaaagaatacctttgttgattcaaagagaagaattcaaatggcggaagcgtaccttaattcatagatagtgatgatcttaatccatcttgtagagataatctttgtggtgattttgggtaatgatcttccaagaaaacaagacttaggttttctaattttctctcttgatgggggaagatgagaatagaaattggcacttgtttcttggggaccactaccaatttat

SEQ ID NO: 247133 - DNA, 1749 bp, Cannabis indica
taactcatgcacacatcataacttctatagcattcagaattttaaatcaggatgtgtaacacatttttacacacttaatattggtgataattgttgaagttattactcatagtatcaagtgaatcctacatatattacaaaatgatggcaactaatatatattgtcatatgttacaatatttaatatgtatattatattatttataaataatataacaatctctcactagattaaatattatttttttagtaacaaatttgtaacttttgtaacatttatttaatcaatcaaaaatattatatcaaatttttatgagaaacacaaatcccttatcattcaaatttaatttaaattttacattttcatttccagtctaaacctcataccttggtgtggataatgtacttgtggacatggctgcttgagtggtcagttgcattataatgtagtttgagaggtacggctgttcttgttcttgttctggtgtcttataatagcaagagctaataaagtgaatattttggttgtttccttagaaaatcaaatatagaaaacagcaaactgatgttgtagacaaaaatgtttgatgtatttatgtattacatgaaactttacatatttttctttccagacaaaaaaataatgaaaggtgaaagagtttagagactagacaatggctccacccttgacgaattcagtaagagccaaggcaaccaagcccaacatggcaacccttccattcaagagctcagcatcagaagtcataaccccaccggacttggactccacactcacccctttgaaaaggggaaccaatgaagccagtgtcagaactatgcttgttcccacgaaccaagacactccaccgttgcttatctgagaaaacacatcctgacccttcgatagctccactaccatagcccccacgaacccaaccatagcgagtctaccgttaattctctctggtgctggcccactgaatgccaacacgtctgtgaatcttgtactcatcttctgtcaatcaatgaattacaccattatataaatataaatatgtgtttgtgtttataatgcttgattattactagctatacctttggctttggaggagaaggtgctgctgctggctttggttgtgttgatggtgctgactctgtaattggctttaagggttccttttcaccatccttatattcattaaaaacacaaaaacaaacaggttaagatttatatataatgtatacatagctgtgtcttaacatataaatatatatacctgggccatgcatctaactctcatgggcaaatgagtgttattcctgtacaaggtcttaggtgactctagagttgctctgttcttggaagcaccaaatgaaattgagctagctacaacagactgcatggtagccattttgctcttaagactttaaacaaaagtttaatagtagtagtagtagtgtttatagaaagttaaaagctttgtaaaagaaagagaaatgctttgtaattttcagttgtgttatttaagttgatggggctgagagggtttatatagaaaaagagtagaaagaaagtgatggacatttttggctccacgtctatgataagattttctcggagctctaagggccatgtggggtttggagagacgtggcccctaacttcaccatgttgtccttttcagggcttttgaggctacaaatggttagttagaaagtattttacttctttctgggtcaagtggcagt

SEQ ID NO: 247134 - DNA, 3711 bp, Cannabis indica
tcacattattttagactctagttattgcccagtttgcgacattgaagaggagagccaccatcatcttttcttcaactgctgtgtatctagggaggttgtgaagcaggtctttgactagtgtggagtagcagcctggcctttggactacaacaggtggcgctgctggttttctaacaagaatcctggtgtgattgttttgctctttgctgccactgtttacttgctttgggaaaataggaatttttgtgtgcataatagtagttgtttaactatattgaaaattgttaatgagattaaagaaatagttaaatacaggttgtatagcttaaagaataggaggattattcaagctgaaaaaggcatgtttttacgcctaattttgtagtggtcgctggtggttgttggggccggttgggtgtggccatgttgtagcttgttttggtctttgattaatgaaattttttctaagttaaaaaaaaacaacttaagtgtactttctcattaaaaatttagtatataattaatataattttttaaaagtaactaaatttatattactttattattttataagttattttagaaatctatactttattaagtaaacttgttcataatatattatctcataacttttaagtattaacaaaagatttttagtaatttataaaattagatggtatactttattttaactatttatttgttaattatatagaataaaaattagatagttacttttaattctatttattttctctagtaaaagttaaaaaaaatgcttatcacacatcaaaataatgatcttcaaaaataaaattcttgagctaaaataaattcttctgtgattagatttctttttaaaagttataagaaagagagaaagagataaaaataatacaataataaataaaatatttaaaatgaatgcttcaaatcaatgtattaagaaaaataataataataatgtgctcacgctaaacaaaaggacaaaataaaaaagaattaaaaaaacaaaaaaaacaaaaaagaaaaaaaaataaaaaggggctgttcactggcgctcgccacagtaggagcagccttttcaggagattttctaggctcgatagtgagttggtttgaagatttcttcttatagcagttgtttttgttcttttgggttctttagtagaacctgaggcttcattcgcctgggcatcacgtttttgggatcttttatttacaaggttgggattgtttagcatatcttccaaatcgagatccatatctgtgaggcaaaaaagatacatcagacacttactcagagacagataataaaaaaatggggaataaaactcctacttaaaggaagttaccataattattagaagacgacgaggaagaactataataattactaaactccctagaccctgtgatcatgtacatatcataagggtttattaaatctcaatttgaatctggatggctcgccctatccaagttggtaccatattgcttggcaatcccgtaatatgagctagtgcaactaagctgaacatggaatcgagaataccaactatcaaacctatgggttatgtgatctgtacagaaattgtcccatgtataaaaattatattggctatatttaaaggttactagtgaggtacgtgcagtcctaagtacggtaggtgaccatccacattgattacctcaggatgcttctttttcagcttcctgagggtttactctctggagatagtagacgcgagcaatgtaatcctggctttcctcattggctgggactgggaccttctcccacgaagagtattttggaaccttgtagtcacaactgtactcgtttgagccaaggaggttgacagtcctcagattggcctcgttcaaaaggaaatctactgatcgcaatttgaatggaagacccagcaggattttatggcactcagccatctcgggagtggggattggtcttttggtgaccgctttcaacacaataagtgtaataagtaaatgacctcagagtcataaatataaaaagaactcaaaaccaagtttttgagacagaaattacttacgtataatgcgaaatgcagtcgtgttgataggagaaagaccagtagtccaaaagaagttgtccttgaactcggtcttgtttggcaacctcacaatgatcctgtgatcatttgtgtgggtaccaagataataaaagccccctaaacatcgcttcctcgagggaacaactttgacaaaataaaaatagactatctcgagaggagtggggcactcccagcctaaaatatggtacaaaccctttaaacctactagagccctgcaagaacttggaatcaaatgaaaaggggcaattccaagataattatagaattttttgtaatactctctcaaggggagaactgttccactcttgatgtgctcgaggctccaagcgcctatcctagacgagcacctagtattggcgccaccgcagtcctcgcagattactctttttggtggaaagcagctgaattccctaagagaaacagatctaatgcagcatcctcacgttttcttgatgccgcaagactttaatacaccaccaacatattctccaatggtccttaccttggattcaataagctcagctttgaaagtgacattaggatcctagggtgatctttgatttacgaggcttggtggacataatttaaaaatcaaggtcgcctgatgaaaaagcaacagtaactcggggtaaaaaaaagggtctcgctaatggaatagaagataaagtttgaggttcaagccaagctgcatctggcagataacgatgtttaccctcagttatctcttgtaaaaattgtctataacaactagaaattttattatgattggtttttattagatgatccctaattttggcatctttaatctcaagtttggatgtgggtttttagattttgggttttaatggaagggctaagtctttaggacattcaatttctaggaaatcaggagttgaaatcttaaaaccagattgggacatattaacaaaaaaataaaattataatcccaattcctggaaggagttaatttgacttaaaccagaaacctaggaatttaataaacctaagttcactccttaaaaccccaaaaattacccaaaaaaaataaaatcgaaaccaaacacagtaaaagaagatgcaatcagaagaaaaaataaaagtatcaactcaagaaaaaaggaataacagagagtaagaaataaaccacttactatatttctgaagatttttgggcagtgaacaacttcgtgattgggatcgtgatgaatgcgatgatgggctctgagaatttctaagattaaagatgaaatttgaggaaatacgtagaaaataggccaaggacaatgagggcatgcaaggtgatgaaaaataaagatggttttttgcaaaaaaaaaaattgaaggttcaaaaggcagaaatggcgaataaagtattttcccttgagttttatacttttaaaaagggtcaccgttagattgaaagactaaagatctaacggatgagaactagagagaattggaaaagatgggcatttaatgctaatgatgtacctcaaaattataaaccaccaaaactcaaagcatgcaatttttcaaactggaattaagatgaaaatacccttgtaatcatttaaaaaggggtaaataccatttt

SEQ ID NO: 247135 - DNA, 768 bp, Cannabis indica
aaaattaaacaaattgaatcaattaacaatgaaataatttgaaacaaacacacctagaataaatataagagggctaagcctgtgtctagagcccacctaacttaaagactcaaggaaaaaaaagatttgtcccattaaaattacacatttttttattgattttgaaaaatatcatattttttctctaaataaaggttcaaaaatattttttttcttataacacactaaatttgaaggttgttaagaaatactaggttcaaccaagcaccaatgtagtacttgtctaatccttgttgggaacaatggtttggtcttctttattgatgaacaaagcttagaatgagagaaattaattaaagagtaaacaatctctttaagaaccattcttgaactctaaactctctgattttgcaacctgaacttggtgatagaaattcacttgtctaatccctaatgtttgtaaccgaaataactaataagttgagttggccaagtttagttaagttggtttagattttggttgacctatcaaagtaacaatataatattataatgtgtacattaaagtgggcaatcttaagttatagggcaaaaattaaaatgggccattttttgaggaaattatattgtatatctattttactttatttattttattttttacctcatttttttatattttttaaaatataccacttttataaatgatgtctctattagaccccttaggttaatgtaaattatatgctagagttaagtagagagtga

SEQ ID NO: 247136 - DNA, 489 bp, Cannabis indica
agcataaataaaaagcgctggcaaaaaagacttttcccataaatgggctggtaaaagttagattttagccacgctggtaaaattttgatctcttttaccaacgcagtaacgaaactgtgctggtaaaagtgacatttcttctaacgataaatattttataagctagtgatgtaggagcctgagttttcaaaaaattttagttagtggtgtcgaaattataggcttctcgccacattagaagtgtctctagcctaatgtgctcaattatttgcaggctacttgatcactaccctaaattattcgaaatttatataattataatataaaaagttaatatataaaataaaatagagttacgacaattcatatacaaaaatgtaaaaaatttccactagtagaaaaaaaaaatattactcagctccttacatatttataaatatatatagcacaattacttgttaggtgtatggcttaaaaattgatactatt

SEQ ID NO: 247137 - DNA, 2663 bp, Cannabis indica
catatttattcataattatagtggggtcattataatagaaaacaattatgattatatacttcgaatattttaaagtctcgaaatttaccagtgtattaaatttacactaaatgataattggtgatgtggtttacttatactatggcaagtggtatgtcttttcgaggacattggtaaagtagacttgtatcgaatgtatagatttacattggactagactgatattgaagataaaacggatatgatgaacttacttttatatcttttctaagtcattatcacttattagttaatcataaataaattcgatctgaatcatgatatggttaggctttaagctaattgttctattcaagttttttgtcttgtttgttaccagctgactttaaagtcaagcctacacttacatattgggacctcggtaagattataattgagtgggagtgttagtcatagatatgaaaatctgtagcttctatgttagaagtgaacgatagtttcctttgaaccatattaaaggtgttaaatagatatctcattttagtaattatattattttactaaaattcctttactagaaactaagagttgaaggatcaaataaaattgagggataaaacggtaattttagtctctactcattgtaaatcgtctataaagaattcttgattgacttaattataataatagataatttatagtgtatctatattatgtatatgtagagcgttctatacaatcaggagtgcaattccgaatctataatagagttatgaggcattaataagttataaaatttatttcttaaattttggatatacttattgggagattgattttataagctcatagctgccacaatatccagaataatgtttaacagtaggttacattaattgattatttaataaattaaaattcacattatttattatttatttttttaatttttgagaattttcacctagttaaaatttagatgatatagaaaataaaggttgatttataaatcgggaaatttgttgctagtaattaataataaatatttaaatatcaagtttaattaaatatggtaaatataaaaagatgtcacagttttaaatttattaggattaagtgaagaaaatagaaagttcaagtcgaatatccttttactttgatggcattgaagctattttcctatttgtatttttcgttttttttatttaactaattaaagaaaaataactcttccttttttttaaaggaaggttatgagatttttttacagtttggatatcaaaaattctaaaaaactctctcctctctctagaaattgccaatatgagtatctctttccctctagcaatttttgtgagccatatagtgttacaacacttgctcacacagttctgtgtacttagatcattatagaagattgtaataaaattgacgatttgatttagttactatggatttttggacagttgataagcgtggaaacgatttctctctttggaaaggaatccttgaggctcgtgatctgtgtgtgtctggtgctggaattctaattggaaagggtgaaaccgatctttggacaaagccgtgggtgccggggttcagtccggaggaggttagaagtagctttacttatgcaattactcataaattctcctctgtttaggatctattcttgccaagatcctggtcatggaatgtaaacttgataagagcttgcttttcccatgaagttgctgaagcgattataggcattaagcctttagaggaggatgaggatcgtgttttctggaaaagcagcaataaggggctcttctctgtcaaaaatgcgtactggctctctcaatgccatcggtttcaagaggaaaatatctgttggaagaagctcttgaagttggatctacaccctcgccattccctgttactttggaaggctttgggaggatgtcttgctctcaaaactaagcttaccttcctttatcaacatgacagactgtgttgcttgtgtaataatgagttggaaacggatttttatctttttctgggactgtctttttgctcgcagtctgtggtttcgatgtccctggggcttgcttactggaaaccaacatttaaactcttttgagagcctcttcctttggctcagcagcttcggggacccaaatatgttgagatatgctgcatgtatgattgaagggattcggcagtgtagaaatgaattcacttttcgaaacatagctccagactctgctgcaacatcttgcagaatccacaaacgtttcgaggagttttcttcggatgtggttgctactcagcactgtgaaagacctgatgtttattgtggccagggatagtttgaggcttgctttatggttgatgcttcggtagtggatcattctgctggtctggctggaagcagagttggaggctattcatcttgctttggtggtggctattgaggaacggtactcttcggtggtaattgtctcaaactcagcaatagatgttgaggctctgaatatcaaagagttgcctcttgcgtggggatcttatccaatctttcgcaaatgtgtttctcttttaaattccttttctcgtattttgtttaagtttactcctcgtgaggaaaactctgttgctgaaaggcttgcctatttggctagagt

SEQ ID NO: 247138 - DNA, 903 bp, Cannabis indica
atttaaatgttgatccaagttactcagcgaaacggcagaaaaggagacccttggattccgagaggcaaggggccctaaaacaggaattggataagttgttagtcgacgactttatacgcgaggtgttttatcccttgtggatagccaatcctgttctcgtcccaaagcctaacagaacttggagaacttgtatcgacttctctgatctgaataaggcatgcccaaaagattgtttccaacttcccaagatcgaccagttagtggatgcaactgctgggcatgagcttatttcatttatggacgcatattttggatataaccagataaaaatatacgttccaaatcaagaacatacaagcttcgtaaccaacatgggactctattgttgtaaaatctgccattcgacctaatcagcgagacgcagaaagttggaagttatacatggatggcgcatccaatgaacagggttcgggtgcaggggtaatattaatatcgccagaaggctttaagtttcactatgctttgagattccgatttgacgcatccaataacgaggctgaatatgaagctttgatcaccggtttaaagatagaagtcaaaaatctcatttgtcatagtgattcgtagctgatcgtgaactaggtcctcggggaataccagaacaaaggcttaaaaatggcaaagtatttagagaaagttcagaagaacttggaaagattcaattactttaaaatcaaccaaattctgagagaacaaaactccaacgccgaggccttagcaaaactggcctcacagaatgactttgatgaattgaacttagttccggtagagatgcttagcgagccaagtatatgtgaaactgaagacgtcgagatgatcaatagctctcctacatggatgact

SEQ ID NO: 247139 - DNA, 1601 bp, Cannabis indica
gaacgttctcgacaaagtatgactaactgcaaatccaacctatactcagtactctagtcatactgatgtggtagcaaataactcatactatctgatagcctagcatatatctgttggcatctcggtgcaactctatgtacacctcactgttgccctgatatgctaatcagatggctatagatttgcctaacatatatctgttggtatctcggtgcaactctatgtacacctcaccgataccctaatatgttattctgacggcaactatcatgtatgctaaacatatataaacatatgcatatcattatactaatcttaccttaatttcgaattcaggtgtgccggccaacctgagtggaacaactgctcggcaaattacaggctcctaaatcacatcgataaccacgaggataagtgatacgctaaatcacaaccgagacttatgttttaaccaaaaacctatctactgcaactcaatatggcaataccctaaactagcaggaaattaaccaactagaaacctgaaactaacacgaatcaaaaagctgaattttttgagaactttgctgcaaaaatcggtttcccggttttatatgtacctgtaaaaccggttagccagttttacccagaaaacctaaacaatcccaacccaaactaaatcgattccaaacttaaccaaactttccagacctgcataatataccccaataaacaatttctaagcaataaaataactacccaagctcataatctaaaatcaccattaaagctccaagtttgagttctaaaactccaaacttgctaaaccctactaacaaccactaaaacaagcgtaattcaacatatctaaacataatcaagcttcagaaaacaaccataaacaataacaacaactacagcaacataaaaaccaaaatcatgcaaaaactctaaacttaaaacttaagaactaaggaggaagttgctagagacttaccttgagtttggaaacacccaaagcttgctgaaaatacccaaagcttgctaaaaatactagaattgttgaagaaaaatcagaaccctagctggttctatgaggtttgaaggagagagagagcttgagagaaaaagtgatctttgatgatatttgattttttgtaaaatgagataactataaaaattgttttatttaattgataacatatataaaatcagatttatttacttaacatatgtccactaaaggacaaaatactaaaaagcaaaatgactattttgtccttcccacactacaaatcataaaaggtcacttaggggtattttggtcaattctaaattctcaactaatcccgaaattcccaatgtctgactacaatgtcacgctatactaaaaatattaggatgtgattttagtagccaaacatcgcattccaatgttgtcgggcacaaaacatgcaaaattatgaaatttcatatataacatataaaatgaattttgaattcaaataaatcatcgtaaattagtaattcaaaactaataatcaatttttataattaaaccctaattatctgttaatttctaaattaaagccaagcggtatttacatgggttgagaatgatt

SEQ ID NO: 247140 - DNA, 815 bp, Cannabis indica
gttaagccctaggttcattgggccatttcaaatactcgagaaggtcgagtaggtagcattatcagctgtccataatgtatttcatatttcaatgttaaggaaatatattttagacccgactcatgtcttgagttacgaatcccttgaactatagtcagacttttcctacgaggaacaaccagttcaaatccttgatacaaaggagaaggttcttcgaaacaagcccatagccttagtcaaagtgcgctagagaaacagcaaggtggaggaagctacttgagaattagagtctgacatgacgactcaatatcctgagctattcaggttagattttgaggacgaaatccttttaatggagggataattgtaatgacctcattttagaatatggattagtaaaggcaattagtgttaattattgatatttttataattgttaataaatttatttaattgtgggccccattattagaaatggccatttgagttataatttcacaattatggagattttatcaaactctagaggtattatttgtgttatatgtgaattatgctatttttatgaatttcgctcggggacgacggaaaatgcgatggatggcaatatgagtcacatgggtaagtctagaatgtttttcttagtgggattaatattggagataaatataataccgagttttagcggggttatagtttttgacaattttacccctaggctttaattagcttaagtttaagcaccatgtgcattttggtaatttggcaagggagggttaggtggctagtggcttgagtgacacctagccaattct

SEQ ID NO: 247141 - DNA, 579 bp, Cannabis indica
tgtcgaaatatttttattcaattattttatgacggtattcgttatacttataatattatctctataaataaattttttgaatagtttatagtgccgaaaatacgtttgaagttttttgaacaagcgtggtaaactagaatatcaataactctattttcgacattgtaaattattcagaattttttaaaagatttataaaaatgatactataattataactataaaaaaaattaaaaaataatattttcaaatataattttgaacataaaaattgatgaaaaaattgtaataaaatattatagggcaagactatagtaggacctagcaaaagttccctaccggtagggaactttttttttaccattgattttagatcatgtggttattatgatgtaaggtgtatactcttacgataggactgcttgtatacgattaaaactttatacatattataataatatttaattatatttattttctaaaaaaataatattaataattaaaaattttattaatttttattttgaattattttttttaaagttattttgaattattttttttaaaagttattttgaa

SEQ ID NO: 247142 - DNA, 1137 bp, Cannabis indica
taaataattaagtttatttttttcttacagtaataatagctaaattatattttaggaaacaataataatactaaagttatattttaggaacactattggtactagccattacatgtcaactcattattcacatgtatttttttattagtatatttaaattattttttaaaaaaaaataaaaattcataacgaacaaccagagattgccacatggcaatttatttaacattttaaaattaagtatctatagagttccaaaaatataacttaaatattaatattgtcaccaaaaattaaaattaagtatttatttctaattaaaaattaaatttaagtatatatgccgcaaattattcataatataattgttaatatataatatgaatattaatattacagtatcatttttagcctcaagaatttgctttttctaatactttattcaaaaaagcattttttttaatagaaaataaaattgggttgctaaatttctatttttgtgatcacattgacatatttatatttaaaaaagacattaatgaaagtattggaaaattccatagtagaccctctaactatttttgcatctaagaaaaaaaaagtttatgttttttttataatttcgtacgttataattatttaggaccacttgtaaatttttaaaaattttcaaattatttacagtgccaaaaattaagtttattaaactgttacttatcacatacatgattatgaaaaaaattaactaaaaattattctatatatataaccaaaccaatagaaagtttatcaaaatatctctttaaagacgtactgtaaacttacctaaaagtattcatataccaattaatagtattttttcattaacttagtgtaactttatatgtgtatagtatatatatatatatatatgggaataaaaaaaattaaatcattattattagtataactagttgacaaatcttttaagtactcattttctaattatgtcagtaaaatttcataaaattctaagataagaaagaaaattaacaattaagaataatattagtcattagcatacctcggtcatcatgcaatgtacgtgtgttgtatatttgcagtcagtgcttgtgtacacacgaaattgtggattcc

SEQ ID NO: 247143 - DNA, 908 bp, Cannabis indica
tagatctacgacgcatatttgttggtcgctaatattggctcaggtgttctccaaaaattctttatggcagcgaatcattgcttttaaacactcataaaagtattttcttatagttttgtttttcgtgatctattgaaactaaaaccaacaactcggttcttatgatggtgcgctaaaatatatagaaacattgctacaatctcctcgatagagacatttcgtgtctttcttagatttcccctaatactgagtatgtgacataacctttgaaatgtttgtctatccattcttaattgtaaaacacaattgatatcacttgcatacaccaaatcatataagttttcaaactgtttgtagactcttattatagataatggtcgattgagacatcttttagaatttttccatgcataagcactcacaatagcacacactgctaaaataatatctaagattataattaaatcctgcactacaataattattttttactttcttgctaagcttaaacgagccattgatttacaaaaaaaatcaaagcaaaaaaataataaagaaactaaattatatgacaatattgacataatgaataatattttttcaattatatgtatgatcggcagacatatatatacatataatatatttttacttcagtgactaattataactatgtatatatagaagaagctttcctttcctgggaatttaaaaatgatcttaccgtgaggtatttaactgagtattatattattggtaaagcatacaatattataatagaatcgtatatctttttaattgtgggatcttttttgtcctcttctctgctaatttttttgtggcacaaatcaaaatttgtcacctcagttaaaatatcagctcacaatgggtagtggggatgtatagat

SEQ ID NO: 247144 - DNA, 1894 bp, Cannabis indica
aaaaccttctttacctttcttccgtttgaaggaatgaatgatctcctgcactataacattattatcttgaatattcctaccaggaacaaacgccgcttgggtagggcagattaaagtaggcagaaacggttttattctattcgcgactatttttgaaataactttatagatgacgttgcaaagggaaattgggcgaaactgaccaggtctctttgggttcggaaccttaggaatcagaactacatttgtagcatttattcctttgtgcatctggccatttctgaaaaaatccgaaactgcatcacaaaagtcattacccacagaatcccaataatgtttgaagaagagtactgacattccatccggccccggtgacttatgactattcatagcaaacaaagtactcttgatttcctcctgcgaagggcaatgaagggattcctgtaggtctagagaagacaacctctcagcgaacaattgcctacaattcatactcgggtcaagctcagatccttcaaagatacttttgaaaaagtcaataaattcacgacctatagagtccctatcagtgagccatatattatccttactcaagatactttcaatggcgtttctccttcctctaattgcagccgaaagaaaaaagaacttagagcacttatctccttccttgagccaagaaattctggctcgttgtttccaatagagggctttcctggattgcatttcattcagcgacttgcggacttcacactcctggttccaatcccgagcacccacagggagtctttgtatgctatccagtttctgctccaggtctttaataacccaatcaattctaccatactgcgttctgttccaatgcaaaagcgcaagcctggtagcccccagctttttaaagagacgagctggagcccaggagtgaatcaccgaatcccaagcattggccacgaccaatttacttctatcatccctcgtccagccttcttcgaacttgaaaaatcttttaaaaggagggggattaccattagtgtttagaaaaagtggacggtgatccgaattacaagtatgagaagagcatagagtagctttggggaatagcatagagtagctttggggaagagcatagtacttctactttacagagtgtgtgagtgaactaattcatcatcaaccgtttcataagttattcgttttggaagttgagaaaaaatgctcactcactcatcaatgtcaagggcaatttcggtaatttcttactttgaaattgaaaaaagcttactataaaaaaattcaacaatgcacattttatctgtttcgctatttgagaaaaaaaaaattactctaataatttttataatcgtttaagttgtagttatttaaaataatttacaaaatttagtacaattagtaaaatttaacatgccgaaaataagattcaaataatttatttcacacgcgtataaaataaaaaaatcttgcgtacaacaaagtgtttgaactctaattttaccacattaattttttttcaaatcttataaaattttacaaaatgtcttaaataattacaacgtaattttttttttccaagatatcaaaattgataggatacatcaatacaccttttttaaggattgcattgtaaaagaaaaaaaatgccacattagcttcaagtttgatatatatagggaggaaaaaataagaatagggtgctctaacaatgatactcgatacattgtattagtattttggtttttttttttttttttattttttgtaagaaaagtactattacattaatttgtgagaattactataataacagtcataagtggagtggaaattcctcaaccaagaacaatcagtatccaccgtaagagcatacttagccaaa

SEQ ID NO: 247145 - DNA, 1495 bp, Cannabis indica
attggtataaaatcttttactttcttttgtttgagaaaatgatatgcatcttattcatgaccagacaaatcatctaccaaaatagcttgaaaagtagtaggaacaaacttcccaccatagctacgaccttgggaggaaaaagcggtagtcgctaaccaattagctgtcatattcgcagatcgtttaacaaaaacaaaaaataaacattaaagtatgacaatcaaaaataactaaactaaaaggagacaataaagaagtcgaattatacagagcatcaataatgcttttacaatccgactcaacaacaacgtgatctaggccccgttctttaatccagctcaatgcttccttcaacccaattgccttgccaaaagaagagagacacgaccaagtaattgtttagaacaatgataaatgacagctccatgatgatcatggaccaaccctccaatcccgaaataaaaaggcacagaagtgacagaggtatctatattgactttaatcaaattaatactgagaaccgaccaatgctccacacgaacacaaggactagaatccattgtgtttgcagaattttcatgagcaatcttctattgattaaagtaagacaacgtaatagccaccacccacatttgtagcagaagttttactaggccaaacaagcccatttcttactttccaaagagactaacaaatcactgcaacatgacaaatcaaagtcttcgaaaatcctatgaccagttgataaaactatcataaaaaatatgtggctgaaaggttgcaaatagccccatcaacccactgccaacaagctttgactaaaggatattcaaccaaaatgtgaaggattgattcattcataccttggcacatcgggcaaataacgaccacatcaacatgctgaccttttaactaggtcagtgttggtaaatacccaaaacatgccctccatagtaatcctttaaccttaggaggaattttaagtttccataatgccctccaaaggcccaaattattatcttccgaccacctgccatgaagcacctggagaagctcgtaagcactcttcaccgaataaacccctaaagtctctttaaaccaataccaatgatccaacccaagattatcattcagcacaatactctaaattaatgatcaagagcattaaacaaatctttaagaatttcatcatcccacacccgggcccctcccactataatctaattgaccttcgccccctccaaactaggatggaaagaagtaatcttagattgctcctcacacgaaagccacgactgccccagaaagttaatagaagaaccatcaacaacgcaccatttggaaccaactttctataactcttgagaagcaagaatacttctccaaacatcactaggatttgaccccaactctgcaaacaaaaacaatctacgaggataataccgcgcttaaaatatacgaccaacaagcaaaccagtgttggaaattattttac

SEQ ID NO: 247146 - DNA, 1510 bp, Cannabis indica
gcacgctaaacatgtaaatacatatgcatactgttatactaatataacctcgattctgaattcaggtgtgctggtcaacttgagtgatacagctcctcggtgaattacaggctcttaaatcacattaatcacaacactgataagtgacatgcttaatcacttcccagggacttaaacttgaaactaaaagtttccctatcgatgactaacaaggcaataccctaaataacacaaaaatatgaaaaactagggttcccaaaattgccccaaccggtagaccggttccccaaccgaaatttcagttctgggaaatttcttggaagcatagcagaattctggttcctacaggcctccctgaaccggaattccagttcagtgcaggaatgactaaaaaattcatatcttcaccaattcaaactttccagacctgttctatacagcctagagaatattatcaaagcaataaaaccctgctacaagcccagaaacaagatttgccatgtgagagcaaagcttgaactcataagctcaaactttgaacaactctcaccacaagcccttaaatcaacttaaaacaacttaaataagcataatccaacataagaaaacaaacccaaacacaaacaacaaccacaacagctaaatcaccatttcacatttaaaaaccaaagttttgagttcaaactccaaacttgaataaaaccaaccaacaaccactagaacctgcttaaatccacatatctaaacacaattaagctttagaaaacaacataaaacaataccagcagctacaacaacaaaatcaccaagcatgcaaaaattcactttccttaaacttcaagaaaatcaagaggaggagcaagagctataccttggcttgcatttactaacaactagctgagcaagacttgaattactggaaacaatccaaccctagcagccccaagaaattttcaagagagagagggagagcttgagagaaaatgtaattttccttttctttaaattttgtaaaatgaaataacatgggttggtttaactaaaaagatcaaccaagaattaattaaattcacatttactaagtgtaacatagtccactaaaggacaaactacatacatttttcccctccacactaaaacaacataaaagatgtactaagggtattttggaaaattttaaattcccgactaaactcgacatttccaatgtctaactaaactgccttgctatactaaaatactaagatgtgattctactgagccatataccgcgttccaatgttgtcgggcactgaacatgacatatattaaatactaagatgtgattctactgagccatataccgcgttcatatatactaaaatttttatatatgacatataaaatacattatgaattcaaataaatcatcataaataattaatttaatattaataagtaattttcataattaaaccttaattatctggtaatttttaaatttaaactaagcggtctttacaactattcc

SEQ ID NO: 247147 - DNA, 655 bp, Cannabis indica
aacatcgagttctatgtgcttggcccttgtgtggtatacagggttggtggctaatgcacttgcacctaagttattgcactagataacaagaatacttagtaatttaaacttcatttcagtcaataattcctgtaaccaagctaattcagcaacaagatgagccaaagctctatacttcgactcaatgcttgagcgagccgagagccacaatagattgtttcttagaggactaattaagaaattaaggactcgccaaagtaaacacaatatcttgtaacatattttttatcgcagggacaacaagcccagtcaacattaaaaaatccaatcaaggatagcctttcactaggagcaaatatgaagactatggtgcatactttagattattttcaagtagttatgaggttactttccctttctcatcagttgtctcaactgtgatgaattcttgcggacaagcttttatatttgaccattaagatagcgttccaacacaaatgatggcaaacaccatagtcttccatagaaagaagttgtttcgataagcttgagtgaaaagagagagtcgccgaggtaggtgtaacaacattatggtcagcttgagaggtctaactctgtcgagtcgacattggcgaggacctgaatgctctaatac

SEQ ID NO: 247148 - DNA, 663 bp, Cannabis indica
aaattgttttccttttcttcattaaatgtaacctggtccttttctttcagttttatctttccgcaatatggtatcagagcgggaaagttaagctttccctcacgatcccttctcccttccttgctgcgttctcttctccggcaacgacggtgtcttcctgctctttcttcctctttctggttttgtgattctttcgttgctgtcttctgcaattcagatcctcaaatggcgaacgatgatcaatctgcccagtctgaaattcggtctctcaatccagacaattcttcatctcgtgacaatcaagattcccagagaaacaatcaaagaagtccacttgaggatcctgccaatccctactaccttcaccacggtgataatccaggaaataccctgttgtctcagctcttaacaggtcaggaaaattatgtaacctggagtagggcaatgcaactttcaatctctgttaagaacaagataggattccttgatagttctattcctaaaccctctcctactgattttgttatgtataatgcttgggttagaaataacaatattgtcatttcttggattttaaattctgtttctaaagaaatttcttctagcatactctatgatgacagtgctgctgctatttggaatgatcttaaagtgagatttcac

SEQ ID NO: 247149 - DNA, 1313 bp, Cannabis indica
aaactcgggaaaatatttacctcacgcatgggcacaggttgcctcagtaaacctgagcccatgaggcacgcgaggcataaaagagatccgaccaggtactgcaagtaccataaagacattgggcacacaacagacaagtgatgtcagttgaaagatgagatagaaagtctcatcgcgtgaggccactacaagcaataagtgaagagacagggcaattgacataaccagcccaaatcgcccaaaaacctaagcaaccagggattacaacctcctcctactgaaggagaggatatcctggttatctcggaggggccgcatatcacaggagagagcaacaatgcccaaaagaggtacgtaaaggaaataaaaaatgagcagttagtatttgccccagaaccttccaagaaggtaaaaactgaagaacctccaattatattttcgaaggaagatgagaagaacgtgagataccctcacgtcgatccattggtgattactatccaactcaccaataaaaggataaagagggtgctgatagataacgagagttcagtgaacatcctttatagggaaacactgaagaagatggggctcgaaaaggcgaaattgaggccttgcatggctaatctatgagaattcattggcgacattatctccagtcaaggtataatcgagctcgaattgaccttgggtgaggcacctctatccgccaattatgcaagactttctggttgtcgatctgccatcagcttacaatatattactgggtcgtccagcattgatcagactatgggtagttagttcgattaagcacttatgcctgaagtttcaaacactggagggtgtgggtgtaaggcgatcagatgctggctagcgattgctatcgcatagagctgcaacacagaaaagtcggtcactagttaatggcagtcctggtagaagaaagcaaaaaagggacgaagatcttgatcctcagattcaagatgaaagaaacttattgaaaccaattgaagaattggaagaagttattctggacccaagaaatcccacaaagtgtgtttacattgggaagaacctggacgagcagttgaagtagtagctaataagtttcttaagagtgaacaaggatccattcgcctggagccatggagatgtgatagggattgaccctaatattatctgccatcatttaaacattaatccaaactacccagcaaagagactagaaagggagacccttggattctgagagacaaggggcactcaaacaggaagtggataagttgttgttcaatgactttatacgcgaggtgttt

SEQ ID NO: 247150 - DNA, 1656 bp, Cannabis indica
ttattaccggcgataccattttcgctaatagtaatataggaccaattaataccggcggataattaccggcggtctcctctattattaccggcgggtggctccgccggtaataccaatatttgttgtagtgtatgtcaagtttcagagcattagcaaaccgtaatgcaactataatgcaacttttagaaacttaataaaccaacaatgttttgatgtatgtgtctgtacactacaagaaatatcacttttgccaaaatatttttgtgttggcaaaagtttggtattgcgctggtaaaatggaattcacttctgatgtgttggcaaaaggggttggcaaatctacattggtattagaacttttgccagcacaaaatgaaaagcactggtaaaagttagattttagccactgcaattgtgtgttggtaaaactttaatatttttgccagcgcagtagcgacctgtactggtaaaagtgacatttcttgtagtggtaggtgtatgcgaatttattatactattcgtgatttgatatgaacaaagtcacattagaaatctggaaaataatgtcaatgcaacgagataaatatttgtatatagtattatattatatattttttttagatcatacctgattttgatttatcgggacactcatatctatttattagagatctatattttatgaatttgaaaattgataataggaggattaattttatgggatttaaaatcgtaatttagggttgaatttaagcttcaaactaatttttttgtatgattctccataaatccaaaatttttatgtggttggattgattgtgatcttcttctcaagttaagtcaccaaaatttatggtgattcttcgtctggttggcgtgctggtttgatcgcttgaagttaccgttgttgaagatggtggttcgtgcagctgaatggtattagagcaaaaggtattctagtaattttttattgttaggctgtataaaagtttatagagagctggtctaatattgtataatacttttgtctttttagtatatacccgaaaaaatttctaattatattcactaccaaaaaaaaaaagttatctttagtgacattttttagtcacaacaaaaaaattttgtgactaaatgtgacttttaaattaatctcaataaaaaattatttatgattaaaacataatatttgtatacaagttgtcactaatttagttttagtcacaagaaatattgtgattaaaaatatataatttaatcataataaattgttatttttgtgactaatacctttaactacgaattttttagttataagaaaaataatttataatttgttataacttcaattttaattataagttgttactaaaattaagttttaatgtagtaattatttaaaataaataaattcacccataaaataatatttattgtattaatatcatagatataaattgggttgaagatcacgtggaataataatatttataacctctataaaagtgagaataattttaggcttttactatgtaaattacacaatcaaccttcattaaatattaaattacaaactttttttttggatgaacaacaaaccattaatatttttgtatgctttcaaaaataaaaaattatattataatcatctaactt

SEQ ID NO: 247151 - DNA, 1823 bp, Cannabis indica
actaaaaattaacatttatattctcttgccgtaacatagatatttttactttataaaatttttattgacaaaaatactaactttctatattttagggtttcatcatcatgaaaggagctcttttgcttcacaaacaacaaaaatcaaccctaaatctcaccaatttaattaaagaacaatggaagaaaatttggtagatctccataaacgttggtaagaaatttattgtcgatctccatgaatgccgataattttttactttacaaacaatttaaatattaaaaatttgtcaaaagaatcatttttatgtaaaaaattccaattcttcaaatttagttatgagtttatatttaaagtaatttacagtataaatacttaagtttaatttatagttacaaatataaatacttaagtttaatttatagttacaaatataaatacttaagtttaatttttaacgataataatacttataagttatatttttaaaattctataagtacttgagttagactaatatgataaattatttaacacttaacaattaggtatctacaaaaattttagaattataaattatgtattattatcgtaaaaaattaaacttaaatatttatactgtaaattagtattcttattattattttgataaaccaaggtttatttatgaaattgaaaagaaaaatagagtgatgtgtggaagggacatgtgagagttgtacaattattaaaaattcatggatgagatttatatatcccattcccacccactttttcttctttaatttattactcaaagctactttactttattttttacctttatataactaattaaagaaaacagtaaaaaaatgtacaaatgtttttggatttattcttttaaactaagggacaatattattgttatttggcattattcatttattatatattattattattattttggcaattatttcatttattttatgtatacttggaaattgataatattggaacattacgaacaaattgtctcatttatcataatgatacttaattaatcttcattttctttaaactcagtctaatattaatttgtattctcttcactaattaagcaaaatatatagtattatcatccttgatgaaatgtttttttttctttaataaataaggattatatatatattatgactcacaaaataaatagatattgttatattatcttttgcacaaaatttgagaattaagttttggttttccttaattatggaattattgatgattagctaagcatgtttttagaagttactagaaaagtgtgttatgttcatatatatttctttttggtttagtccaaactccaacattttggaaagctaatgatatatttggttaattaggtcaaatcccctaataatatagacaaagtctaatctaagtggaagaaatacaatgcaatcaataaataaaatcataccccattcacttgatatgattctaattaataaagtttatttttatttatttatttttctaaataatgcataatcttttttatcatttttttaagagctatatatatattttagacttgacttgccttcaaagcaagagattttgcatgtacaaaaaattatatatatgaggtcattttaatttggaattttaccatgaatactcatctgagttttgttctatatgataatttcaatttttaagattttttttttgagttctcaagtttcatataaatagtggcaatgaaatttttagtttaatttttcacaaaaatcctaatttttagatgaatttttcttttatgtgtaaaactattt

SEQ ID NO: 247152 - DNA, 1544 bp, Cannabis indica
ttaaacaacatacttgtgagtaaatctaagatcctggtaaaataatttttaacaccgggccgggctgggctagaagcccgataagagcccgaataattcgggccacagtcaggccgttgggccgggggcccgacccgacccgcgaaaatagcccagattgacattcctacataatatgggttcaacagtcaattcatcagccattcctccagtagtcaattcgtcaaccattcctccaatagtcaattcgtcagccatccctccagcagtcagtttgtcagccatccctccagcagtcagttcgtcagccatccctccagcagtcagttcgtcagccatccctccagcagtcaattcgtcagccatccctccagcagttaacttgaccaacctgactatccccggaagctctctaaaccaacaatcccttactagagcaaacaatgcaataattgatttaacaccttctattgtgaatgcatgagtgaatgttggacctactcaagaggagttgattgaacaaataattgcacgaaaactggaaggcatggaggccatgatccaaagaatcccaggagggccaactccaatcaaaaagagcctacttagaagctttgcgaattcaccctttgtagatgccatcgccttggtcgaaatgccaaagaagtttgtgctcccactaatgaaaatgtatgatggaacgactgatcccaacgaccacatagctagctacaagtagaggatgttcactgccgcaatacctcacgagttacacgaggcgtgtatgtgtaaagggtttgggtctagtctagttggcctagtccttcagtggtatacaaacttgtctaataattttattgcttcttttgctcaattaactgacatttttgtagagcaatttgctagtagcaggaaactggagaagctatagaattagacagagaagggacgaatcgctaagagactatgtagcaaggttcaatgccgagaaagtgtccattatagcctacaaagtggacacaaccgtcacagccttccgaaaaggccttctggtagaatctgatttatataaagaattaactagataccattgcaggactatggaggatgtgcttaccaaagcatgggctcaaatcaaatgggaggaagatgaatcgaacagacaaccgatctccaactactcaagttctcgtgagaatcgggggccaagatgagtagagggtaagtcatcttatcatcttgaaccaaaccccaccaacagatctagatcattttaaggtagtggaagagctccgccccaacgatcacgtgattacccgatcatgtggacagtcaatcgggggggtttaccgagtttcggattcaaaaaaatgaaaccgaacccagacccgaataggacacgggttggcgggtttcagttggccgggttgactgggttggcgggttgacccggtcaactctttaaaaaaatatttttttattcaaataattatttcttttattttttatttattaaattaaacatatataatataacaatttta

SEQ ID NO: 247153 - DNA, 533 bp, Cannabis indica
cagctgagaattcagcaaagaaaaaatggtgtttccttgagctttctggtttctttccttacacagtatctctcttttctcaatcttggacacaactaacttagactggtgttggcattgttctcttttcgtgtgtttgttatcgagttggaaagaggaggtttatatggttgtgacagctggacaagtcaccaaccgtatgctgagttgtcaaaaataacagttaattttgttatggcttttcaaagtagttaaaaaaccaacagacaattaatttaataatacaatattttaaaaatatattacactaaatttacaaaattattagatagtctacattttattagaaatcttcatagtaaacctccttaaatatcgttttggtaaattttttatttgtttagatatatagtagttcaattttttttttttttcatgatcgtatattgtagttatatcaaacccttttaaaattttcaaaaaatttcaaatagtttatagtaccgaaactaaagtttaaacagttacttacc

SEQ ID NO: 247154 - DNA, 940 bp, Cannabis indica
ttatatatatattattctcttattatatatacatattttatattgcatgtgttcttattttcttccacctttcttatatataacatatatagtgtatatattatatattatattgttgtaacatttatttaatttctttgttggtccttgtattgtattgcaatagagttgtaatatcttgattttcttccattgttataaaatctctaacatataccaccgcataggaattggctgacaaaatataatagcatatctgagccctattgcctagtttagtattattattgtattgtggtcaaattattcttgtgatattgactccaagctagcttgacacacggtcaaatatttagacaaaagtaaatttgaaaaaataaaatcattttgaaatttgacacatcagtctttttaaagcatgaacttggagtgaaaaataagcattgatgaagaaggattagtttacttatctaatatgttattttagatcaattttaaacaattacacattttaacttaagggttttttcttctagaaatgtccaatgtattaaaagattatttaaactacacatatgcaatgcaacatattatctacattgtatactcctatttaaattgtattacattgatttattaaatatatatatacggatatgatgtcgttgcattatcatttaataacttctgttaacttttcaaaatacagcggtggagttaggcatcttatcttttatttatattttcaaaaatttatatatgtgttacatagttttttgataattaaaaatattatgtgcatgattaaaatttattaaaaataaaaaatactatgtgtgtaattaaaatttatcaagaaaaaaaataatatatgtgtagaaagttatcaatgatatcagtggcggaactagacaaagacccaaggaggggccgaaacatg

SEQ ID NO: 247155 - DNA, 766 bp, Cannabis indica
ttaatagatatgcggatactgttacccataagctagctaaatatgctctttcgatggatgctcattacctcatggttgaaggaactttatgtctattgtattataactcttattttaatataatagcctttaatctacaaaaaaatgaaatgttcttttattttttttcaaaaatagaaaataattattcaattataaaaactggaccatataggataaataatacactaattttcctgcatgattacaaaggaattatacactaataaattcctatgtgaaaaagaaaaaaaaatacaaaaaatttactttaaaaatgtataactaattttacatggggcgactgatgaagcctctcactcaccagtttggtaaagatgcaaaagcaacgacttcttttcctctcttcttgacttgaagttgttaattctctcaatatatccattttcatcgtcctccagaattcatgcctctgctcttaaaaatcaaggaatttagacgagttcagcgaaaacagtatttggcttttctgaaacacatcccccgattattattattctctatcgtcgccatgtttttgtcagtgtttgcaagtaatgcaatcatgctttccaaagcttttggtttgtaacttactcgtcatcttccgaatcatcatcttcatcttcatcctcccaatcagattcggcctcatcatcttcatcttcatcctcactctgcaaacaagaaaagatatttttaatccatcaattcaaatgaccaccaa

SEQ ID NO: 247156 - DNA, 1690 bp, Cannabis indica
aatagtagtgttaaaaaatagagtgcctataggccaaaagcaagaacataaaagcctcatggccaaatatgaatgaaaaattagttcaaatgcataaggccaaggctctgtaagaaccatatagctagagaagaattggatagagttcctagaggaaccacgtattaggataaggcaaggtagagttcctagcaggtcccaagccaaaaggcagagttccttgcaggttccaagccattgacaagactttggacaaccgtacccaagggtacttgccaaacaatgtcattgtacaaggctgggtatcagtgaagtacaagtctcaagtgtaacaacttagataaatgttgagtcttaagttgagcatttgactataatatactcaccattaaatttcatacagagtttctaaggaaaccacgtatgagtctgaggttgtatatgcctacaaggccatgacatgattcttaccgaagtcaaaagaggatagaaagttggccacctgcttagaaccaaggcctaggccgaccagggtttcaaagcttcaagagggtcaaccagggtcccatgactcaaccaagaaccagccagggtcaccaaacccaggcatgaactggctagcttcctagggtgaaaccctagagctggctaactcccatgattaaatcctaggactggccaggtctcaaataagacctactaggtccggccaaggttagttttgaattgaaatgtgtgtgtttttttttttcaaaatacaaatatgtacctcgtgttcttcatgactcaaagagtcaagaatcacaacgaaagccaaaattgaattttttccatcaagaaatcacacattctaaaactgtcatgtggaccaacataccaataagattacaatttaacatgggaatcaaaaaaaagatttaagagcttaaaaagcttgaaacttataaatggcaggtataaagatgagatatcaaagaagagaagatgaggcatacatagagagaaaagatcaaagatttaaaagcacgcatgccatacaaaaagggaacactcgactagataaggctactacaagcaagacaagagctagaaagtcactatccaaccagatgtacgaacagatacttagagagcaaatattatcccaaattttgtccacatgacgtggcatgtgcacattagccaagacagagtacatgtagaatacaaccttaccaatagtaagacaaagtctccttacgaagtatggcaaaactgccaagtagcaagcgaaagaagttaagtgagttgtcaaaaagctataacaccatgtttggccggccaagggtgtctataggttggccaggatgagcttatatggtcggccagggttcgagcacaagccggctggccaaaaggtgactttcaaaccaaggaagggtccgttcaactaaggaagcctgacctctacaaggaaaaggtatacaaaagttggcctccatctccaaaggctagcctccacttgtcaaagttggcatgaacatgacctataagatcttggcaggcatatggccggccagaccctggtatgcacatggtcggccagaccctggcaggagcatggctggccagacctcaacctacatagattgtatggcctgccagcctatatcctataggtacatggccgaccagcttttccctggcaaga

SEQ ID NO: 247157 - DNA, 658 bp, Cannabis indica
tttgtaaaattcaaggaaggcctctgtaacctaatctgggtcatgtactctccttccatcttgcctttcaatagataggatacgatattgcctcagtcttcttttaatgcaagcatgaaaaagtgttgaattacaatctccttgctgaatccaatctgcttcagctttctgttgtaagaaggacatgtagtctccctgcaccttggtgagcttttctctaagttctttttcttgtagatgaagcttaggatcaagaggctgtttgtgtatttgactctgaagaagatccagatcctgcttaattcgaatgacagcactttgcaaatcagaaaaaccttctttgttaatctccatgagtcacactttaaattgcttcaatttagtcactacttgaaacattttggatcccctttcatgttgcttccacacttctttcaagtaagtgtcatacttaggatgagatttccacatcctaaagtatttgaaaggtttttttccactcaccaatttgggatagattgataaaatacccggagtgattgtttaggttaagatgcatagagtttaatctcaaaatcaattaacaatgagaatagcatatacatcactacaagaatttcatgcattagcagcgggggtatgttggaaatattttacc

SEQ ID NO: 247158 - DNA, 619 bp, Cannabis indica
ctgcatactttgctcatcctcgccttgtgggtaacaccccaattagatgaatcccccaatattgcagatgggcatggtaaggtcatcattctcaactcggctggtggtacgtgaggtatatgtaaaaacttttgacatttatcgcatctcttaatgaactcatgtgtgtcttaattgattgttggccagtaatatccttgacggataatcttcttggataggctctgccaacctgcatgatctccacagaagccctcatgaatctctttgattattttgcttgcttatgttggtaacacacatcgtaagagtggcatggaataatccctcctgtacaatttcccctcgaccatcgtgtagcgaggtagcgagtataagagtttgcatgcctcgattttttttgcaggaagttctccacttactagatacttgacaattggtgtcatccatgttggcaaagtgtctatcatctcgatttcttcctcttcacatatgcttggatcgtctaagacctacaccgataccaaatttaacttatcaagatcgcattgagatgctaattttgctagtgcatctgcattagagttttgttctcttggaatttgttcaattttaaaat

SEQ ID NO: 247159 - DNA, 858 bp, Cannabis indica
gttggtagcactagttcatgctttcaaaagtataaccaaccataataccacatgcactcaataatctggcgtactagtattggtagcattggttcatactttctgaattgccaaacacatacattcacgatatcaagaggcaatcatatatacactaactatcattctaacgtatatgtcatacatctaaaaacataaaattaacatgtacatatgtatgtgtgctatactagtgttacctcaattttgattttaggtgcgccggtcaaccttagtggaaatagctgcaggtaatcgaaggccctaagtcacatttccaaaaaaacaaataagtgttgccctaacactttcgggaacttaaatttacaactaaaacttttcctagtgatatacatcatggaaataccctaagtacatagaaaaaactcaattgggtcctaggaaaagtcaagattatggaaccccaaattctgcctaaatcgaatcgcccgaaactcaactatcccattttaaaacttgcataactcctgaaattctaagaaaaacgttacaaaattttgcaggatatctaaaaacatcacaatgaacatttttcatgaagaaaacttaatcaaaatctcaatagaaatcaaactaaatggccgtcctaaaactgcctaaatcagatggcccgaaactccttgtccgagtttggaaatcccataacccatctaatccggatccaaacattaccaaattttgtagagcgcctaaacacatcataatgaacatatttcatgaagaaatcttaacccattttgcaatagaattcaagtcatcacaaccaagttaagtttgagttctttgaactcaaacttg

SEQ ID NO: 247160 - DNA, 1395 bp, Cannabis indica
ctgaggggaaaatcatggttgtattgaaaacttttcggggacttaaaatcaaaactaaaagtttccctatcgatggttaacatgttaacaccctaaatatttctaaaatatgaaattctagggtgccaaaatttctacaaccggtaaactggattccctaacgaaaaaatagtttctaagggtgctacctgggtgaacggtagaccagttctacagggcaaaactgaatcgatcgaccagttcagtgcaagaatcctcaaaaacttcacacacaactcaattctaccctaaatcaattcaaaccatccagatcacctaattaagtcataacatacctatttcaacaaaaaataatagctataactccctaaattcgatttcaccattaaaggtccaagtttgaatttaaaaactcaaacattggttgagcacaatcacaaccaacaaaattaagtacaaacaactcctactaacttaaaatcaactcagaaaatgaatcccaagcaacttaaacataaacagtgccataatcacaatttcacttcaaaattaaactcaaaacctagaaaacaaaggcgtggaggaactagggctcttacctttgaattcactcatgaaaaatccttcaaagtttgctgaaatcctcaagaacaagaatgagaggcttgagttctactagtttttctagagaggccgtgaaagagggagggagacttggagcaagggacatgcatttctaattaattttttttatttggctaaagaaatcaaagataagaattaatccttttgtcttattccccaataatatcagcctaaatgactaaaatattaataaaattccacaaaataacaatttacttaacttaaaatgaaatgacaactttgccctttcttcaccacagaacaacctaagaacttaggggtaaaatggtctaaaactacaaccccgagtaactccaacattctagatgtctaattatatgatctcgttaaattaaatattttaaaccatatctaagtgattctataggccaaacgtcgcattccactactaccgagcataaaacatgcaattcatgaaaattcacatatataatgcatctagtcttcaaatatacactactactacaaaaaaaaaagcttattagtgtcattttttaaatgacatatataatgatggcgtcaattcgtgtaattgacgtatatacaggggacacaaatagttactctactatgttagttcgtaactgacgacattaaaaatagtaccgtcaattttgaaccgacacaatataaataaattataccatatacatcggttcataactgacactcaactacagaaataaaaataaaaatttagatttaggcactcgaactatctcgagctca

SEQ ID NO: 247161 - DNA, 620 bp, Cannabis indica
gtattaagtgtaaaattattttatataaacttttaataaaaataaaatgtattaattaaattttagggtgtaaattcttactttctatttttttcttcataaaattatatatatatggtgaaccccaacgttcactccgtgcaacaacttggaatctgctccgtgacattgccgctgagtcgactctcccatggtgcgtaatcggagatttcaacaacatcacttccaacggtgatgttaaaggaggccgcccctaccccgacaccctcatcaacggcttcaaccttgctctttgtgactgccgacttgatgaattggctcttggtggttaccagtacacttgggagcgtggaagaggaggtcctgcacatgttgaaatcaggttagatagagcctttgctactcatgaatggttctctatttttcttgaagctaagctgtccaattttgattatacttcctctgatcatacacccctgctgcttgaacccgaccctactataaatttcagaccagtccgtttgtttcgttatgagaacgcatggggccgtgaggctttgtgtgggcagttggttaaaaactgctgggatgaaaatatacatgtttctcttgctgaaaaa

SEQ ID NO: 247162 - DNA, 699 bp, Cannabis indica
tcccctacctatatacaacatcatcaaaaaaactggctactactaaaaagttttggtgttaagttatttctagatagactattatactatacccctctcatgtaaggctttgtaatttgatcgagattatataagagcattgttatttagataattggctactaatactctctcaaatttatttcattagactatacgagattcgatacttaattagaaggctgctagacactactaatacttttaacatttctcattatatagtagtagcagtatacacaaactacaaagattagtgtcttaattcttctcaatatgggaggcctcctcataattactacaaaactaaatggcgttttgtggccaaatttaattattataataaatttaacaagagtattatactttatttattttattctttaagatatcttaggatttttttttttattttacactaaatttttatatttggaaatgttaaaaaatattcatggtgactagcaatgtaatatggttattagtgcaattcaattttagatcccacatattttactttaataaagattatagagaaccgttaactaattataaaacgtcatttcataataataataatagacactttgatatcacgtaacaatacattttacattacaacttatattaattcttgtatatttttactttatatcattt

SEQ ID NO: 247163 - DNA, 934 bp, Cannabis indica
acatatctctctaacaaatccttcaatttttaaacattatcatcacgtaaatatttgtgaactactccaaagatcttctaaacaaatttatattcaattttttaaagctagctccgtatagaaattgtgatatgtgcctttatagaaattgaaaaccctaatctttgctgcgttcgtgttcgggataaaatgagtagccgtgcgagcagaactctttacgttgggaatctcccaggtgatattcgcgagagggaagtggaagatttgttttacaagtatggacgcatagcccacattgcgacattgacttgaaggtccctccaaggcctcctggttatgcttttgttgagtttgaggatcagagatggctatgattttgatgggcatcgcttgcgggttgaacttgcgcatggtggacgtggacatttattattatcaactgatcgctatagtggccacagtggtgggggtggtggtggaggaggtcgagggggacgtggcgtatcaaggcgctctgagtatcgtgtgatggtatccagattaccttcttcggcttcatggcaagacctgaaggatcacatgcgtcgtgcaggggatgtttgtttctctcaagttgatcatcttcctgcagactagcaaatgttaatgaggaatggcatatttatggtgtccctggaagcaggttatggagaaacaatttttagacatgctgcaaaggtgttgttggggaaaacaatagaaggtcctcttcaattcaagactattagaaattcagatttctaggaagttactatggaaaaagttcaagttcataattgaaacctattatgtaatgttttagattgtgattgtgtgttgttacacgggcatgttaaatgtgtatagtcaaagaaaaaggccattagagatctttgagaccattaatcagtggttt

SEQ ID NO: 247164 - DNA, 938 bp, Cannabis indica
attatatctgcttattgttttacatttatttttgtgttgtttagtagttttttttattctgattttctaaaattgggtttgcaaatatagctgttattgcatctggtacggatgctgtgtagaagattgctagttttttttaatcttttttccttttttttttgtttaatttgttttagtgttgttttacagttattttgccatgattatttattcgacgttgattttactgttttttctcaatctcaccggaattaatggttgttttctgattgttctggtgttcctgtagtggttctatccgtgggtgtggaagatggagacctcatttttttttgtggtttatcgtataaaaggaaaaaaaaaaaataggtcaggacagtataaaagttatttctgccatgtgatagtatttttgtaaagattagaccaaaaatcagtatttttgtaagttgcccaaaagaaaactcagtctaaacgatgaggcgcacagttagagctttagcattgatccataggcctttagaagatttggagcccacaactcaagaccatggggcgctccatagggccatgagtttgggtaaatggaccacactccaatgtcaataatatataacaaaatgaattatttgagcagttagtgacaaaacctgatgagtatataatttaataaaatctctgaatgggtaggggacccaaaaatcaaaaataaaaaatcaaacacagtttctcactcgactcttctctgttccactctaggcccatctataatttatctatacaaagtaacaataaatatttaagacataattgtgtttgtgtttttttctattacccctttaaatgaattaataaataatgtgatacgtggaaagttgcaatagctataaaaatgatgaaaatatttttatagatatggttatgtattttttttt

SEQ ID NO: 247165 - DNA, 7492 bp, Cannabis indica
tgcaaaattttaagaaatttggaaaagtttaacatgccgaaaaattatgttcaaatagtatgttgcacgcgtgactattttattttatacgcgtgtaaaatagactgtttgaacattgttttctatattgtaaattattccgattttttcaaaattttgtagaatatcttaaatagctataacgtaaatgcatatggaaaaaaattagactaaaaaaattctccgggatgccgaaacaagttaagagtgcatcaatatatcccttttaagggggtgcattgtagaatcacccaataattatatataatacaaaaaattattctcattaacaatgcaatctagaaggagataatgttttcttttaatatcttttacaaacatattacatttgaatttggataataattgtgaactgtgactgaattagagaattataaataatttgaatccatcagcactaaattcgtttagtttagtctttaaatgattttctccaaattgattatgttttagtttagaaatacaaattcggattgtatgaacaattgtattggataccatatgtaatattcttttttttgaaaatccatatgtaatattctaattatttgtaatgaaggaatattgtggttgttacaattatatattttcactattggttaatatatttgttaatgggattagtaacatcaaagtgacacatgttattttttttttcttttccaacaaagggttaaagaaaattcaagtttggcatggtgtggtggtgtgtgaatgatcttaccttttcatgttgtttttctctttgatttgattctctcaaagttgaatatctttttttgtccaaatgtgtacatttaaagaaggtttaatatatatgtttaaaacaagagggaatctcatggaaaccctaaaaacctttttcacttaatatttatttattataaaaaaggacaacaataaaaataaaattaaatttatttattgtaaattctgtttaggcatatatggttttctactttctaaaaataatgtctttaaaaaggatttattagaaataaaactaaaaattattaaaaactttaaatttgttaaaaataaaataaattaaaaaaaaaaaaagggaaagcctttatatttttttttcttcttgtaagggatactggttatcaagttttgccacccgccgccctggactgaaacaaagaagaaaaagcaaaacgaaagggttcatatatttgaagaatcttgtttatgcttttgggttttggattttgttaactcactctttgtttttggtttatcttgttttccaaagtctttacctttttctttttcttcgttcgaagcttctttctttttttcatttcttttcatacaacaacccccatttgctttgatttgcttttgtttaattttcttgttttctaaatagactttggaacaagacccagttgtgtttttttttggtgtgaactcaaaatcccaagaaaaaaaaaagaaaagaaaaagaaatatacagtttgaaagggaagaagaaaagtggtgggggtgaacataaagctttgtaaaaaccgtcattgtgaacaaggttttggttgctgttttttcttcttcttcttttaatttatttttattatccaaaaatatcatattgtctaatctttatctctttctttggttttatcagaacaagaagcaaactgggtttgtctcagtatttataacttagtacttattgttgttgttgtttccattatctttagccgttactatcattgtttacctctgtttttctttttcattaatttttgttattttttgtctatataatcttagtaatacgttggctttctctgtgtggacggcagcagtagtcagaacagagccgtattgtattgtttttttggtctttgtgagtaccaaaaatgaagtacgtacttgtgactggtggagttgttagtggactcggcaaaggggtcactgcaagtagtattggtgtgctcctcaaggcttgtggtcttcgtgttacttctattaagattggtattgttctgttacaccaatacttttcttgcattacatatatatatatatatatatatgtattttctttaaagttcatattttttctcatttggggatttttgaaatgtgttcttttatggttatagagaaatagtttttggccagggaataccatactgattgaagtttaaagtagctatcttgattaggcttagttttgaatagtattatgttgcttcatgtatgattttgtggtaacaagattttgttaggtgttagaagcttcccatactagtttgtatgttttagagaaattgaccttttgaaagttaatacgttaatggctgagttatgacttacaattgtaatggttacattacttgcagatccttatttgaacacagatgccgggacaatgtctccatttgagcatggagaggtgtttgtcttagatgatggtggtgaggtatgttgttgaaagggatggttatacatgccattcggattagattacaattgatgttagttttacttgattattatttattaattttggtgttgtgaaggtggaccttgacctcggaaactatgagcgttttctggacacaacactaactcgtgacaacaatatcacaactggaaaaatatttcgggtaatttgctatgttttttctattcaagagccctatttcattgatgtttataatcgtcataaaaattattttagctgacatttaattgattgtacagtctgttattgacaaagagagaaaaggagattatcttggaaaaactgttcaggtatgttgtaattctggccttttgcacaatgatttggattttagacaatgttatgcttaaataattttggttctatcttttgtttacgaaaggttgttccacacattactgatgctatccaagagtggatagagcgtgtggcaatggtaccagttgacgggaaagaaggtcctgctgatgtttgtgtcattgaattgggagggactataggtattggtgctttctttttctggtatgtgattaggtcttttattattttgtttgttaaaagcttgagtttgcattcttgatgcaggggatattgaatctatgccatttattgaaggacttggtcaattttcatatcgtgttggtaagtttaaatgttcagatgtaaattgttctttttccgttttcaaaatttcttctaaattaagttgtatgactagcaaacctgtttctcatacaaaatattttctttcattagggcctggcaatttctgcttggttcatgtcagcctcgttcccgttctcaatgttgttggcgagcaggtatcatcaacaactatcaattagtgaaattatcattaagaattctttgttctaatactagatttgattttttcaacatggagacatgatgtacattaatttattttttagctcatatgcttgatcactcatttatctaaatttttcatcaaatttcaatttcagaaaacaaagccgacccagcatagtgttcgaggacttagaggactgggtttgacaccaaatattctagcttgtcgcagcacaaaggtacatccttctacaattctacatcttataatttcaagcagcaatctaaatcttttatatttcatatgttattgacaggtgctggatgaaaatgttaaggcgaagcttgctcagttttgtcatgtgccggtaccattagcattgttatattaattgtgatgttattctattttttctttcatttgagtaattggattttattttctgaacattgttacaggcagagaacattgtcactctatatgatgtcccaaacatatggcacgttcctttgctattaagagtaagtagtttagtgctactgctgaaactattttagcttggagtactgatatttctgtgatctgggtacacttaattattgcaaggacttgatttgtttttgtttgttttcctcgttccgttgtcaaattaggaccagaaggcacatgaagcaatactgaaagagctgaaccttcatgggtttgttttattaacacttgttttgcttctttaagtattttctttttcttatagaagcattgtaaattttaagtttgtcaaaacatgtatgcagtgtggctagaaagcccgatttgaaggagtggactgctagaacaatactttgtgacaagttgcatgatacagtaggttcctagaaaatgtttgagattctctcgtatctttgaaacctgttgcgtgctattaattgtcgtatgattattacaggttagaattgcaatggttggaaaatatactggcctttcagatgcttatctttctgttttgaaggtaaattttttcatgcataaacctatgcctaatgtttccaaattcgggttgtaacttctttaggctctaatgtcttcatctcctgtttcaggctcttttgcatgcctcggttgcttgccaccagaaacttgtagtggactgggtagccgcaggtgatcttgaagatgcaactgctgcagaggtgagaaccaattttggtttgctgttgagccatatattcagtttctacttagttttattttgaatttgatatttactatttcactatgtgcaggctcctgaggtccataaagcggcatgggatcttttgaaggtgattctcttcatccataatcattttatcagtgttagggtcagtgactcagtgttcattcattgttatttacctcacttaactctacaaacttttttccaatttagggtgccgatggtgttctagttccaggagggtttggtgacagaggagttcgagggaaaattcttgcagcaaagtatgctcgagagaacaaagttccatttttaggaatttgcctgggcatgcagattgctgttattgagtttgcacaatctgttcttaatttacatgatgctaatagcacagagtttgatcccgaaaccaaaaatccttgtgtcatatttatgccagaggtgtgaaatacaaaagtgatttttgtgtcaatttaatgttgataattaatgtttgtttcccttctattgtatttaagagggttgatgtttatcgagcagggttcgaaaactcatatggggggaacgatgcgattgggatcaaggagaacttatttcaaggttgcagactgcaaatctgcgaagttgtaaggacatagaactgaatttaagtttatattttgtgaaaacctttaaccaaatataattcctttcatagtaatatgataataacttttggatttgattaatatgtgatcatataccttttaaaacataagttataattaaaaataatgatggtttgaattgtgttttcaggtatggcaatgtaaattatgttgatgaacgtcatcgtcatagatatgaggtaagcagcattctttcttactaacaaagtagatgatgcttttgtgaatataacagacactaagaagccaacttctgtgcgtaggtcaatcccgatatggtatcacagcttgaaaatgctggtttgtcatttgttggtagagatgaaacagaccggcgaatggaggtaagtactttcttagagcagtgaaaatcaagttttgtataaaaacttgactgagacagacttatttgtcaacatattgaaccgagacagacttatttgcctagataaataatttgttattgcatacagattgtggagctgactactcatccatactttgttggtgttcaattccatcccgagtttaaatcgagacctggaaagccttccgcgacattcttaggtatgtttttacgctccttgatattgcttgattaaagatgtcaaagaatgccaaagctaatatgtaatttcttacttcaaagctaagaatgtcaaaaggaacctctctttaaatattttttcttttaaaaataaaaattgtttcttcaatgtcattgatgaagctagtgtatatgaatattgctaaaatgaagtttgaagggctttaaagttttgtagtaaattcttctattgtgttacaggacttatagcagcagcatgcggcaacttgacatcggttcttcagggaaatggccatgtgagcaaatcagttagcaacggaataagcaacggacactcaccagccaaagtccaccaaaacggacatgtttacaagtcttccaatgggtcatcagtaaacggtgtgtatagcaatgggaatggtgtgcactggtaggagtgtggaagcctggtaatatttgttttcttggtagggcttgtggcagtcgtaggtatgttgccgtcggttctgtctgtacagcttttgagtatgggtaggatggttttagctctctctcaaggacttttgttttgaaaaagggtgaagctggattttgctttcaagagggcacagcttctttttgctgagatgatttggttccaaagtaggaaagttgcttctttggaccaattcttgtctttacttatttttttttattatttatttaccttttactaatatatgtaacgtggagaatctttttgggacagggaaaagggacattttgttttcatttaagtatgtgtttttgaaagaacaattttgtcttttcttttttcttttcactttgtgaaataaatatgtttgtcagcagtgttatgtatgaactaattaatagtgaaattgtaatgattaatgagtttatttgttgacatgtttgtgtcttattacatggtatggtaatggtattcaatgttaaattttacaagggtttaataatcatctacttttcaagcttcttgtagctcaattggaataaaatttcacttggaaaatatatgaaccttaattgcacctcctttacctgaagttctcaagtgtttagcaaaagcagaatccatgcatttctgcatccagaaggttaaattagtgataatgacaataaaaagagaagaaacccataaaataacttgaaagtaaggacttaacattctattaatcatatcatatctcagatacatatggtatttatatggtgagggtgtggcttttgtatcaagtggtaagaatgtttttgttttagtacttgaaaaaattataatctaaatattttatggcattgtatattgtatgtatagtttttataaaattacgaataatttaaaatacctatagctaacttcaaaatatcttatttcgtgagtgtataaaactaattttaaaacaattaatttcttattttcgtcattcaacatagaagttctaaataattataatgcaagttgtcatataatttattttgaattgttacataatattaatttgtcaaaaaaataaatacaaattattttgaagtttattttatacgtgtgtgaaattaattattttcatgtaaagaagacacgaaatatactgttatgaaatcattctttgatgcattaaattattaaaaattttacaaaaattagtgt

SEQ ID NO: 247166 - DNA, 1667 bp, Cannabis indica
aaaaaaaaaaaaaagaaacttagtccaattaaatatataaattttatataaaataaaaattattaaaatgaggtgtctttagaagtttttgtaatgtaaataaaatttctttttttataggatcgagactgatttcatagattttatatgattttttatagggtcgaaactggtttcacaggttttgagagttttgtaatggggttgtttcattttatgatttatttattttaagtttctttatattttttttaaaaaaaaaattgcaaatggttttcacatttatattatgttcttaaattatagttgtgttttgtttttgattatatttgttagtggtttttctaaattattgttcgaaactggtttacatattttgagagttctgtaatagagttgctctattttatgatgttattacaatttttttattttaagttacttttttattattttgtttctaggtttgaaatttacacttatattttgttttcaaattattaatatgcattgtgtgctgttttgattatatttgtaattactattttttttgtgtgtttttcttttttcattttttatttgattgtctgataaaattagtttcagttaactttattatttaacatttatattttgttatgattttgtatagcgtcaaaaattgtttcacggggccgaaactggttcacaggttttaactgttctgttatggggttgcttcatttttgtgatgttattgtataatttttagtttgtataaaatcagtttattattgtatgatatttgaacaataatttttgttttattttgaataatcagtttctgacacacatattatattattgttttcataactagtttttttaaggagctagttttcataactgtttttttttgttcataattgagttttaaattttaatttttttatttaattattttaagaaactgatttttatatgtttgtttttattttggttattttactatctagtttctcgcattccactattttttattttattttattattcttttataattttattttatttttgtctatttaattttcgttatttcttttttttttctctttgattttaattttcgattctctttgttatatttgcacgcttaaattaactctgattttctagcaaataaataaaaaattaaatgccaaaataaagaatgaagttagaagtttagtattaagtattgatataaaatttatatgctcgaaactgatttttaaatttggtatcgtttgtaaaagtttagttattaagtattgtgtatgttttattatgttattgatgaaattattatttttttttttttgtctcttttaatgaaataattacttatttcttttaatattgagaaactggtttttaaagagtgtatttttagattataatttatatcattattttgttaatgaaactatttttttattctcataatgaaattattagtttctttcaatgttaatgaaactagtttttaaaatttgtattatttttagattataattttttatattgatttttttttaggatgatgttgataaaactgttttaattttcctattgcttttaatgaaataattagtttttaacaaaaataatagtagtttaaataaaaaaaaaaaaaaccatgttta

SEQ ID NO: 247167 - DNA, 890 bp, Cannabis indica
cacgaggggactcatatgtctccgtgagttggaatactaatggacactaacgggctgacccgatagtgcacctaagaatgccaccagagattagcaggtacgtttccattggcttgctggtatgccgtttgcattggacgtggcctaaacctctaagagacgttgtggtgcgccttggccacgagtctcaacatgagatgacacgggtagtcattcgtaggctggtttgcatacgcgcatgggacaaatgcaccatgctgataagagacaaaagtctaacatatgctactagtttggtggcttgtttcaagggcctgccaacatgcgtggatgcatggtgctttgaggattagaccatggacgtatgggagttcttgggcgatgagggagagagttcggacagtattgaatggggcatgattagaatcgttgacacgtcagcttagtgttggtatcttgctacacatgctaccttggttgtgagtgactaggtgaacgacgatgttgggatttgccttatcatagtgagaacctatggacagtgcgagtatcttggctagagagcctcgatccatggatgcactcatggatgcttgcaagcatgactcggcaagagttcttcgagacacggaagtgtgcacgaggcacacggttgcgcaaaaattgagcccattgttactcggatggttggaaggctgacattagcttagagaagttaaggtgtcgcacgggtgttctactgcttgaaaaggtcagcctgtgacacacagcactacacatcacattttggtagtagaatttgaggatttttaaggtttatgtagtgcaaaatttgaaaattacccaaactgcatgtgcaaacagatctaataaattagggcgaacactct

SEQ ID NO: 247168 - DNA, 624 bp, Cannabis indica
tttataaaataaaaaaatatatatatattttgtcgttcccaaaatttttgttttttgtaactttatttttttgaaaagtgttatatgaaaagacacgtttcattgtactcaaaaattatttcattaactttattctacatcatgtatgactaaaaaatggaggcaaatataattttataaccatgttccaatacatacacaaattaacaaatatatttaacgcacacaaccccttgctcgagataatttctttattttatatgtttcctacaaaataagatacactttggacatgaacctagggcaccctcacacacactcatccatccaactacttgacccaaccttgagagggcagagcgttgcttcaaaagtgaatgttcaaaaatcgactcaattgctcaatcaacacatttaatcagagagaaaaagaaccttaaagctataaaaaccagtatcacagccccttcattctgcagtatgttgctgcatattccattgtctagcagtcagctttccctcatggatactccaaccctgagctataattccagcaaattagcttctatcccatggaatgtacaaggcgactatggcaatttataatgcataatccaaaaaacc

SEQ ID NO: 247169 - DNA, 526 bp, Cannabis indica
atctatgaaggatagcaacttaaatcctgaggtggtagccaccatttgatcaattcgaggcaagaggaagcagtccttcgagcaggccttgttaaggtcagtgaagtatatgtagactcaccacattctgtgtagtttgggcatcaacaccggattggctagccactctaggtaatacacatctcggatgaggccattggtcattaacttatccacctcttgctctaaggcgttggcctttactgggtcgaaaggacgtcttttttgctgtatcaaagggatatctgggttgacgttcaggacatgggtgagcacatgggggcttattccggttatatccccttgacaccacgcaaagacatccgtggttgcctttaacatatcaatgatcttgcttctttcctccggttctaggttttttcctagacggataattttagtggagtcgaggtcgcatgtagcaccctaactagcataggcgtgttaacgtaatttttaaacgcattgtgcagctcattgctaatca

SEQ ID NO: 247170 - DNA, 1854 bp, Cannabis indica
aaagagttttatttagggcataaaacccaacagtatcttcattgggactgacagatatggttcgagaatggtgagaaggctgttgagattggtcaggacacacagagccagtgggagtcgggtttgtagcagtgggtaggattgagggattgttcacattgagaaaagacactataggagggacaccagaaggtgaatgtgaagagagttcagtggtggttgagtgatttctagactgagaagagtagggaaaagtgtgttcatcaaagacaacatctcttgagatgtagagcctgttgtctttggatgaacacttaaaccctttgtgtgccatgttgtagcctagaaagatacatgggacagacctatactgcagcttatttttgttgtatggtcttagattgggatagcataagcacccaaagaccttgagacttgtataatcagggacagtgttgaataatacctcaataggtgatttgttcattagagtaagtgagggcattcgattgattagataggctgcagttctaaaagattcatcccagtatttgagaggaaggttggcttgagctagcatagtgagacctgtctcaacaacatgtctatgcttcctctcaacaaccccattttgttcatgagtgtgtgggcaggctaatctatgaacaattcctgtactctcaagaagattggtaaaggctctaaactcacctccccaatcagattgtagtgtcttaattttgtaccctaactgtaactcaatttgggttttgaacttagtgaaagtaggcaaggcctcatctctagttctgagaaggtatagccaagtatacctagagtaggcatcgacaaagctaatgtaatatctatagccatttgctgaattgatgggtgcaggtccccataaatcagagtgaagcagctgtagtggttcagtgtaagttgtagtagagctagaaaagggtagcttatgtgatttaccaagacagcaagatgaacaaacatcagagacatttttattagacaaagtgatattacatttggagagagccatttttacaattttagcagtagggtggccaagcctactgtgccacaaggaaaaatcagaactagaattagacaaatgatgagtgtgacattgaggtgtggacagatatgcaggaacagaagcagatggagatgaaagaatactcagctggcttgaatcaaatttgtacagtccattctcaacattcccaaccaacaagatcttctgtgtagttcggtccttaacacaacaaaagaaagggtgaaactcaaacataacattgttatcttgagcaaatttagacactgagtaaattttttgttatggaaggcacatgtaaaagattagtaagaagtaattgttgagaagagagaggagaatgggctatagacttaccaacactttcaatgttcagaccagctccattaccaacaagaacatgttcattacctgcataggaagtgcttgccccaagattagatgaatcaggtgtaaggtggtgagatgctcctgaatccgggtaccaattatcatcttgaattgtttctggtgtggcaaaggcagagggcatctcaacaatattggccgtgacagggaaattgacaaaggactcagggcctgtaaaggacttatcgaatcgatagaaacattgcttggccaggtgtccaaacttgtgacatatttgacactgagccttttgctgcatttgttgactcgagccacgtccagtgttgaaaggattgccacgttgaggattgggaccacctctgttggaggacagaccattaccacgggacataggattccttgtgaaaccatcagca

SEQ ID NO: 247171 - DNA, 1034 bp, Cannabis indica
ggttgtaagtttttggggttgggggaattagctcacaaagtacattattatgcacttttaattaaccttctcttgttatctattatataagtatactatagtagtaatagttttcttatctaatatatatatgaaaaaaaatcagcaatgaaaagaaaaaaaaaaagtgtgcttccaactaagtttggggtgttccccccattttaattcaaaaaaataaaaaagagaataaacatagcaagagaagtcaattagggtaaactttagtaccctgattgggcagcaaaaggaaggaaggacaaaaggaaaatggtggccgcattttagagaggagggagtatgaaatttcagatctaagtacagaaaaaagaaaggaaaggaagagagtacaaagaatagaagaagaaaattaagaagaaggagaagaaggcgaaatccaaagaaaagattcgagcacacaaactcatttctgttgctctcctcttccattttgtatcattttctactctttaaaattctcttaaactccatgaatatgtcattttctggttttgagtttttaatttcagctatgaactagaatctttgagatttgggtggttatgaagtatggactagtgctttaattttgcaatgattgagtaatctcgtctttgttcaattagatgtgatgaaatgctgattgtatgttaatttttggccagctttaacatttagtaagctagatcttacttggaaaagtaagacctagttgaacccctctaattgatgcatgatttttacccctcttttaggtgttaattagtagtgaagtaggaaaatttcgctaccatgcataactaaagatttgatgctatattggactatttgtgatctaatctgatgtaggaatgcattgttgagattatgaatggtatattgcaagctttggaaaaagctttctagtttttcttaaaatctgttaactctacaaggattgcttagttattgttgggtcattgctctatcaactggaacatacaagtggaaattaa

SEQ ID NO: 247172 - DNA, 615 bp, Cannabis indica
gtattgagagagtcccacattctacaaactctaagtattatattccagatatttgtgtgagtatttaagtttgagaaaataatactcaatcattagaagaaaagagagaactaaaattaaaaaaaaaaaagtaagaagagagaactaaaagaaaaaaaagttcatagtaaagttatgaaattaaaagaaataatttaagataaatatatatatatatagagagagtttagtaagtgatagaaaaaaaaatgtgtgaattattatttttgaaattatgtaatatttgaaaaaaaaaagagctaataaaaaaggtgtgacttaaaaaagtaattttataggtaacatttttttaaaaaaaaaagtatgttaaaatagatcatatttaagaatatatatatatatatatatcaattaataaaataaatttgattttattattatttgatttgggtggtggtataataatttacggtgaatttattatttaatttttagaattgataaatatatttggattttttagaatttataggaataatttattcaattaattaattaatatttataaacttaataaaaaattaaaaaataaaagaattaaggagagaatagaaa

SEQ ID NO: 247173 - DNA, 667 bp, Cannabis indica
tattagattttatttggagtattttttcgtttggtagaataattaagcatgtttatgatatactaaattttgtactaaatattttctcttttatttaaaagtgatacaattgaagaaaaaatattattagtttttaggtgggattatattattatgtatatttaaaaaaaaattattagttattaggtgagttgttacgtacaatgtacgtatactttattaaattattaatgtcatttaaaaaaatattaaatatttaatattaaacataataaaaggaaacaatatatagttataattaaaaaaaataaagacattttataagatttttaaaatataatgttaaagtatatgatgttgggatggtagattttggtagtgggtgtgaaattctttcttttttgtccccttaaaatcttgtcaacatatactcctaaatatatttatttcaaaacattactacagagaatacaattaattattaattatctaacaagtaacacattactataattattaataaagtcgacctttttattttcattaatccaagtggaaggtttcatatgcctttattaatgtattattcattagtcaaataggacatatgataccataagagataagagacacaaagattgttagaaaatgcttagatattagatta

SEQ ID NO: 247174 - DNA, 1861 bp, Cannabis indica
atacacttagagagtgagctataccaggtctaatactgaagatgatatacattaaatagccaacaaccatagcatagggtattctcctcataccttctctctctattttagacttaggatattgctcatttgacaacttaaactgtctagctaaaggtactgttgttgccttggaagattccaagttgaacttcttgatcactttttctgtgtagctcttctgagttaagatcatcttcccttcttgccttttccttatgagttcaataccaaggattttcttaactagtccaaggtccttcatttcgaatttagaattgagcttatccttaatgagttttattcctaccttgtctttgctaatgatcatcatatcatcaacctaaagcattaggtaaactaccttagctgtccctaattccttgtaatataggcaagattcaaactttgatcttgagaatctaataccttggaaaaacatggtgaacctatgattccactcccttggtgattggttaaacccatatagagaccttttcagtagacataccatttcaatcttcccattttccacctaaaaactagtggttgatgaaaaaaacctcacataaaaaaacaattaaaaaaagaagtttgacatctaactgctcaacttctagatcatagtgtgcagcaatggctaacatcatcatgatggttttgtatttctacataggtgacaatatatctatgtagtctattctctcaacctgtgtgaatcctttagccagcatcctagctttatacctaggtggttctctttctgtcaaccttccctttccttaaataaccatctgcaagagataaccttctttccttgtggccttggaaccaaaatccaagtcttattcttactcaaagaatgcatttcatctcccattccagctagccatttcttctttgatttatacttggaattgcttcatcataagtggttggttttgaatcatttttagattgtacgattgccaaagcatatgctatcaggtccactttttagcatatttgtttgggagtttaatctctcttctagttttgtcttgagccagttgataattggttaaatctcgttggttttcttgactaattttctgagtttccacttcagaagtaccctgtttatatacttttatagtagcttgtgtttccacctctatttctatctcttctactgatatgtatggtaattcatttggtgcttcaattctatcaaaattgatctcaagctcagccaataatctctcgtagtaccttcaacttttgaatttatgcctttcttggttgccaagtgcatgaaatcatgctcattgaaaactaaatctcttggtagacaatcttaggctttccattttcaatttgacacaatctgtaacccttagcacctttagggtattcaagaaagaaacatttctcagtatttccgtgtcacgtgttgttactcttgccacgtcaacattatcaaaattttggtaaacatttgcccccaaatttttagcgggatgactatacgataggaactttttgtgtagcccgcacttcaatttaattattgttgatgacatagtggtagggtggcaagaatgccatggttaaactggaattacatttcaaacccaaaaaataattctcccactttacatacttttacaacatatcccaatgataatttttccctttacaagcaaaataaattacaagaaaaataaattatttacaaaagaaataatctaaatatttacaaagacaaaaataaaaaaattaacttgtaagcattataataatcattggaagatttgaaagtctccattttcatagtgggtaa

SEQ ID NO: 247175 - DNA, 626 bp, Cannabis indica
aaataaataatcttaatgaataccaaataaacaatcttaataattcaaaactaaaggactggtattatctagagtcacataccgtacatatatacaatctgtgacacaaaaataaaaaataagaaaaactagaggaaaattgatactacgttacagatatccaccgcctatgggaaaatggggtctcacgatccagaaaactttagaggtttaaagttttggattcaaaaaatatttctaaaaatcatatctcacatgaatatctaaaagaatggaagatttaatttaagaacaaaactcaccacataatcgggttttccgttcaatccaaaaggatctgacatatcattcttctttacccattactggattgtcaccaccttcttcattttccaatactagatttcttggtcctcatattatgaacagcttaaaatataaaaaatgcataaattaaccacataaacaaagtaataaggggaaaaaaatcaataaacggcagggaacaaaataatcaaattaaaatcaactaaacactatccctctgatatcagaatttcaaataacagagcaaactgcgatctcggttacatcctcagcagatgctttgccagcgtcaatggcta

SEQ ID NO: 247176 - DNA, 642 bp, Cannabis indica
taagatgagttgagctgactctacctccataaccctatccaagccactaaggctagtggtgagggaaggatcgaaaaaaaggagaggtcatgagttcgaactgaggacgtttaagttattaagctaatatatgattgtaaaaatcattaccctacactcaaaaaaactccataaccctatccaactgttctaaagtaaatttaagacaacttttatacataaaatatattttacattttaataaataaattatattattataataaaactaactaaaacacataacatgtacattctacttctattaacaagtttaatgtgataattaatcactatttttgttatccataaaatactaccactaccacttagaattttttagagcacaatatttacatactaatacgcagatatatttttatgcactaaattaaattattttatattgtttgtaattgtaacataaatattaaagcctaaaatattagtcccaactccttgaactcaacctaacccaaatccaatctaactcaactcaaccccttatcttatatactaagtagagttagattgtacaataataaaaataaattgaatgatttataatttttctaaaaggcaataattgaattgactcattaa

SEQ ID NO: 247177 - DNA, 734 bp, Cannabis indica
ttgtttggatggaaaaatagtgaaaagatgggattaaaataaattaggaatgtttatttaggtgaaataaatttggaagataaaattgatatttaagtgtaaagtgagagaaaatataattttggactttgtgtgtgtaatttgggcttaagaaaaatgcatttgctgacttttcaatttcttcttcagccgggacacatggcgtacgcgggttggagctgcagctgactgggcgcatgcgtggcgagatgaggttggttagacactgacgtgcgggacccgcgtgaaatgctggatcaagcaagtgtggcaggcgccactttcttctggtcgggattgaggagctcgcgcggatgggagccctcagatccgcttttggatggctccgatatggtcaaatctctgaccgagagtgggccttgcaaaggggtttaatttggaaattagcagatatttaaggtttaattatgaaaattatttatagatatttaaataattatctatgtcgttatatttgaattctgaatgcattttatgtcatatagtgaaatttcataattttgcattaatggtcccggcaacatggaacgcagtgtatggctcagtagaatcaaaatttagcagggcgatttatttagacattgggaatgtcgggattagtggggaatttagagttttcccaaaatacccttaagtgctttttaacctttttagtgtgggaggggcaaaatagt

SEQ ID NO: 247178 - DNA, 507 bp, Cannabis indica
tgaacttccaaaggtgatctttcatgaccttgtattgcagtgtgcagagactataaacaaaaatttatgtaattataaacccaaagccaagtaagaataaccggagaaaccttctaatttgtagtgactactgataatcgttcctaaggagaaatgctaaaaggcacatatagtataaggtgtcatataatttaatgcaataatttttatggaatatgatcactaaattaatcacaaggcgctgcatctcaaggtggtatcaagcgtacctgcaatactggtactaaatagcaatgatgatcattatctttataatgtataattacctagagagtaatttgagcttctcttgatatgttgattgcaccatattgaaatccaatttggcaaactcgagtaaagttggattcatgtcttgttttctttcatatattttttcaattaatagaccatttagcttctgatcttgtgattctccattgaagtggcatctccaaagcatgattc

SEQ ID NO: 247179 - DNA, 859 bp, Cannabis indica
ttttcttacctttaatccaagttcatacaagttgtccaacccaattggagaactatccccaataatctcggccctatgtcacaataacggtaaaccaataagtatttatcctaaaacactgtttaatattcacataagacaatctaagattttctaccaaatcccacggtataaatacactaaaataaacttatattttagctctaaaacatacatcatattgtagatcttgtcgcaagcttcaaaaaggtatatagaacgtccgaaatggacacccgagtcaaaagttatgaaaaaaatacgatttctgatatcttaggaatttctaaaaactatgaaactcgaaaatttttattttctcactcaccgaaacactacccaaacttatccaaatcacttcaaacttcacagggcacatatataccataaatattactatccttgtgtaacagaaattaaaattgagcccttaaatgaaaaacgccattaatgttcggactaaggtttaaaaagtttaaaactcgaattctaactcaaaatcacatcaaattcatcaagaaaacatcgaaactagtcccatgactacccaagaacaattctataaggtcagaaccttcataactattctaattcacaaaactcctatacaaaatcaattatttttaaattaaaaacgaaattaaaccataccttaagctttccttcttctaggatttgctatcctgctactaccggagcttagatcattaagtttcgggttgaaaatcgaagaaaatgggtataaggagagaaggttttgaagaagaagggagaatgagggtttcgttcattttttgtttactgtgttatatgttacttg

SEQ ID NO: 247180 - DNA, 536 bp, Cannabis indica
gtgtgacagtaatatattttagatttttctaaggtggagaatataaaatatatcccatttgtagggtatttaatagtttgttctaattggacaattacattgtaatattgtggtcttgaatgcgacatattcaaactaggattgattaaaaaattttgtcttatgcaaaaaaaataattcattgggtttaaggagactctcttttacactctctctttatttttaagacaagtgtcaattattaaacaatacccacttttacttaatatttagtcataatattatcattttattacacgtatgacatcaactaaatcacttcacttatttaaaaataatttatttttatttttaaatgtcaaatttttttacagttttaaaaaattactaccgtattatacatagattattataaattctcttaaaaaaaattaatagaatacacacatcaaacatgtccaatatactatatatatacaattgtaataattctatacatataaatgtatatatattaaaaaacatactataatata

SEQ ID NO: 247181 - DNA, 837 bp, Cannabis indica
agatcctggtaaaataaatattccaacaattggaggctcccgccggggccagcccctcggaattgccttcaccttcgcccacgcccgacgagacctcggggagggcgctaagcagggccccaatggcatcctcagtggctgagtcatgctgagacgacatgccgagatccgatggggcgttttcctcaacccttactcccttacttttcttcgccctgctttttcgtttgggggacttcgacatcatcctcttccgacgggccgcattctgagcctcaatctcctcaatggtcaactcggacagcctcattttaggaaggtgacgggggtaagtctctgcaaggcgggagtgatcctcagaaaactctatcaaaagtggttcaggtgtttgatttaagtgtcttaaagcacattttaaaaaatcaggccaaataaagtaaggaggataaggagtggggatacctagggggattctgagttcgcgaggccaggcagaggattcgattaaggcctcacgggatagaaggaacttgattgatcgaaacttgggatctaaggctgtgaccttccgaaccttctcagtaaaaatatcgccaatgacagtctcctcgttatcagcaacggctgcaccaaaacattcccattggagtcaacaccaaatacgccgttaggtaaaagaaataagggaagagagaaaatacacaaaaatatgcatacgacaataaaaagtagtataaccgaataaccaaagaataaacgaagagaatggaagaaaaaggtaaaataaaaaaaaaacaacaaacaaacacaaaatagtaatagagataaggagattac

SEQ ID NO: 247182 - DNA, 756 bp, Cannabis indica
attatctcgactctaagagtacttttgtgaaaaatattctctgtaagcatcttgagagttgtagctagaattcactttgtcttccttattaatctgcgcaacattatctcaatatcaatacaacaaaaaggggagtaggtcattactaatatctaaggggtcgaacctctataatcctggtgttctttttatttacttattatttctaactctatactggtgattaattagcatttattagactctgagtcagttggcaaattctctagtcagcattttagtgctttcattgagagcttcaaaatcccatgaagatctcatcatttccttcctaataatcaccatggttctaacaaggataagtgcatccaccaaaccccaagatctgatggttgtggaccccaatgttcaagttccatccattgttgaaaactcggccaatcctgtccggccacctcgggcaagcacatcaacagggtcccaagccgaaggcccaacaaataccgggcaggtatcgattaatgccggacagcttgcccaaagtattgtgggggttcctttaacaggagctacccctaggtatgtgatagaaaaactgggcccagagttggccaacctagtgtcaaagagccccatgttgacttgggggacgattctgagctagccagactgagaaaggccatagggcttgtaacaccctaactaacataggcgtattacgtgatttttaaacatgttgtgcagctcgttgctaat

SEQ ID NO: 247183 - DNA, 1134 bp, Cannabis indica
tctcatcaaacatgggatctcccatgaacaaaatggggttgtagaatgcaagcatagacacttaatagagtcagccctcacatttcttgctcatgcatctatgccattgtccttttgggatgaagcagtaagagcagctgccttcaccattaacagattaccatctgttgttctgcataacaaagcacctctcgaggtactatataatagagatcctgattactcttctttaagagtattcggctgtgcttgtttccctaacattcggccatacaataaaaataagcttcagttcaggtctctaaaatgtacctttcttgggtacagccttcaacacaaaggctacaaatgtctttcacccactggtcgtctttacatatccagagatgtgttgtttaatgaactctcttttcctttctctgaaatcactccatcttcttcaccttccccacacagcagcctctctacatcagctcacattcccactgtttctacaacaacaccaccatctcctaatccatctacatcgaactccatttcaccatctctgccatcttccacctctaccacacattcaccctcaccaaccaacacaacacctgtcatttcaccaactccccctgctgcctctactctaaatacccatcccatgacaacaagagccaaggctggcatacacagaccaaaaattctccttgctcatgccattcccaagtccataaccaaagctttacaagatgaaaaatggaacaaagccatcaatactgaaatgacagctctggtgaaaaacaaaacatggtctcttgttcgtttacctgatggcagaacagctataggctgtaaatgggtacttagagtgaaagaaaatgctgatggttcggttgacaaactaaaagctagacttgtggctaaagggttctctcaagaatatggatttgattacactgagacctttagtcctgtagtaaaaccgaccaccatccgaatcatgctcacagttgctctatctaaaaattggccaatcaagcaacttgatgtggataatgcttttcttaatggtgaactaagtgaggaggtttacatgttgcaacctcctggatttgtggatccaaaccaacctcacttagtttgtaa

SEQ ID NO: 247184 - DNA, 1289 bp, Cannabis indica
aactccagggttgtagttacatctggatgacagagaccttctgagtaaactttgcggaaaatggcctgcctccacaaacagtaccataaccaggccggactagaggcccagcagacgtcgacgtactaatggtctcctcttagctgccgccattacaggatcaattttcgatcaacttcatggctaagcacaaaggtaggggaagtaatcatcgacaatggatctggccctcgcttgagcactagcgctggagccttgggatggatagattcattatatgtgacgaccctttatgagttagtcgtcataaatgcatcgggtcttagcaccgtcggcttgccccaacacctcttgcacctcgttgtgtctgtgtatggacagcgaggaacatgtgcttgaggatactagtggtcggtcctcctgccagggagttggctagccaaatgtgggtttttaggggtgagcgcgagtacggagagtgtttctaggccacatgcgttcatcttctacactttctttgggcgctcaagggtgtaaaccctcgtcttaacaatacatctggccaagaccccctgacctttggccggaccttgacaaccagtcaattggccttccttcttctttctacgcaggggctcttccttttacaggcttgtgtcactgaccatcgtgcatgtttctttcctcaactctcaatgaaagcaccaaaatatttaccgagtttttggcaactaattattttttagagcttgagaaagtaaaggtaggataaatagcaagataaaaaataagatatttttacgtggtttaggcgttaactatccttagtccacgagtctattttattagggtcattggctagtaattatttatacaaatagagatacaatagactaaaactcctttccaccgtgttcctcttgaagaagaggaagcttagtatgtatactctggagttgataatagggttacaaaaatgtgttttcttaggatgacgaagaaagagtcttctatcccaaaaaaaaggtgctcctctcagagtcttctatcccaaaaaaaggtgtcagcgaatagccacatatacccaccgacctccgagtaatctgcattcaatcacaagtccatggcctttcgcagtatgggggatcgacttaataggcgagctacccaaaggaaaagacagagtcaaatatgcagtagtcgcagtagactattttacaaaatgggccgaagccaaagcaccgcaaccattacaacgactaagttgcgcgagtttgtctacaactcca

SEQ ID NO: 247185 - DNA, 2486 bp, Cannabis indica
cgaatatgaagctttcatcgctgaactaaaactagcccgggagatgaaggtcgaacatattgaaatctgcagtgattcactggtggtagtaaatcacgtatttggagaatacgaggctcggggagaaaagatgatagcatatttgagcaaaatacacgatttgctcgcacagttcaaaagctacgctctcagacaaattccaagggaagaaaacacgactgctgacgcattagctcggcttgcgagtagtaatgtaagtgatagagcgaatttggttcctatccagttcctcgaagaacctagcatcactggcacggaagagattgaaatgattgatacttccccaaactggatgacgccaatagaaccctacctcaacactggggaactcccagataatcgaaatgaatctcgaaagatgagaaggaaggctgcacggtacatcatagtagagggaattatgtacagacgaggattctccatgccattgtttagatgtgttacccaagaagaagctgcacgaattttgtctgaagtgcacgatggattttgtggaaaccacaccgccgggcagagtttatctaagaaaattctaaggtaaggttatttctggccaaaaatgatcgaagattcaaaggcctacgttaaaaaatgtgataaataacagagatttttaaagatacctcgagctccgcccaacgagttaactcagatgcaaagtccttggccttttgccatttgggagattgacttgatcgtagacccgtacccaaaacttgggtccgagttcaagtctggatttgagtccaggaattgtaatcagacttaggacacgaacctgaaccccgacacagacttggacccaaactcggaccaaggacccagaccgggataggagacacagacctagaattaggaaccaaacctagattggggacccaaactcaaaattagagccagaatcgggaccaaggactgggactgggacccaagacctgaccccgatctcgatcctagacccaaacccagacacggacacggaacgggatgcaagattcgaatcgaaacgagactgggacaaaagattgtgatcaggatcttgacccacgactcggggcttggacccaacccatagtcagtgtgtagatcttggaatcgtaccaagacccgaacttggatccatttccagactaggacccaaacaaaaactcgggcccgagacagaaattggaacaagaatcgaaatcaagaccttggaataggaattggacctggaaccaaaactggatttagacgtgaaaccaaacacggatccaaacccagaccgtgatcgaaactcgaacccagaccaaaacccggacccatacttgtgccagtacctgcgacccaggacccatgacccgaaaccttgaccagaacccaaactcgtaccagaacccgaacctaaaccttgaaccagacacagaccaagacctgaacctagaaacggactgaaacccaaacccagacccaaacccacaccgagacccagacccagactcatactcgaactcagactcggacctagatcaggactgggacccagacccagactaggaccgaggcttgaacatggactaggactagaactaggactgggactgggaccgggaccagatactgagacataggacctgagaacctaaccgtgacccagacccagactaggccaagacgcgtgacaaggaccagtaacgaacacgcactgagacatgcacacggacttggaccctaacccggacacggtcgtgtacccaaactgggactgagacccggacccagacctagacttaggtcccgatcccagacccagactcagacctagatagggatctggatacgaacctggactcgaacccagacccagacccagaccgagatcgaaactcgggaccaagatccagaccgagaccgtgacccagacccagacttggacccgcacctgggacccgaacccagactcaaacaggaatctggacctaaatctatactcggactaagactcggaccaggactcagaccccgacctagatttagacccaaactcgaacccagacactaaatcgaaattgaaactaggataggacccaaacccaaacattgacccagactgagacctaggactcggaccttgacctgggccttgaaaccccgacctagatcaaaactcaggactcggacccatacctggagctagactcaaatcgagatctggacccaaccaaagattggaactctgacccagactcggaccaggacttgaacccgatcaggtcctgggctcaaaccgggacctaggactcgaacctggattggggactttgacctaggacacgggcatcagaattgggactaagacccagaatctgaccctagagccggacaaggacctgggacccgaagtgaaactagactgggacccggagaccgtgatccacatctacact

SEQ ID NO: 247186 - DNA, 640 bp, Cannabis indica
accgacgtcgaaaaagcaatacaaatactaagccaagaaaaaaacattgaagaagaaaaattggaacttgactgtaaggtacttttaagtttattactacatgtgtgtgtgttgtgttttttttttttttttttttgctcaacttaatttcagcattttacatttcaaaatcagtagttaaacttgtgcagaatatgttgtttacattacagtaaccttgaaattccatttacttacatatgtatttagattgcttcatgttttcatatatttttttcatttagtttaaattcctataacttttgcaggatgtcaaaggagaaatgagtgtagttaagaaagacactgatgaaattaaaaatgaaacagctaatgtaaagataggaatcaatgatatatcagagataaagaaatagacatttgatgttaatatgggaatggatcactttggcaatcttcttgactcattgttaaaacaagatttctcaaaaatgaaggcaacttgtacaggagtagaagaagagataaacaatataaatgagggaaagtcttgttcccaaaaagatgaatttgaagatgaggcaatcccagaaacgagtgaacaggcatgaaatttattttgtcacttctaataaataac

SEQ ID NO: 247187 - DNA, 633 bp, Cannabis indica
ctcaattgaccaaagaacgaccaacgcctgctataacacttcgttgatagtcgtcaagaagaccccttctactgtatagccgaggagatgatgaagacctcttccactgtaaagtagaggagatgacaaagaccttctccactgtaaagccaaggtgatgatgaaggcctcctccactttaatgcctaagagatgatgaaggcctcttccaccaaaaatttgaagagatgacggaggcctcctccactttgaagctaggagatgacaaaggcctcctctaccgtgaggctaaggagataatgaaggcctcttctgcttcaaatctaaatcgatgacgaaggcctcctctgctataaagccaaggagatgaacaagattgcctccactgtgaacacaaccgggggaacattaaagacctccaagttcacaactcaagagagaataaagaatgcatctatatcaacttgaacacgtagtgtgacaagatagccaatgctaagaaaatagttgaagatcaaagttggtgatgatattttggtgttaacatatttcaaaagtctccccaatcaaaggaaattgtttaagacaattagaaaaaaaaaaattgcatagattgtcaaaattgatgcccac

SEQ ID NO: 247188 - DNA, 1358 bp, Cannabis indica
acttaaactagattttgggggccctaggcttgggccggcctgctttagacatgagatttaaattacactagctacaaagttataattaatctcataataaaattttaataattagataaatattatttattgacattattattttattttagactttactacaaattaagttgctattggatgtaaataagaggtcgaccttgttattttttatgacacttccaccatttttaattataaattttgttttatgaaattgaattgctttagttttgtgatactaatgtttaattggcggcaatcattttcctactatctctagagaatagttatttcttctacacataggaggtatttcaattgatttttttcttttttacttttttttttaaattaataataaaatgttcaaattttattctaaatataaactaactttatataaaaaaaaattaggatttctcgaggttgtcttttttcttcggttaggcccgctgatcttccttgggttgtgttgtttggtttgggttgtattttgctattgcaattagtcttgtctctgtgacatgattttgagtgttttattagtcatgtctctatgatatagttttaagtgttttagttttgtctatgtgacacgatcttgttttgttttgtttcgttgctagttcttttgttcttcgatgatttaccattaaattgctgttagtggttggaaataaaaagttctctgcgactgaccttgcacaatagttgagtgctcaaataaggagattgaatgaacctactgcaacagtttctactgttgtgccttctgagtggtagataaaattgaatataagtattcttaaggttaactgttgatgctacaatctttttcatgttatgatcctacaatagtagctagaaatttttgtttagacctcattcgaacctagtttggagagcttaacagttcacaaatcacactataggttcataacttattcagtccaagttttgacttcattcagatcaaattcacaccatttcagagacaaaatgagttcacaccaacctcactcacttagactaatgaacaactcgtttagtccaattaggactgaatttggttttaatagttcacgcagatcatgtagtctatcaactatcctcacagttaagagattattatacataacatatggctatgtgtattttacgcataaatcttaaagtaccttagtactatatgtagtttaaatgattagatcatgaatagtctatatatgtatagactaggaaactataacaatgagattttgtttgaaacagagtatatatgaatgaacataaaaattaagaacagaatacttttt

SEQ ID NO: 247189 - DNA, 1048 bp, Cannabis indica
tcggaagatcaaaagaaggcactggaggataatcaataaaaagattctcatgcgttatactacttgcatcaagctctatgacagataatctttttccagagattatgggtgcagcaacggcaaaagaagcatgggacacgctgcaagaggagttcttagtaatagttaaggtacgcacagttagactaaaaaaagttggaagaaattttgagaatcttaatatgaaggataatgagaccgcaaaagactactattctgaaattaaagaaatagtaaatcaaatggaagcctatggaaaaataatttctaacaagaatatagtacaaaagatattaatttcttgtacagaaaaatatgattcaatagtttctatgatagaagaaacaaaaaaagttagaaactctatcaccaactgaactaatgggctctcttgaagcatatgaatgtagacgagaaagacataagaaaagtaaagttaaaaatgcctatcagtctaaaattaatctgcggtctcaaaaaccaaaagttgatgggaaaaagacacaagaattacaaaaaaaaaaataacgacaagtaccctccatgtggcatttgtaaaagaaagtcacttggagaaagactgttggtttaaaggaaaaccacactgccaaaattgtaaaaaaattggtcacattgaaaaaacgtgtcgtttaaagaaatcacatcaagctaatttttttaaagagaaaaatgatagtacttggtatcttgacagtggttgcagtaaccacatgacgaaaaatgaaagcatcttttgtagtcttgatagatccaagactaaagtcaaaatcagtaatggtgacttcatgaaagcagtcgacaaatcatcgcatgtcactgttactgttgactctaatggtcaaattatcgcattccactgttactggacataaaatgtgaaaatgctaaattcatatatgtcatgcatgacacacccagaatctaataaaatctctataatcgagaaattataacccttgcctatttttgacaataagacttattttct

SEQ ID NO: 247190 - DNA, 701 bp, Cannabis indica
tacttccatgtgtaggtaaaggaaaggcgaaagctgaacaggagtgagctgagctgagatgaagttgtacatgtcaaggcagcgcgacctggagtgttcagtctcgggacatctgggaatatgattttgtagtcgctgtgcgacctgtagtgtattttgatattttgtgtataaaagcttttaaacgggatcccgatacttataataagtttgtaattataaaggtcattatttaatataaaagttttaattgaaaacgtttttcaagaaaattctttgattagcaaaaacagcactgtaactaaaaaatactatagcgtgccttagcattagggcgttacacaaaacccaacaagaacatattatatatatgtgaatgtatttatgtgtgatatatatgcatgttgtgtttataatatatatgtttaggtgttatcatggcgacacaaccattgtgtcggttcagcagtacgggcatcgtattggttaagagtgatattcaccccaaaaagtattaattggaactattatagtgacacaactattgtgtcagttcagcagtacatgcatcgtactggttaagagtgatattatggccaattatacttttgggtgctattgatgctgtcatagtggtacaaacatagtgtcggtcccgcagtgcaaccatagtgctgatagtggatgatgtcatggtcagt

SEQ ID NO: 247191 - DNA, 1584 bp, Cannabis indica
ggggtattagaggcacattggccaatgctcacagctccattccacttgcaggcctttcctctgaatcggcggaacctagctgtgaatggcgagttgttccagtctatcttcaccaagccacctctggttgcccaattatctgcattccataagcttgtgtgaaccttcatcccttgcttgttggggtatgcaatgccctgattttcatagtttcgaaaaactcgaattggcaaactatcaacgtaccacctgatatttcaaccttaaagtttagtgtttgttttgtttgtttactataaactgttaagtattttgtgttttactttttttaaaacttacacaatctcagtagggttccaatgaatggtgtagttgtggaaatcagctgttggatcaaaccaggggtagaattgctgctccttgcttcctttgccttgtgtgtagaggtttgtgtggataatgtaaggttgtcccgagacgtttcctaagaactcgaaatcgatctcgtcatgtttgtcaccactagaggttagctgcagaaaaaaattagtacaaaagaattagatttagacccctttcacattttttcagtttatatgtacgtattatgaacttgataatatgttatgctcataaacttacatagtaggctgtaacagttcctgcagaatttccaggtaccaacttgatgagcatttcaatgctaccaaataagaaacctctctttgattgagcagcagaccctggaaaccaaaacttaaaattcatacacataatacaatagtatattatattatttcttgtgtaatgccattatcatatcattaatgtaagagaataattacctgaagtttgatcgagaacaagctgaagatcttcaccatctcctgaaatagatgcatgttgttgaccccaattaatatacatactccttgaaatctttgcatcaacgagtacttgatcaaaggcaaagaggcacagagctatgaacataactcgtaaaattttagttcccatttttttcgactcaaaaccagttaacaaagctctttttttttctttctttgtttttttgttttgttttaatttatggtgaacatatgttttgttcgaaatgggtacaggggtggtttagtcttggggttttaatgtctttatatagcttactaataactatcatatatgcttggtttgtaacggctaacttagtctcacgattaaattttctaattttggattatggtttgacctcgtcctaataatttgatattatccctaagaaagtaaatcaaaaacgtttgaagtgaacaatttaaagttaggtttggtgcaattttgtggtacattttttatttaaggaagtcccctatcctagaggtggttggtgagtgttgttttgagcaaagatattgttgtttctctctctctctctatatatatattcaagggacggccaagattaaaacttgcaagtgttgatccactactaattagttggtcattagtaggggtgggcatccgatccaatccaaccttttttttctcatccgatccaatccaattagtaattggatttggaaaatc

SEQ ID NO: 247192 - DNA, 1288 bp, Cannabis indica
atggttgagagccaaaggaggtggagccacaccctgaaaaaggttttgtatgagctagattagcttcattgttgatgagatcctactctttggcagctttgtcaatgcaaacctctttagctattaataaagcttcaatttttgcaacactataggcatccatcttgatattaacagaggtgataaatacattatactcaattgccaaaccattaaagatagcctttatgtgatcttaagcagaggtggggtggccaattgaagcaaatgtatcaattaagattttgatcttgaggaggtagtcactgagagcaaggtttttttactagctgatgttggcacgattcaatgtagtgtagtactctctcagattagtttagatctatacagcactgtcacaaccaaacatgcgagtaaggattctttcaaacatggaagaaagtaaccaggatacaatgatgttgtcctgttgctccattgatgggcaaagacgagtcctccatggcttgaacgatgaagctctaataccatgtaaggacttttgatccaagaagaacgaaagaaagtaataaagtcttattattgaaatgaatgagaattacatgtatttatataatgatacattaagctaatcaaaaattaaaccagatcaagtaacatactcctaactacccaaaaccagttaactaacttgacaactcagctatcttagcttcactaacacataacacttctctaaaaaagctttaaaatatttaaagaaccgtactaaaaatacactacagcagatgctttaaactctttcttcattttaaaatttctttaaaatgtactatttaattatgctctacatttatagaatactattcattgctctaagcacattttattaattattttagcaagaaaatacgtgttgatattaaaattatatatttgaagtgaataaaatatattaaaatttttaaaagtagggctttgttgatatattttaaagaagttgatatatgtagtagggctgaacatcgggcgagtttaccgagtattgggttggtgggttttgggttcaaaaaaataaaaccaaacccggacccgaatagggcacgagttgacgggttggcgggtttcggttggccgggtgggcaggttgaaaatataaggtaccgaacctgttcttttgattaaaaacaggataataaatgagtatattccctacttttcttatatacatttttcataatcgtttttataatatgtataacccttttgttgtactttttatctcaat

SEQ ID NO: 247193 - DNA, 739 bp, Cannabis indica
aactttattaattcaaatcatccaaaactatggatgtcaaaccagaaggaagcgaattccaaccgaatacatactcaacttccaaaccaaaagctcgcgctaatgcgagagccacatgatttgttgaacgcttaacaagacaccaagaaacagactcatgttcatcaaacaaagccttacaatcaaaaagcataaaaccataaggagagactatatgtttaaaataactcaattaatcattaacaagtgtaagataatccatctcaacaattatcttagactaagcatgacgcttaatccaactcaaaacttctttgagaccaacaactttaggttgcgaattccccacacgattctattgaactgcctccaacaccaatcccgcaactgatatagccacaaaaacaaatacacaacaatattctataattgttattgagttaaattatgtgagactcgatatttaattctagttataacgatataattaatatctttggtagtgttagacacattagtacattttagcattttatagacatatttatagaaatactaaaagacactaatagtacctaacactctcttaaatgccatattattattaatgtaattaaatatgagatctcatttaatataatataataaattttagggaatatcgctaatcaatttagagctctacctctaaaaagtattagacatcattaatacctaataacaatacataaaacaattt

SEQ ID NO: 247194 - DNA, 1063 bp, Cannabis indica
gacccacttacattctatagcatgttcaccgggacggagaggaacacatcccaagtcttgttagccacaagagcaatgatttcggtgtccatggcttgattccattcacgaatggtggctgcctctttatagctagtaggtgcaacaatggcattggcaagccaaaatggcagcacgaaactgaggagataacctgttcataacaaaagaaattgcacaaagggtgagccgtagaagtagaggaaccatcaagggtacaaacataatcattcaagtgagatggaggctgagattttcggccagatttggtggtttggacacgcgaagaagatgtggcagtgtcatttgatgtggtagtggctgctggttgttctttttagggcaagccgaaacccaaagagtcattgtgtccttggaactttgttgatcctgtagagggcaaaagagatgcattaaaaaaaattgaatgttaggatccaaagtcttattatgtaaaggaaatgtattctcataaaagataacatcacgagaatgaaaaatttcttgagactcaatatctaataaagtataagctttcataccatgagggtagccaataaaaattacaagccttagccctaggagaaaacttatggcacttagcatcaagagtagatgcataggcaagacacccaaaaacctttagatggtcataagggggttgcctcttatgtaagagttcaaaaggagatttcatcttaagtaacctagaaggagtgcgattaataagataaacagcagtgttaacaatataactccaataaggcaaagataaatgtgattgaaaaagaagagcctgggccacatttaatatatgttgatgtttccgttcaaccaccgaattttgttggggccgatcaacacaagaatgaaaatggttgacgccatccgaagcatagaaggcagtaagattaaattccttggcattatttgagcgaatggccttaatattcatagaatattgagttgcaacaaggtgaaaaaattgaggaattcgaaaagaaacatcagatttgttagtgag

SEQ ID NO: 247195 - DNA, 1289 bp, Cannabis indica
atgtcttgtaaagtgctttcattcactccgttattggtactgagacctctattgagtcaacatcactatcggagacttcctcagccgaaatctccatctgggtaatgtgtgtgacaaataatctatgggcgagctcgaataatcgttgtttaggggcgtagtttaaaaggggaagaagaaggttgaggaagtgtactaggggagttgagttcatcgtgaaattcttatgcgcagtggaattgcaattaggatattagggattttactttagttacagatattttttgcgctgaaaaaataaaattatctagtttaaattaagaataaatcgttaactttggcagagaagagaaaaaaaaaactttaaaaaaaaagtcaccctataatttctcataaaccaagaattatgttatataaaaattagaaataaaaacgtgaaggtgaatagttttatgttatattatagtaatttttttaaaaaaaaattaattaataatagtattaaaaaattagaaaaaatacgagaataattaactaattaaaaaattaaaaaattaagagaattaaggagaaaataaaaaaaatagactttaaagtatttttagaccgccacgtcaccgcctcatacttctcatttatatatatatatatatagatttttctataatttagaagattttaatttaaaaaaatagaaaataaaaacaatctaatactcctgttgttattctttttccctctcgacacaaacaatctaattaaggaagtgtcagacgagataacgatagtacaatgagtgttaatagggacaaagttcatttcacgtgcaggtacaaaatgaaaagggtatttttagtgtaacttaggatgtcgagtacatcaaaccacctaggatacaaaattatcagatgtgaaagtgatttcacattcgatagagtagggatctagtaaagttgtaaagtactaaaggctcactataaatagggcccttaaatttattataaaagaacttttggtgttagtgaataaaacgataatatttttggagatcaaaggttgtgattatttttatttcaatcatttttctatcaagatctttaaatattattttaagtctttattcttttgttgaggagttctcaccatcaacaatttggtttcttaacgttaaaatcaattacattacaaatatcaaaactcatttataaatttacatgcttcttataagctccaagacttaaccaccaaaccactactaaaactaaaaccaatacaagaccaaaattaaa

SEQ ID NO: 247196 - DNA, 1246 bp, Cannabis indica
aaaaatgatttcacagccccacaaatctcacttccaattatctcccaattgtcttgatagaagctactggagaatccatcaggccctggggatttattcccaggaatactaaagacagcctttttgatatcatcttcagtgaactcctttaagagacattctgcttgatccgaactgaccaaaggccctttgttaataacattcctctcaaccttcttcctgttagatcttttagtgcccagcaagtttttgtagaaatcaagaaaagcatctgagatgagagaagagtctgtaattttgaagccctgctggttttctatagaaagaatactattttgtctcaatctatgcttaatacaagcatgaaataaggcagaattcgtgtccccatcgtgcaaccaatccattttagcctttttctttaagaatgaagtataattctgctgtttttgaatcactttctcccgagcttctttctcttgttggtgcggatgggctgctaaaggctgctgctgtagacttgcttggagagcttccaattcagcttttgcatttgttaattgcttaaataagtcacaaaatccctctctattaatcaccttgagtctctccttgaactgtttcagcttgcagacaacttgaaacattttaccacccgagatattcagactccacactgcttttaattctgtctcgtacttaggatgagatttccacatcctaaagtatttgaaaggtcttcccccccccccacaacatgtggatgtaaagacaaaattgccggagaatgatcaaagagtccctcattgagaaaaatagcttcaacacactcgtacttgttgatccaagcttgattggccataaccctatcgatctttgaataaattctatcagaacccggttgcttgtttgaccaagtgaaaaaattcccacttgccttaacatcttcaagcttacaaaagttcacacaactaagaaattcagagtcaggataagatctcaccctttgtcccaccctctcttccttcgccaaaatatcatagtcacccattacacaccaatattcatcagtatacagaccacacaaaatctccttccataagatatgcctctcagtcctattatttgatgcatacacaatagtaagaaaacaattgaagccctcaattgttgacattctcaagtgcattagctgactagtacacttgaaaatatcaacagagaatctatgagggttccaagcaat

SEQ ID NO: 247197 - DNA, 953 bp, Cannabis indica
atttgttatatatgaattttattaagtacagacacttagcttcaatcaaacaagagaggaccggagttgataaccaataagtgaagtaatgatggtgaacatgttcactatccaacttaaagagaaaatgatgttagacaggtttgttgtttaggtgacatacaaacgtagcacagagattataatgataacttctctttaaagcctaatatatatacacaaatatatataactgtttatctaattaataagtgattacaaaaagtttggaaatgactttctctttctttggtgaataataagggaggaccggattgattagctaggggggaagaacgtttattattgtttttgcttgaacaatagtctttctaaaaaaaaaaattaaaaaaaaaaaaaaaaaaaaaaaagaaaaacttttccaaagattgatataattagaatgcatgttaacttaaaagagtcaaaattagttttgggttttacatatatacagcatatatgttttttatactaaaatagtgatacatagccaaaagtatttaaatttcaaaggcttccacatgctagcatgcatatactactttttcatgaggaaaatctttggattaattaggtaatatcatgtacaatttatatttatgtaaaaaaaaaatatttttttaacaattaaatatttaattattgtaatattaaaattgatatttactcactaaaacttctatattgtgtctaaaaaagttatatatcatcaaaggagatgactaataattaactaagtgcttgtttgatgtgtattgtataatattttgttggattatattgtattaatattatttaatataatattatttggtattgatatgtattaataggttgtgtaaaattatactattattattacaaactcgatctcaaccgtagattggaaccccatactcagactcactagg

SEQ ID NO: 247198 - DNA, 1757 bp, Cannabis indica
caacacacacttaatctcaaaacttacttacttgatgtatttaagatattcaaactcttctaagatgaacaatattatatcgttaagtaaagaaatgagtgattgtacacacctcttttaatgagccaccaaacaaaatttacttcaatttgtaaaataaatccttgctaattaaattcacaacctacaatattaaattttactatattatccaatatatcaagaaaaataataataccacatacatattataaagttaagattttagtaacacaatatatcataaattttttaaacaaaacttcttttttaattataattactaatgtacatatcccaaattaaacttttcaattttatgttacacaaaataataaagttgtatatattacaacttaaagtttaatcaacacaattactttttcttttaaaaaacaaaaatacatttgccttttctacacatccaacatccaacattttctacacatccaacctttaaaagtttctaagttgtatcatatctagttaattagctaataaattagtaatatacaaacttttaaaattactattacactaaaataactattacaaaattatacaaaataaaatttaactaatttatatatatatatatatatatattgtaacacttaaaaatgaataaacattaccctagaataactaattacaaattcttaaaaaaaaaaaaaaaaaaactttaactgttttaaacactggtggaaaatcgtttggaacacaaaaactctcccaaaaataaaacttttcacctggaaagcttttaatagtagcctgaacctctttaataaaaaatccattcctagtccttacttccctctctgcagcaacaagattgaatcggttacccatgcccttttccactgccctagagctaagtctgtgtggaaacattcttctgtcaaagcattctactatgaaaatgttattgtgatattaaagaattttatctcagaggcttagaccatcttactagtgacacttttacattgtttattagcttaatttggcagatttagaacaggaaaaacaatgcactctttaactaatttactaacaatccccttgaggtagaagattttgtttgctctttatcgcaggattaccaagaagttcagactctcacaacccgcaccagtccttcggagtctattgtttcggatcagaacccagcttttcaagacgatcaaccacctcatcaaattgatccagtacctcgctctccccaacatggccattttgctctttcagtcgatgctgcccttgatattaatcatcttaaaacaggtcgaggagctacacttcacaacagttagaaccaacaaattgcaagtttttctatctcaaaatggggtgcctcttcacccctttttgctgaagcccaagctttgttagaaggtcatctttagtgtactgcaatcaagctccctttggcctccattgaatcagattgcttacaattaatctcaaaggttaagagctattggaaggacaattctgctttgtccaatgttgttgacttgattcgggaatccttatcctcatttcctaatgtttctttctaccacatttcgaggaaaaataatggtgcaacccatcgaaatgctagagaagcttcacggcaaaataagaatcgggtttggagcatctagcttctctttcgtgctttgtaactgtctcgtggtttcctttagtctttctttttacgatttagtaac

SEQ ID NO: 247199 - DNA, 1118 bp, Cannabis indica
tattttgccaattcaaaataaatatttctttgaacatccttacataactctttatcccaacccttgatagtgtttcaaggtggcaattcagggatcatggacctataattctaatctccaataaactagattatttattgagtctcttcaaccaaataatctcttgttcattaatttcatgattaatccactataaatatagaattgcactcttagtaattatagaactatacttactgagtttaacttcggtgtccattgatataatcaattctagtgattagcccttcatgtgttagttcataattagttttggtcaaaatctcatttaaattttctaattacttctttacctttggggtgtgtttggaaggagggaaacatgggtggatggagagggaaggagggagaggcgtggtaggagatgaaaaatccatttgtttggcatagaggattgtgggagggagaggggaggtggaatgatttacaatctattcgggcgcaccattttgaatccttcctcaaatggaaggatttatactcttctttctaatttattttaaaattacatatacaccactataaaaaattataaaaaataaataaataaatggatgataaagtaattttataagtatatagtaatgtatccttccacctctccatctttctttccaaataacttgaaaggataattaccatactctccctcccttatattctctatcttccttcaactctccatccatctaaccaaacatagtgttagttttatcaatttacttgtggaagtataatttaagatcccatctgaatttatgcacaacattctagttctagaattaacacttaaaggaacccaacattcaatccattaggaaagtcaggactccataattgtacatcatgtccccagccatccatgttattagattcctaaaatagaagttgtaagaatcatcttttttgagaaactttaacgagtgaatcaaaaaaactaataacatgaacaggagttcatgataactcaggatttaggctaatatactattaatcatcgttatgatatgaattaggtctttatgataaatagcatgttgataaagacaactttattc

SEQ ID NO: 247200 - DNA, 1050 bp, Cannabis indica
gtataattacatatattaaataataaataataattaatatattaaaattcataatagttactatatgtttttaaactgatgcgttttgaagtttctataataaagtgtaattatattaatagttattgattattgatatatattatattaaattgttttcatattatgtaaaatatatgtaatataaatttattgtattaagattggaacgttgggttccataaaaaatataatctataaattattatttttattaattagaatgtactaaaaatatcatttattaggataacgtttatgataacgtgagaaggtgaatagattttaaaattaacaactaataaaatacttattaattgttattagtttgttagatagattataaatccttttattattattacataagaaaaattagaaaaaaccacaaattttgaaaattaaaatcctaaaatattaaattgccacattattgtggttaacgacagaattatatagatatatagatttgctcaagagttttgttgattttctaacgtaacattctggtgtcccaccgccatagttctaaggatagttgactatagtgacacgtatgtagccaataattattcccacatgttggaagggaagaaaaaaagggcacacatatggctagtttaccagcgcctacaatagatttagagttatttttttttagttaaattttagagaatatttattgaggtagatagtttatttggtaaaatatgggagtactacaccattaggaaaaaaaaattctttctagaaatttacattgatactattgtttttttttatttttaaaaaaacaataaaaaattatagtaaataaagttatttttttcaagtttatatatctattatatataaagtataactatataacaaaattcttaaagtgtagctatgtaacagaatttttggtttaatagaatttttttggatctcaattacttagcagaatattctttattaattttataatattattatatgtatttaaaaataaaaattatttatatttta

SEQ ID NO: 247201 - DNA, 966 bp, Cannabis indica
ccagtggtacttgaagtttgattaggttatgacatcatttggtttcgtcaagaacaagtttgaccagtgtatttatatgaagatcagtggggtcgtcgtatttttcttgttctttatgtagatgacattttacttgttatcagagatttgtcattactaaatgagaccaaacaaatttctatctaccaactttgatataaaggatcttggacatgcatcttttgtttcggggattcatatttattgtgacaagaatcgaaaagttattggcttatctcaagaagtttacattaattgtgtgcgcaaaaggttcaacatgaatttatgtaaggttggcgttgttcctgttctgaaagaggataaatttactaagaaacattgtcctaaaaatgacttagaaagagatgcaatgaagaacaccccatgtgcaaatatagtaaggatttttatgtatgctctggtttgcactagacctaacattacttttgtagtcaatgttcttaggagatatttatcaaatcctggacatgatcattgggttgcagccaagaaagtcatgggatatttgcaaagaatgaataggtttatgcttgtgtataagcatgtcaacaatctttgaattgttggttattcatattcagattttggtagttgtgtagatgatttaaagtcaacttctggttatattttcacttttgttggtgcaactatttcttgaaaaagtgttaaatagactttaatcacataatctactatgtatgttgagtttgtcacatgttatggggtatctttgcaagctttgtggttaaagaatttaattttagagatacgactaattagttctatttcctctcgtatgctaatctattgtgataataatactattgtattcttttcaaaaaataataagattactagtgcttccaaacatataaaaataaagtatctcactgttagagacttggt

SEQ ID NO: 247202 - DNA, 988 bp, Cannabis indica
taaatacaacttaaacactcagccccaatccccaccatcaagaccatttttattcttctcttcttcatttcttcatctcttcatctcttcttctcttcttcatttctttatctcaaccaaccttaataataagcttaactattattttttcttctcttcacctcactattttttctaaagattttttccataaacccatctccatctcttctctttaaatctatcatctactctcttaaaattcctaaaactaaaaccctaatatgtaatcaatccaatctctatagataaaactaagaaattcttttagtttaatcactatttcagtaagttttattatatatatatatattctccaatttaaataaatatatcatattatatatacccacataacataatacatatacatgttatttttttttttatgataaacaatacatatacatattcatgagcatcattctctacttcaattagtgtaaaacaaatagaatataaattgagattttgttcattcttttttgtgttaaattttaaagttttttttttttattaaatttaaagttaagttttggcttggttgaattttggttctttaattcacgtattttttcttattttatgaagaaatcatattttatttgttttgttatctaaatttaaataaatacactactatattaatatcacattatttatgaattaacaattaaaattaaagattatattgtgttttcttaggcaagagtgatgttttctcagttttgcaccaattggctcttatgcatatttacttatgattagcatttttaggttatccaattgttcaatcacccaagctcaactctaacatactatattttggtaattgaatggcacaaagcaaaataccaagtattatagatccaaaacaaccaatccaacgaaagttgatttggaacgaaccaactcctcccccatgcacaacaactcaattaaatgatga

SEQ ID NO: 247203 - DNA, 986 bp, Cannabis indica
taattaaacccaaaaattaaacaatctttttaaattaaaaaaaatatatcttagccacatatctctctaacaaaccgtatatcccaaattatcaaatctcgctttggtttacgatcaaccaaacgcagttatggctttgcactccggtatagatttttccaaccctagaagttggggcttattcccttgcctatgttatttacttttgcagatattattggaatgaatgggaataagttggggttttgaagatggtgcttttataattttattacgtacgccacgtttaagcatttgtagcaaatacagtataaaatcccaaatttgtcaattttgactcgattatcaaagctttgtttctacttggattctgtgttccataatctctcaataaaagaacaagagtatctgtcttcccaaagaatagcgcacgaggttagactacatttaaatgatcaagaaagaagagttaatttttaggttttgcgtggcataaacttttgaagttgatatatatctctctcttttttggcagtggttacaggtggagaagagaccgacttactggttggtgtgaaaaatgatggtaataaaattattatggaggtttggaattataattatgttttttagttttgtttgttcttcggtgtacttgatattatgttcttatgctttgattttaataattctgtattgctatatcgttttgatgactttagatttggtaattttgtgtccgcttaactaccaagctattcccttatgctttcattttactttatcaatgttatagagtgatcttagttgcttttcttgatgattaaacaggggactcaagaattactatcgatcataatttcagcctatacaaatatatagtttctgcgaaaatttgagccaccatagacttgataatttttttagtttatttgtgtatttatgcgtttttttttttttttgatgaattactctttttaaaaata

SEQ ID NO: 247204 - DNA, 1069 bp, Cannabis indica
tagttataagttgtcactaatttagttttagtcacaacaagtatagtgacagaaaatacattaagtcacaacaaattgtaatttttgtgactaatacctatagctacggaccttttagtcacaaaataagaataataatttataattggttacaaattttttacttgtgactaagacttagattttttgtagtgtccctttatgtttccaaatatcaccctcccactgtcaaagctcaacctaggagagtctccctcgtcgtcgtcgccgaaccttagctctccccacaactgtctctttctttcccctaaatatcagaacctcaaatgttttcgattattccctcttattgttcattttctttttatgtttatagaacttcttctctggtttcatggtgtaatagacctagatctcatttcgtgcttttggatttgtataaatctagttcttttggagtttgttatatgtgagattctaatttttggggtttggctttcatgtttacattaaggcttggaggtttgagggggcgaagacgatgaaataggtttcgttccctgaaatgtaggagagaccctcgagttttttgtgggttttgtggctttgttcaagatattacactactagaaaaataggctttagagacagttttttgagacatacaatgttacttttggcaaaatttactaccaacgttgttacaagtgatgtcgtaagggagaaaattaaccgacgatataaaacgaccctacaccgttagttattaataactgatggcatatggaggtcctgttgaaatattcaacatagttactaaattaaccactaaatttcatataaaacctattattttcacatatatattgttttatttttatgaatttattttaattaaatatacatttcatataaataaattaaattaaccatataactaaatgtgtatagatacattattctaagtaaatatatcacacaaatatttcaaacttagtccaagtatttacaagttattatctaattcaacatagaaaaataagggaaaaaagttaacaagttatctaat

SEQ ID NO: 247205 - DNA, 580 bp, Cannabis indica
tgttggatagccaaatgaacaatgtatgctatgatgttttcaatctattatttttctctttatattgttttaaatactatcatttgctattatacatgttataactcatatgttacatgtgttatatatggtgttaagtatcataatgttcaacaataatgattccaataataaagaatggtctaaaatatttaattatacaattaaaaagaagcagcatagaagtacctttggaagaatttgaatactatataccacaagtaatcccattctagctacaacatatatagtgaataatgttatggtggtgactatgtttttatccttatattgtacacatatttttttaactgttcatctatataacttctaaaagtaacattttgtaatatgtatttgtctgtagcttattaaatattctattttacttcacatttattatcaagaactaactatgcttgattttttatttctttgcagtggttatggcaaactattataatgggctttagcttctactgaaatcaaaatcacatttataaaattgtgtttgtaaacatgaaacactaatcaagtttct

SEQ ID NO: 247206 - DNA, 887 bp, Cannabis indica
cttagttttcatttggttctttatttttgaacacatgatcggactaataccaaaatgaacttgtgtaactattttttgttaaatgttaatatcagttatgatccccaaactataaaatcatcatatttaatgatcactttcaaataatgtatcatattttactgtataaattttggagtaaaaacaaacaaacttggggaattgtataattgtatataaatataaacaaacttgcttatgtgctgctttaactttcttggagtaaaaactgatccagtagacacttctgaaactaaaacctttgaacatgttacatatacgagctttttatgaacaatcaatgaagcactaagatcttttttacttgggaaatttgagaaattctacatttgatgccaattttaaagatagcttaatctcctacagctgcgatatatatatatatatatactacatatatagaagatgaaagtgaaaagtaattagtaaattaaaaaaagcagtagcttcatcatcactgtcatggtttgaaatggaggagacgtcagagtcgaaggtgaatgacacaaattcaatagatgggtttgaatataatgaagcaattttttttacaataattattcatttttggtgtattttttacttttaataaattttaatacataaataacaataaaacaattattatcataacaatataaagtcaatactaatattctacctaaagttaattcacaaatatcaatatttcgtccaaaaattatatattatgtatatgtaaaataattacatagattggttggtttagtccggattaattgaatttaaaactaaagactgcggtttatatgaatacctaatatatatgaatgtacaatggtagaatt

SEQ ID NO: 247207 - DNA, 523 bp, Cannabis indica
atattttgatgcataatttgagtacacatatggttactcttatataagtaaatcacgagtatcaacaaccaactacatggacttgagttgaatccctacaaaggctcaaatgttgcattgtgagcttcacacacaccggcgcgttgagcttgtaaccacttattgtgaagttggacttgagtggattcaaattcttgactcaatattgaggggatgttttttctaagcatccctaccactctaccaaatggtttgggatgaaatatcattaatttagtgtaaagctgagaagtgaaatacataccgataatggaccaagtccaacacccaaataagctttgtatgttgaagccattaatgcagccattctagccattccatggataatggcaactctcaaccttctagcattctcatatctagaaaataccagagaaaatatataaatgaatggtaacaagtccagaatagttactagttcgccaaatgtgattcataacagattacaaatgtggttcattac

SEQ ID NO: 247208 - DNA, 624 bp, Cannabis indica
ggatgtcttctgttgcaggagatagagttttccatgctatctagctatcccaatctccacattctgagaaggatcctggattacataagtgttattgtcaagattgattgtaaatgaggtgctgtccaatagttcattaatggataagagatttattttgaaactaggaacaaagaggacattattcaaagtcagagaagagtttatattgatagtacctatgtttaccacaggaactttatggccagtgcgtaggataacatctttgggatatgtagtgttagaaaaagaactaaagcaagatttgtgtgcacacatatggtgtgttgcaccagtatcgataatccaagtaaaatcagagagaaaagaatttttaccagccaaattggaagcagcaacaggttgttggtcaaaatccacgcgagcagtggtgtttgtgagatgctgacttaggaatgaaatcaattgctgacattggacagtgagataagttgggttggcaggggtatcaacatggttggaagaagaggcttggtgagcattagctttgcctttgtcctgcttctttttatctccatatccgggtgggaagccggaatgcagaagcatttatcaaccaaatgc

SEQ ID NO: 247209 - DNA, 659 bp, Cannabis indica
agcgctgaagagtattattaatctacaagtcaatattattgagttatttggctatggagtattttacacaagaatattcttgccaaattttttaactctttgtatgaatgtgaagagccttatttataggttgtattcggttcgagtaaaactgaacctattaggatttgcatgtgtaaaataagcctactgatggggtaaaatgtaaaaatacattacaatatagattgacttcgggtcggtaagtgaggcccaatttgaggggtaaccgttgtccgtacggtgtcgcaccatttgatggtcatagctgtgtgtgcgccgtcgatcgtgaacagtgaatatcaaagtagtggatattgtacaaaaatgtagtttgcttcttttgcgtgcgccttttctaggtctgacacaaggaacaagcccctgattcttaaggattttgtgtcagaggcatgacacgtcagattgatctcagagggtagacgctctgtgatacccttctagtactcctttgggatatccctagggatatctactatttgtctatgttttctcgaatatgctcgataatttggttgtgtcaaacttccgaatctacttgtctgactctattcatgataggttcgtggttgaatccggattcccattcaactttgttt

SEQ ID NO: 247210 - DNA, 638 bp, Cannabis indica
aggagttgtttggtgtgtttagtttacttctctaaaataacgaaatatcatttttaccattttgttgtgaaatttgcctcaaccaagaacacaatcaaaacaacacagtgacaaaatttaagaacagaatacaaaatgaataaaatggacaaatgaatttccaacgctttgaaaggaggcaagtgggaacaacatccttagtaagaagaaatgacagtatgtgtcctcctcacccaacaacagtaatttctagcactactttcagccaagattgacctgttacaagtaataacaagttatacacttctgtttgaatgagcaaatgggtttagcttttgaaaatgagttagattagtcattaggtatttgtattagtttatacgaaggtagtgttaaatttccaacccaatgagtgttatggaatctaatgcattccaacaataacaactacaatattcatcaaataagtcaaagatctattttgggcatttaataataatgaacatacttctgatattgtatgtagattctttgatcatcttctttaatcaaacttatccaagaaacacaacatacaataacaaataaaatgcaaaagaggaactaatgaagagcatacccttaccattaccatcata

SEQ ID NO: 247211 - DNA, 1316 bp, Cannabis indica
atacagtgagttatgacaggccttcctgattcctccctcaggtaagggtaataggataaaatagatcagttttccccttaaattttggcagacacaatgaaatatttatttgtaattggtgttctaaatatgatctttaggacatacaaacacatttactgtgaaatgtacaaattaagtaatgtctcttatttaccttttgtactatatatatgaagttgaaattcattttcaagtttgtaggagagagaaaggtaattataacatatgtatttattgtatatcctttttttctttgggataattttttaaaaaaataacaagaagtatgaaatttttaatatttttatgattttttaaactttatttacataaaatatgatttttttttgtgtatttttatgttgtattcttgttattttgttgttgattttttgttatttgtatattattttttatattgttctgatgttgttttcttgttacttttatgtagttttattgttatttttttgtgtttttatagaatatcttaaacatataaaaaaattatacgtaaaaatgtaaattttttataaaaattaataatttatgtaattattcttttcttattttccatatatgaaacttcacagagtacatacatcgacgacttgttttcgtattgcatatcattagtatatgagcttaggtggaaaatagtctcaaatctatatatttatgtaaatagttttttttatatataaatatgagaaaatgtaataaaatttgcgacttcctgctgcacaccgcttgcaggaaattttagagttcttggagcacaaatatgatgtggaaaacctctccactattctagcgaatttgtaagctaatgggcgctctagcccattttacaaggactctcttactttttataatgacctgaagacataaataaataatgcaaaaagatacgagaattaaagtttaaaatataagaaaaaaaaagaataaataaatttgataagatttataataataagtttcgccgaaaaaattattgaaaaagttattatttctaaaatagtcactgaaaaagtcatcgtcgccggaaaaaatcatcggaaaattcattgtcgtcgaaaaaatcactggaaaagtcactagaagtaggtatgtcagatataaataaaaataaaaccgattctataacataattaataaaatcaaataatacaaaattactcaagccgactacaattgaaatagtactagttttgaaacataatgaataaaaataaataacacaaaataactcaaaccaattataattaaaa

SEQ ID NO: 247212 - DNA, 954 bp, Cannabis indica
ttttatggatctcctactgtacagaatagatctgattcatggacacttctccgtcgcctttcggatgtggcgcctatgcaaccatggttggttattggcgattttaatgagattttgggaaatcagaataaatcagggggtaccttacgaagtgaatcacaaatgactgcctttcgttctgctcttgattactgccacctctctgatcctccttttcaaggtgattgcttcacttgggcaaagaaacgaacaaccgtcaacactctcaaagaaaggctcgactggtgtttcgttaatgatgtgtggaattcgactcttaaacaaccagaggtgactcatttggattactttaactctgatcatcgtgctatttcagctgtgttaaccaatgcttcaaccacccagaacctacaaagacatagtcgattccgttttgagaagttatggttatcggaccctgaaagtaaggatataatctctaattcttggctaaatgatcaagcttttgatcctattacgggtgtcctcaacaaccttgaatcatgtgctcgatcactacagtcttggcacatcaaaaaatatggccgaatgaagcataatattactgctgcacaaaaacgagttgacactttgaataactctcattctctgaataatgagacagcagcaactctgaagcaccatgaatccattcttgatgacttgcttgaacaagaggagatttattggcaacaacgttctaggcttgactggatgcatttgggtgataaaaatacaaagtatttccactcaaaagcttcagcaaggaagtccaacaacaaaataaattctctttataaagctgatggtaccacagccacttccaaacaggacatgagcagtgttattgaatcttatttttctgacttatttacagcctccacagttgacgatgatgcccttgctgaaacactg

SEQ ID NO: 247213 - DNA, 843 bp, Cannabis indica
ccccactatttctaagatactaaatcagttctaagtgactctataggccaaacatcgcattccactgttaccgagcataaaacatgaaattcataaaactttacatatacataattattaatgcacctagcatccaaatatatttccgtaattgagaaaatattttcttaaggcctatttctgccaataagtcttaatttctactaagagacacaaaatcacataataataattaaatctcttaattatctactaattaatttttatgatttaactatgcggttattacactaaaattcttgtctattttagaatttatggagtttttttttttgttttcaaaactcaatttatgtagtactaactgataattttttttttttaataaaaagtccaatttcaatttttgtccaacacctttggaccagccccatatatataaataatatatatatatatatatatatataaaaaaatgttgaacatgaaaatttgatgattataaggtgaaggtgaatcatgcaacgtttacggagttcataatatagacatatgactacataaataattttttgaacgtctaatatttaaaggaattaatatatatacatcttaaagtgtagtctccctccaaatgtaaagtagccttagttttctcgagagaatagaatattttgtgtaatctaagattaatatgtagacttgaagtgatgcaatgcgaagcatattaatttggtttagtgttttacatctaaaataatatactgtatatactatataagaaaaatgtggttgttttgagatacaagtgttgggaatacttagctttattattagtctctt

SEQ ID NO: 247214 - DNA, 686 bp, Cannabis indica
taacatcaaacatctcagactctatcaccaacccacgaccattacgacatctcagcctctctctctccaatacacggccagaccatcataatatcgaaggtaagatttcgagccctgtctttttcatttcatttcattatatttttggatgatttaaggttaaaatgtatgagtttattaataggtttattgatttagaattagaatgtatgatgaatctcagtgatttgtgaatttatgttagatggtttggtgagatctgtgttttggacaaaaaaactagtttttacaccaggtacaatgcctttctgttattaacgtcctcgcttcaagccttaattgggtttttcctcactaattcatagctcttatacacaaatacgtcactctagctgtctcctggtcaagcatgcttaactgtggacttctttcgtgatgggctaccagaaaataaaatgcaccttattgatataggtagtattaatcaatctatttaagccattttaaactatgcagtcctatacctacacagtctcagaatcatcacacttgactttcctcaagtggtgtgagattgcacagcttactggacattttttcttatagatcacaagactactgattatcacaaacattgcgatggtctggtcacgatggtcgtgagttggaaagagagtctgagatat

SEQ ID NO: 247215 - DNA, 794 bp, Cannabis indica
gaacaactccctcttctaggacatgatcccttgtagcttcatcatcaaatttaacaatagtgaatccagcgttcattctgactatctgtgctatccccaatttaccctaaattctacgaataaatccttcaaacaccataaacggagggttagctccgagaaccatacatatcactgatgaactccagaattcagattgtatttttacctcattgacatctatcatagctatctttttaccatcttgaacagtcggtttcaggtaagtaagtttagcatcttggtaggagatcttacctgaagtaaaatgcttccattgctgctgtgaattcgtctgaaaatcctcctgctcaacatcctcagcccaagtcttctggccactgcctatcactccagttccctccttcgaaatcccctgcttcactgaactacattcaaaatcaactattcccccaatcgacttcccctgaatctgcggactacagatctcatcaacctttaggtcaggttcgttctccaagcaatctgtaaaatgatcgctttgattctcgccaatctctccttcttggattgaagggggatctactgactgagccctagaagctggctttcgtccaacccgcttcttcctcgccatggaagacggagcagctggaacgcacgcacgcacaaaagttatcttactgttttgttactatcgattagccttgtctagccaagtatttggcttttctcatggcatgcttttagatttttaatcttctctctccatatatgcctcatcttcttttctt

SEQ ID NO: 247216 - DNA, 1634 bp, Cannabis indica
ggacccaccgcccaggttgacactgcattgggccataggttgacatattgtcaacttatatcatttccaacagcagatcagaagaagtcttctgggcatacactacaaaaaatagctacctttaacaacaatttcttagtcactatataaattttttgtgactaaatgtgacttttagtcacaacaaaaaattagttgtgactaaaacatagtatttagatgcaagttgtcactaatttaatattagtcataataaatattgtgactaaaaatacatttagtcataacaaattgtgatttttgtgatgaataactttagtaaggaccttttagtcacaaaataggaatactgatttataattagtctcaactattttacttttagtcacactttttattgtgactaaaagtaatattttttgtagtgatattctccgttttcgttaataattaagattttggtgctttcagggaacaaatagagtcatccaagagctaaaattgggaccaagcacccaggttgacattttgtcaatatgggccatttccaagtagtttctccaagaagtctttcgatcatattctccgttttcacaaataattgagatacgagtatttcagggaatcattcagaaccatttaggggcaaaaagctggacccagcgccgaggttgacattttgtcaacctgggctatttccaatcaatttttccaaaaagtgttttaggcattttttttccaaaaagtttttccgaaataacgaagatattaatgatctcagggagcaaattagatcttctatgggttaaaacatggacccagcgcctaggttgacatgggcacaataccttacgtcgaagttgacatgcaacccggttcacatatttttgctcctcaaacacgaattttgtttcgggcattcatcttattttggtcaaaaaaggggtaggagaccttgttcgcaatctcaaatgtcgtagaagtattaaaacgagccaaaagaagtcccccgagaagcactcaacgcccaagttgatgtatggccttgtacgctgagttttgcttatcatattttgattatgtctcaagcatgtgactattttttcattgtaaaatttgaattcacactttgatatttcacccagtcaataaggctgagtattggcaaaatcgaaaagtttcgagtcaactttattccaccaaaaagcgacatctccaataacaggtgaacaactttaatagaactaaaaaattagctaagtgatgtcaacatatctcttaggaatcaaaaaatacaagtcagggatgttttttcacttacccagcatccaggttgacgtcataatgtcaacttggacgatggattctgaacaaccttcagtaatacagtcataatcataactcactcaatattgagacgattgacacgattcaacgtgcattttaaatctctttcaagtcatgttacacactcatatcacaattataacgattttaagtccaaaatttgtgtccaagataagtgtaactttttttgctaattactcaaaaataatccaacgaacgtgattcaagctttgaaaattgacaatttcatcaagagtcagtttataccattagatcatcatcaatga

SEQ ID NO: 247217 - DNA, 780 bp, Cannabis indica
ccgagtacactattgacctccagctcattcgtggtctattgttcagggaggttcaacaactaaatgagttggaattttgggtttctgtggcaagaaaattacttcgattcagtgttgaggagtttgcattagttacaggtctagatttccatgcggagtctgatattttccagtataagcaggataaaaacatgcttgttgaactttgtttaaagggcaataaaaattaccaaggattctatccaagttgcatttacaactaacaatttaggagacaatgatgatcgatcaatcaaattggttgtcttatatttcgtttagtattacttgatgggtggtcctcctgataaggttgtttcgattgaggagcttgacctggtagatagtggacgttataatgagaatgggtggggtaaagagtgttttgagatgacagttgaatcatttacgggtaagatagatgcatgtattaggaagattaagaagaaggaaaaggatggtgggttatatacattgttgggttttccttttggccttgtaaatatgattttttttagtgttgttcgtatgttgttggacaacttttgaggtatttaaacattgacattcccaagctttttaactggcctaaaatgctaaagttgaaggtatctcagttgaaaatggataacgtcaacatcatcatctttaattggccattgaaggaggtatctgtgtgttattttacttttgttttattgttgttgttacttttgttatttatttctttgtttgactttt

SEQ ID NO: 247218 - DNA, 2419 bp, Cannabis indica
aaaattactacaaaagagtgctttgactcaattttactaacaaactaccagtgccatgagagtatttctcactaaataataacaataattgtattattaagttttttcttaagagtgactagagtagcacttggctgtagttaaatggaaattaaacagagaagtaacaaacagagaagcataaatcacaaaggttgaagccatgaccaaaatgttgattaaacagaaattcaacctatactagttgtggtggtgatttacaaacagagaagtaacaaaggttgagaacaatgttaataaaacttacaacagagacttggctgtagttaaatgggggactttcatcgccaggcgacaatgtgacctgcatattttcttcagcaagtgatttacaaacgaaaacccaaaagcactttaactaattacttgaagctttcattgtttttaatctatacaaacacttgctttcacattgaatttccccaaccccacacaaatcacaaaaataaaataaaaaacaaattgaagccacaaaacaaagtcaatcaagcaatcataaaacaaaattcgaaataaactcacaaatttcactaactttaggttgggaacaaatgctaacctctccgtagctggaacggctttatgggcggagatgcttcgtggtcgcgtcatggccggagagggaacagatcggggttgggcgatgctgactcggatgcctcaaggctggggacgcctccgacgagatgagaatgagatcgggctggtgtggtgggtttcggctggtgggtttcatgatcgggctggtgtggtgtattcaactttagggctggttgttctgctgagttttgtttatgtgaaaaaaaaggaagagagagaggcgcgagatgaaattgagagaggcgggctaattttaatttgttagttttcatttttggtctcggtatataactgagacttaaggggttgttaaacttttaagtctcagttattaactggcactatagaggcctttagtttttttattagctcttttaatctcggtttgggctttagtctcagttgtttaactgacaccattgctttttttaaatgtcagttataaactgacaccttaaaattgagctactctatggtgtcagttttttaaattaaatgattctggaactgacaccaaaagtgtcttttgtagtagtgaatatttgttatgcaacaccaaaataagcgtcatatccattacaaattcaacaacaatgaaatcaagtaccatgtccattgcattatattgaaagttggaaatacatagagattacaattactttactagataaaatacaaataatcattaaaattgttttcaaaatttttaacacctatatgtgaccaaaatcacatccatggacttttcttaaatcttcatttactctcaaatattcatttgcttcatacaacatgaattgttcttcaagtttggctatcttcctcaagagacccaaaatcagttctctacactttctacaagattcaacatccatccattcaaagaacttacatcctccatcagcctggataaattttcaaaataactattgtgttttcttattatgaacagtaataataaacttaaacatgggggaaaagtgtaagtcttacacttggaaatctgcacctcctgaaccaaagacctgggtttgctttcgtattcaatgttcttgcaatccacaactacaactacaaccacaataggaattttgaggttccctttcatggattgaaccaccagctcatcttgaccttcgactgttgataccacaactactgtaagaatcctccacatcaattattctcaatctttgtcaaagctttgttgtttacaagcttcatccaacattaacgttttcaaatgttcgagttgggggatatacaatttgggattcaggtattagatttgggttttgagataaaagttggcttttaattaattaagtttagttttattcattagttttagattttagggaaaattacaaaataaaaattttgggattaaatcaggggcgtacatgtatcccgttatttaccctaatacagtggggattaatggaatcacgagtttgttgagcttaggtattttcaacgccattttttgaggttgggaactaatctccagcaaacctaagttttttgagacttttgctataattttcccattattttttagtatatttagctatagcgttaataaggatatgtacatattaatacgaaaatattaaggggcacaataaggtaccaagcacacaaaggtatacaataccgtattagtgcattataatatcagctccaacaattttaattaataaatgattggaaaaatctaaaccattaatggtaaccacatcggtatagtattgaagct

SEQ ID NO: 247219 - DNA, 589 bp, Cannabis indica
aaaatcagagcaatttgttttttgagcacctagagccccgaacacccagcgccaaggttgacaatatgtcaatcagggcaccttccaagtattagatcggcgattcaacttttttatcttctttgtcttcatcaaaaatggggaaatgggtcctttcaaaggaaaaacaacaattcctgggcataaaaaataggacccaacgcccagattgacacttggggatggccctgcgcccaggttgacatttttcaacttgggccattttaaatggagtttttcaagaattctttctagcagcttctcctttttaaaaaaatattgagatttaaactatttccagggactaaacagaatttccaaagggccaaaagggggacccagcgcccaggttgacaatactgttttcgatcaagttcagcaaaaagtcttccaggaatttcttcgtcattagaaataataaagattcaagcaatctcgagaagaaaactacaatcccaagcccttagaaatagggcccaacgcccaggttgacttggtgttggcctactggccatgttgacaatcggctttggacgctgccttcaattgc

SEQ ID NO: 247220 - DNA, 1040 bp, Cannabis indica
gattgaaaggcaattaagtactgtctcttgaagttgagttgtttttgctgagaccatcattagtttcttgaatcaaataatagcatgatgtgtatagtttcgtagagattcattacactgtagtttgatattcagagaagctgcattcaaatagctacagttcacttttgaattgatattgcttattctttcaaatggtttgttttgctggctctaatcttctatgttctagtgaatcatcatctttaatccaaatgaatcgatcaagtactacttcatatctttcaggtgaatctactcccaaatcaacttggagccctggtgtggcctatgacttggtgcagagtctcaaacaccaatgcattttggttccacatcaacctcagacttatgttgaagctaaagagaagtttgatacattagcagattcagtagaaaccattgtaagcacaatggaagtggacaactcataccctgcaataacatctcatatggaaaaactgaatgaagctgagaaagtctctgctgtttcttctcattcagtaacaaacttgatgagcagtgatgtgaagagttacttactttgcaataaggtgagagtgtactcacagttgcccaatcatccattcccagaggacattactgtgctccccattagagaagacaagtgggtggctgtcagcttggagttcccaaatgaaaataattgaaaaattccttcaccccattatcgagacacaaatgtattcccttaaaaaattgatgcccatgtaatgtttttttttatattacaactcttttaagttaaaagacttggtttttatgtaaaaaagaaaaatattggctctttacaaatgagttagtagtaatcttttataaaaatatataaaagcatatatatttaagagttttatgggttttggggaatgggtgggtggctctcccttgtgcctaattttatttaagtgatactactgacgacgaaagggttgtttagtcggtaaaagtagtgtatggtatcgatgcaattatcatttccc

SEQ ID NO: 247221 - DNA, 716 bp, Cannabis indica
cggggactcgtttaatattttatcttatattttataatttataatttatgtttgcatttttttagtatatcagtatctttttttatgaatttcaagttgtgttttggataataattagtttattgaataataattaatgtataatatttaatttttatgtagtttaaatatttgtatattaaaaagtttattataataaactttatttttctattaggagattctccgctcgtccatccctgatgaggaataagcggagaaagaaattaaaattcttaatggaaatgggaacggagaagcaatgtccgctaattctccgcccaatgtgcatccctactctcaaaatgtcttaacctttttttttctttcaaaataatcttttaatattagtccataaaataaaacctcctaaaattaatttactagaaatcaatttaaaaacttattttaattttatttttatttttttcaaaaaaatcattttttaagttttgacaagtctcataaaacaagagatttgatccactcatcatttactcaataagattttagatcatatattcacatgtaatttaagtttatatataatactcacacaagtcaagtcacaaactagattattatcatatggtgcaatattagaagatacaatgtgatcaaacattaaaaatatttaaacattacacacacataatcatatatcatatacatatata

SEQ ID NO: 247222 - DNA, 972 bp, Cannabis indica
ctgctagtctgctttggtaaaactccaaggcaaaatccatgttttatataaatatattggagaattaatacatttctttatacagataaaaccagagttttagtagttaaaatttcagaaaagggtgattcaaattcaaaggcatgaattgaggaaatagaaccaagagaattgagaattgtattgtgtacttagaagagttgtctctttgttgatttgtgattggagccattgatgtaatttcgttccaccattgtaaagttgtaaaggattcatcatctaataaagatcaagccactaaggttgttcccacactggatgttttactaattcatcctcatgacaaacttaagcttttgcttactgctgacccatgcagttgtgaaatttgtagagccttgcttactactaatccatcctcgtgacaaattattattttatttacatttaattttctaaatttaaatttgaacagtaaaatccgtcaaatcagtaaactgttaacaaatttaaagtgtcatcctaactgtcaacatggctaccaacatagctgcttatgtatacaattttaaacacgcgtcgtatttatattggtacacctaatttaattatttaaaaaatataaaaagttattttaaaaactaaagtttttaataattaaattaggtgtactaatataaatgcgacacatgtttaaaattgtacatataagcaactatgttggcaatcgtctggcagttaacagaagtaaatagatgacacattaaatttacttacggtttaatagtttggtaggttttagcgtcaaaatttaagtttggagagttaaatgtaagtgaaatattaatttagagggtttaaccgcaaaaaaactctatatataatcatttaatacttaatttcatcttgttaaaaaaaaaaatattggcagtaaaatcacttaattttatatttttcaataattaattactt

SEQ ID NO: 247223 - DNA, 660 bp, Cannabis indica
ctcttcctcgcaccaccgagacctaaccagacccaagcaccgagactaccaactaccatcatcgaacctcttttcctccactaccaccgaacctcctcatctacccaaaaacccaaacgaaacccagaggcctaagaccggccggacctccatagcactcaagcgtcaaaaaacctagaggccttgaacctctgtctccgtctccgtctccgtattcatcttcatctttgtgtttatttgtttttttattagatttatgtttatttcagaccttagatggttgtggttatggtattttctggccaaaacgtgattatcgataggttgtcgatagtttatcgatgatttatgtttatgtaacacaattttgttaatttgacatttatcgataggttatcgatgacatttatcgataggttatcgatagtatatcaatgaaatttatcaataggttatcgataggttattgatgatttttgtttgcacataaaaatagcagtgcacagacacaaccatcgataattcatcgataatcacattttggccagaaaaccataccctccaccaccatctaatgtctcaaacaaatacgaattcaatgagcttctagttgggggagagttaggtgggcggtggtaaatggcgatggtggttgagaga

SEQ ID NO: 247224 - DNA, 705 bp, Cannabis indica
tagatggcatattattagtagtgaatgttatgttttatgatctttttgatcacattgccttgtactttgtgctttgatcacataattaaaatactaccctatgctttgttaatggcattagtagtgaatgttatgttgtatgatctttttgatcacattgccttgtgctttgtgctttgattacaaaattaaaatattaccttgtgatttgttaatggtattagtagttgaatattttgttgtatgatgattttgttcattggtttatatacttctaaaacactatagttatctttttgtattttttttatgatcttgtattagcaaaaacagaagtacatgtttatttcaaatggcacagttttaattgtacctaaaacacaattttaagtgtatcaaaaactgtaagtaaatatacctaagttgacaatacaattgtatcaaaaacggtaagcaattatacctaagctggcagtaccatattgcattaacaatttcagttttgatcacacaaattgcattaacaacctctgctatacaaacactaaaacaagtatgtaatatttcgataagcctaatagtaaaataattagagtttatatatatatacattatgggttaataaggtaataagtgagattatgatcctactaatctatttcagcataaaatttaaatttgatataagtaagtaaataagcgtaa

SEQ ID NO: 247225 - DNA, 1042 bp, Cannabis indica
tatgtggatgaacgacatcgacacagatacgaggttattatttaataagactttatttggctaaatgtatttggcaggcatatttcgttgtagaatatatattgtttggctattacatgatgtaggtaaatccagaaatcattggcattcttgaagaagttgggctaaaattgttgggaaggacgaaagtggaaagcgaatggaggtgagtttcttatggcgttgtttcaaggatgggcttgaaacccacttgaacttgaaaacgttgaagctgattttgttcatatttccgtgttccaatatcaaatgtgcagattttggaacttccgaatcatccattctatgttggagtgcagtttcacccagaattcaaatcgcggccggcaagaccctccccactattcttaggtactttgaatacaactagtgctgtatatctcataaacagtttcaaccattacaatctgtataaattcaacacttatgattcttgtgaaaatggctgagttaagaacaatggtattataacacttacattgtatgtaacattttgaaaatttctactgtaggtcttatattggctggatcagggaagttggaaacgtatcttaacacacacggaaatggaagctgattacgttttcttttctgtcttaattttttaattttaattttatttttattttttaaaatggagggggacaccaagtcgaccgtggttctttttcataatcttgttcaagcatttatttatttatgttgctcctttggtttgaagttaaatacataaaaaaaaaaaaaaaataaaaaaagcagaagtgagattgatttaactttttcatttttttttattaaatgtatagtttttttttttttggtaccttttgtacacaaccactatgactctatgtttttatttgatttattatatacccttttatagtaaaccactctatcatatgttatcattagctaagggaaattacatgatgtactaatttttccccatgtattacaaaaatactgtgacacgcccaaattt

SEQ ID NO: 247226 - DNA, 1540 bp, Cannabis indica
cgcagcctcacaacagtattatccccagccacaaccaccaacgcagcctcaacaacagtattatccccagccacaatcaccagcgcagccttatttttcccaaccacaatcactagcgcagcctcaacaacaatattttacccagccacaactacaagtgcagcctcaaaattcttatgatccgtactacgataattattacaataattattacagtaattattacggatataattatgccggctgattataatttctttataatttgatcttcaagttggctagacttgcacccattgtcaagttttttttttcttcagcaatgaataagcgagtattattgaatattttattaaataaaagttttattttactttttcgtaagttatatgatctttatatatattatttttttttacgtacttggttcataatctacataccatataaactatactctgtttttcttttgttttttcttgatgattcttaatctagctacactttttattaatttgggtacgtattagaactatttcacactatacaacaaaatttaaagttttgttgtgattaaaaattagttagtgactaaatgtattagtcctaaaaaaatgtatttttttttttgttgaaatttatatttgtaagtaactaaaagttaaagtttttttttagtgtcatcaaatattctaaaattaaggtatatatattgaaaatattgctccgaaattcaaaccataatttacttattttcagaaaaaaacggtagtaaactattgataaaaattatggcatggggaggtttatctatttataagaatcaactattctttttgaaaattattataaacaataaattaatctttctgttttgttattgcgtataattttttatttatatgtacaactaacttcaaaataatgtgcataaactgttaatattcaatgattaattaagttaattaatatggattaccgaatgcaaatgaaatggaaagagtattgctcaaattataatgctcttagtcaatataatcataagaatatataataattgtaagtaaaatctttctccacaatttaatactaacaattataaattatctgtttatttgtaggtaatctatttacatactttaagtaaagatgttacatactacttactgttttatggaaatttgataatgtttatttatcacgagtatatccataaaatttaactatttaaattaaattgtttgttatcatatatatatatttaattatttaaatagaatcatgttataaattcataagaataaataaataaatcaattttttttttaatttcctccaatactatgatcaggaaatgaaacagtctattgaatttcctccaatattcttttattgaattattttttaaaatattttttataattaagagaaacacgtacaacatagagattaaaaatgggcaattttctcaacaaaattaaacaaataaatgaaagagaaacaataagtttacaacaactttttaaaatttaaaatttaa

SEQ ID NO: 247227 - DNA, 1208 bp, Cannabis indica
ctcttgtgatcgatatagatctcaccctttttgccatataaataatgacgccaaaccttcagtgcgaaaacaaccgctgccagttcaatatcatgggtaggataccgctgctcatactctttcagttgcctggatgcataagaaatcacttttccagactgcataagtacacagcctaggccctgtttggatgcatcgcaataaatcacgaacttttcatcactgaccggtaaagttagtacggaagtggtaattaatctttgtttcagttcctaaaaattgctttcacatttatcagtccaaacaaacttgtgattctttcaagtcaattctgttaaggatgtagaaatcttagcaaagccctcaacaaatcttctataataccctactaaacccaggaaacttctaaccttaattgttgacttaggtcgaggccagtctcgtaccgcttcaatatttaccagatccactagaataccatctttatttaccacatgcccaagaaacttacttgaagcaaccataattctcatttcttgaacttggcatacaacttatgctctcagaggcgtaccatccggagatgtctttcatgtgtctcttctgtattcgaataaaatagaatatcatcaataaagacgataacaaaatcatccaggaagtctttgaacactcagttcataaagtccataaatgtcgttggggtgtttgttaattttaaggacattactagaaattcatagtgtccgtaccgggtctgaaaagctgtcttggggatattctcttctcgaatcctcaactggtgataaccagatcgaagatcgatcttggagaaggaggtctttccctgtagctgatcaaataggtcatctatattacttgaaatgagtaatataataacatgatcttggagaaggaggtctttctcacaactattttatatttatttattactttaattttttgttttagtctagatcatgttattatattactcatttcaaatattgacatgataattagtaacttactgtaaatagttactagttatataagttataattaactaactagtttcttacaactagtaactaattatttgtgttatgcgtaacacttgtttttttttttttaattatttatgcatttttagtcaaatttatcctaattcaaccaaaatttcaacaacatgatagttgtaattggac

SEQ ID NO: 247228 - DNA, 1098 bp, Cannabis indica
agaccgttcctattagggtaataaccctaatctcggttactaaataattatacatatcattttcaacataagcgccactgcgcatactctatatgctaaccattgtcttacctgttgtcccgcaatggcagagattccgaatcctcgagtgctcctgactaggtgccggttatcctagtcacacaatccgggatttcacaactaggatcaacccctgatttcaaactcataaaatgtattcttggcatttaaaatttagataatcacatagagctcggaacgagctttttaatgatataacgaactcccaaatcggagttcggaatcaaaagttatgaaatttcaaagtttgcactcaaactactcagaaaatcgagggcggccgcgacatgcccaagccatgccgcgacacctggaacaaatcccaggttccaccaatgaaggcgggccgcggcatgctctgaccatgccgcggcacctgggtttaaaacccaaaaaccagccagcaaaaactcaaatttccaacctcaattcatcaccaaatcatcccatttcaacacctaactttcaaatcaacaaataagattgctagcaaataatagaagctcaaataaacatatttcatgcattaattccaataataaacccttaatttcagagtgtaaaaatcaacttaaaatgatgttcaaactccaaaacttcaagctctaaacttgagcttcaaactcacatactcaaccaattccagtagaaaaataccaaataaaattagattcaaacataagaatctccctagaataacatccatagcttaacaataaaaattcatcacaaagttctggaatcaacacccaaatctaagaagatcaacatcaaactcctttttcatgcaactcaagatcaacaacacctattcatgcttttctataattaatttcagtaataaatagagatcaaaacccatagaaaattacctcaaactcaatccaagaacaagcttaagatttaacaagaacaaagctccaaaactagccaagaatcaagcttttcttcccaaaaatcaatttaaataagaagagggtttgagagagggagagg

SEQ ID NO: 247229 - DNA, 800 bp, Cannabis indica
ctcaatcatagtgagtaagacggtggtaaccaaacccgaaggagaaaaagagatccaagttcagatctttataatgctctgcgacataaaagaatcaagggctagagatcttgaacagaagtagtcattatattccactgcaatcaatgtaagattttatttaacccttatgtgtttattttcattgttttagagaattcatatttaggatgttaatcaacataattgttagtaaatctagatcctgataaaatattcccaacatatagtacgtccaaaatggacaccaagtgaaaagttacagcaaaaatacgattcctaaattcccaagactacccggaaacggtaaaccgattgagaaccggttaaccacctccacaagaatcggttgactagttcacaaccagttggttgggaacggggcaaaaactctcaattctcaatttacgcactcatcaaaatactaccaaaacctgtccaaaccattccaaacttcacaaggcacacaattaccatacatacaaccattcttacgtaatagaacctacaatcaagcccttaattggtaatgttgcccctaatttttcccaatatacgtggaccaaccagatagtgacacgtggatggaaagggtttagcgttcgaattaaatagctaagtctttataaagcaaagaattattttggatatgcctcccggagaaggcatgcaaggtctcatatgctcccggagagcaagatggcatcaaagcatctccgggtggtgtcaggcttcttctgagcagtcatctcgcatttaat

SEQ ID NO: 247230 - DNA, 798 bp, Cannabis indica
gaaaaaatacaaaaattgttaaggcaaaatctgttaagacaagatttgtcaagacaaaagttgtcaggacaaaagacaccaatcttatcttaaacaacaaggtaggcactaacttatgtactgtttgggttaattaattatttaattaattcaactaggtaaataaaagtgattatagatatttcaaggttgttgagatattctctaagtagttgagagatttcctcataaatatcaataatcgaatttgattatagatatttatttatttaaataattaaatataatttaattaatggaatttaactactataaataaaagtctgatttgagaaatcagaacatcactttacactgtaatttttgaaattaagaggagaaaagaaaatatttttctctctcaaagtgttcttgctcatgtgttgagaaatcaataagaacaacattatacactttattctaatagctcacactattttttgggtgcagtggattaatttagaagacactaggcgagtcctattgcatcatcctcatcatctggattaaggaatacataccctgatagtcttcaagaggtacatattctaaacttactatttattattttgatttaatgtacaattttatctttttactttttgtttatcttggccgctaccacttatgaaacggtacgaagttaatcaatcgataatacccgcgtataatataattattaaaaaatgtgtacaaattgttatgaaattttgcataacttagtagcctaatgaaaacaaggctcaaatgacttgtagg

SEQ ID NO: 247231 - DNA, 462 bp, Cannabis indica
gatccatagtacctagagcctggaatgctgaccacctccgcaaatactatcaatagttaggagttcagtacttaaattcttctttattttgtatgttaacttgtgccgaacaaaatatatgcattatcccacataaatttaagctaagtgacccaaaagtcctttttatgtcacttagggggggtactaaggcataaaatacgcgcagaaataggccagacataaggaaagcaaagtagatataaacttgtaatataagttatccaaattataaaagggcctggggtcgggccatagtagtctccccttacctaaaacatagataataaatacaaaaataaaattatcttaaaggggaggagtaagcgaaatattaaaagagagaaatgttggaaatattttaccaggatctagatttactaacaagtatgtttcattaaaatcctaatatgaattctaaaa

SEQ ID NO: 247232 - DNA, 636 bp, Cannabis indica
aaaaaaataaaaatctgaaaaaaaaaagtacagcgtatagtaaaaacaatctttcataaaatatacatttagaaaaggctaattaaaattttattctttaaactttaacatgtattaaatcatgtccctgaacttttttaactgataaaaattttccctgaactattatttgagattgttggatttaaaaacttttgtccaatttcacttaattttactaatttggtgattgttcatgtattatattatgctcatcaaattttgatatctatcaaatcatgcccctcaaattttgacaccaaatcattctccctaaactttgattaatgttaaacttttcttactaaaattagacaaatgtccttaaatccaacaatctcaataatttatgaggaatttttaacaaccttcaaattttgagtcaaaaactaaaacagaatatgtaaaatattgaattattaaaaaaaaaaaaaaaaaaaaaacaaaaaaaacataaagagctagaatagtaaaattgcaaatttaactttaatatctttttcaaaaacaaattaaatatatgttaatatttataaattatacaaaatatagaataatttaatttaatataaaacctataattagaaacacagtttt

SEQ ID NO: 247233 - DNA, 774 bp, Cannabis indica
tctttgcggctcgggatgttgtacagctgaggaaaaggattggtgcgggattgtctgtgaatattacatcagatccatggctacctattgttgatcgagcttctccaattcctattgttccaggccttgatcacttcacggtaaacagcctcttccaaacaaacaatagaagctgggatgtcgatgtggtaagggacttattctctcctgaagatgcttctattattcttggaattcccttaagttcaattgatgcagacacttggtattgggtcgctgagaagaatggcttttattcagttcgtagtgcttaccatctcctccaaactctaaagcattcgccgggcttgtctgttccaaataccaattggaagattttatggtctcttaagacaccaccgaaagctaaggaccttgtttggagagcggcctctaattgcctcgctaccaaagccaacctttgcattaagaaggtcttgattgaaaatacctgccccatgtgcggaatctttgctgaaactgaattacacgtcctggttacatgtaacttcgcctgggcgtgttgggaatacgctggtctggcagctgcaaaccgagaagcctcctctcttggccattggctgagcgattcttttagccgcctgcaaggggaccttcatagcagagttatcatggtgtgttgggcaatttggtgtgctcgtaatgatctcatttggcagcagcgatctcgtagtgtgcaggacgtggttaattttgctaatttgagtcttgatc

SEQ ID NO: 247234 - DNA, 878 bp, Cannabis indica
ttaatagctgaagttgttgggtgttcccattttaaaacatggtactttgtagatgttagttttcactttttaggagtttccattgttgttcatgaaaataaagttcctaactttcttggttgttatggatttggagtaatttgttgtccaaattgatgggctgattaagagaatgattcattgtttggaatatatccatctaattattctgttattttctatttggacacaatctttggcaactttttgcttggacattacattcctatgaatgtcacaacccacataatctgaaaatttggttccaagttcattaggccttttgcaaattgagtctgtatttaaagctcacttaggataaagtcttcaagtcattctctaaattttagtgtactgttttccaatttatacattgagcttagtgattaatatctctatctatgtcttctttccaggcaaggatagtacaccctgataaaaatcatggagaccctaaagcagctgaaaagtttcaggtatgtcggtgtgagttattagattttagttctttataaaaatgcatttagttcgtttagctaaatattttggtgaagattttattgtttttttgaagtcataagactgtatatcagaaagctataaatacagttgtggagaaaaataataactcatgaatgactatttataattgtatgtgtggctggcctaccatgtgttaaataagtctaataaatttcataattagcctccaaaaacaagaagagggaggctgccatagttatgttggccctcttcatttttaagagtaatgtggaatagaaaaccattaagatctcttggaatcttttgttattgtactttttttagctacttcttgc

SEQ ID NO: 247235 - DNA, 728 bp, Cannabis indica
taactgcttaatgtgcgagaattgattccaagtataataaggtagtggcttacttccggtttcctgaagttccagtttgaagtaatactccctactcttatattttgttaaatgttagataaacttcaaatataataaggtagtggcttacttcctataccttggggttccaatttcaggtagtactccctaatattatatttgagaatttgacttaattattttctcatgaacgagggtaaaattgataatgacaataacataatatgctaccccctaagtgatcgataattgagacttttgatcgcttgttacatatgaaatgaaaacttcttttattcaaataatccgtgccctaaggcgtacacagaaattaagaaaagataaagaaaaacaaaaaggaacctaacgatccctagtttactgatagtatcgacacaggtggtcaacattccatgcccttggcaacactcttctcaaaataaatgtcgctgtttttctaatcttctactcttgactttagagttgaaattcctggaaattttcttttgtatacatctggaattggaactgtgattgttcttgaagcttctcaattaaccaaggaaaaattacccaccattttaattcaaaggtgaagagtcgtacatttaatgttagcgatcttgttttgagaagagtattcccagcttcgcaagaaccgagagtgggggtacgttaccccaaac

SEQ ID NO: 247236 - DNA, 1294 bp, Cannabis indica
tcttaattttttttagatacaaagtacaatatgtatgaaacataaattaaaattttcatgaactattacattggtgttcatttatttattattatatatcacatttatattatcaaaaaaatattatgttctttctaaaattttaataccatgtagacttttttattatttaattcaaaataatgaagaaatatgacattttataatattaattattttttattatatggttaaaaataaaaatctagcaaaatagttccttatattattaaagaatttaaataattttttttaaaaaaaattcaacacaattttataacttaattatatttaataaaaaatcatatacaatttaaagttttcaaaaataattgcaaagtttctaataaataaataagtggaaccaaatttcagcaagctccgctccactcggtttcactttgaaaatcactggctcaaagacccttcctttgctaccattgttaattcctcttgggtcaattcccagaacctttctttaccaccattgcaatctttcctggacaagcaatctcactgtatttcggatattaggacttggagtaaatctcaacatcctattaagctccaaatatcccgtactcaggcggatcttcacaacctgttgaatgattcccaaccgaccccccattttatctctcaagttgctactctccaatctagattggatggccttctcgttaaggaggaagtttattggaaacagcgttctcgagtcgactggctgcgtgctagggataaaaatacaaaattttttcatcaccgtgcctctgctcgaaaaaagaacaatctcattcgccaaatcactctccctgatggatccacttcccacgattctactactataacttcccaattccttcacttctatacttctctttttacttctcaaggtgtgtgtgatatggctgtaaactctcttcttcaagggatttctaacaggctttcccctcatcaagttgcttttcttgctgaacctttcactgagactgaggttaaacaagccttatttagcctttcgagtgacaaggctcctggccctgatggtctcaactcatttttctataaaagtaattggtccactcttgggaaagatttcaccagagctatgctccaaattcttaaccatcaggaacacatctcccaaatcaatgaagctatagttgttctcatcccaaaaaagaaaaaacccaagactgtgcgtgattttagaacgactagtctatgcaattccctctacaaatgcctatccaaa

SEQ ID NO: 247237 - DNA, 786 bp, Cannabis indica
acattgcaaagacttatggggcggtaatccccaacttgttgcggatgtttggttttcggaatgagacaaaggagagtcttattgagttgcctacagtccttgtggttgttgaggatgtccaagcaaaccttagtaatgtccctgcctataacttcccaatgattctcataaaatagccgaggcatcccatctattcccggggctttcatagcgttaatttgagacaaggcgaggtgaacatcaacagctgtaaagtcagagagcagtcggtcattttgggttctgctaaggcgtaacggcacaaatcgttgaaggtgttctgttgtagcatgaccaccatccgttgctgagaaaagatcttggaaatggtcacaaatggtgctttctatgtcctccatagaactcctccagatcaggtttttgtcaaaaagaccattaattcggttcttcttccgccttgatgtggctttttggtgaaaatatcttgtgttgcggtctccatgggctaaccaaatagctctactcctttgtttccaaaacaactcttcctttgctagttgaccgttgaggtctttttctaggagtttaagcttggtgaagccatcggttgaatgatcattaaagtacttctccacatctttatttagatcttttattttggcaaggttggtcttcctttggattgtattccattgatctaacatagtaccacagatgttaatcatttcggcaaggtctgaagccgaggtaataggattgccatctttccatgtctcttgaattatt

SEQ ID NO: 247238 - DNA, 1159 bp, Cannabis indica
gggtcctactccgtaagacaagtatttttgaggattcacaagattcatacatgaaccaagaaatcaactaagatccttatctctttcagtacaatggactagaataagagattgtttattctgaatatgatgcatgtccactagctggaagtaatgaagatgatgaaccatcaggttggcacccactttagaaggactccaattatgactcagactacaatgctaatcacgagccaattatcgaccgctaataagtagaacaaagagattccatatctcgtgtaagatagcaaataagtgaaaaaattcttaatagtcatgatgtttgtacgaattttttctaaacgtttatttgtcagtttttcagtttgtccatttgttgttagattgtccttttctcggtttgtcattttgttggtttgtccatttattgtcaggttgtccttttctatgtttagttgtttgtaggaaatttctagaaagtttcttattttgtatcctaccacatgtaaattgttatgtatagagccatcattttcattgtaataaagggcatcaggaaaagcattctactaaataaaatttttagtgttcttctctcaaaatgttcttctaaattttctttaagagatttttgaagtagtgatagtgtgcattatgggtcataccgaagagatattactgttatgagttaggtttcacttgtaaaggtaactaaacaatctatctttcataatcgtaagtcacgttgtatagtcgtaagtcatgctgattcttataagaatattacttaagttatctttatatttgatgatttttgtaagaacattgcttaagttatgtttatataaaaataaatttaggttgatttttgttaatattgaagtgtttatctaaattcttaagatgtataatatttttttatttattatttgaatttaatatttaaaaattaaaaacatgtgtattccttagataacatttttgtaaaggataatttaatccataaaagtgttctaattacactgaaacaatatttttttttttaaaaaaaaaaaaaagtatgatgcaaaataacataatacaatgcaacaaaaaaaaattattaaaagaaaatcaaactatttgataaattattataaaaataaaataaaaaact

SEQ ID NO: 247239 - DNA, 1237 bp, Cannabis indica
tcctgaggaaactccaaaggaacattttttcgggtttagcttcatgttatacttctttaatatcttcaagcattccgcgaggtctgcggtatgatccttactttttattgattttaccaacatatcatcgatgcaaacctccatgttttaccctatttggtttgcgaacatctcgtttaccaatcgctgatacgttgccccagcgttcttcagtccgaatggcatgactttataacaatagagtcccatgttggttacgaagtttgtgtgttcttgatctgggacatacatttttatctgggtatatctagaatatgcgtccataaatgacataagctcgtgcccagcagttgcatccactaactgatcgatcttgagaagtggaaaatagtcttttgggcacaccttattcagatcagagaaatcaacacaagttctccaagttccgttaggctttgggaagagaacatgatgggctatccacgagggataaaacacctcgcgtataaaattgttgactaacaacttgtcaacttcctgttttagtgccccttgcctcacggaatccaagggcctccttttttgtctctttgctgggtagtttggattaacatttagatgatgacagaaaacattagggtcaatccctatcatatctccatgactccaggccaactgaccctggtttgccttcagaaaacttattagttgctatttgcgatgctcgtccaggttcttcccaatgtatacacactctgtgggacttcctgggtcaagaataacctcttccaattcttaattgctttcaataggtttttctcatcatgaactcaggggtcaatatctttgtttttcttttcattttcttctgccaagatcgccatcaactgatgaccggctttcctatgatgcaactctatgcgataacaatcgcaagccaacatctagtcaccacgcaccactcccacaccttttggtgtttagaatttcacggacaagtgtttgatcgaactgactgcccctagtccgatcagtgttggacgacccaacaatatgttataagtcgatggcaggtccacaactaagaagtcttacataattgtagaagataggggtgcctcgcctaaggttaatgcgagctcaattatgccaagactggtaatgctgtctccagtgaatcctcaaagattcaccatacaaggccttactttgggcttttcgagccccattttctgta

SEQ ID NO: 247240 - DNA, 592 bp, Cannabis indica
gagacacaactcataatgattttgataaagtgacaattgaagccaaacctcgacaaaacttctttgagaaatccccattcgagtcggtcatatgctttgttcatgtccatttttaaagccattaagcctcctttgccttttttctttttgatcacattcactatctcttgagtaagcaaagaggattccgctatccaccttcccgggagaaaagcagattgggtgggagcaatgatacgctgaagaacatttctcaacctttgggcaataattctggctagaactttgtacgtgaaattgcataaagcaataggccgaaagcgatcaacagtatcagatttatgccctttggaataagacatagatgtgtgtggttaaggcccggttccattaccccagtagcaaaaaacccgataaacacaaattaccaaccctacaaccaaacataccctaaatgattgcacatatctattgtacgagtaacaatagaatttggaagataaaattaaaaaccaatccaaacaagtaaagttattcacttttcaccacacattttgaaaaattagaccaaaagaagaagagagagagagag

SEQ ID NO: 247241 - DNA, 989 bp, Cannabis indica
aaaataaataagtagaattttggaaagttatataatgataccgacagagagagttggtaagtaaaggaatagagagccaaaaccggagattatggcaccatttggtgactattgttctcacttacacaaagtccatgcgtgagttcctccccattctattctacattgtcttcatttcttttttaaacctaaccaaaaaatactcccttttaatattaatgcatttcgttatcttaaaactacctcggcagtattcttaatttggtccccagtttttattgaaatattaatatcagctaattaagacaatagctaggtaacttattaatcaatgatacaatagaaacttattattgagataattaaagagagaaatgtttctttttactaataatgaataatgaatgatacaataaaagagaccttatatacatgggagatatccaatcttatagtatacactaaatccaactaagaatatcttaatttctattttcaaacattaaatataattatttaatacttaatatgctccctcaagatggagtgtacaaatttgtgacactcatcttgaaaaataagtccttgaaatgagatgagaaaagaaacttggtaaggagatcggcaaggttgtgtttggtgttgacatggaggagcttaagctgaccactttgtacccgttcacggatgatacggcaatcaatgtcgacatgtttggttcgttcatgaaaaatcgaattttcaaaaatatgaatggaaactttgttgtcaccatacataacggctgatgtgaatgagtgatcccaaagtctttcaatgaggcaagtaacctagtacttcgcgagtagtgttggccattggcacagtattcggctttagtggaagaccaaaaaattgtgttttgtttcttggatttaagatattaatgaatctcccaataatgcaataacctatgacagagcgtcgagtgttggggcaagtgctccagt

SEQ ID NO: 247242 - DNA, 879 bp, Cannabis indica
tttttttgttatttttaattattatttaataagatctctttccctataaaatgagagctcctcttctagtttatttttcacattctgaaaagttctcataaggtctaaacatctctctactttctccctagaattttgagcgccaacacttagtcaattctttgtaattctcgtgagaaataaaaactcaaagtagatgtagctccattaccgttgcgtcacaaggagtgagctactataaatttgttatgtctctgttacttatacttaactctgaacattattgtcaatctagcgagcaggtgtaactagatatgtgtattctgatgtcgatgccaacaaaattttatgcgcataaaaatataaattaatttttttcttcatattttttcaaattcctcattaaaatagtttgcaaacaaaagttgagaaaaaataacattatacttttcaattatgtagaatttttggataatttttagggtagcttggattgatgatgctctaacaatgtccatcttccgaatataaataaaataaaacccaacaaaagaaaactaagaagtgcccatactttgataaagaaaatagaaagtgacaattttgtagtaataattaaaaagaaaaagttttggtactagaagtagaagtgaccaatagaatagaacatgacctttgggaattaaagaggacaaaaagaaagtaaaaataataattaaaaataaatgataaagtaggcacatagttgttttatgttttgggaacaaaacaaatggactagagagaaataagccaaactacacaaaagctaatacccaccgtatcaaattggctataggcaatagtatgtgactttttaaatttaatcaattcatattc

SEQ ID NO: 247243 - DNA, 812 bp, Cannabis indica
gggcataaaacccaacagggtccaccagaaggataacaattttgtttctccctctcaacgagtgaactcgaccaggagaagagataggaggacaagtggagcatggcgcatcacttgaggtcaaatcattgtacacacatttaatgtggcatggggaagaacaccccacaccttactctgaaaaaacgtgatcaagggtataaacccatactttcttgattcataatactccatacatcatttgacgactacattataagctatcaaatcatttgcaagagacaaatctagtctcaccaaatgccgataacaagcctaaacacactatagagatcagacaatcatgtcctatgttttaatttgggaaaatgtgcacgttcatacaaacacgacaatagcgtcatttttaccaccaatatgagcctataaatactctactgatgtatgaaagaatgagactttcagaattctatgtaagaaaatacttattaataatattgattcatgaattaagactcattaatgttctaatcatgtaaaaattttcttctataatttctatttattactataaacgactctaattaataattacccaaaacttcgataacaattataaataacttcatacgagatgtagttttatttttatcgtattatgattaatatttgtgattattatatatatataaaaatcatatacatatattatataatttttatattatttttaaaattaatttaaagtattagatttgaatttttatttataattaataaattaaattttaatatataattttaaaaatata

SEQ ID NO: 247244 - DNA, 3217 bp, Cannabis indica
acatactttcacaacagttgggctaatttgttctgcaaccgccactatcctgttcctcgagatgtttcttatcggtgaagccaccccgggagctgggaaacctcctcggtgtggcatcagctcctctccaaccgccactacgcccttcattagctgcaattacacaacttgttgtaaccattttagttatgagaggtaagcaactaacttaacttctaaaacccgagtgccaactgtcataactaatagccgagtttgtccttgagcatttgaccaatacttaacacaactacttattatgacaaacatgaatgaaaaatgagtatctagaatttaaaatgtgacataatttaatgtactttaaatttaggacaacattcattatgatatgtttgattgagatttcttaagcgtttttgcgaaggttcctagatctttgtctaatcaaaaactttcactaagattggttacttaggtgacgtttagttagagataataaaatagagtaaaatagaaagaaaacaatttttattacatttcttattctaactatggttttattccttccaaccaaacttcacatgatggaatgtttgttatgtaagtttgagttgtaaggagtaaacttaaaaggaatataaaacccgagtgttgaaggggtaacattactaccattttagttttaaaaagtagaatccacttagaaacacaaatcctttggttattaaaatttaatttaatttgatattctcattcacacaaagtctaaacctcatactaaacgcccctttaatgactcaagttagttagttagtcagttttcagttataactaacttcttccaaagactcaagaaaccattaagattgatcaacatagatggctagttctaggctcaagtgttcttgagtgttcattgaaagaaatgaaggtaacacaatcatttcattgtgaaaattcaactaaggctcttccttgccttggagtaggactaatcacattgattgaatccaaaccaagtaatcggttttatgaagtatttcaaagtacataaaagcttaaaatcaagacatagaaactatacctcccaatcattgaaatcgagtctgaagataaaagaatggtagctaacatctcttgacgcgattgaatctgcatcgggagagttccttggccctaaagcaacaaaaataagggacaattaaggtggataaacacaacaactaatgactattaaaatctgataaacagtagagtagacttacaaacgagttggcgactatttttgtcaacagttattccaacacggccatctcttactagaaatgacaaagcaagcaaattctcaactgtttgtggaaatgaatttcggtttagtatcaaactctccttcacaactccaggcttcttcttcaagatgttaaacattgttgagatatcgtcgtgtgtatcggttttctcttctgttccagcatcaaactgatacacatgaacacacaatgcttgaagaccaagaaactcaaatcttaggtgaaatgaaatcaaagcacacatatactatttacaaattagttcaaaattgtaccttttcactagttttagtaagaaaaactaactaattaaacaaaagtaattactaattaaaaacaatgacataaattatcaatacccttctcctaattccttccaaacttttgactcatagttatagagtcaagccaaacaatgcttgaagactagaaactatagtactcctactgttggagaaaccctcttaggtgatgaactcaaaagtcaaaacagatatagactaaaacaagaaagttacagtcttttagtataatactattcatttaagtaagttagttcaaaattgtactttttccactaattttggtatattcatcttttaaaaacaattgacataaattaccaatgcccttctcctaatacatattacacaatttcttccaactaaatttggactaaaacatcatactcagcatagattgacaaccaaaagagcaagacaaaacacttcattaaaagttaaaaatgaaaactttttaccttctctggttgagaagtatctgttggcctagatctttttgtataggttctagggttcctcattgttgcctttaaaaaacacttctccatagctgtactcattggtccaaccctttgagacataacataacataaataagcacattatataaatatatatatttatataagatagcaaaattaaggatagaaactcaaattatacatatatatgaatactcacatggttgtagagccatgggccttcatgaaaatgttggaaacagataaaccaacaccattccaatcaatctcagaagagtttttcccaaaatttctcaacaaataagtaacaaaatcagatgatgtaaaaccaccaacagaatgtgatttagcagatgttgcaagtgtattagcaagacccaacaatgcttcactatctgccacttgttcccttggcttttgaactgaaaacccaccaagaaaataaaaaccccttattttctcatcaaccaaacagataataaagattcaaactttgaacaaaaactgaaacaaaacaaagtactaaccttgtttgaataaagtttctacctcatcaatgatcacattgaatttctttgactgtggttttgccaactcatctcttttttcttcattagcaatcagaaaaatcaatactttataaccaaatatacatagaaacatatatatatatatgtatgtataaaaatggtagttaccttggattctcttgcagacattgcgatagttgttacaaatttgtcgagtgtgttcggaagtacgatgatgatcgtgatgaaaagattcctttttgggacgtttgagtggtggtttctccatgttttttgggaaaggaatgagattaaaatttgaacagagaaagaaagtgattggaaagaaagaagaagagtttgattaatataagaacaagaataagaagagtcattttcccgcctaaactattttttttttatttattattatttaatttaattgctgaagaagtaaatcagttcacaaatattattatttaattttcaattattttaaattatttttataatatttttaaaattaatgagaattacccatatactatttttttttttttcaaatttaccgtttggatttctaaagtggttgc

SEQ ID NO: 247245 - DNA, 761 bp, Cannabis indica
accaatagctacacagcttatctttcaaaaagtttaggtacctctttgttactcacggtgcgaagaaaaatctaaaactccaaaacatgttttattttcctgctctggtttgattccaatgtggcatcaattaggggtatggttggtgctctgtcgttgtgtacatggaccaatgccagaacttctcctctttctctttaaaaagttatctcgtgggtcttttgaattgataataattaccttaaggtggctttagtatgatcgaaactcaatattatttggtaataagcaatcaagattagatgttgctccatagttagctcataatcatatcttagaattcaaagagcatatttggcgaggtcttcatttgaaattgtgttattcaaaccagttgaaaaacgacctactcattggatgcctcctcctcctgatttctttgctcttgcgactgatgcttcagtgattcctgggaggggctttgtcaaattgggtggagtaggggtgagtaacagtcggtttggtcagttttacacacacaaaattcaaaattcatttttttttcagttttcatggttataatctgaaaactgaccgaccattatataaatgtcaaaaacccgaccgttttaatcaacggtttggtcggtttaaaaaaaataaaccgagcttcatttttttattaaaaaacataagtctttaaatttgttataattatttgaaaactaaaaaaattataatattgtatcaaatattatata

SEQ ID NO: 247246 - DNA, 756 bp, Cannabis indica
gattctgtaggagacgggatttaattgaaacggggcaagcctgaggtggtttatgaagtccttaaagtagtctcgcagggggattatagctccagccctgatgtgctcaaggctccaagcgcctatactagtcgagccacttgtactggacttgctagtggttccctcagagttttcacgagtaagtcggactggtaggtagcaactgaactccccgactcgcaccgacctaacccagcagtctcgcttgtattcaataccataagtccgcagtgaatcacctacataacctgcaatggttcgcaccttcaactatattaactctgcctcgaaagtgatgttggggttctggggagtctttgatttacgtggcttaggagacattatttcaaaatccaattcacctggttcaaaagcaattgtgaccttgggtaaaaacagaggctcaactaaaggaatagaggacacactaggaggttcaggccaagcagcatctcgcaagaaacggcattagccttctgtaatctcttgcaagaagcgcctgtggcgactagcaatatcatcttggtgggttatcactaagttccctaatttttgcatcatttatctctaatttggatttgggttttgaagttttggattcgtacaggatggcaagttcagtgggatactctatttctaaatcttttggacgataaacttctaaaccagattgggacattgctgcaagaagaaagcaatcccaattcctggaag

SEQ ID NO: 247247 - DNA, 935 bp, Cannabis indica
cctgttcgtgctattctttctaagagaatccagattgaggatgtgtcatgcccattatgtaggggctgtgagtaaacgttggaacacttatttcttacttgtaattgggccactcattgtggagagcatccccgtgggggatttttcctatttctgactggcatttgtttgtgggactgggtaaaattcatctgggggctaggaaaaatgggcattaatatagatgaagtttttctttatgctttgattgtggttgacactatttggaggacgcggaacgacaaggtacacaatagaagtctgcccaatatgtctcagtgtgttgactatatttactattcttatgcagactatagagcttctctcttaccaactccttccccgcgtgtagaagtttgttaaaatcctccccctcttgggtggataaataaattgtgatgttaaagttggattggatagtatgtgtttagctgttgtggcaagaaaccatctaggagtggtgtgtgcgattcaatcggctagattggacttctctatgcgctttgtggcgaggcggctgcttgttgtatggcgttggaagtggctaaagaggaaggctagagatttattattatagagagcgattctagagtggttatcaattcgatcaacgatttggacttccgttggaaaattgagaactacactaaattttgtttaagactttctcggctctttgatagttgtaatttttatttcgtaagcagaagttgtatctttatggcacataatgtggccaaatgggctttcatgaacaactggtttggtaggttgagtgatttgtctatcccgaataatattttatgtaataaccgtgaggtctaatttatatctatgaacgttttatttcaaaaaaaaaaaactagggcttagggctgaattatatagattaaaaa

SEQ ID NO: 247248 - DNA, 513 bp, Cannabis indica
ttaacccagcaatagactttatctaaattcgcatccccccaatgccccgaaacaggccatttctcaagcagtaaaaggccaccattaaacagccaaggctgtttccccagaacaaatttggcattttccacattcttgaatgtaattcgaacaagtttcccctcactatcatcatcattcaacttgactgtccaatccccaattcctttccacattcgactaaaaattgtattgaataagttttccttgatatcacgccgggaaattattcttcccaccaatgatttttccccaaacgtaatagctgcatcttcattctcctcccagacctcctcctgatccatttccaatctgctagtcatattaacaatctcctccacattcacagtatccgccgtcgccatcatcagcccaagtaacaataagaactcaatcatgagatacagtcccagtagactatttttaaggaagggtcacgcagagaccatttttgggaactcagactaaggtttt

SEQ ID NO: 247249 - DNA, 525 bp, Cannabis indica
ttcctcccaaccaaacggctcctcttctcttttaaaatttattatatttatttctttttttaatcattctactaattttatccctatcattttacgatagtctttattcttctttagctaaaattttgccccaactttcccacaaatttacatattcatctctaaaaaatacattctattatgtttgaaattgtgttttgataatgtgaagatgtgaggataatttggacacaatattcataaaagagatatatttgaattaaattttatttgaagataaatttaattaatgtatttatatatatataaaaaaataatagctcataatttgaggctactgttggctacctctgatgacaactatcattatgggaaggtattttttaatgtaacggggagttgtttgaaaacgttatagctttattgtctaaattttcgagggcagttttgacccatgtgactcgcaataagttttctgcagctcatggtttgacaaaatatgccttcagttagacgatgagctat

SEQ ID NO: 247250 - DNA, 810 bp, Cannabis indica
tttttttggttgaaaatgtagctagtttacattaatgtatcatatgcatatatgtatgtagaaaatgggccttttttttaataatgggccttgggcaattgcccctcttgcccatagcttgagccggcactagggttttatggtggtcattcatgttcacatgagagtgaaaactctataaatagagaccatattgttcacttgtaagaaaagttgtttgaaatcatttgttgtgtggttagaatcttgtgaggatatatgctcatccttagacactaggctgagcatatgaggcttgataaatccttaagagcatttttagagtttccctaagtgttcatgtgaaggaggaaatggcttttaggataaaggtcattgagccttgatcaagctttttgtgtgttattcttcttctctagctttcttgtaatcttgatgaaatacttttatttgtattttgagcattttgattgtaatcctcctattctctcttgtaatgagaacttttctaacaatctaaaagtcatttcgatggcatattcttctttctaaaagacttgccatggaggtcatacaatcaaagaaaattatccatgggggagagcatcaatcaagatcatgagaaagaaaacatgtggtaagagattcaagccattcatgagtaaacatggtggatttattttgtgatccactatttatttgatagtaatttattaacatattcatatgataagatatgatattttagtagaaatttttttacatattaatatatatgatacatatatgtacattatattattatatata

SEQ ID NO: 247251 - DNA, 821 bp, Cannabis indica
aaataaaaactttaatattttttatttccttttttctttccatttattttatcttggacttagtcttcttcatcaagcacacacagtccacagacctttcttcatcaaccaacaattttttcttacaagctgtatttcaaatcttctttctttcttgccttccaccaccactaatttaaactccatactggaggttggctctccggactttcgaaatcacccaggtcgaagccatggcgggtgaggcttcaacaacggggatagctacacacaagggccaaacatcacagggacagagaagcggtagatctgttcagatcttgtcgacggcgagtggcggtagtccaccttttctggtcagatctcgtcgacagagaccaccatggatgatgacagtgacgaccactctctgtatcccactccaacgccatcatagacgtccaccgcaagaagagggatgaagaaattggggctgggtagtgtgtaccaaatcttttaatgtcattttttttttctgggttttgttttgaaaaaattattagatcttgttgtatataagttgcagaaccccaaagaacagatttgggcttttgaattcgatggtatgtgcctttactagatttaagaattgtttttttctgaaaaaattggtacaaatttagtttcgttctagtggtttgagctatggttcttaaccttggataagctatttgaattttattgtgcaatttcagatttgattttttacctagctttcttgattggttataacaaattttgatgattgaattagtaataggtggttgtggtggtactatgat

SEQ ID NO: 247252 - DNA, 602 bp, Cannabis indica
agacaggatccttcccgatatattttatggaggattgggatggtggctactttgtgggcattatggctaaaagaaacaatagaattttgaaggggtggaagagaatgatgagaagttgtgggctaaaatcaggcaatgggtggttattttgttttttattgttaagtacttccaagatgttgcatctctgattatgtagaatctgttgttgtggattcttacacttttgcttgtattttatctaaatacttgttttaaaaagagggacaaaggtcaaatgtctttgactgaccgtaccaaaaattattattagaaacctcatataaggcggaggaacaccatattacagtagcttgtggattttctctaatccatatacaagctgggagaattatcaaagaaagcgaggattttcaaagtctcattagtattattgttcttttctttggcaatttctacagtccaataaaatcagactacttgtgttttcccatttattactttttccttgggcatacatatatgtaaacacacttgctacatgtatacaaagatgtactaaaaatttctgcagccactatgtcacacttcaaatatactga

SEQ ID NO: 247253 - DNA, 688 bp, Cannabis indica
cttgtaataataaggttcgaccgagaaaatcatcggcgccgaaaaagtcactgaaaagtcgtcggtatcggaaaagtcacaagaaaagttagtctccccgaaaaagttgtcggattagtcacagttactggaaaaagtcattggaaaagtcaccaaaagtaaatatcgcagatataaacaaaaaatataacgagttctataacataatgaataaaacaaataattcaaactggttataattgaaatataaccggttttgtaacataatgaaaaaatacaaataaaataaaataactcaaatcagttataaataaaatagaaccggttctataatagtgttataatgaataaaaacaaataacacgaaataactcaaaccggttgtaactaaaatagaaccagttatataacataatgaatacaaacaagtaacacgtactaactcaaaccgattataattgaaaaataaagaggaaatcaattcctaaaacactgaaacataaaagcaaaactagttccataacaaattacctcataccacacaatacctcataaaattgattataatttttttaaaagaatggggatcaattctaagaaatattgaggcataaatatcaaaagaaccgattccataacaaaataaataaacacaaataataacacacaataactcaaatataatata

SEQ ID NO: 247254 - DNA, 708 bp, Cannabis indica
actagccatactacctaaaagttattatattaaattatatgggacccgatacttagttacgccaatagcgatattgacacataggaggatgttaggcaccacaggtggccaatagcatttttctaatattattgatgtattgccttccaacccacattcacgtttgccacgtgtcttggcctggatggtccacacggatatattttctctttcgtctcttctcacgtctgagtctgagtgaaggaaagaaagaaacaaagaaaccacaaaacaaaaaagaaaactctttctttctaacctgctcatcatcataacattttctacttatccagtttcagatttttaccatatgtaatacatattcctaaaactagttgataatgtaatttcatttcaatagtattagtataaaaagtaaataccattttgaattctgcgttttgaaaagttgtcaattggactctctattttgttaaataataaaatagaccttatatttttcaaaatgataaaaataggaccctgaacttaatttttacaattggtgttcttttttgccatatttttttttttactatttttgttctttaaaaagtttgataattacaaaaaagacctatgcatgcttatgtcatgggttttctccccatactttacactccgtctctctgccaccttcttctctttcatttcattttttttaatttt

SEQ ID NO: 247255 - DNA, 1137 bp, Cannabis indica
ttcatggtagacaacacagagaatattaacacaccacataaagaaactcatcaccgtcctggaaaagagcccatgggctccagaaggcctttcaactcacagtctaaatagaccactcgctccaagaggacccaacttgagagtggcccagcattcgaaccacttgttccaggaggacccaacctgaggttggtcccagtacacgaacgacaagttcgaggagagcgcagcatggggagggccaaaatcctagaatgggagatgaaggacccagttgtggaggtgctcagcccgggtgagggtacttatgaaatggaaatcggccatcttaaacgccacctggaggaggcaaaccggtggaacgctgaattagtgcgtgatgcagccgcagctagggcggcacagggggataacactcaaaatcaacctaaacctggagtgagaagacctcgtggctcatgaactatgagacaagaaattgctcaggaagaatagtggggtgaggttccccctgaaaatccaaataatcagccagaacactctcatagaaatgagaatgagacgcaaccagaaaccaatgaacaagaaattcctcgtggaaacgacaaagacccagggcacaacccaaggaacgtaggtcaccgacgaggaatcaccagcgttcttcccgaacccgtagagagaggactcgtacaaaccccagtgggggaaatatgacgaaccccgctcagggggaagaacagggcgcaaagaagcaagtgtgacctcagggcgctcaaggacccacagtcgatcaactcgaagaggagaaagttctcattgcgctaatgattgagaaagcacgggaaccagtaaatctacaagtcactcaaggacgaggttcatgagtaggacgaaatccgttgcaagacgagatccgtaagtaggacacagtttatgagtagaacaaggtctgctagtaattattcccaactggatctgtgagagcacttgaatcagaaaaaaccagatcttcaccaacaacttggtccaaagtaagaggatcctatccaattacgaatagacaagttggaggataagttcacgaaatatcaagtgggggaactaggaaaaaaatctggatacgacttagatgag

SEQ ID NO: 247256 - DNA, 617 bp, Cannabis indica
agccattgggagagttttgatgcttgactgtataatgttggctcaagttcgatatatgcttggagaataatagcattttgaaaggatttgtggagcctgacatacttgaggtatttgtcaagtggatgtgcagtggaagaattgcatatgaaatcttttaaatgggtaggtttagaagtggttctaccacttttagttgttttctttatatcagcagatactatggggggagggagtatgggatccttagggggatcagtaggtagttcgatgttgatgttctgggaagggatagtaggagcaggatgaaatattgcagtaaatttagcaaaaaaggtgttgagatcaaaggtttaagaaccttttaagggaaaaatagtttcataaaacataacatccccggaatagaagatagcattactggccaagtcaagtagtgtgtatgctttcataccattgggataaccaatgaatatgaagacatgagcacgcgggaaaatttatgtctcttgctagttagagaagtgtatgctaaacaaccaaatgttcttaggtgattataggtaggctgcttattgtgcaagagttcataggcagttttgtggtgtaataagggg

SEQ ID NO: 247257 - DNA, 1187 bp, Cannabis indica
ttaaaatttattacataaaaaaaataaagtgaaaggaagagttgaatgaaagtgtacctctatgataattttttttcttgtatatgcaaactcaataccacattaaattcaacaacaaatgaagattttagaatataaaaaatatagtataacttataaaagaaatagtgtattgtgtttaaaattgtaaaagagaacatatatataggcttatttatataactgaaaaaaaaagattaatggtgcaccaacagttgaatcttttcatatgccaataatttaattttttttttattaggagccaactaattaattggttttatcaaacaaatacacaatttaattattataaatattttcatatactatataattagacattagtgtgcactaaaataggctttttgtgtgttgtgcattaatgtagataggtgggcacggttggaattttctaacaaaatgggtttgtcatttgggctttgtaataaaaaaaaaatattggcctattggactgaggggcttggggcagtggcccctgctgccccacccttcagccggctgtggtcggaggactccctttgggtctccctcatctttaatatgtcccgtgcctagcccttcctccatcggtaagctctggttctaaccttccatctctttttttatggtttccattggcgtttatttctctcccttgtcgtttgtgctttttgtttgtatctgtcctctaggtttgggtcgcgcagtgttgggcctttttaatgtactcggatctcaggttttggggtacccattccgtttggacttattaacgcttttattctattttattgggcttttactttgtgccaatatttttcccctaaacacacctccgattgcaccctctaacaactggtgcttgctagccgctcgccctcacaatacagagcagcctccccaaccaacgtcgagaataagccctcgtcgagaagacaatttctgtcaagtagttgttgccgtggaggagatgttgtcatcgatatcatcgtcgtccttcccatatatagccgcactaagtaaagctaaaccctttcaaaaaagggactgagcctagcgtatttctttcctcacagagagaaactctagaaatattatttattaataatttaaaaatagggcaatttacactaatgtatacattatat

SEQ ID NO: 247258 - DNA, 798 bp, Cannabis indica
tactttttcaaacatactttataatagtctaggtatgtaatccaataacaaataatataaacgcttactatattatgagccgacctttcttcacaacaaatgtacatattcgactagtttcaggacctttaaaactatggctgctctgataccaaggtgtaacgtcctaatctgtagggacgtcacgtgtgtgattttataaactagtttaacactaatagattaattaattaaaaaaaccgtgatgatataaaaacttgaccaaaataaaatactaaaaacatgcatcataacgacattaaaaacgtgttccagagatccatgttgtaaaaattttacaaaaaggctaatacaacgacaagtaaaaatacaaaatcaaaatacacagcagatacagcccaaaaaaactcctgacgattcggcacacaggtgggtggggtcaatatgtacattgttggagaagactgtcacctcatggttgatctagcttttccttgtctttacttgcaccagatagcacccatgatttacaaggactcagcaagaaaagtaataacaacaatcatataatatattattcaaatagtatcatttatactcagacaattagaatcaaacgatcacgcattactcataagatgaaacccaaatcactactgacatctatcccgaataaacatcagtataaagatgtttggtaatacaatatcattataccaataacagaaatcatattcatttaataatataaattatatatatatgttacctcatcaagtaaccatcttcattacatca

SEQ ID NO: 247259 - DNA, 1250 bp, Cannabis indica
gcatagctacactcgtccacaccctaacagtaggcaagctcacactactaagcgagtcactaccattgaccaccgctctcctcagccgtagactccgcctcagcgccgcctggattttcctaatcacattacaagtgtgcgtgggtttagggatcaaaggaaccgtttcattgggaaccgatttttcgagcttcggtacggacaggactttggtgagtcgagtcattttctttctcggcttgcacgaaacgatgcttcattgcttccagggaattttaaaaaagaagaagaagaagaagaagaaagaaagaaaaaagaaaaaaaaaagtaaaaaaaaaaaaaaaatttaaatttaaaaaagtaaaaaagaaaacaaaataattttttttattatttataattatttttgaaaattaatattacatggaccactaaaaacttgccacgtgtacaagtgtgtacacgtggacagtccattgtggcacttaactgtgatttttggacgaaggtgtgcagagcaaaacggaaccagagtttaggtagtttagccaccaaaatttcgatttttgtggttaagtgttacaaaccgtaaagttcgggtggtttagccgccaatatccctttacttaaatatagcagttttgactttgcgcatttttttaatgtaatctatttgtttttttttttacacaaaatatagttttttgtaatatttttgcatcaacttttattattatgttccaatgcataattgtaaatcttgatggaaaatttaatatgtcatttaatgctcatctaatattttattaaaaatataaaataataataatacaaagataaatatttaagaataaaataataaatattatgaaagtcatttaatgtaaattagtatgctacctaaactataataataaaatattaaaaattgcataatagtaaatataaaaacataacatttattgtgatgtatattttgcatcatgctctattgcgatgtaaatttggatcacttttgattatgtgagatttttgcatcataatatagcacactattggagtaggcttttaacaaagtgagttatattttgcatttacattaattattttgtttttggtatagaatttacatcaatttagtataaaatcttttatttttggtgcaacaacttcaataattaacaccacatattccaccaaacaaatatattttactaaaataatctcgtattttatactatttacattga

SEQ ID NO: 247260 - DNA, 654 bp, Cannabis indica
aataatttggagcagatagttgtgcatgtattatatacttagaaaattatcagataaaaaaactaatccatcattgtatgtacaatttgtcgatttgtagttgtacctaaaaaatcctgaccaaaaaaaagtttgcacttaaaatgtgtcgagcatatcaccttttttgggctggagcttcaagcccaataagttaactatgtcttagtggctgtcatggaccaagcccacttctataagatgatcgttatattcttctttttattttgttatcttacaaaactttttttttttggtcatttttacatttttattgtctcacttttttttttcttacatttttacttaccatgtttttaaaaatactgtattaaagttttaaaattacaaaaatactttattttaacaaaataaaaaaataacttaaaaacaactaagacatttaaaaaataactttagaacaacttaacaaacaataggaaaacaactataaaacaaaaaaagataattacaaaacaacaaaataaaacttgaacctaattggaatatacaaaataatatcaactccttaatatattttgggatattggcggctaaaccacctgaactttacggtttataacacttaactacaaaaactgaatttttagcggc

SEQ ID NO: 247261 - DNA, 886 bp, Cannabis indica
tttgtttttttttttgttttaaggagtataccttttttatttatcaattaattaaatttacctttattatatttaattgaaacatattttttttatctgtattgtactaaaaataccttaacataaagaagtcacaaggagagtatattgaagtaacaggggcaatcggcaaagtgttaaaaaagaggtaaaaatgatagactttaaaaaaatggtaaaaaaaaaagaaaacaatataaaaagagtatagagtctaatttcttcttttttttttggaatttttacacttagtaccactttttgtcaattttttacatttttagttatttaaacatttataaaacttttgtttttcaatattacattttcaaaagttttataattacaaatatgtctatccatgcttatgtcatgggttttaccttttcttacacgccatccctgccattacttctcctttcttatttatttatttatttatttttattttttgttactctttcgttggtttttatgttgacagaaccgacgatcatcccctctgaagccctaactcacgatttttcaacctcccatctatgccactctctgcactatcttccataacgtctgttagtttttcctctcacattttcttctcttcttctataaatggccaccactaggtcaggttcaaagtcaccttcacctgctaaaaaaatttcaaaaaatgctaagaaacctccttcgaagtcatctaaagttgatcctaaaatggtttgaaacgcattgcgaaaaagggaatgtgtgatgttgcagagccatctggttctaaaaaaagacctcttccagataagattgagtctcgtaaggcaaagaaaaccaaatcttcgaaatctgccaagga

SEQ ID NO: 247262 - DNA, 573 bp, Cannabis indica
ttactccactctcaaactctacaagtgagggaacacctggaagtggacctctcgttgccaagaaaaataatagagcaagctttcagttgtcagggaggtgccaagcccctagatttcaggtcctttgggagatcatcattagcctaacatagattccaaagttgactactacacataattgcaacgacgtaggattaacatcattacaaagccatactgattctgatgacccattgacctaggcagagaaaaagtgacgggtatgcactttcacattggccgcatatgggaaaaatcttgtctcaccaaactcctaccatggaggttaggtagcacctagagactagtaattcacgcacctttttacctcctattgccctttcattttcctataaatacctagaaaaataattggaaaggagacttttggactcacacacaaaaagtgagctctgatattgtaacttgaatattctctgatcaagagaacattctaatcataaataaaagtgactcgtggaatacaattcattaatattggaaccacgtaaaaatcctattttcatttttctt

SEQ ID NO: 247263 - DNA, 887 bp, Cannabis indica
gccagtgaacaaagccaggaacatggacatccaggtcaatatggtgggccgaaaactttaataaatgggcatcagtagaaatcttccataaaaaagctagtccaccttttctaccttgggttggcacagtaaaactatcttcaaagcccaaccgaaccttgagcctatccacaatgtcattgttgcataaagtttcacaaaggaatataaaattgagcttcttttgaacacagatatcaacaaggaattgaatggcccgtgggttcccaagcccacggcaattccaactaatggcattcataatgattggtgggcctgaacaccaggacccacctgttccccattttttggaaacccaatagcatcaatactatgaaaactaattggctcagaagtacaaatcgcatcatcttccactattttagccggccctttagagagaatatcaactctttttctcttcaaatcatatagattcatatcatcctctgacataaatgatgattcattctcatgaatattcaaagttgcctcattagtattttccaaatttaaatgacccgtatgcctagaatcaaggagagatttttggaaaattacatttgtgacagggaggtgattgcgttgcctggttggactcacggtttcagcctgagattgaggcatagcattgaaggtggcagattgtggtggattgctactgccggcagtggcaggttcaggctttctggtacgaagctagggaaaagctatgaggaaactctgccgctttgaaggagcacgcatgtcattactgtattgttttttgattgcctccgctggctgcaaaatctctccgaatgtcccacgatgccgcaaataaaacagaaggtgggaactctctcata

SEQ ID NO: 247264 - DNA, 606 bp, Cannabis indica
agatcctggtaaaataatatccaacagaaccaacactggattggcatgccaaactggatataaatcttctcaaaggagctctatattagtcagcttgtctacttccgtcttcactacttccgtgggaccttgatcgaacagtcttctcttcacacaaactagcttcaccatgggatctgtgtttagagcatgaaaattcatatgagggatgattccagtcatgtaagaatggctccatactcacacatcactattttctcttactgtagagatgattttctctctaacagttggaggtagattctctcccactttaatgactttggtgggaccttcattgttgatgcgtacttattctatctcatccataggttcaattattcattccaccactacaaccgagtctaactcatcttcttcctggagtaccccaagtgctggttgagtggatgttcttgatttagctaggttttttactcacacaattaagacagttctagtcgagacattgtaaaagctcctggaacttttttattacccctaatcgttccaatgcttctggtatcactaaagaattttaggcacatgttgtagactaaagtaaca

SEQ ID NO: 247265 - DNA, 665 bp, Cannabis indica
tttgctgccattataagagaagaagagacatttttggaaagctctaaccttagaatttttctttaagtggctgtagcaagaagaagaagagaagaaattttcttaacccatacaacactagctgagtttttatttactaatttaaaaataaacattgcaaagcatctgaaataaaacgataaaaaggggaaaacatcacttatttactgcctcgtcgcttcctcttcagtctccacttagccctcatggtgaagatgagatgaattagtgaatgagtgttactgttagtggagagaattagtattttttgaataattttgaactctttgtgtgagaggatagtggctggcgagtatagtgtgttagagtttgacatataccttatatatatatactagggttttggtgcttgttgggctgatatctccttttagtgaaccaaatattgaagaatgttaagagtttgactcttgggcccaacaactaagaaaagtttgtgaggtttaaattgccaaatttgagttgggctctcttgaattttcggacctgaatataacaaaaatgcaattgtgtgttttaacaatatcatttttgttgtggatgtataacaaaagtgtaaaattaaaaatagcactttttattatggaagcataatagaaagtaaa

SEQ ID NO: 247266 - DNA, 582 bp, Cannabis indica
gggatgagtttaagagtctgcttgaggaataattttataacatcgttgtaaggacttcccatatggaagactttgtgaaactgactcagggaaaaatgactgtggccgaatacactctggagttcgatcagctgtctaaattttctggtgatctggtgcctacagattttacaaggaaacaaaaatatgtaagaggactgaatgccacaatcagttgggacttcaagattaccactgctcacgacactttgtataagaaagtgatcgaattagccttaatagctgaggaggctgagcaacatgtgattaaggagtagactgcataggatgtctccacgacatcgaatcctcctgtaagtggtaatgtcagtaaggggaccgaaagtggtaaccctaatcacaaacggaaggctgatgcatctggaacatcaagagctaacagaaagtttcggggaaacagaggtggctgtcagggccacggatcttcattccgatcataccctgagtgtccaaaatgcaagaaacatcatcagggtgaatgccgggccaagacttgttttcagtgtggcatggtgggccact

SEQ ID NO: 247267 - DNA, 673 bp, Cannabis indica
aattattcataattatctaattagggttttgctaatcaatttcttaattccagggtattacaattaccccttccgtatagaaatttcgtctcgaaatttacctgaacaactccggatatttctgctgcatattcgtctcgagctcccaggttgcctcttccactttactgtataaggcatatttatattattagcattcaaccctcacttactgattagcttttggttcttagacctaagaaaatacctctaagaggaaggaagacaaggagaacggttggagagacgcccctcaagctaatgtctaacctccacaagttgaattccctatgaacgctcttctcgaaaccttaatagcagtttctgctcaacatataaatcctgtcgctcgatagaatcatcattttcaaatctttcatcgaatccaagtgcctgagtttgagggtggacaagattccactgtagctgaaaggtggttgaggcagataaagaaaaatttcaaggcagtaggaacacctgaggaatacttagttacttttgctatgtccaagttagagggtggtgcaacaaattggtgggagaccttatccaggatgatggagactgatgggatgacttggcgagattttgatagagttttcagggaataatattttagtccatctcataggag

SEQ ID NO: 247268 - DNA, 534 bp, Cannabis indica
agtgctaaattgttttgtttcgcctcagagaattatagtgtgtgtatagtcttttactaacttgtgtaacatagcatagagtttacttgcactttaccgacttgtacattacaattttcctattatgtgtatatacacaatcatagaaaagtatacaaatataatcaggaagttttgtatgtacacttaaaattctcctgaataaaagatttgagagctgtttacattgttggatataattattgtagaaaatagtaaattgaattgtgtatgtatttcataaaatagtctatatttatatacaaagttatgagactaaatgagaaattattaaatacaaataggaaattagagatgttcatccaatctaattcgtactattttattcgtagtgcattcaaatcgcattacgtgcggatttcaatttttggattcaatccaatccgcacaatagttcaaatctaatctaattcaatccgtaaaagtgcggatttgaacggttattttggattttgttactttttaatattaaat

SEQ ID NO: 247269 - DNA, 567 bp, Cannabis indica
aaaagggctaccattgaggtagtgtgttagcgtctcctatggttacaagttatcagaaaaagtctttttgacatattgggaaatgttccctgcttacactttcacacacttatgcttgacaaagtttgtggtaaaaattttcatatcttcgaaaatggtgttataaaactgttacatacaatttgatttgcctttaatattcttggtgactgagccaacttttttcttgcgtaaccggtatgacttcattccactaattcattagtttgataaaataatttttgactattcttatgagtttgattttttcatcagggacaaggacaagcggacattctgtactttttgttggcaaaaatatcaagcttattttattttttttaaaaaaataataataaaaaataaaaaatatgtgtgaccgacattgtcaattgagctttcttagaatttcttgctatttttcttgttatgtttcattattttcttaaatactttttcctctacagtgttgattagtgccttttgtattttttttgtgaggtcttgttcgtttctttgcaaataaaa

SEQ ID NO: 247270 - DNA, 1215 bp, Cannabis indica
actttccttctccccaaaaagaccactgataatattgatgccattataagaaagttttggtggactggccaatgtaaaaagggcagatatctatctttgaaggcttgggatagcctctgtaaacccaagtcttgtggtggattgggctttagaagagccaaggacatcaacttttgtttgcttgttaaattaggttggctcctagcctctggttctatgtctttatggactgaggtcatcaatgcaaaatactgcaaggatggtggattcctatcttcttctcttccctctaaagcctctcctgtggcgagaggtatctgggcaactagggacttcatagctgatcacagcatttggattggtggtcaaaactcctccattgattactggtgccaacaatggatctgtggagagagcactattatccacaaaggcctcatcaatccgttgacttcgaactcggcctcggttaatgatctggttgatagtgatcacttgggatggaatgaacgaatgattgataatgtctttactcctgctgtggcttcgataattaaatcctcggacagaaattctctcccatccatggacgtggcctgttggaaatctaccaaggatgggagcttctctttgaaggcggcgtactgggacttaaacaagacaagatttgctgaaaaggatgatgtctgtggagggatttggcttgctaaaattcatgatcgattcaaggtgtttttatggaagctttgccaagatgccttgcctttcggatcaaaattgcaaagtatttttggtaagcctcctggtgcttgttctctctgtggcattgaaggtggggatgtcatagatcactttgttgctggctgttctgtcacgaaacgattatggttctcttctagatggggccttcgggctgatgcgctctcttttggtaacggaagagagctggttgcttggctctctcagcctccttttcatcatcttctccattcgcaggatttgtccagcttttttctttatggtgcagttctgtaccataaattgtggctttgccggaatgatgccttccataatggggtgcctgtggattttaagatgttgcaaaagagtattgagagctgttttgcggagcacgacagggttcggattgagaaaggagttagaccggagttatgtcatggtgtggcggaattcagatggggtctcccgaggcct

SEQ ID NO: 247271 - DNA, 882 bp, Cannabis indica
aaaataatatttattttaatcctgtagaataagagattaatgagaattaatcaattattatttattggtagaataaataatcaatcttattgatggtaaaattgagaaatcttaccatctcttaatgaatggcagaatccaaggtagcttcagaggtaaaaaaggtctccgacaaggtgatcctatgtccccacttctgtttgtgctaataatggagtacctatctagactgttgagcttctattcggagaaagaaggatttggctatcaccctttgtgcaaacaccttcgtttgacgaatcttttttttgcagatgaccttgtcctatttagcaaaggcaacttgaattcggtaaaaataattcaagaagcctttactaaattttgtaatgctacaggattatcagcaaacaaagctaaatcgcagatcttctttggtggagtcaaagaagatgtaaagcagaagatcctggagcttgtgcaaatcgaagaggggtcttttcctctgaaatacttaggggtcaatctccgaacaacaaagtggaaggcttcagactgtggtgtaattcttgacaaagttaacaggaatctgaactgttgggcaagcaggaatctctcgtttacaggtagagctcaattaatccactcagttctgcttggaattcgtaattactggatgagcatcttcataatcccccaaaaaattgttgaagccgtagacaaaagttgtcgagatttcctttggggcaagaaggagaataaaagcaaatttcatttagctttttgggagaaagtttgtctccctaagaagttaggtggaattgggtttcgagaagggaagaagtggaacaaggctttgatagcgaagtacctttgggctat

SEQ ID NO: 247272 - DNA, 1497 bp, Cannabis indica
agtaagataacaaaggaggagaagaaaaaaattagcatcaagaagaagaaaaaaatgtgtattttttctatgttaaaatgaaggatgcttgaagacttgatgaagatgagatttcaaagtgctctctaaaagctataggcatgtggagtatgaatgaggaagcgcgaaaattttattgtcaactcacttatttatatgtgagttcaatctcctaatcctaaagctaataggagtcttttaaatttaaagcttttaacgaagaggtaaatgacaagtaaaagatataattatatcttcctttttagctagatttcgaaattcttatacaaataggaataggaatccaaatttaaatggtaacataaaatcctaatgctattaaaattaaggaaaaattgtagaattaaaagaacaagataaacgataaagcaaaagaccaaatttttttctcttcttcttttctctctctgatttcgaatggcacctactaataggattaggatttcaatccaattaatcctgaatccatgaaaaaaataataataaaattttcaaatttttaaagaaaaaggtaaaagataagtgaaaaaaatataaatttttcctcttttctttgttaattaatttttgaaattctcaaggactaagcaaaaaagttgaaagtcctaatttaattgggaatacttgaagaacatatacaattgcctaagaatgtcaaaactaatgcccatctagtagtttcaagcgaaacgagcttggttcacatcatcaaggcaactccacacaagtgtaaagttaactttgggggaaaatgttaacttggaaactttcactggtgacctagacatcaatatttgacatgtggtatgaaggataacatcacagagttgagtatacccgagtcatagtagtcgacttggaaagggaccttagccctgtgcccaggttgacttcaagatcttcgaaatggaagtttggacttcaataacttgaatccaactcactatctttagtattctataccatgaagacatggaggaacctaatccaaggctcaggagctaaaattacacgaacctacaaccctaaagccaacctaggcacctagggtttcactcgatgcctaggttaacatatccaactagggtttcaatttctgggaccgtcttagtgcaaaagggccaaaacttgcattaagacatcaactagacataccacagatatatttgaggctttagaattagaatcgaagtaagttcatttatgagcacccgagaccccgagcactagtgcccaagttcacaatttgttaatctggtgcctttcaagtatcgaatcaaagatccaacttttgcatcttctctgttttcatcaaaaatgcaaaaataggacatttcaaagaagaaacaacacttcctgggtgccaaaaataggacccatcgcccaggttaacacctgggactggccctacgcccaggttgacatttttgtcaacct

SEQ ID NO: 247273 - DNA, 994 bp, Cannabis indica
tcctttgcccagttcgaattcccctgttcaactaacctggttaatgaacccagaggttttctatgcttgaaaaatctcatcagtcttcaacatctcagcgatcttatcaagttcagtagtaactcccaccgttgtcttctccgtttctccatcgtctgcatcatcaatcggttcaggatccaacccacgagcaactggctttcgaacggtccttcttttcttcgccatggaagagagagaaaggagaggtcgaagctttttattgcacttgtgtgtggacttattttacaagaacttgacatggtagttttttgtaggtttttgtaatgttattcttatacacataagcttttgtaattgtattatattatactgtgaaatatgaaatcgctcaactatcgcatagaaatcgcaagtattatcaaagttgaaataataacttgcttagttcgctaaaacaaaaatgtcgcacacacatcgcatagacatcgttaaatgtggccagaaattgcatatgaatccaaaaaaaaattaaataaaatcgcacaatgtcgcacacacattgcatacaaatcgcgcacaaacaacaattacaaatatgagagaaaatcgcacaagaatcgcaataatgtcgcataatgttgcacacacttttaaaatatccatgcatattgttaaatattcaagctatagtcctgttaaacaacaaccagtaatacaacacatattcatttagatattagataaacggttcaaactcgagctttgcatgtagctctgttgtgccctgcaccgtgacatagcgagcagtgacgaggttccactaccacctgaccattggatggtcgacgcttcatcggtcttctacctgcattgctcttcctagcccgacctactggttttttctccaatggtaccccaattcttatgttcttgatgtgttccggtagtacccactcatcctcgtcgccaacaatattaattgtggcatcgt

SEQ ID NO: 247274 - DNA, 826 bp, Cannabis indica
gggtaataatttcgatgatcatcattggacttgcttgatgaagcacaagaggaatttcttaatgatcctaaaaaattcgataattttctaagtgatgcagataaatactatcacaaaaatggccttctgcttcaatttttaagtgacatagaaagaacttacgtcggtttgtgtaactaacgctataactgtagacacaaatagtcttattttttgcttcacttagtaacagacgctaaaatattttttcttcagttcacaactgaagaaaatagtaaaacactgacgtaaattggttttttgcttcggttatgaaccgatgcaaaagaataaaaaaattaaaaaaaaacataaaccttcataccaccacaacccttcagactgccacaacagcccaacaacaacaacaacaacatcaataaatactgccactacagcaacccattgtactactaaaagcacatcgaaccaccaccatcccaccagaccacccccactgcttacaaaaaaaaaattgagagatagagagagaactggaacgagaaagagagagactagaggtggagctgggtgcgcgagatggggaatgagaaaaaaaaaatgaatctcacctttgaaaactccattttctcaagagagagagatagagagagggcgagggcgagggcaatggagatggtcgcgtgctccataatattcgacgatgagctccaacgccactagcaaaaaaatgagaaagagagagttagagttttagaggttcatgcttcaagttgggttgagaagaaaggaagaagatcaaggtgatgatgggtggagagaggga

SEQ ID NO: 247275 - DNA, 539 bp, Cannabis indica
ctttcttaattactacagagattagtaattgttagataaattctcatactatccgtctcatataaaagtgtaaaattttaccaatttgccttacaccaacaagaacattaatatcagtgtcaaaggtcaaaatcgacctttacccgtctaatttagacttagactaaaacggcagtgtttaagcacacgacaccaagtcctgtgtcgttcaaagctttggtttaaagactcagtagaagagtctagaaaccctaaacaccaaacacaacacacacacacacagcctctctgattcgaaaccctagcagagcaagttcttaacaagatgaagaacttgctcgattctagactagaaacccagatccacacccacacacaaacacaaattagattagatgagagaaaaacgaaaaataaggagagaaaacaccagaaaattgtttcagacttcacccaaaactgggctacgtctctgtcaagctcttctcaaagatagaagcttgatatccactatcacaatgttgatttacaagttttgg

SEQ ID NO: 247276 - DNA, 546 bp, Cannabis indica
cttcgaggaactggataggaaccaggtttgccttgtcactcacattgctgcttgccaatcgagctaacgcgtctgcagttgtattttcttctcttggaatttgtctgacaccatagcttctgaattgtgcaagaagatcatgtattttgctcagatatgctatcatctattctccccgagcttcgtattctctggagacatgatttaacaccagctgtcaatcactgcagatttcaatgtgttcggccttcatctctcgggctagtcttagtccagcgattagagcttcgtactcgacctcgttgttagatgctttgaattccaacttgactgcagtgggtaggtgttacacctcaggcgtgacgagggcagtccctgcaccagatagttgatctgtagccaacccatccacatgtcgtttccaggtcggtttgtcctcattgtgacttggctaaggtattggtgctggctcgcggttgctttctcgtatgctttcttttttgcctatgcattctacacaaagtcagccaaggcctggcctttgat

SEQ ID NO: 247277 - DNA, 606 bp, Cannabis indica
taaccttcaacagataatcattgagtgacagtgtccctttctttaagttctgaagcttggttctgaattccaagattttggaggagactttcagcgtgaagtgtttctccaaattggcccagatttgacgagctgtgtggcacccaaccattcgagtgagaaggctctcagtcatagatgatagcagccatgaaactaacaattgatcttgcacatcccaatcaagaaactcagggttgtaggttgaagaagcacgatcggcatcactgaggaattgcggtggaggagcttcatcttgaatgaatttcagcaaacgatttccacgaatcgcagcaaggacctgctgtttccaaagaagaaaattgtgatcatttaattttacagaaagattatgagtaaagtgaacaggggagaactcatcggcatcacgatttcgacttctctgcagattaggatgtgtgtttgtggaatttccaagattcgaagggttggctgggttttgagctgccacaattgccatgttcgccgttaatggcgaattgagctctgataccatgttatgattgttgtttcttcggttcaagatgaaagagatcagaaagaaaa

SEQ ID NO: 247278 - DNA, 571 bp, Cannabis indica
tagttttatagggtttacaagtttgaaagtggtttcacatgttttgagggttctgtaatggggttgctctattttatgatgttattgtatatgttatgtttttttatttaaaatatcatattttgttgtattaaatttatatttatgtaaattatgtttcttattatcatatttatgtaaatatttctatatagaaagcttcaatttgattggctgacatcaccatttttggtgaaattttttttcagatttaatgttgataaaaatagcaatctcatttttctcacattatcatgttacctaattacaatttataatagaaagttacctattttgttagtattaattttataaagtaccaatctgtgatgctagtacaacgaatgatccatatcaatacatatatatatctaattttatttatagtaataatgctaagtaatgataaatttagtagtaacagatttaattatttaataactccattttattaccacgcttatcgatgaattaatggatataaaaaaaattacatttcaaatactaaatatagttatgttagaaaaagaaa

SEQ ID NO: 247279 - DNA, 969 bp, Cannabis indica
aaagtaggtagatagtatgatttaaaaagttaatttatttttcaaaaaatcggtgtgcttggtggtgttatactcttgactaattttaattttgtgctttaaaagaacatagaatcatattaggtaattttttagtaattaaattagtttatgtatgctaattgggacatgtgaaaagttgtttgataaattctagaacttgcttgctatttgaggcgaaataatacattatgcatgactagaaaagtgatttaggtatttttttggatcgattgtgcctttcaagtcatccctgtaattttatcctacttaccctttttgagtcttaacatgttctttgtttctacacattatgagcctaaaaaagataaacccatgaatatccaaagatttaactctaattataccataagtaaatttttagtttggaggaatttggatggaaagtttgttgtatgtgtgacggaaaaagtgtgaaaattaagagaatatataaaaaaaattagattgacaacaacttgaaaagaaaaaaaatctgacaaccagtgtcaaattcaggaaaaaaaaatcaatataaagttgctgcaatcttgtgaaaaaaaaaaattctctcatgtaattagaagaaagaggtattgtgattgtgtgtgaaaaaaatatttggatgacatgattgaagaagcttatggtataggcaagcctaaatgatcatttaatctactcttacctaagcctaacactacaagtctagaaagaccttttgattcttagttgtgcattaatttatattagtggagaatagtaagtattgcaagcatatgaaattttgagttagtggattaatggttgaaattggcatgcataaagtgatttaattgttagttaattgcattctatggtttcatgagctgaatgaaaataagttgaagtatgtcaagggtgtaattgaattgaaattctagattgtat

SEQ ID NO: 247280 - DNA, 1081 bp, Cannabis indica
ggtaaaataatttccaaaagttccttcttgcaacagaagtctagattacattggctcaaagagggtgatgaaaacttagcattatttcattcgagcatcagagagagaaggcatcacaacaatatactgtctatagcagatgctactggtactagacatgaagatctggagggcatcactaaagctttcttagctttctaccaagagttgttgggatctaagatggtgaacagaatgcatgtgaatatcaacttaatcagaaaaggggcgtgtgtaactgaacaacacagtcagattcttactactgcttacacaatggaggaattaaaagatgcagtttttggcataccggcggtaaaggccccggggccagatgggtacaacagttccttctaccatgataattgggagttagtcaaacaagatatctttgaagcaattacttcatttcttcactcaggccatttactcaaggagctaaattcaacaataatcaatcttgtgccaaaaagtaagtgcccaaatgttgtaagtgattatagacctatagcctgttgtaatgtactttacaaggttgcaactaaaatgatttgtagcagactgaagcttatactgccagatatcatagctcaaaatcagggtgggttcataaaagggcgattcattgctcataacatcatggtttgccaagatttgataaggcactatgggaggaaaaatgctaaggcaaactgtatgattaaacttgatctacagaaggcatatgacacaatggagtggagtttcttagaggaaatgttacatgcttttcaatttccaagttcattcatcaagctggtaatgatttgcatcaccactcctagattctctttactctttaatggattcctacatgggttttttgaagcaaagagaggtcttaggcagggtgatccaatgtcacctctgcttttcgtgctgggaatggagtatcttagcaaaataatgaagaaaataggtgatacagaagactttcagttccatgaaagatgtggggatttaaaaataatcacttgagttttgcggatgatgtcttgttatt

SEQ ID NO: 247281 - DNA, 1607 bp, Cannabis indica
cacagagaaaaaaaccataaacaatagagacaaatcatgagtaatagatatatgtaaatattacatttcaattctcaacatgttttgccatatgattactattgtaaacaaacttaatcaaaattactactatagaatctcaatctcagacattgaaacaaataattgcatcaatatttgaagctaaacaaatcaaactcattaatcattgaaacaatacactacaaattcaaagcgttaaacaaataaaaaaaacaaaatgtattataactgattaagaacataaacccattaattattgttgagctaagtgatataaaaataactcaaaataccttcgctaaatcatctggatgtatgttgattaggttctttggccaagctacaaaattgtttacagctaaaccaactgtgtcgaagccttcatgttctatagggcatggtagaatggcattttcttcaaccaccttctcaataaagacacgtttaaaatcatcaaacttcttttttactccatgtattataatattgccttctttgtctgccttttcaagtttcacataacctgatgcaactaagaccggatctttttctttgggatcaatcacgtacatatcacacctcaatctcttcatttgcaaacaaaacaagagacaaacaaaatttattttaaaaagaacttaaataattatgatataaaaattaaacatgcataatgaaaattattttaaaaagcaagtaaataatacattatcagaagtaaccggagatggtgctggtggagcagctgcacaagttgtggctggtggagcaacaagtggtggtgttggaacagaagcagtatgatcacacatggcaactagtggagcagaggccttgggagttggtggagcagaggccctggcagctggtggagcagaggcccctgcagcaggtgttgctcctagaactgaggtaacaacaggaaaagctggttcgttggatgctcccccaacacctaaaccagatgcatgtgaggtgctagcaacaccactttgactttggactatttggaggagttgctttaataattcgtcttgcctacgaccctgttctttcgactcttgaagtcgcttctccacctcactcaagtgattattgtcattgactctttttcttttaggacgtggggttttgaaaaactgtgcatgtgtgatgccacgccctattcctctaacacgtcctcaatgttattctgttcccaatgctagagtaagtatgtcttttgagccttctactaacactgtcccctcctcaacctgctttcgtatctcagcctacatttaagaaagtaaaattagtaagaatttgaacaacataaaagtgtttaagaatttgattgccccatgtattcatagtacagaatactaaaagatagagagttggattcaagttattgaagtctgaacttccatcccggagttcccaaagtccacctggccacagggctagggacccctcctaggctgatttcttataattcaaaactactcaactccgagatatcatctttcttaccgcatgtcaaatatcaatgtccacattatcagggctacttttggtgtaaa

SEQ ID NO: 247282 - DNA, 717 bp, Cannabis indica
cacagtatgtttaaaaataacgtaatacgcctatgctagttagggtgttacattacaattcaaggttgacctacaaaaccttctcttatcgagtttgagaatttgttagctgataaaagatcttttgctaagcatatatcaagagtttcaataaagaatgaagaagatcaagcactcttcaacaataaaagacaaagacaaccaaagcaacaaagtaacatcaggagtaatgagaagttacataagcaacatcgaaactcttagtcaggaggagctcaaaagaatcgttataagaataatcagatgagtaaataaaagagcttttgatgttataactatggaaagaaagagcacattgttagagattgttgttcaaagaattttgtcgaatgcattgcaacaacctccaacaagaagattgatgtcgaagaagaatgagatattaaagcatcatttatagttgcagaatctagcaagaagagtggaagctctgaggaatgggcattggcagtagttacttaagagcatattaattacaagaacgacttgattatagatcctggatgctcaaattatatgacgagatatggaaagctgcgagatgggacaaaatacaaacgagaatgaataatggtaactggaaataattccacactgtcaatcactcacatcagtaaggctaatgtagtccttccactactacaaatataagaattc

SEQ ID NO: 247283 - DNA, 522 bp, Cannabis indica
attatgaaatggagagttctattgtgctttaatttgtttttttttttgtttcaatttcgtttcaaattctctctcatgtgtatgttctttattttatttttcttgcagatttagtgattggaagtagtaaagtaaaggatagtcccttgctcattcttcaaaggtatactattatattgccctttaaaagatgagttactttataatattataaagatattaattgtcataacaaaaaacaaggtccaaacttatgatttgttgtcatgagaaataattcatgtaattagatagactttacctttagaagcaatgttgagttcttgtgctaagttacctggaatattcaaaattattgtttctagttatagcactttctctatgttcaagttttgcagcatatgatgagtgatctcattacttgcattttgatattaatccacagtgaagtaggttttgatattaattgtgtgttgcggtgataacggaaggtttctaacttgtgtgccttagtgaagtagg

SEQ ID NO: 247284 - DNA, 1004 bp, Cannabis indica
agcaaccctaattctaaaatcaagctgatcaattatgggcaaaagaaaactattttttggagatactttatttaggtcatagaagtctatacaagttctccacgcgccattcatttttaggaccaaaactagatttgaaacccaaacgggataaaatgcctctctaatgaagttgtttgtcaataattcattgacctcttcctttagagcattctgtctctagggattaagaagatgtctcttctgttgtcttggtgaatagttaggatctatgttgaggcagtggcaaatgaaatttgggtcaatcctgatcatgtcaaaatggccccaggaaaattgatcctagttttccattagaaaacagatgaattactactttaattctttcccaatcctttaccaatttttacatttttggtagggttgctaggatctattaccacctcctctagctcctccacagtcccaagttgttattgttcatcaatgagtcttgggtccagatctttgatttgttcttcattatttgcctcgttattactaccatagtctgatgggtcatgactctttcttttaagtctacactatagcattttctcaccattaattgatcccttttaacagtgcctattctagaatgagtcttcaaagatagatgttttatggagcttattgctcccattccagtcaaagcagagcgacccattatcatgttatgtaccgagggtaggtctaccacaaagaattcttgcatttgtgttgctggtaatggtgactctcccatcgttaatggaagttttattgttcccaagcttgcaatgttgtttcctatgaatccacataagttcaccatgcacgtttttagtgtgacattctccaattccatttttctcaatgtctctttatataggatattgactgagctaccgttatcaactagaaactattttattcttttattcgtgagttagactattttcatgactggatcaatatgtgaaaaa

SEQ ID NO: 247285 - DNA, 538 bp, Cannabis indica
agatcctggtaaaataaattccaacagttagtatggtaatagcctactcccctttgattgtattaactcgagaacaaagaatacgatattttctttgtcaaagctcttacaatgaaatctctgagtaattctcttagatctctcttagaagcaattctttcgatccctttcatagtgaaactagatcactatttatagggccttaatgcatgtgggaatgtttcccttttgattacaatgtataaactaagaaagaatttttattacataattacaatgcacaaaataggaaattggaataggttgccatactcctctgactcaatcccacaattataggtattgtcttcatgtttgaacttcacgaaatcattcttaagtagtcaagtcctgatgagtagttcaaaatgccaaacttaatcttgctcggataatctacctttcaccctgctcgggtaacaagcaaatgtataacatgaagtctattcgagatattcatctccgcccagatgcaaggagtgtaggacacgtgtcactc

SEQ ID NO: 247286 - DNA, 1013 bp, Cannabis indica
atttggcagtcggttttagtttttttaacatggcggtcagttttggtttttaaaataaaaaatggttgaaccaaaaaactgccaaaactgccaaaaatcgcaaaaaactgcaataaaccgtccaaaactgccaaactgaaaaatcgccaaaaaccgtacggtcaattttatacggttataatttctaaacggtcggttacggttttcgtaaaataaaaaccgcaaccgacctgtcggttataaaattgtaaaaaccgaccataaccgaccgatttgcacccctactctcatctaggttgaaggcagtagttaaattgtcaaaagtggatgagtgagagcatcatgttccttttatagtatttcaactagggcttaagaatgaattatatggattaaaaaagaataaaatattgggcaaaagaatgttgacttgaaaagaatgttggaggaggctccatcgtccatcctacatctcgctatggtcatgttcccaaagtaatgaccagggggtcattgtgtgggaaactgacttgagcaacgtcttcttctgtgaaggagattatgggctctataagctttagttgcttaggccccctgtcttcaaaagtaaggatgtcgcttttgggctcgtgatggcgtatccaagcatagtgctccctagctttgctggtctcgcttacattgggggtctgccaatgatgaccccttagtgtcctgccactggtggtggcattggatctccattctgggcatcttgtgcctaagtttggtcgttatacacataacgacggaagtggaaattgttacgccttatgaggtattcaatctccctttttcaaattttgacactcgttgatgtcgtggctaaagtcgttgtgataccaacagaacttcaacatgtccatcttgctcatctccctagggctttcggtaggggaatgttccctgagtggccataaagatggcttcaggtttctccgtcaagagggtgaagcaagtgttgggttttatgc

SEQ ID NO: 247287 - DNA, 741 bp, Cannabis indica
ttttcaattttcttcttccaaaaatacccctgtcttttcaaacttctctcattccctctttcactgattctctctcttctacattctctctcttcgttccctcacccacgaacccaacagtctgccaaaccgcacctcactcacgaacccacaccggccctcacccacgaacccacaccggccctcacccacgaacccacaccgcacctcacccacgaacccacacaccagtcgaaccaacgaacccacgccggacctcacccacgaacccacacacacgaacccacggcgacgaacccaatcgacccgaacgaacccacgacgagcacgaactccagtcgacgacgaacccacgacgaccacccacaccagtcgaatcccaccaaccccaatcgcagcaatcaaggttagttattgtataatttatctttgaatttctcctttaaatgcataaatatgtggttgaatctagtattgaattggaagttgttattttgtatgttatttgggatgatttgtgcaataaaactgtgggatgaagatgggtttcgatcaaaacttgttttctgggtttttaggtatttgtgcgattttatgcgatgccatgtgcgattttgtgcgacataacacgagtctgtgatttagattattgtgcgatattgtgcgatttatatgcgatttttgtgcgattttgtcccaaatcaatacttttttagtatgcttagcgacgtttaggcgacc

SEQ ID NO: 247288 - DNA, 868 bp, Cannabis indica
ttctcccaacttatttgaagaattaaattcatttgtcgcggtcttcagttcagcataacggaaagtcaatggtttaacatccatccctaaaaactctgcaaatcatcaactaacaatcattaagctttcaaaattacaattcattttcaacaaccaactagtaatttgcaacaaatgtatagaaaagtgtgtaccgtcgtcatcatcattcatttgtgacttttttcttctctgaataagatagaaggccactaagattgacataaagcttaaaatgacaaccccaacagtgatccccgcaatcaatctagttctgctcttcttattgcttaaacttggagaaatgttactaaccgtaggtgtgaaatctgtatcaaaaacatatattcaactacattatcctaattgattgctgaaatgattccagcagtcaaactagttcgactatgttattaccttgagtagcactgattgctgaaatggaaggtccataatcaccatatgttggtatgcaacaagttccttttccagcccaaaacagatggatttcaaggtagttctgggagacaacagccttaaattccttctggaccgccctaaaagagattacacctgcctcttttctgatatcaaaattttgcattacacggttcccctgtcattaatatgcactacaaatagtcataaaccaagttgataaaacatcaatgtaagttaaaaagaaaattaagagagaaatcttaagaaaattaagctctctttacttggataaaaatatcaaatatacgcctgccaagacttgtccaggtgcgagaattttcgaaagtagtttctgcaaagtggagtttgacagtgtagttaccattct

SEQ ID NO: 247289 - DNA, 793 bp, Cannabis indica
agatctcggggcttatcaattggtatcagagccgccgattccggtgaacgccgtcgacaagaatggaggagaaattagagcaacactggaaatcggagtcctatgattatcattctgaatctaatacactagaagaccttgcttcacttttggatcaagtaattctcgggcaagtaaggttactccgcctatcccgcaatctccgaagtcatgtcacaacaagatcggaggacaacgatctcaatgagtggatccaccaagctgagcaatctgttcgggttcgcaaccaagacggattccgaaattgccacgcgccgaatctgacttctggatctccttcagcaatagaaacggtgggggaatgtgatggtaagatggaaatagcaatattagaacacaaaagagcctttgctagactcgacagcttcagaaaacacaaagggcaggtagctatacaatcagagctcgtaaatgaagattatctaccttctgtatcattgcccgtgccattcgaagctgcgaagaacattcgagaagaggagagaagatgcgtggatgctggaggagttttctgagcagaggaagtgtgggaacggcgccggatctggaagttgttccatggaagtcgatcgcacctcggcaacgaatgacatccgagaagaactacaagacagaggtacaagtgggtgcgtcgacggagatcgcgtccctggtgccatcgccggagaagaaggctttgtcggagttggtgcgggacgaggaagggaagtcgaagacgccgttagtgcgagcg

SEQ ID NO: 247290 - DNA, 635 bp, Cannabis indica
cttgggagaaggtgtgtcttcctaaaaaccttggtggagttggttttcgagaggggaagaagtggaataaagccttgttggctaaaaatttgtgggctcttgctagtaaacaagattgtctttgggtcaaatggattaactcgatttacctgaggaaccaagacatatggagttacacaatgaaggttgatgattgttggtacttcaagaagattttgaacctacgagacaacttggatgaagcaagacttagtcaagctgtcaaaggtggtaagttcagcgccaaaaggtactataacttgtctattgaagtggctaaggcagactatgcaaaagctagctgggataaactcatagtgccgaaacatagatttattttttggcaaattctgaactcccaattgctgacccgagattacattggccgaattctttctattcaaaatgtccattgtcctgtttgtgaagcagaagttgagacgcatgaacacctttttttcaattgtatcttcactaaacaggtcataggtgctgtcatggagtgggtgggctgcttctcttggcctagaactcacggggagctgctgaactggtgcaaaaaactgaaccagcagcctcaaatgagggtgctgaat

SEQ ID NO: 247291 - DNA, 547 bp, Cannabis indica
gaacaatcagcaacagataattggtttgagccgatgtgagagatggttatttgatggccatcccccacaacaagcttatccttaccaccataatcagatttttggttcaaattgtttccatcagatgtcacatggctgctagctccgctgtcgacataccacatgtcactatcaacaacctccggagaagcagtaaaagcagatggagggttctttggctgtgactgattgtggttaggatctgaacccatgaatgattcattatatctgttataacacacagcagctgagtgtccgaacttcccacacacttgacaagtgggtttggagttgttgtttgaacgtcctctgcctcttcctcgatagcctgttccacgactgtttccagatgaatttgagcgcccagcattggtattgtgagaggtattggaacctcgaccacggcctgagttatcagatctgttggccaagttcgcagtgggaacaacagaagatttcgaattctcattcagtgagtgaagaagctccactttactgtcaaaactca

SEQ ID NO: 247292 - DNA, 654 bp, Cannabis indica
tcttctactgcacttcaacatcagcactgccatcccaataatctttgatcaattggtaacaaaatggatcccgtagccatgcatttataaagcaaaaacgagtgacccgttgcagaacagcaatattaaaagttcaagcaaaatgggcgaatgattggatgtcgatatctcaagattgtaaagtttagccaaactaaacatttgcaaccaagcaagatccgctaagcctctgtccatacgaacttcaatccaactcaaagtgcccctacccttttcccaagtaaaaggataaccacaaagctctatgtcttgtaacccactatcattcaaagcttgttgaaacctatttattaagaactcaggataccgattccctccccttttatcctcatgagcacacacattattcatatcgcccattacgcaccaaggtaagcttgagttagccaccaaggagcgcaaaagattccaagtcataagaagccctctatttggttccccatacggctccgtaaacctccagtccgccataccctcaattgaaacttttacatcaatataattaagagagaatcctaggaccgagacctcctcttcaaccttccaaagtaacgcaatacctccacatcttccttgcacatcaaccaccatcat

SEQ ID NO: 247293 - DNA, 725 bp, Cannabis indica
ctgcttaatgatccatctttgttcagtttcactctgaacaaccatttgcaaccaatgggaaccctgtcaacaggtctaggaacaacaacccaagtgttattccttctaagagcaacatactcagaattcatggcattattccaatgaggttcaagcaaggcagctttgactgttttgggttcacaaacagccaacaatgccttaggttttctgatgccagacttaagccgagtttgcattgggtgggttgaagtaacaggtgctgttgtggtattgagagaagtagttggtacagatggagcacctgaagtgctggtagttggttcatttggtgtactgctaagagtacatggtgttggtatagagacactattgtttggtggttgggagacagaatttagagtgcgagaagtgtcagatgacactggctgagtagcagatgcagtagcacctgagtttatgggagagatattgttgtaagttggaggaatgatgggacagggtgtttgaataggtgtagtaggagatttttctgtgtgaacagggtgtgtaaactgtgaggagaggttgaagctggcagcagagttagcataaggaaaactcttttcatcaaacaccacatcacgagagatatagagcctcttgtctttggatagacatttatatcctttatgagagagactgtaaccaaggaaaacacaaggagtagacctatactcaagttt

SEQ ID NO: 247294 - DNA, 969 bp, Cannabis indica
cacctcgcggagatgccttaacgttatgttagcttccgggagcaccttgagctccatgtgccttctccgggacttatgtccgggacgttaccttatggcataaaaagacttagcaaatattgtaaaattgcttcatccacatgtccctgtctggttggtccacgtattttgggcaaaattaggggcaacagacatgttttatgacttgttgataggtgtacgggcgcttagccacaagtcagttatatgtttatgttttatgcttttcttactgagtttatcgactcatagatgcgatgttatgtgcaggtaaaggcaaagctgttgttgaactacagtgagtttggagctggatgaagattgtacatatcgagacagtttgacctagagtgttagatctttgggacagttagggctcacaatttagaagtcgttgtgtgacatcttttgattatgtacagttgaaaaatgtagatacgggagctcgtattttataaatgtaataaattatatgtttatttattaaagtttaaaatttatcaattttgataaatcctttgattagcaaaggttgcacagttattatgaaaagcactgtagcacgcctaaactagtagggtgttacaaaatacatgggccttcctctctttagaatgaagcagagagatgctgacttcaattttattttggataatctttctgccaaactctagggttggaaggtgaaaactctttctaaggttggttgtgcgactttaatcaagtctatggaactttccttgcctatgtactccatgaaaactaccatgttgtctagtcattttttgactagaattgatggcatggttagagatttctggtggggctttgaaaagggtaaccaggatttagatttactagcaagtatgttgaattaaaatcctaaatatgaattctctaaaacaataaaattaaacacataagggttta

SEQ ID NO: 247295 - DNA, 647 bp, Cannabis indica
ccattttttcccaacccgcacatacattggacccatcggacccgtcggaccccatcggaccccccatcggccccatcggacccgtcggaccccatattcggacccctccatcggccccatcggacccatacagtcggacaccatcggacccataaagtcggaccatcgaactatcttcttccccagatccgaaacgccaatctcttctccattcacggatccgaatcctattttcacaaaaaaaatcttaaaccaatacattaatgtttcacaaacaatcccaaacaaaataaattttttaaccctttactaaaaaaacaaaaaaaaacacaacataccttggacattttcgcttcgggtcaccaccgtggtcgcgggctgagcgttgatggtcgagggttgagcgtcgacggtcgtgggttgagcgttgacggtcgtgggttgagcgtgggttgagaccggtcgacgtcttctgcgggtcggggatttcgtaggttgccgtgagttgagagagaggaagagagaggctgagattaggatttcaaatgtgaggggtagttttgggaaattagtaaagtggtcatatatgaccaattttaataactatgcatttaaaggaaaaattataaggtgttttaagtatggaa

SEQ ID NO: 247296 - DNA, 1071 bp, Cannabis indica
aattaaccttccataaccaaagtacataaaatacaaactgaccagccaaaagtaaagatatttaacgtctaagatagtaaacataaaactaccagtcaacaactgaccaattgactgccagacacttttaaaattaaagcatcaaaatatatatatatagcattttaatcatttatgacaatgattatacacagcttaatactgaaaatcatccagaagttcagaattttataataatagtgtcatcttaataacaaaacaagtgcctgacctcaacacctccaggaaagcaaaatgaaagaagatccttgtatttcagtggtagctgcttttctggagggtaaacaaacaagacctggaaagggaaagagatcaattgtatcgaatacccaaagcacatccaaataacaatagcagacaatcaaattgaatattttggccacaaaagcccaacctgaggttcaatattgggttctacgcgtgattgattctgataactaagtgtatttcgtaacttgccagaaccttcagcctttcttccaacatattgcctctcaagtgcttgaatgtcacaattagggtgaaggccaacaactaccatgctctcgaaaagccgtgttggctccttataagacttgtggtcctgcacacttaaataagacaagggttacataaacactattggctaaaattatgcagctatagcttccactggtagatgaatggcaatatcaaaacaatgttcaagtagtcatcatcccacacatgtctttgagctaggttttttttccttgaattgtttcacatccaaaaaaaagtagagcatgatactaactcatttaaaacagaataccgtaccaagtactgcaactgaaagcttgcccattgacgcttcaagctagtcaaatcttctggattataggttacacgctttacttcacgaggctgtgagaagcctttcaggatactagtaacttggcgttgaattttttgaaattggccaccaccattttcatccttcgatgaaaaaatcacagatggccgtggagaacgtggggcagtggctgctgc

SEQ ID NO: 247297 - DNA, 741 bp, Cannabis indica
caagacatgacaagttgattacagctaatccaagaatcaaaaaaagaatcatgggagggggttgagggagagtaccttcaaggaaaggggtcttgtttttggctccaatggagagttttcagtcccttttccatggctggaaattcttgtctgtaaggacagatgtgaccaaaaccataccaggatggtctgctgtactaaggtaatagggtaatcgaacgtcttcgtatgctggtctttcgactggaggaggacgatgaacaacggaggaaggaagaggattcgttcgagatgggttgtcagcggaagttgttgatggtcgaggagctgtgggagcttcaactctggaaggatcatcataattagttgcagaacttgtggctcgagtacgcaccatgattatggttgagaaagcttgaatcttgaagctgcagtatgagttcttgaagcttcagtgtatttcctctgataccatattaggagtaaaacaaaggaaatgaattgtgttattgatatattaaactgaatgaagaaatgttacaggtatttatagtgtaccaagccaagctacattaataatagaaaaaacaggaaaataactatcaactaactatttactaactaatctaagagacttaattacaactttgaaactatatgtaaattacttaatagtttaaatgcaatgctatagactactaattaattttgttgggttttgtgccctaaataaaacccttt

SEQ ID NO: 247298 - DNA, 671 bp, Cannabis indica
atttgtatgttattttgatgttaatttcttattacttttatatggtttttcttgttcttttcgtattatttttataaaacactaaaaatataatatattgaattcatatataaaataaagaatgaattaactgctctgctagggctctgcgattccgatctcaaatcggtggctatggcaggtcgtgggcgtccgaggaaggtagcgcaggggtcgagcaaacctagaaatgctgtcaaaaattcaaagaagggaggaaagaaggcgattgatgaaacggttcatgctggtttgatggagaggattgctgaaattgaagctttagagcttacggatgaggaacctgcgattgacgatgtccctgttcttcaggatggttttcaacctctctctccgaagtcgtctctggatgcgattaggagacaagaggatgttcgaagtgacttctcccactttatgcaagctaacagccgatgcaatagtgcaattgcagcaggtaagaattctatccctcctgttttgcgatctgcatctgttgttagaaatttggagaattcttttgattgtactaagcagaatgagaacaaagtaaggatcactatggatgacatagaagatgaaattcaattttggaagccctctatagtctgttatgtgttaggagtgaatcc

SEQ ID NO: 247299 - DNA, 516 bp, Cannabis indica
aacaatattcagattattaaaacttaagtaaatctcactaaaggacaataattaaatggccaaaaagacaattttacccctacctaaatccaaaaagcttctaagtcacttaggggtattttagtttattttaaaatctcaactaatctcgacattcccaatgtctaattatactgccctgctactactaaataccaaaatgtgattctattggccaaacgtcgcttttcaatattgtcgggcacaaaacatgcaataacataaaatttcatgtatgacataaataatacatcctgaattcaaataaatctccataaatattaagtcataattcttattctagcttcaaaattaaaacctaagtatttgttattttccaagttaaaagtaagcggtctttacaattatccccccgttaaaaggattttgtcctcaaaatctaacctaaacaactcttgatactgagacctcatgtcggactctaactcccaggtggcttctgttggaaattatttt

SEQ ID NO: 247300 - DNA, 725 bp, Cannabis indica
caaacaaagaatgatgaaagatccgattgggttgtagacagtttgtttgtcaaaggcaaaaatgaatcaagagattcgaagggtggatataacaagtcgaattataagagcaatcagaacaaagggcacaatcaaggttacaaatcaaacacaacatccaaactaggaaaatagtgttaccactgcaagaaggaaggacactatagagatgaatgtagggcactcaaggtaaaattgaacaaagaaaagggaaaagaaagaggtgatgcaggaattacctttgatggttatgagtctgctaaggctttggttgtgacaagtcaagaaacatgatatgattggattcttgactctgggtgttcattccatatgacaccaaaaaagcaactgtttagtgaattcaagaaaattgagggtggatcagttctgttgggggacaacaaagcataatggtcaagtcagactcattcaagaagttaggtatgtgcctgaactcaagagaaatctactttcaattagtgaacttacatctagaatgaaagtaatgaggggcactaggatagtaatgaagggagatatcaaaaatggtatttaccatctgcaaggtgaaactattgttagaaaaacaaatttggttgttaagaacagtgatcaggacaatacaagattgtggcacatgaggctagtcatgtcagtgagagaggtctctatgaattggagaaaca

SEQ ID NO: 247301 - DNA, 495 bp, Cannabis indica
caagtgagactgagattgagaatgagtgtctttccgataaaaataaataaaaaaaaaggtagaaatgaggaaagatgagttattaccttcttcatgcccttgtgtgagttttcccggccaagaggtggtatcaatcgagtaaagaacgagagagaggcagagactagcaaaggggaggcggtatcatgttagggttagggcaactgttagagagagagtatggtgtcgttctaatttgtatgtgtgtgttgtgttgggtgtattatgtttattagggttaggataaaggtaatagtattagtagcagcccaatatttaaggctcatactatttttttttatgttacaaggctcgcccgggttgggtttattgggttgtaattttcccaggccgattctgacccataactcacaggttgtagtctttttaaaccaaataaacttcggcccataattatatgggttgatcgtcccattttcagtttgggttggccgg

SEQ ID NO: 247302 - DNA, 1460 bp, Cannabis indica
aacatgatttagtacataaataatcattaaaatagtaaaattaaatgaaattagacaaaagtccttaaatctaacaatctcaatagttcatggagaatttttaatgaccagaaaagtttatggggcatgatttggtatatgtcaaagttcaggaggtaaaaattttaattaccctaaatatttccaattctaattcttcttcacccattaaattaaatatgtctgcatatattcttacatatgaatttaatgggtgagacaacagtataacattagtaaataggcaagcataatgtaaagctcatttttgtatgattatttagcgaacctgctatatttcacataattgcaaattggtgagccaaaaataacgcttatttttgcataaacaaaggccacagttatgtttatctaattgtaaatgggcgagcttgatataatgcttatttttgcgttattatttagcgaacccactatgctatttctatttataaattggcgagcccttcatgtgctcattttatgcataattatttgacaagtccactgttatgcttatgtaatcccaaagagacaagttcaaacgctcatttttgtatatggcaagctcgcgatagtgctcaattattttttcccattagcacatcacatttatggccaatgcctcacttaggggccactctgcccaatcgggcaacacaaccctgaaaggtttgctggggtgacatctcaaatatataaaagaatcaaactctactgaaaaattttggtccgtgaattagttaccaaaggtagaagactttttgtctcactttaggggtcaatgtcccacttggtcaatacctcctcttatatatcaaatatataaaaataaagaggcacgggatattagaaagaacgagaatcaataaatcaatgattggacgctatatatgccagtagtccaacacttgtagattaccaggtgtactttttcttttattttaatcaagtccaacactttggtcaaataaccattttacatttgatacattattattcgttcacttctgagagaaatacaaatacatttaaatgcatgataaagctacatttttacacgtgctcattttatttacaaaatggagtgaaacatgatacttatttcttgcataattatttatgagcgtattgcaatacctatttttacattattgtaaatatttaattgaattaccataaaaaatattgaaattcccttcatatttattttttaaaaaaaattaaacaaatgaaactacaatgatcgtcggagttgtcactcatgccggaaaagtcaccagaggttgctgtcggtaccggaaaggtcgtcggagtagctaccagtgacagaaaagtcaccagagttgccaccgacgccaaaaaaaatctttgaaaatagcattgtcgccaaaaaaatagcaggaaaaatcaccaagaaa

SEQ ID NO: 247303 - DNA, 587 bp, Cannabis indica
gaaaaagcgtttctgtgcaccagcaacacggagagaaaggaagaaggagccagagataccctcctgttgatctaagacatcagatcaacggaaaacatggtgacctacgggatcacctggaccaaaagaaacatacaccgacggtctccacgggaaagctgaacgagggaattatgagcttgccatactacgcaaagacattgctcgagtctcccggagacaaaaaggtgatgactcagattctatctgtgaggatcgggagccatgcgccaggcacatcttggaggcagagctccccaaaaattttaagatgcccgcaatggaagcttataccaggaactcagacccaagcgatcacctgtctcggttcaaccgagtaatgacggtcatgagtgtcagcaatgacgccaaatgtttatgcttcccgctgacattaagtgggtccgcggaggaatggttcaagaagttagaaccaggatcagtggactgctggaacaagctgcaagttagtcttcggagatagtttgttaccgcgagaaaggttaatcttgaggtcagtgccctgactaacatcaagcaactgccca

SEQ ID NO: 247304 - DNA, 500 bp, Cannabis indica
ttagatgtttagtttattatttttagtatgaatatgaactcttttagtataaattcttttaagtataaaaacaatgtttagtattaaatatgaaaacaatgtatgaatttttagtattaaatagaaaaatatttagtttttaaagaagttatttaatagaaaaaaatgtgattaaaaaaattaatatttaatttaatttaaataaatttattttttctgaaaaatgaccttaggaacgattgtttcgtttctgataacaaaacagttgttccttataatttgtaaaaattaaattactggtttaattttttggaacgactttcactttttaggaacaacttattttcgtttcaaatgtattcgcatcaggcatgtcgctatattttgttcctgatattgattttcaggcacgagttatcaggaataaaacatcaggaatgactaatcgcgccaaataatcttttggaacgaattagaaggttttctggaacgaaaaaagt

SEQ ID NO: 247305 - DNA, 1293 bp, Cannabis indica
agatcctggtaaaataaattcgaaaagatccttggtcacgggtcttgggtccaggtctgggtctgggtccgggtctgggtcctcaagtcaagtaagggtcctaggtctcggtttgggttctggcctcgatcgaactgctggtcccggttcgtgtttgggtctgggtccatgtctcgagtctcagcctggtcttggtctagggctctgtctgattcccattcagtctcgagtcctaggtctgggtctgggtcttagtccctgtctgggtttgggtcccgatcccattcccggttttggtcccgatccctattctagtttgggtgtgagtccgggtctgagtttgagtttgtacaggttttagttctagtccggttgtcgagtgatagattttgggttctgggtcctaggttcgagttcatgtttgggttttgagttcaggtctgggtctggatctcgatctcggtctgggtccaggtctgggttcggttttggctctcattccagggttccagtttaagttccgattccaatttctggtctcgagcctgggtctaggtatggaacatggtctagaactgagtccgggtttgggtcttcgcatgatgcccaaatccagacatcgactacaggttgggtccaagccctgggtcccgagttatgggtccagattcggatcccaaccttgggtcccgatcatgttccagttcaggtcccaggttgtggtccatgttcgtgtccttatctaggtttgggtctgggaatgagaccggggtcgagtgtagggtcctagtaccggcttcaggacttgattttgattatgagtttggatatgggtccccaattcaagtccgggtcctaggtcttggtccgggtgtaagtccgtgtctgggtttgagttcatgtccttaatcatgatttgagttttgatccgcgtccaaatcctgattcaggtctaggtcttggtcctggtccgattttgattttgggttggggtcacggaccgggtcctagtgctggtcccgttctcgagtcccagtcagctgtcgattctacttttggtttaaggacataaggtaccagtctgggtctgggtccgagttcgagtactagttttgatcccaaatttagacatcgactacgagtatagtccaagccttgggtctagatctagatcccggtctcggttcccattcttgttccacttcgggtctgagttcaagtccaagtctatgcccaggtgccaatctcagtttaggtctggcacttggtccgagtctgatttcagtttaagtt

SEQ ID NO: 247306 - DNA, 837 bp, Cannabis indica
gggggtcttaggaagccaaagtgagatggattcaaagcttaaagtggggcacttatgttggagttggcgttatctaagttaacacatttattcttgaattatagtttagtgttaagtattattttgaacaatactttttatgttcctacttttaagaggaatttagttttgcttccgcttttagttaaacaatgatattttttttcttttgctaatcataatattgacattatgtttgactctggattattgaaaacttttattcaaatggtctttacaaatttcattgactttcttagctttctcttttatattaaagaaacattgatccttattgttatggcacaatatattgggtcatatttctaaagaaagagttgaacgattactttgagctaaaattcttcctcctcttgatgattctggttgggatacttgtgttgatagtactcgtagaaaattgactaaaaaagaaagaagactgccaaccgtagacaatctttaatagaaataatccacattaatatcagtggaccttattccaccacactatgtaggaacaagtattttataactttcatcaatgatttttctcatcatggcttcacttacttgatcaaagaaaaattcgatgcccttgataaactcaaaatctttcaaaatgaggttgacaaacaattaggaagagtcgtcaaaggttgttctttcagatcatgaaggaaaatattatggtcgttatacaaaatctggacaacatgtgaggccttttcctgagtatttacaagaaaatggtgaagttcctcaatacactatacttggttcacccgagcagaatga

SEQ ID NO: 247307 - DNA, 850 bp, Cannabis indica
catatttctaaagaaagatttgatcgattacttcgagctaaaattcttcctcctcttgatgattctggttgggatacttgtgttgattgtactcgtagaaaattgactaaaaaagaatgaagactgtcaaccgtagacaatctttaatagacataatcctcattaatatcagtggaccttattccaccacactatctaggaacaagtattttataactttcatcgatgatttttctcattatggcttcacttacttgatcaaagaaaaattcgatgcccttgataaactcaaaatctttcaaaatgaggttgacaaacaattaggaagagtcgtcaaaggttgttctttcagatcatgaaggaaaatattatggtcgttatacaaaatctggacaacatgtgaggccttttgctgagtatttacaagaaaatggtgtagttcctcaatacactatacttggttcacccgagcagaatgacgttgctaaaagaaaaaattgcactctaatggacatgattagcagcatggtaagcagataaaatctactagagctcttatggggagcagcactcatgacaactacttatatcttaaatcgtgttccaagtaaatctattccaaacaaaaaactccttttgagttatggactggaagaaagcctagttcgaatcatcttcgtgtatggggcctgcagttaaagtaagaatatatgatcctgatttaaaaaacttaaatccgagaacagttctttgttatatcattggttatccaatgcactcaaaaggctgtcacttttaatgccctactcgtagtacatctcttgaacatattcattcaacatctcttgaa

SEQ ID NO: 247308 - DNA, 821 bp, Cannabis indica
atcatcgttccgtgtcttcgaaatcaaggtaaattatttaggtattaaatataatataaactaaaattcatagttgtgttttattttcgtttttagagaaataggctttcataaaactaccatatctccctctctatacgtctgtttttagtgatttaggtaccattttaaagataatttaatgatctatatttttcatgaagaatctctttcctgattctgattatttcgatgtcaaaaaattcatgttttcatgctggctatcgaattacagtttttcaaatttctttcctatattgcctaagtacaatatctctctcgatatgtattcttttccagcgattctagtacccttagaaagataattcaacaatacatattttctttgaagaaacctttccctaattcggagttgttacttatcaaaagtcagtatcttcactcggttaagatatctcgttttaagttttatttcagaaaaaatgtctttagtaaaaatttaatatctctctcaattttgatccattttaaaagatctttatctctttttaaagcttaaaaaaatagctacattttttatgaaggaagtgttcgctggatcagggtgtaactatttttaaaacttttatttttgggctgtattcagaaatcggtatgatccaggattttaaaggaactgttttaataaaatatgcataactcctaggttataattccgattttgatgatctctataccgttataaaggtatttcgattatctaaaaactttatgagcagtaggatttctaattcaatttttttatgagtcaaattctaggc

SEQ ID NO: 247309 - DNA, 592 bp, Cannabis indica
tagggcataaaacctaacagctctatcataggttattgcattcttgggagattcattaatatcttagaaatccaagaaacaaaacacaattttctggtcttccactgaaaccgaatactgtgccaatggccaacactactcgcgaagtactaggttactttccttattgaaagactttgggatcactcattcacatcagccgttatgtattgtgacaataaagtttccattcatatttttgaaaattcggtttttcatgaacgaaccaaacatgtcgacattgattgtcgtatcgtccgtgaacgggtacaaagtggtcagcttaagctcctccatgttaacaccaaacacaaccttgccgatctccttaccaagtctcttttctcatctcatttcaaggacttatttttcaagatgatgttaaacattcacatatattatgaactatccaaatatacattaaacatcattgttcataatcattaaaaccaaaatcaatactttatttagagcatcacaaatgtaaaacacatacctcccatattgctattctccattgttgctaagacaccaaaaccttcaatatgaaaaa

SEQ ID NO: 247310 - DNA, 772 bp, Cannabis indica
tttgctatctgcaagtacttcacttgaagctttgaagcattgtacattggtatggtaaatgtcatgctaacaggaccagattcttttgttatattaccatgcgattcttgtgaaaatgttagccttgttcgcagtgtatgttccgatccacctacaatcttctttaaattccattcaagcttcttattggcttccttgaaatctgtagtttgtccaacagcttcagtttccaactcaaaacttgctctcatagtatacttaggtaaaggcatttgtatagaaatagtgttggccgtaatgctagagggaaactctgcttgtactttgagaatcaaatcagccttaagggctcccgtttcttcaatcaaagcattaatacgaaaaggaggcttgaattcctgggtcatacgataattcatgacaggaaactcaccatccggaggaaccagggacaaagttttttctgcctcaaaactatcaagacgtacggattcatgaaaattacagtcatcaagaatcactactcctgagccaaagcttttatagtcaaagactgatctcccacctcttcctatgctcaggtcatcattaagtgctaaccgaatttctgggtttccactaagataacttttcatttgaattgtgccatcaatttcagaggtcagtatgtatccactagaactaaaagtgatgctgatcttttcaattatatcaacaaaaatttcttccctatttctaccactaggataatttgcaacaacagattttgtga

SEQ ID NO: 247311 - DNA, 533 bp, Cannabis indica
ccaatgtggagaggataaagagcaacaaaacagtgatagttggtagatccattatttcaataatcatactttccaaactttttttttcttaaaatcaaacattaagagtacaaaaacatgaataggttgctggttttcaatttttcatttcccttattttaaattggacaaatattaaccattagatatcaaaaaaaagactagtctattcaatccaacgactatagtgctattgcagtttcacatccctcaaaatgaagtgagcgacttcataattggccatataaataaatataaaaatatatttgtcattatttactactatttcatttccaattgttatttcataaaatcaagagcatgatcaccattttttgttcttcttattcttactattcaataatggctatattttccctctaaaccgccattacactattcaccaatggctattttttctccaacctctattttactattcatcaacggctatattttttttctataaatactcactcaaaattttataaaat

SEQ ID NO: 247312 - DNA, 1090 bp, Cannabis indica
ttcctcttttcgtacaaacacctgacttctttcattgaactcactgatttttttacagggcgaccctgtaagtcatcccacaactcgccttcagctgttgagaggttagtcgtaatccccgcttgaagagcagtaagctgtatattgttgttcaagtttctaactctagcagcggctgtactaaatcgactcaaatatgcccttgtgactcgcctggctgttgcttcacgttagtgagggaagacgcttcaggtcgcctattccttgctgcttgaaattgtttcttgaaatctttagatagttgtccctaagaggtaattgagttatgggtaaatttattgaactagttgcttgctgccccagtcagcgaggtggggaataaaatacaacgtaagttattcgtgacattactggctcgcattattgtattaaagttgttgaggtgagcgaccgagtccgtagtcctatcatacaacgagacgtgagggtttttaaatccttggggaagttcagcactcataatgattggatggaaaggtttgagctcctcatctgagtcgtaatcaggcggtttcccatctgatagttcttgaatttgttttctaactcactgattcacaattgaattggatcctcttgcttttgattgatttgttggcgcaaattaggtttcctccgattcaattgctcacgaagatctagccgtcttcgatcatggtttcttgttgaccttgtacctaagtaactctcagattgatggctcctagttgtgctcatactttctcgatcattactacgtcaaggtctatcccctcctcgtgtagatcgactgtaatctcgagattatgaacgtctcgagcttgaacttgcctcgtcatgtacatgccttctcttttgggaaaggtttgatacatgccccctgctggggtttgtatatgcctcctccttatcaattcgagaaggacgttgacggtgtctcggtggtaacccacttgtcctaagttgagccctaggatctctcttattaccacgagggatctcctgttcccttgtcacgggttgccttctgttctcgtttctacgagaagac

SEQ ID NO: 247313 - DNA, 819 bp, Cannabis indica
atccttagttctaaggagataaatccatgtgtacctagtgtatgcatcaacaaaacttatgtagtatctatagccattaaaggaatctataggagcaggcccccataaatcagtgtacaacacttggaggggagcagtatacactgttgtggaatttggatagggaagtttatgatgcttaccaagacaacaagcattacaaagatcaaaaagagttttattgctatgagagatattacaattgtctagtacagtcataacagtggtcttagatggatgaccaagtctgttatgccacaaagaaaagttggaactaggtacattagaactagaatgaaaacaatgaagattgttgttataaggatgaggattgagagactgagatgaggatgcagctgagttctgacttgactgagaggaaagattgggttgttcgaacttgtataggccattttcaacattcccaaccaacaaaatcttcatatcgacttgatcttttacaaaacagtggttagggtgaaattcaaagaaaacatggttatctttggcaaatttattaacactgagaaggtttttagtaatagcaggtacatgaagaagattatttaaataaagaggatgagaactaaaaggagaattaagagtagtggaaccagtgtgttgtatttgcaaacctgagccatttcccatataaatctgatcactgccttggaattcttgcaggttttgaagattggaagcatcgggagtgatatggtgagtagctcctgagtccgggtaccaacttgaatcattcacagtctctgcagtagctaccat

SEQ ID NO: 247314 - DNA, 556 bp, Cannabis indica
caacatcttgatccaatttatcaataaatgaaatttagttggaaagtcttgagcaaggctcgcctcaatcaagattcttgggaataaaagtctgtctctatacttggtgttgtcgtgcacatgaattgggttcccaatttctccaagaattttgaactatgaaggctctccccagtacttgatatctaatcccctcacctggatccacgttagaacataatcaattttccctgtagtgaaatcctcaaatgtattccacagtttcataataaagggtttcttatcaaagaaaatgaaaccgttggatatattttactaggatctagatttactaccatgtatgtttcattaacagcctaatatgaattctaaaacaataaaataaacacataagagtttaagaaaaccttacattggttgcagcagaatataatgactccttccgttctgatctctagcccttgattcctttctgtagcagagcatcaccaagatctgaaccgggatctctttctctccttcctttgatgctgaatctccttcttgttggttgatt

SEQ ID NO: 247315 - DNA, 811 bp, Cannabis indica
tgcacatccaattcaatatgtttagttcttgcgtgatacactggattcgaagccaaggcacttgcccccatgttgtcacaccagatgataggggtttgtttgagagggaattgcacttcttggagtaaggattggatccatgcaatttcggctgctacttgagcaagggctctgtattcggattcagtgctggacctggaaatgacagcttgtttctttgatgaccacgagataagagaatctccaaaatatacacaatacccagccactgatcttctatcatcggggcaacacgcccaatctgcatcagtgaatccagtgagagtaagtctgtcacagtgtttaatgtgcaaaccatgatcttgagtgccttttaagtatcttaagattctttttgcagcagaccagtgaacatcagttggagctttgagaaactgactcagtttgttgacggagaagctaatgtcaggcctagtgtgtgtaagatactgaagtgccccaattaaacttctgtactatgtcgggtttttcagcagttcaccatcttgaattgacagagtctttcctactgtcatgggagtaggacacggcttgaggtgtgtcatgttggttttctcaagcaattctgttatgtatttcccttgagataaatacatgcccgtgtcatctcgaagcacttcaatccctaagaagtagtgcaacagcccaagatcttttaaagcaaagactttgttcaattttacagtaaattgcttgagcttctgagcattatttcctgtcacaattatatcatctacatagatgagaacaa

SEQ ID NO: 247316 - DNA, 863 bp, Cannabis indica
gagcaagtttttccaactcgttacttatgagggaatgatcaacatagcatctgtcctcagaccgaaatgctgggccaatcccttgctcacaatagccaagtacgatggcctctgggcgaatcagtctttaaccgattaggcagcgtgcccgatcacaagaatgatctgaatcgtagaagaagattagacagacaagaaattcctcctaccgttcagccaaataatacagattactatgtacctcactgaccaagttctaagagatcctcatgtgatacaggtcgacgaacagacaggtcaagttgatctattggtgcaaacacagatagatcaacttaagagcctcgttcaagacccgaccgacccaaaactcacagatctagaacttgaccggactagaggatcgtaaatttttttctagacattacactaaattatagtctttttgctcttactataactaagaacttttgatcatattcaaaaatttgttgacgttagggtcctaatacaaccttttacataacgcagcaaatgtaaagtttgatgtgataattagtcaaaatacataattcaaaattatataaacttgggctttctcttctccctctccctctccctcttacaaatcatggactaaggttgagttggaaacaaattaaaaatggttaattaagtcccacaagactgcccatgcaaaactttttctccgtaaaaataactaatgtacgtatttcatactaaaaaacctactagaagagaaagtctttctcttccactttttttatctttctctattgcttacatccacaaagatagaaaataatatccattctatttccttccacatcttgagcattatt

SEQ ID NO: 247317 - DNA, 737 bp, Cannabis indica
ccagcgctcaggttgacattccagcgcccaggttaagatatgacgtcaacctagacgctaattttaaaaatatccaagagatgtactttaagatgccaaagtgatattttgacatcacttagtctatttctgtgttatggcaaagctggtaactagttctcagagatgttgctgttctgtagaaatgagagactcaaaacactttacttccaagtgatttttcaatgttagaaatgagaaatataaagttgtgaatttgacttctctaacttcataagtcttagttattgtgaaaaactagatagatggccgaaacagaatcaaaactggataagtagaacccaccgcaccaggccattttgtcaacctgggcaatgggtacttattgctaaactcacaggatgtcgttttgatacttccaaggttcttgaacttaaggatgaggtaacttatcccatttttgaccaatcatgattcattggtcgaatcagatttggcatttgagtgatcaaaaccagtgcaccatgttgattgtcaacctgggtgctgggccctgtttctaagagcttggtgtgtggttttctctaagagtttgcttgaatcttcattattttttatgaagaaaaaaatgcccgaaacactttttctagaacttgattaaaaatagcccaggttgacaatatgtcaacctgggcgctgggtcccagttatagcccttcggaagttccgtttggtcc

SEQ ID NO: 247318 - DNA, 993 bp, Cannabis indica
aaatgtaagtagttatatattactagtgagaaaaatacaaagaaaattatagaattgaaactatacatttatacagatgcaggaaatatatatagatatatatcaacttataaattgaaactattatcactaaaaattcaaacagtggacaaagaaacaaatgtacctttgagttgggagacataactattttttaaaagtagcagatgcatgtcaagtgggaaaaacttcggtacagaatgcagtagccaaagggagcaagtaaagaaactatacattcaaattgacacagcaaatgcacaataaataaattgaaatcctaaacctctattcatgacaaatgaaatgtttgattagaattgttcacaacatcatatgataaataacaaagatgacaaatctcaaatgaaaaattcacaattgtaaagattcaagtattcaaatccatagtaattccaaaatgctagttatgtctatgatttcaaaataggaagcataactaaggatcatatgggaagaaactttggaaaactaaatcatataaacggaatttattacagcttatctacaaaacttaattatctattttgctaaagatgaagaattaaaatcatgaaacaataagcagtttattccatatcagcatattctaaaatagtaagaattaaaatttatattcacaaagagcctccttctagagctttgatatttaaccactttaaccacatcaaaagacaagaactgtgatgtttaacaataaaacacacagcagtggtataaaaaactactcgaagccacatattatgacttaccctatagcaaaatgaaagacattctaacccaagttaccaaccaaacacttacgccatatccggaggagtacggatctgtggatagcggcggctctgagacatattcggttggcgacaagagagagagagagagagagagagagagagagagagagagagagagtagagagagagagagaga

SEQ ID NO: 247319 - DNA, 754 bp, Cannabis indica
attatatccacgtatttcaaataaatttccgtaattaaaaaattaacgcttatatatccacttattgagtctccagggtcgccgaacctgaaatacttttattccacatatagctcatattacattcacacatgttatataaatctccgtaattaacaaattacgattatttactcacttataacaaaatttaaattttatgctgaaataaattagtaggatcataatcccacttattacctgattaactcataccgtaattatctaccattagactcatcgggatattacaataactttcaggccaccatcgtcggccacaaaccccataccaccaccttgcctcacgaaccccaaaccgccgctgcacacatgcacaacgaaaagtgaaagagaaacagagaatcgaaaaaaattaatgtagaaggtcagatttaaatggctaaccaccgagagacaaatgagagagacgattaagctcttagtggtctgtttgtgcggcggagaaaccagaaagtctcttgcaaagttccattgtccggtgagggaaaagcttggctcgaggttccgaagggtgcgtcctccactggaggagctcctctgtcgtctattggtagagctacttcatcgtcggctggtggtgacttcatcgtcggctggtagagctcctctgtcgtcctccacgttgaagcctgcttcagttccgagcttcagacggcaaagaagaaacgagaagagagaaagtctgagagag

SEQ ID NO: 247320 - DNA, 2229 bp, Cannabis indica
attttcttgacctcatctcttgtaaccgtggccataaggagatcaatttgagcccctgtcaaggcaagtccttcatcaataataccctgcttaaccttcattctgttctgcatacagtgccaagaagtcctatgtaatagtcgataaaagcatctttgacttcacttggttcatccacccttttcccatcagcattagtgatagataagacttggttgtgtcttcttctttcacgaatactggtgtgaaataatgtagaattctcatcaccatcctttacccaagttagcttcgccttctggtgcaaataagcaagatagcttttgtgtttaaagacaaaatcgtctctggctgcttgctctaaaagttgtaaatcaatatcaaacggctgctggtgtagtttatcttgacattcatccagtgtattccttgcttgagtctcttgagcttggatatcacaaaaaaattgagaatttaattccttgaaagtcttcttcaaagctttcaacttggtgataacacaatacattttggttcctgcaaagtgtccctgctgccatattttcttcactaattccgagtaggtaggatggttttcccacatcctatagtatttgaacggcttcctaccagtcaccactttgttgtgtaccattagaacagccggagaatgatcaaaaatctcctcattcatgaacacaacctcagctaaaggatatttggctaaccactcttgattagcaagcacccgatcaatcttagaaaaaattcgatcatctccaaaattcttattgctccaagtgtaatagtactagacacttgcataactatgaaacatgatacataactataccaatagcgatataaaagaaaatactagacattaataatagcttttaggaattctcataaatataacattattctttgccatttgcatggtcatgatgtatatttttgatgaagatcttcatttaatatcttcttattaagtccatcactcgtttctttcaaccccagccccactcccacacatataaatacatataaagtttttatatatgtatatatattatattgtcacccttttattactcattgtgctacaaacacgtttaaaaattaaaaacaaacaaacaaatcaaaacaaaagtgttcatagtatatactactttatttgtagttatctatacatctagtatatgtgttattgtgttataaatacaagaaaagatagtaggaggggcaacaaaagttgcccctaaaaacctttataatcgtccctaaaatgtattagggacgacaagttgccactaacatgtcgccactaatacttcgtccctaatgctcctttttagaggcgacaaaataaattgcccctaaaagtgattattaggggcaattttttattgcccctaaaagtattaaaatcgcccctattttagggaaatactttaattttggatggttttttgcaagtaaattgatagttggaagagttttgccgcaaattactcttaaaacttttattttgattttgtaaaatatggccacatatataggataattttttagtgacctgtcattgccacgtgggcaaaattaggacttaacgaggctggacagacgacaccttaaaaatgtaaacgaaacagtactttggagggttttcccaccaaaatatgaggttggatagttttttgcaagtaaattgatagtttggggagttttgccgcaaattacttatattaatatatatatacgattttgtcccgttagtgtactttaagggaatgtatttcatgatgtacagcagccgttagatagaagaagtaatttgatttgagggttggagtaaatctaagaataattagagttaaaaaatggtaacgtatcctgagacctacctgccgtgaatacatttcatattttacatttctaggcacaaaatcggctccctatatatatatttgtggtttctcatttacaaaaagaaaatgaattattgaagtgcaaaaaattaaagaaaaaaaatgagagacacacgtagcagtggtgtaccacgacagagactgtgaaaaaggattctccaatggatactgtcattattatttactattattattctccagtgaagcacgtaacaagctcaagtatttatttatatttatataatactaaatagtgttatgttaggtgtacactctatttaccacactcactatactc

SEQ ID NO: 247321 - DNA, 1110 bp, Cannabis indica
gctagcttttgtcattttccttccataatggcgcactagatcctgacaaatcataatgttgtgagcaatgaatcgcccttgtacaaaccccccttggttttgcgacactaaattgggaagcaagcagttgagccgtgagcaaagcagtttggtggccactttatatataacattgcagcacgctattggcctgtagtccttcactgtgtttgggcatttaagcttcggcacaagtgttaagactgtgttgttaatttctttcagtaagctacctgtctcaagaaaggaaataatggcatcagatacctcaacaccaataatatcccagttttttttgaaaaaaaatagcttccaaagtcgtccggaccaggagctttgacccatgggattgctagcaccattttcttgacctcatctcttgtaaccgtggccataaggagatcaatttgagcccctgtcaaggcaagtccttcatcaataataccctgcttaaccttcattctgttctgcatacagtgccaagaagtcctatgtaatagtcgataaaagcatctttgacttcacttggttcatccacccttttcccatcagcattagtgatagataagacttggttgtgtcttcttctttcacgaatactggtgtgaaataatgtagaattctcatcaccatcctttacccaagttagcttcgctttttggtgcaaaaaagcaagatagcttttgtgtttagagacaaaatcgtctctagctgcttgctctaaaagctgtaaatcaatatcaaacggttgctggtgtagtttatcttgacattcatccagtgtattccttgcttgagtctcttgagcttggatatcacaaaaaaattgagaatttaactccttgaaagccttcttcaaaggcttcaacttggtgataacacgatacattttggttcctgcaaagtgtccatgctgccatgttttcttcactaattctgagtaggtaggatggttttcccacatcctatgtatttgaacggcttcctaccagtcaccactttgttgtgtaccattagaacagccgaagagtgatcaaaaatcccctcattcatgaacacaacctcagcaaa

SEQ ID NO: 247322 - DNA, 649 bp, Cannabis indica
gtatattcccacaaatattgatccagaaggggaattggaatattgtcctgaattcccgacaattggtatcaaaacgtcgaggtcggagctctattccgcatgtgactcttcatgtctttcttgggaactcacttataagagtaattttgtctaggagactatctaggcctatcctttcttgaaaggattgcgatatataaacacagtctttcttgagaatcacctagctagtacaaaggttggtgagactgaagaaaaatgaagagccaaaaaattagaatttaagaagttcagaggcaacgataatttctctctagctgaggatgaaagatctccttattatttaggagaaggtccacaaggtgttactaagcatagagaaaaagcctagtatgatgaaagacgaagattggaatgagatagacgagatcacagctagtacaattcgtctaattttttagatagtgtcttgcaaaatatagaatcaaaataaagtttgaagtgaagtttagcaattagaaagaggttgtgttgatattgataatggcaacacgtcctccatcaatcatgtaatcattgcagagaggtcttggtttcgtttgaaaaacaaaacaagacgagaggtgtggagtctcaagtctttatttca

SEQ ID NO: 247323 - DNA, 610 bp, Cannabis indica
acatcatgtggaaaggaaagagaaaggataaaaaaattctacactttaagatagttaacactgaacgagaagttatcataatagagttaccccattaaatagaataaaattatatgaagaggaatgagaaaatggatggaataaccgagaaattgttaaatactcactacttaaaaaagggaatttctcgaccgtttaatagtcggacgaatggtattatcgttcgtctttatgatcgatgcctattcgatcatcgcaaaattgggtagaatagatgttggtggaaaataattaaatatgtctattcccaactatttaaaaccgtcgacaataactgacactataaccaacagtttagaacatttggcaaaggaaatgccataaattttaaatcctcagctatagtgagccactaattaagaatttgctcgctgaactttgacatacatcaaattatgctccttgaatttttaaggttgttacaaattttctctaaactattgaaattattggattcaaggacttttgtctaattttacttacgaaagcttgacatagataaaagttcaagaagcatgatttagtacatgtcaaagttcaggagtcatga

SEQ ID NO: 247324 - DNA, 517 bp, Cannabis indica
aaaaaaatagtataattttaaaatgtaaatatttttttttaggcccctgagataggtgggccctaggcacaggcctagcccgcctatcccagggccgggcctggtgcgaagtagtaaaagacagcgatggcaaccacgaaacaccttaaaacttaaaacacttgtatacacttggaggagaaatggctttgtactggcgccgttgttgatttgatacttataaggagactattagactataatataaatatataccaaaatcataatataatcgagagataaaaaaaaaacagttttgatactaactattagaatataatataaatatgaaaataaagcatatatgaacaatatgtaaagcggaataaactgtaaatatatcgaaattgtatatgtaatgaaaggatcgaaatacttctagttattgatgtttaagctttaatcccagcaatagcttcggtataggaattcaggcttcctcactctctcaattctctttagatagaattttgttgtt

SEQ ID NO: 247325 - DNA, 690 bp, Cannabis indica
taaaccttttataattttattattttttcaatgtatagttaaaattaaaagatctctaaaaaaaattgaaattaaaagagaattaatttgattaaaatttattttgaaaaacaaagagtagaatttaacgcatattataattttaattattttaataccattaaaaaaccaaataaactatgataattgaataaattaatatattgatatattttattttttattttataaaaatgaaattattacatcagacgaagttttgggtggttggctgaaggttacatcagacgaaggttttaatcagacgaaataattgttagcaaaatatttatgcaaatgtaatgcaactattatgaaacattaaaaatcagaatagtgtttctacatacgtaactctatctacatgtatcttttgatttatatgaacagattcactattataaatttagaaaacaacgaaaatacactaggaaaatatttaactatagtattgatgtaatgttttttagatatacttgagttggattgtttgggaactccagcttaactttttgagatatgcttttcatggatctgaaaattgaagtcaagaaattagttttatccaaattaaactggctttacagttgaattttagttttgtcgtagtttttctacacttttttttttcatgaattcgaaacagcctct

SEQ ID NO: 247326 - DNA, 551 bp, Cannabis indica
aaatacgataatcacctgaaccatcaaacttatctatatcaaccttcatgaaactcataattgtatatgtataaaattatttcaaagaaattatatagataatgagtttagaataatcctgttgttgttctttgcaatcttggttttgtgtatttgaattcttgctggtatgaatgtgtttcttgatactttctttatgctttcttgattaatctttgctgcagattgtgccttgtttggctctgataccactaaaggaattttattcccaatttgccctacacacaacaatagattgatcaatataccaaggtcaatttggacctttttaccccagtcaaactcactgttgaccccaaaaatgaaagcccaaacgacagccccccttaaagttatactacaggtcgtttattcacactagaaaccctaaaatttcatcagacatatatatatatatatatttattttgtctcttttatcatcaccagccccaactaaataaccctagcaaaggctattcttcgggttcttcattgaagaacacgaagaca

SEQ ID NO: 247327 - DNA, 538 bp, Cannabis indica
gagggaaatattattgtcgagaatgatggaattggcataggaagtgagttgtgatggtgtgttggagtaaaagaagcccttttccaaatgtcatgaactaactaagtttgtttacgacataggatagatcaggcctcgtgatagtgaggtagatcaattttcctatgatgcttctatatgttgtagggtcagggaggagatctcttgagtcctttttgagttttatgttagattccatggggtggaaactggtttggcaccctagaactcggtgtccattaacaattttaaggcaaatggtctttgtgagactgaaatgccactggaacacctaaatctttcgagccctaagaagaattttagggggccaaggtcttttagtttaaatacagagttcaagtgttttcaaagtttggaatggcttgatcactgttgcctagttggtggcaatgactatgccatcaacttagacaaggatagccataaagaattgtcttgttctgatgaataagagtggtcagagtgcaagtaggtgaaa

SEQ ID NO: 247328 - DNA, 534 bp, Cannabis indica
atcaccgattcactgagatgaagtaggtgaaagaaaggtcttaggtcccgcagctgttcaaagaccaattgaggcagttgataaaattcgagcgcgaatgctcgcagctcagaacaggcaaaagagttatgctaatccaaagcgacgggatatcgattttcaagttagagacatggtatatctcagagtatcacctatgaaaggcattaagtgctttggtaagaaaggaaagcttagcccgaggtttattgaaccttttataatccttgagaggatagggcaagtagtgtacaggttggctattcccccagcactggcaactgtacatgatgtgttccatgtttcgatgcttcggaagtatgtcttagattcgtcccatatcctgagttatgaagcattgaaactttagccagatttatcatatgaggaacaaccagtgcgaatacttgacagaagggaaaaagtcttgagaaacaagatgattgcactggtgaaagtattatggaggaacagtaaagtagaagaggcaacctg

SEQ ID NO: 247329 - DNA, 1310 bp, Cannabis indica
ttcaatataagcgccactgtgcaaactctatgttctaatcactgtcttacctgatgtcctgcaaagttagagattctgaatccccaggtgctcctgatcaggtgccggtaatcctagtcacacaatctgggatttcacaaataggattaaaccctgattccataatcataaaattcaatcatggcatttaaaatttagataatatacagagctcgtcggaaagagctttccaatgatatatagaagtcccaaatcggagttaggaatcaaaagatatgaattttcaaagttcaactcaaaactgcccaaaaacacaagggcgagccgcggcatcccaagccatgccgcgacacttggggccaactcccaggttcccacaacaggggcaggctacggcatgcccagagcatgtcacgacacatgggtttcaaacaaagaaaccagcatgcatttccacaaattttcagcaaaaacccaaccaaactcactcaaattcataaccaaaacttctgaatcataaaccaaagttactagaaaacactagggatttaaaacacataatcatgcatcaaaatccaataataaccctgaatttcagattgctcaaaaagctagaaatcatgctaaagatcaacaaaactcaagttcacaactaagaacttcaaagccaagcttctcaaataatttccagcaataaacatcaaatttaaaacctgaatttaagtaagaaaataccctaatcattccatctagggctcaagaactaaaactcacaacaagatcaaggaattaacacttaaatctcataaaaagactataattttttcacacacgcattaacaaaaacatatcaactaattcatgcttttacaacaataaaattcagcaaggattcaaagtttaaaagctataaatctacctcaattccttgcacaagctagcaccaagcttccaacacaattttcccccacaatcaaccttaaactcaagctatttctcacaaatttaggatgaaaatcaagagagggtttagagagagagagaggggtcgggtgagagggagagaaatctaaaaaattcatttactttcctccaaaattccattttgtcaaacttagaaaataaaggtcaaatgaccattttgcccctagggccaattaacatgcatatacactttcaagggcacaattgtcatttcatacacattaattccacataaatttcagattatcaaatatcaaacaaaatgccaacatttaatcccaaattacatttcgggcccgaaccccgttcggcccgaaatacccggt

SEQ ID NO: 247330 - DNA, 1730 bp, Cannabis indica
ctgctgcattcagcctccacgtcctcgtttactcttatctttcactaccattctcgcttccttccctcttaccttctacagtcctccgatgatgtcccattccttggcaatgcttgcaaacatgggtttccattcatattaactgccaccgagacctcattaccatgttcattatcaaagtaaatcaaatcaagaaaatcctgctgcattgaaacctctattagcactctaggatatgtaagcttatccctttcttttgtaattgcatcttccataattggttttcctagctgccccgctatcttaaaaaaaagatttttgctctcaatactttaattctaggtcttctagctgaatccaaataggcacagtcctaatatcttccttttgtagattgagattttgatcccaagccttcataaggataggccttttattaaagaaaatgtatccttagccaatatctcatctctttctgcaatacttgtaaatcgaattatgaaaatgccatatgaaatcatacctactttgtccacctttcctttccaaattcttctagcaaatccatccaataccgagagaggtggattggcaccaagaacataacacacaatagctaagctccagtaagagatttcatcttcaatgtcatccattgtaatctggactttatcctttttctttgaattggcaaaagtagagtctaagctccgtttcactgaatctggtctgagaaccggtggggtaattgtaacacccttcgagattgaactttgacattcttggttagccgcaagaaagaatccaaaagtctgcaacaatctcatcctacctctgcaataatcggaaagatgaatcaggggataatggttgaaacagatcctggttcttatcctttagttgctctttatcctcatcgtcatctgagaattccaggggtgcaacccccagtatttcatccatcgttttcgtcttcttcacttcagcagatgaattcagaccctttctcttagttttcttgcctgaaaccttcatcttccccacattcttagccctagttttcgccatggcaccaactcacaagggagtcgaacagagcaaagagagaggagattggaagggttacaattagatatattcttaaaagttacacctatgcacgatgtaacgagatttggagtgaagggtaagctagccctgaggtatgttagagtttttgaggttatagaaagggttggggagataacttatcgattaaacttaccagtgcagttgggacatgttcataatgtgttcaaagtgtcaatgctaagaaagtatgctccatatttatcgcatgtgattgagtatgagaatattcctattcgagaagatgtaagctatgaagaaaaatctatcagaatcttggcgacagagttaaaagtgttaaggaacagagagatgctggtagtgaagatcgtatggtagaataataaagaagatgaggatgcttgggaattaaagtccgagatatatatgaagtgtccttacttgcttaatttacaacctaaggttgtactttgaaattttgaaacgaaatttctttgacgaaagattgtgaagactccgtcaacaaagaaagaaaaagaataataattatattatatgtggtgggacccactccatacattaactaaaaagaattctctttctttttctctttccctaagaacacctttctctctctctct

SEQ ID NO: 247331 - DNA, 674 bp, Cannabis indica
ttagaatttactacaaatttctatacaatttagtctaaaaaattttatacacttgtagaaaaaattatctaagaacttaagaaatttctaaattagattaaatctaaaatatactagttatattgaactctagaaacatttaaatttatttggatatgtataattctttctagtaaaaaaaaggatctaaaaaaaataattctaaccataaagtgtaaggagtgagcaactatataaatactcaacaaggattccaaattgtaaccaacacctaaaagctaaatatacaatctttaattttaataaaagcttactactttaaatacagttctttaatgcttttaagtaaacactaattttatatacaagccattgaggctagcttagtaatgagaaagggataaaaaaaaagaagagatcatgggtttaaacctaccaccttaaattattaagctattaattgattgtaaaatattattatgctacactaaaaataatactaattttatatactaaatgaacaactactcatcaatattactacttcactaatattaccacacattattatccaatatcctgcaaaaataaatgggcgactaatatttcacattaaaccataagagtcaaaatgtggaataaattcgtattcaattataccaaaaaaaaaaaaa

SEQ ID NO: 247332 - DNA, 756 bp, Cannabis indica
acaagaaatgcctcaaactctttcatgtccttttaagacacaacactgcagacatcatgattaaagctctctttccagctcaatttaacctccttttgtccaagatgagtgtccttaatctctacacctcatcttgatggggagtatcagaagtctatggttagtctatgattagtctatgattaagttagttaataactattatagaaagttgttagaattctgttactcagatttattcattctttattcatgtaacaaatattgccatgtataaataccctattttgggttagtgaataaaatcaattcattctcttctaataattggtaagtaatggcaaaagagcaaaatgaatcgtaaaagcaaaagagaagagaaggattccattgtgggttcttcttttttcaattgaactaatttgtcttctttagcaagctaatctatttttattaaccaggtgagacgtcactcaagtcaacacctccttttcttctatttctattttataataattaaaataatcaatattattttgctattttttagtaggtctgacaaaactttcaaaaacccaatatacaaagtgaggccggccttcttcttcacgccatttaaccataggtaaaaaccatttcccattatttctttgtaaaataaatttatcgatttttctcccggtttcaacctcaattttttccgaaaagacttaattttttcaggttatttagcattgcaaattatctgaggggatt

SEQ ID NO: 247333 - DNA, 943 bp, Cannabis indica
gactcaacctgagggtggcctcaacattcggaccactcgtttccggagaacccaaccgacattgatcctagtatgcagacaacatgttcgaggagtgtgggagtggccagaaccctgggacgagggatgaagagcccaatcgtgggggtgcccagcctacgagaaaaggtacttatgaaatagaaaactgacgcctaaggcgctgtctggaagaggcgcagcagcggaacgctgaattagaacgtgatgcagctccagtcagggtagcacaggggacgaatgctcaaaatcaacctgaatctggagtgagaagaccacgaggcagacctcgtggctcacgaaccaggagacaggaaaatgcccgggaagaacaacccagggaaaatgagagataccccctgaaaatcagaatgatcagccacaaccctctcactaagatgaggatgggaggcaactggaaactgatgaacgagaaattcctcatgacaatgaggaggatcttcggactcaaccgggagaacgtaggtcacttgcgagaaatcaccagcgttcttcctgaacccatagagcgatgactcatacagaccctaatgggggaaatacgacagaccacactcagggggaagagaacagagcgtgaagaagcaagtgatatctcgaggctgtcaagaacccacagtcgatcaactcgaagaggagaaagtactcaacgagctaatgatcgagaaagtatgggaaccagtaaattcggaattcactcaaagacaaagtctatgagtaggacgcgatctgtgagtaagacgaggtctgtcagtaattattcccaattggatcttcgagagcacttgaattggaagaaacccgaccttcgccaatagctcgatccaaagcaagaggatcccatccaattacggataaacgagctggaggacaagttcaggag

SEQ ID NO: 247334 - DNA, 1144 bp, Cannabis indica
gactctatattttatgatataattttttattgttatttatatattataaacttattaaaaagtaaaaaaattacagaaaaaatgaacaattattgtaaaaaaatttagaataactacaaaatacaaatcatgatttcaaaccaaatcaatctatttttgagtggattggtctgataatttaattagtctggtttggttttgaatttttgaaaaaccgtaatactggtttagtttgaaaaaattataaatcggaccaaattaatttgtgaacaccattaactagtgcctagcaccctcttcgatgtcataatgctattggtgtaattaagtattgagtctcatataacttaagaaaatagattttaaagaatattgctaactaatcttaatgcactatttataaaaaatattaagtactatcggcgcctaatatctttaaatttatgtattacttttggtgttgactgagtgagggtagagcaccaatatttattaacaaaaacccacaagaccaccatccacactaccaccaccactccttttcccaagtaattttcctctcattactagaactttggtgggctgctctccatatcaaccttgccccaaatgggaatattatcacaaattttcttccccctttttcttcctttttctacaagaaaaaggatttgatcttgtgctttcttttttgatctactttctctaaagctatcattagtggcattaattcattaacccccttactaaaatattattagcacataacacatatgtatatgtttataattatattatatatgttataagaggtgtacattcaaattcaagtatacatcacttagggctgatatagcttagcttataatctatgattgcctatatatatcaacaagaccttagaaattcactttagaggtgccaattatttttgacatatgattgatgatcacatgatgtatatataaaaaaatacgcttaataaataaatttgaaactaaatgttaactactttaattttaaattagggaattatacttataaaattaaaaaataatatatatgaaaaataaatattttattttatatattataaataattatattattaagtatatatatatatatatgataaataaattat

SEQ ID NO: 247335 - DNA, 1611 bp, Cannabis indica
gaagtcgtacaattttctttacatacaactctgcatactgatctattgaatatattgttttcactggaaaaaagtgtgctgacttagtaaaccaatccccaactacccatatggaatcaaacatacccgtgattctagacaatctaaccacgaaatccatagtgacatcctcccatttctactcaggaagtgttaaaggctacaacaaatctacatggctttgatgttcaaccttaatctattgataagtcgaccttctagacacatattctaccacatcattcttcataccgtagcactaagtaatagaatttcaaatcttgatgcatcttggtggtaccaagaggtaatgaataggaagtgttatgtacttcatcaaggatctcatttctaagcttaacattaccagtaatgtaaactcgattttataaagtaacatcccattgtatgacactgagaattccttaactttaccaactaataccttttctcaagttttaaccatttatgaatccacgttgttttgaatgtaaagtttaaaaatgggatctcagttttatgtgaatatatgtatatgtttttaaaggtttaaagttaaataaaatttaatttatcacgatttcgagaaaatcctttgattagcaaatatttgcattgtaattggaaagtcactgtaatgtgcctaatttttaggtcgttacacatttagacaatatttgtgagttgacagactcagtaagaaaattttaagcataaacatgtaccctaaccgtaaccaagtgcccatacacccgaacacaatcctttctcagtaccatagctgatattctcgatacttaattgatatctttggtactctagccaatgttctcggtactctggccaatatacttggtactctggcaaataaattaagtactctagccaacaaactaacatgtatgctaaatatgtatgcatgtatatctctatactaatcttaccttgatactgaattcaagtgttttagtcaacctgagtggaaactgttgttgaatgatttaaggccctaagtcacaatttacataaactggtaagtgacttactaaatctctttttggggacttagactcaaacctaaaagttgccttatggataggtgtatgggcgcctagatacaagttggtattatatattgtatgttatatgtttttcttacagagtttgttgactcacagatattatttttgagtgtaggtaaaggaatggctaaagttgaacaacagtgagttcaaagctcagggaatgattatacatgtcgagatggtgtgaactggagagtttggtctcgggacgacttgggcatcattttgtagtctacgtgtgacatgtctgtttcaaaataattttttatttgagttaagtatggcccatggattgatttttgccacataatttcattaagtaaacaataatgtgttggttggatttgtgagtggtccccgacttagggtattgatcagccaactgaagatgcaagcccttatagtgttgcaactcatggctcatccctaatggatgaacgttcattagcaatataaggtcgtagaatctcgaaagataagtatcatt

SEQ ID NO: 247336 - DNA, 699 bp, Cannabis indica
tggacctagatagggatccggatacgaaccttgacttgaacttagacccagacatggatcaaaatgctggacctagatctggacagagatcctgaccaagaccaaaacttctccccgcactcgggacccgaacctagacctagatcggggtccaaacttcaactcaaacccagagacagactcagacccgaaatcaaacacccacacctagaatttgacccaaagatagaccaggacccggacccaaacttgaacccagacaagaatcagaaccaaggacttagacccagaactgaatccagactcatatcgggattggaacttgggactcggacacaacctaaaccaggacctaggaggcgaacccacacccagagcctgatctggacctatactgaaatccggacacgaacccaaactcagaccaggactcgaactctgatccgaactcaaacccaaactcgaactcagaatcgcaaatcgaactataaccgatttagcactaggaccaggaccaagacgtaaacccaaacccgaacccagatcaaagcccagactgagacctaaacccaaaatgagactaggactcgaacccgaacctagaccggcacccaaacccacacaataaccgggacctggacctagaatcagaatacggacttgggaaacagaactaggaccgggacctagtacccgacc

SEQ ID NO: 247337 - DNA, 604 bp, Cannabis indica
catcaacaatatcagagatatcaatacaagtatattgcctcaataaaaagaaaataaaattacacattgcagctattttattatataagataacgatatacatataaaaaatatactgaaattaaaacattttgtatatatgcaactaggcaatatagtcgctcttcgcgtggcttatttattttgtttagtataataattaaaaagaattatatgaaaataataaataataattttaaaattaattaaatatataataatattaaaattatactatcgaattatttattaaacataaaattggataaattatattttatatattaagaagtttaaaatttatatgaataatgtatatatatggaattttaaaattttctatgaaaaattattaatataaaagatataaaatagggtagtacaaagaaaaattagagtattattattattatttaagtaaaactatttcctgtaatcaataatttatatctcaattattcaaagtcgttgtgaatcattgtatctcacctgttgctatcaccatatcccacatttagtcgttacagttgtaatttccaaaagtttacttgatacataataatac

SEQ ID NO: 247338 - DNA, 582 bp, Cannabis indica
catactctgttatttgctatttggtttgtcagccttttccttctattaagtttggtttggcaatgtggaaaatgagaattataatcatttgattaaacataaatgtgaactacaatgaatcatgaatgaataactgtcttctaatctcaaccattggaggaaagcatggttgatacttcctgtattcttttgtatctcaagtattgatcaactttgcaggcaaggattctagcattgaatgataattactttttaaaagttgggggtcacttggtaatctccatcaaggccaattgcatagactctacaattcccgctgagcatgttgcttgaacatatatagctttatgttttagacttgaaattaataataatatgtatcagttgaagaagcaaagatagcagagctttattgatttgttttttattttcttgttggattgtaattgctgaacatttttgatgcatgagctttattgtaatcaaatatttgaccacactttttaagactgtagacataccttttcattttaatttttacacatttggttctcatttatgtttttgatgatataaatatat

SEQ ID NO: 247339 - DNA, 605 bp, Cannabis indica
tcaattaacaaatttcccatctacattgccctcatttcataacccacagagtccatatcaatctcatctgagatcccaaaatccatggcttccttcaagttcttgtccacaaacaagattacccaagtgccaaatttgttttaaaataagccacactgccatgatgtgttaccatcacactggctttcaaccatcagcacaatccccacgcccattcaatgcctatttcacccaacaacagccacaatagccactccatccacatccaccctccatactgttggactttgtgtcctaaataaaattctatttcaatgtaatattttctattcaattatcaataaggaaacatatttatttttattacttatttaatgtgttatttggttcatgtgactatttatttgatttataagttcattcaaatccttatcacactgatattcttgtttattgtattctcaacacagtggaaagtaatcaagattgtgtgattaaatgtattcctataatttatcagtacacatgatttgactgataggataatctacaatgtagtttacttgcaccatggataagtgccatgtcctttccagggcattggt

SEQ ID NO: 247340 - DNA, 1574 bp, Cannabis indica
cctcctcccatgcagcattaaatgcgagatgactgttcagatggaatctgacaccacccagagatgctttgttgccatcttgctctccgggagcatatgagacttacatgccttctccgggaggcatgtctaaggtaatcctttgctttaagaagacttagttgttttatttaaatgctaaccccttcccatccacgtgtcatcatccagttggtccacgtatttcggggcaaaatcaggggcaacatttacccccaagccttgtttaattatgaagtgaacaaggcttgcttagatgcctccggttgcctcctcgatttcctggcacgtgctttgggcgcgtgatggcatatttaatgaccatcattactgcagttattcactttttgcaggcgtcgattcgtttcttgtccatttattgataaggcacattaatgggtgtcagacgggtactcaagcgtttctactgccttgatgacgattcaatccaaccgttggatctatagaatgcaaaccgattgctttcccagtcgttcgatggtggctgatcacagctgtctcacatatgctttgacctataaaagccaaccttcttacttcatttggttactttcagcatttcaccaaactttctcaagttttccagagagaaaagaaacctcaaacaccatagatttcttactcattttccttcgtcgttgccaatcaactttctaccagcaatcaacaccaacacccagttcccaagctttatgtaagttcttcgcatcttgtactctagtttatttgttgtttacatagcatgctttactgttcatctgctttttctgggttggatgttgaatttctgggaatttctgttttgagtttctgtgcaacgcgttagattcctccttttttgtgtttgaattacttcttttcatcgtatttttgtcgaggacccatctttgtctcacgtaatgacactcaagggtttagagtagactttgtcttttcgatttttactccttttcccttttctctttgcttattcgtaatgtcaccatctgtgggattcttgcacccgactcttgtcaagcaaaaccttttgaggctttctttttgacaagtgtccggagggggcctctttccagcggttaggggacccccattccctttttgaattagggtttggtttggggccggactgttggattttttcaatctttttcagaaccaaaatgtctgcatccggttctaagtcttcgaagaaaggggagaagcgtctcgccaccctggaggaggtcatgaagggtcctgtggcccaagaggagcacaagtcccgtgccaacgggtgggaagcgactgagcttcattctaccctgacttgccctcaccagctggaacagatcgtggtggtggcgggtatcaagcctacgacctccgagacctaccaccggtcgcctcgggacgaggagacacccaaccataactacggggtcttcgaagcctggagccagacacatctgatggtcggggccatgcttcccctttaagattattttattaactttctagtatttgtcggccttgcg

SEQ ID NO: 247341 - DNA, 1056 bp, Cannabis indica
tttttcctaaaccgcatggtgcggtgcggattgcgattttgaattgttaatatacagttcaaactgcatcgcactgcatattataaaaataccaatttttatacttatttaggtccaatatgtgaaggttcaacccaaagcccactaattattgtattgttaaaacttgaaacatatttattttcaagccttatggtacttttgagaagtgttgctcaagttttgttgtatttgtgatagtttaattatttggtgatagtccaaattgtaaaaactgtagaaatcacactgcactgcaccaatttttgtggtgcagtttctgtggttttttagtttcacagtgcagtgtggtttagaaaattggaaaaatcgcatatgcgagttggtttaataaaatggtcaaaaaccgcaccacccgcactgagaacacccctagttttaacaaagtaagctatattttgtatttgcatcacttatttgcatctccattagagatgctctaatgtaatggtaataagaattgattataatgtttggtttgtagttagaataaatattataatcaaaagggtaaatagcggcagaagtactcaaagttttaagtttgtaagcggcataaacccaatgtttatttttagctaactgcataaacattgggattatgccacttacaaacttaaaactttgggtacttataccgctatttaccataatcaaaattattgtgtttagtttaatatgaaaatgtaaggaaataaaatggtatagactaaaataattctattattttattttatcattataaaatatttataatatatacttttgacttttattattatattttttattaaaatattattttgcttttgtaacgaattgtaattataatgaggattacattaattttaacatgcaattatcattataatactcaatgcaataactatattacattgtaatgagatacaaaagtgaaaatagaaaaataaacaatgtatgaacccattcattaccattacaattactcttccagtgaccaaacatctcataaga

SEQ ID NO: 247342 - DNA, 949 bp, Cannabis indica
aaaacccaacactcaattactgtgagccactgctctgccttcatcacatcaggacctcatagaaacactggacgtgcttgcttacagaatctctcgtacaacggctccatacggttgccagcaataggttgttctggttgcatcggtggaacggcaacgcctgagcaacttgctgaggaggcacgacagggagaccatgctacctcaacctctgaatttcttcatcctgctggcggattcgatcttgcatttccgcaaatctttgctcccaatctagaggagcttgtagtggatttacaaggcgaccaccctgagctctgccatggccacggctgcgaccacggggattcaggggattttgatttccctgaccgcctccggtctcaaccatattaccctgacttcttgtatttcgctgggcgtccattttataggacttagcctatgaacccataagccaggcaggttagacagcgatcataaaacttaataccgctctttaggacttaagttaacacagttaaagtaattaattataatctaatatgcttcctcacatgctttcataatcatttaaaataataaacaagtacaggcttactgaaccgtgaactgagtttcccctgatgaagattgtacatgtcttggcaagcttcggtagacaaacctggcggctctgataccaaaattgtaatgccctaatgctaaggcacgttacagtgatttttcttaaaaaacgtgtcaaattaaaacttttgtaataattaataacactttataatatacaaaagtatttacaagttctgggatcccgttttcaaactttttaaacataatattctaaaatacatattatccaggtcgcacagcgactacaaaatataacccctgaggtcccgagatcgaacactctaggtcccgctgcttcgacatgtacaatctcatccta

SEQ ID NO: 247343 - DNA, 557 bp, Cannabis indica
tttccaattctctcttgttccccgttggatctctattcttttaatttgacggtgatcatcaaactcaaggtataaattgaaaaggagccatttttccaccattttaacattcaaaataaaaactttgagcttttctgcgaaaaaaccattttgatttcgtaaagctttgcatgctctctttgtcattgacatacttcttgcgcatcaattcaatatactgtttgacctcaagaattaacagaagttgtcacgccacttatcccattctcggtgtcgtcgtgcaaaaactcaatttcgaacggtaagtgattcatccccttttctctgatcttttctattttcctgggttatgatccttattatgtcaattgcatctgtgtcgttccattttattttagtaattttgatttaatcttgtaggtaatttttagggcttagacagattaaacaaatttaggtttatcatatttataagtttctggtttaataaatttcttccaggaattgggattgctctctttgtaaaaatgccccaatctggttctgaagtttattct

SEQ ID NO: 247344 - DNA, 585 bp, Cannabis indica
caaaccagatgaaccatcagtatcagttccagccagataatcaagagagaagtgtctttacttctgcagagtttgatgctggctctcaccctaattcgtcttcaggtatataatctttgcagatattttctttgcacagcttcgaatgacttaacacgttaactgagctgtgtatttggttgttgaacaccattcctgtggcacaaaatctacgtggatttgggattttgggccagctttaaaagccctcttctaaaacaacttctcttctctcatgtatcattggtttcaatgattggaaccttttaagaaaaaaaatggtattcaagagaatttctgttagttatatgattttgcattgcttaattttgttaatttttggtttattctttggtgtagtttgtgatacttccacactttcattgcaaccgactcaaaatcaaagtggcaatgataatagtggtaacaatagttggttctcttctactttatggtcatttgtggagtccatacctactactcctgcctctgctgccgaaaatgcattggtgaatcgagcttttgaacgaatgtccagctttagca

SEQ ID NO: 247345 - DNA, 1059 bp, Cannabis indica
aacttaatatttcatgccctgctattgcatcaacgagctgatcgatccttggaagtggaaaacagtctttagggcatgctttgttggggtctgtgaaatcaatacagactcaccatttcttgttcgggttgggcactaatacaggattggtgacccaagccgggtagaaagcttaaattataaagttgttgttgcgtagcttttcaacgtcttccttcaaggatactgctcgttctttgtccagcagccttcgcttttgttgaactggctggaagttgggatcgatattcagaacatgtgaaataatagaaggatcaattgcaactccctgaccggagaaaccatagacaggctagaggcatggggttaaatccttgagttggactcccatcttttcataagcagttttgaacaagatattggaagaggctccattattgatcatggttctagccacaatttcattggctatttggacttccacgaccagcgggttgttctgcgaaaatttaattttgacagcgtcttgatcgatgaaggttgtggtcggttctcctacccgtggaactttgggcttcctttcttccacagccaggataacttcttcttgctcgtgctgcactgttcaggcatacctttcccaagctttacctgaatctctagcaatgtgcgggcctccaacaataacttgcagatgcccatctaccggtggaggtagcaaattttggttattgtcgttcctctgaccctgatcggtcttaacatacttctacaggtgtggttgtttttccttatcaggaattcaattttccgcttcaagttgttgcattcattagtgtcgtggtcgtagtctccgtggaatcgataaaactttgtcatgtccctcttgttgacatctttcttcatgggcccgggcttcttatatggggccagcgaccgagttgccatgtacacactttatctttagtcaaaatagtgaatgcgatgtacttggcatgattctcccgggaagcttgttcggatttgctggttaactttcctttcttcccattcccatga

SEQ ID NO: 247346 - DNA, 851 bp, Cannabis indica
attaccaccaacacttgtttcttttggagctgagaaaggcgaaaacaaaacagaacacatatgttaacttaatatgggtatagacagggccgaccctaggtataagcgggataagcccgcgtttagggcccacccattttaggggcccatttcaactcagggccggccctggatatagatagcattttaaatctgtactaatctgtacctgttgtcgaaaatggtattcgaagataaacattttgttgtcggccataagtacccttgctatttcgagtatcaaacaaatccccgaaccatagtacacactcagttccaatagctaattcggatttactaccatctaaattggaattataaccataagctgtacaagagcaattgcttaagcatttagcattgcattcatcatgcttcatacttttacttgcccaagtatacttagtttcaggcactttcaactcagaatttaagtaaaacatatctttttctttatcattacagctcacaaaactgttcctcatacatccttgtgacaaattatttttattctttggctcgaaaccttctaaacattggcaaattggatgatcatccactatgatacatttagaattagctccacaagtgccataattgtcacatatgtctcctggaattctgtaataaaattcccatacttcttgttcttctacccatctcgtgtaatcaattgcttggctcaaaaaaattcttgagatcaatgagtactcaatttcaacattgtaagagaagtaaatttcatcctcattgtgcacaaattcataattagagctttcccaagaaactgatacatgattcgaagttccccc

SEQ ID NO: 247347 - DNA, 679 bp, Cannabis indica
ccgcatctatctctctaacccacgaccaaccaccacccatcttggactatcacaacatctctcaatcacggccacaagtttgcaatgtcgaaggtaagatttcgtttcctccctttttcatttatattcattgtatttttacatgatttaggattaaatgtatgacattattgataggtttatttatttagggttaaaatgtatgtgtttctatatgatctgtgagtttaggttagatttagggttggatttggtcggatgtatgttttgggcaagaaactgatttttaagccaggtccgatataggtatcatagtattatctcgatttttttccacttgacatggcatgtctacgtggccaatattagagccacatggcagtacagctcaccaacaaaaggccaagtcatctactcagcacttcaataaacggggagtcccgacactcaaacgggataacaaatgacagactagccacctcaacgaggttggccggccacccctggtcgaccctatggccaacataggtcggctagcttctggacagcacaaggtcggtcagcctacatcctgcaaatgcatggtcaactagacattggtctggcaggactttagtgtacagcctcatgcatggtcagcaagctagactacgaaccgggccttaacaacccacaaaaa

SEQ ID NO: 247348 - DNA, 821 bp, Cannabis indica
ttgacatgcttgttgagtccatttagtgttgcttttaaaagtttggtaaaaataccaaaatatttattttctcttttaaatttgctacaaaatcaataaatcattagtaacaaataataatcaaatatttgctaatcatcaaaacaaggagatcgaaaagtttgagttaacagataggaccttctcttcgagatgctactggcagatttgttctgggtagcaaaggttgttaatcaagactagtcaggttagcagtggcaattggataggatgtcttatccgagtttgtttggcctatcaggttagtaggattcgctgcataagttaggtttgtggaaaatctagtggtggtgggaacacgcaagttaggatcaaccgtcatggggtttaaaggaagacccgaggaagtagaaattctagttcttcttgttacaaccatgatgattgatcaagttgataaataatgctctcaatgaaagcaccaaaatgttgatctcagattttctcaactgacaccgaaaccgtatttatgatagaaaatcaccacatgtaattaatgtaagaaaataatgagataggcacaatatttatagaggtttggtccccttgattagaggctaatgacctacttcattttttgttgtactgattcaagagataataccacacaagttacaagcttttaccatgtaatttctagtgtggctctttgtgaatgttacaatagtgaaaataatgtaagtcaaatctcgaacaagtgagaaaacgacacatgcttagtgttaatgctaagggcatacaagtgtgtgtgtgtgtgtgtg

SEQ ID NO: 247349 - DNA, 1329 bp, Cannabis indica
agagtcgtctcaggagcagcaaggcaaaacggacacgttgcagatattggaacatgttttgtggaaagattaaaccgagttgggagactgttggtagaagctctccacagaaaattaagaacctttggagggagctgcaactgccataatagccgccagattccagagttatcttgaatatctctcctgggtttcattgattgaagcagagaatatgcactcctaacagtgaaaactcctggcgcatcatgtaaccagtaccacaaatcagtactcatatgactactgagcggaatcttccacaccaaagctcgatctctagcagtgagcagatcagctaatacttccccatcccattcaacccactcaactttcattaaagagtcgaccgactttcccacaagacctagatggacagattcaatgaaagggttcatctcatcaggaagccaaggctgagacaaaatattgacggtagaaccatcacccaccaaccgccgaaccccagcccgaactaactccttagcctcaaacacacttctccaaatataacttggggttactccctaagtcgatgtaagaaaagaccctgacgaaaagtatctagctttgtaaatttaccccattaagttatccccacaagtcaaaagcctccatccttgcttagctaatagatctaagttgaagtcccttaaatctcgaaatcccataccaccattgctcttatgtttcatgagcatgtcccagctgagccagtgtatgcctttattcttgttcgacctccaccaaaacttggtaatagctcgctcaatgtcctgacaaatcccgacaggaataagaaacacattcattgtataggccgagagagattgaacaactgaatttaataagaacttcctttcctgcacgagaaagaaatttattgtcccaagactggatccgcttctgaactttgtcccgcaaatagccaaagatggccaacagtactcgggagccccaaatccatacggtactcagttgcttcctgaaagtacagatggcctgccacaaatgagatgaagtattagtgctaaaaaagacaaaagacttcccaaaattaacacgatgtcccattgcagtagcaaacatcctaagcaactgaagaacccgattcatctcaccattggtcgccttacaatacaaaaagctgccatccgcaaagagcatatgagagacactaggcgctccattagccactttacaaccatgcaaccacttcctctcttcaaacttgcaaataagagcagaaaaagcttcagtacataccaaaaaaagataaggagatatagg

SEQ ID NO: 247350 - DNA, 757 bp, Cannabis indica
ttctttcttttctcttttatttttcttatgtcaatttctgtttcaagttttattatggatttgcacttagagattatgaactaattttccaatttagggatatgatgaatgttgaatgatgttttcctcatttagttaatgtgatttgttagttttttttctctggatcagtgtgatttgttcttatttattttaacatgttttatattggccatcttgaatatgatttatgatcttaatataaaatcgagaagtaaatattaagaacgctctaatagaacaaacatagggtttgatgtaaaacgagagtatttacatagcatgtgtgacatttaggttacgtgcgtactgtatattatatgttaatttatttcaaagatacaaatagataatatatatgatttaggatcttaatgatctaagaagagttggggttatttctataatctgtcatcacttaaagaaagaaagctcataaattgcattaacaattgggtaactgaaacaataagattcatgtttttaatctttcatccatattcaagcaacattaaaacttgttcttttattttttttgcttattatttttatttctttccaatcttatttcgattaaccaaatagaaacataaatctagttaagcagtagtcaattttaattttctgttgtttgacctcacttatgtgagtactgctcgatacgtacacttgcatagtttataattttacgcaacaatataatgaagagaggtaatgt

SEQ ID NO: 247351 - DNA, 642 bp, Cannabis indica
tgaggcgacttctaatcagagtcggttctaagggtactaagattaggcccgtacttagggctctcaccttacgcccaaatcggctttttttttccgataaccatcgctaataaagttatgtgactgttttaaatcatcgacaatagtggagtattaattaccaacattttaaacaatcatttactatttccgatggtttaaaacagttacaagtttaaaattaaaattggtttttaaaggttgagcttgaatcggcaattagatcgagttaggcgtctaataccatataaagaagaacgagggctcaaagtgaacaaattggtgtttgtatattgaaggttgaacttgaatcgtctgtatgtaaggaagaacgagagttcaaagtgaacaaatcagcgtttgtatattgattcttgaattgaattacactgatctatgagttagctttatatacaaagctaatgagaaagaaagttaattaaacatagagactaattagttacaattcagctagcaactaactgttttaacatactaatgcatctaacaatttttaaccatttctttgttacgccgtattatattgtattgtactctatagtattatatttaattgtattttatacaaaattatatatgcaa

SEQ ID NO: 247352 - DNA, 773 bp, Cannabis indica
ttatcacaagctttctcaacaatagaaaatgatttggaaacaatgatactttaagtcttctacacccatcaaaacaaagtttcttgagacttggaaaaactccaccttcattaaatgactactcttggagactatccaaaccctcaaatctcaaggtttccaaagatctaaaaaatggctttgtttgtatttgtattacaatagaagtaggataataaaactctgaacctactctcaccatatttcttaatctctcaatgacaaggtgttttaaagaaggatgttgtcccaattatggcaagaagctacaattaggacagtattcattaagcaactgcacatatcgtttacaaggaatagtagtaaaagtagagtattgttcttacgagaactgtagttaagtaccaaacaattcaatttctaaatattcaattcggtggcaataatttccaagaagttttaaaaataaaaaataaaactaaatcaaaagcaataaaaacaagaactaataacaatgactaaacttaggtcaattaatttcaattgtataaatttcctatggtctaatacagtttagttcctatttcaatttctatgtgatagcggattaactattttaatctatattcttgctagaatctatagaatataaattgtatggtaaagtcctacacttttatggtaaatagtcatcaatttgcatcaaacatgaaaattctaaatgctacatagaccatacaggtactcttgtctaatatcaaaatctaatgtct

SEQ ID NO: 247353 - DNA, 396 bp, Cannabis indica
taaaataatttccaacagaagtcaacatccttctgtcttaatctaaattgggggaggcccaagtacttgataaaaccttcaggcgatccaattcctaaagcttccttgatccctctttcatgccagtgggagtatttttgctaaagaaaattgaggttttgagcttattaacttgttggacggaccaagaacaaaatttctcaagacagtgccaaacacatttcgcttcattcaaattggctctaccaaccagaattaggtcatccgcaaagaagatatgggaaagaactgggtcgcctctgctaagtcttataccctgaatagtgcccttgcaaagagcatcctctaaaagcgttgataaaacttcggcaatccaaataaagagataggggaaag

SEQ ID NO: 247354 - DNA, 735 bp, Cannabis indica
aagaaatataaatccactgaagtaattagtcataaagtttatttagacaatttttatctggtatataactaaatacagaaaatgatcttaaacaatgttacagtagcacaaaggaaagagtcaacagaggcaatcagtcatggctgctcctagatttacaaactaaaccataagacattattgccactatcacttacaaattgaagcagtaaaccttgaaactcaatagatacaaaatggaaaacctggacttagtgaaagatttgatgcaccagtgatgaacttgttacctgtacattagtatttgtgttccaaaattgctgaaaagttcatgtattctggatctcaagcaatgtcaaaagtttcattatatatgttttgaattgttctgcacaatgcaagggcaaccaaaatgatgaaaatcattctgtcttttctttttttcttcttctttctttagatattttcgatggataagttggtaaaaaaacttggtgcaatatgggatgcattcatcctttagtttctattttcatttccttatataatttctttttgtgcatactaaattgtattccattatattcctattctcactcctactcctattttttcatttctcccaaccaaacgtacccaaatctttctttcgttctagttgttgcagttatctgggctagagtatacttgactaaaagaattatttgggttcctcattaaattcctttcgtctta

SEQ ID NO: 247355 - DNA, 598 bp, Cannabis indica
atttgtataattatgatatttataagtgccttacatttgaatttttgcttgtaaatggtgtaatttatggcataatttatttgttcacaagattacgtggctacaagatggtatagagctctagagctttgtgattcattttcttccaaggtatttaactatttatcaccctttcttaattcactttccttcataaaataaatatgaaaacatggtatgtatttgcttggatttaaaattggtatgtgttctctctcgtattggattaagaggatatcttgctttcaacctctcggtgtgttgaggctaatcctagttttgttctcttgattgtcttagtaatttgatatataagattatttggacatttgacaataatagtcttgatgaaccatagtacttgctaatgaagaagttgtctatctaataatactatcattattttgattaagttctacaagtttgtgtcttgaagtcggggccggcttaagcattgggcagcttgggccattgcacaaggccccaatttttctaaagcccaatttattttatttttttagaaaaatgtctatttttttttctttttttttcctattat

SEQ ID NO: 247356 - DNA, 1086 bp, Cannabis indica
ttccacacaatgccagcaccttatctctcgtctaagtcaacaactcagcaacaacaatcatgctgaccttgctgtcatgcatcctgttgcatcaaaccttgcatgtaaaatgttgtagcacacactaaactcatcactacctcataaggacgttgagacttataagtatgccttgtcggctgctactaacattggttggtatccggattacctaaattgtattcaaaactttttatcggttgagactagtgatcaatgattatttgtccctttcccttttcttttgagctttctgatctaaaaggaagtgcttttatggagcttttcttctcaaaataataataataatttgaggcgaaaatcataattagcgtaaatgtgagaaaattacaactgatgtgcagaatcaaattaactataaatttaatcaacaaacaattaacaatgacaagattaacaaatcacaaacaataatcagagataaaacaatgatgaacagagtaatcaaaaccataaaacgattaaagcaataaaataataaaataataaaattaacactaacatatatatttgttcaagtcctatagatcaatgtgatctatggctatactctagttattgaacaccaccaaaatcgtctttattgattgagcaagaacatagtataatacagtcaatattaattctctatttggattctctcaaagtgtttatctctcacactcttacccaaaatattcttcatctacagaaaatttttcatacaaatcctaaaccaatctctctctcttttctctgcacatctctctctacctctcaatctctttccctgatcacaatcttcaacctcgaagtcttctctaaaaactcctctatcaaaatgataaccctcggtggtatttatagattagagatatatatcccaaagtcggtggctgcaaatattaagttagatgttaagttagttataacttaacgaacttaacaaactcttcgtaacagaatctccatgtcaactcaagttaaagcgcttctagatgagtcatacatttcctagaagatatttcgaagcatatgctgaaggga

SEQ ID NO: 247357 - DNA, 537 bp, Cannabis indica
tatgtataaggaaaagctgacttgattagaaaatatcaccaaagaagcttctattgcgagtttaacatgaaaattgatttattttatattaatatgcaatctcacttgcatattgaaatatataaaatagtgactcaattacataatcattgtgattattagtgtatgttttctttacttttgcagggaagacagagcaatgacaattcgcactcttttttgttagcatgtgatggttctaaaagtaattctaacattaacctcaaatttctttgacattcctagtaatcttggaaggagagacaaccattgtattaaatatctctacaaaagaatagtgctaagccacctataacagcaaaacagctaagagcatcgaataaagactcaacgaacttccatcatttatcgaaacaaattatcttgaaagttgtcgtggataataacgtgcacaaatgggggtaagttggaaaatacgacttttattactcaattaattaaatttacctctaattttatatttaattgaaacatacc

SEQ ID NO: 247358 - DNA, 1015 bp, Cannabis indica
caaatattgatcaaccataactgggctgctaggcgtatcttcctctgcccaggtatcgaaaacataagacacgtgtcatccactcctattgccacgtcatggtacaaaaaataggataacatttgccccaagtctgcgcaggaccttcttggtcgcacatggacttcactcagcccagagtcttatttggatgggtgacgcgtgtcctagatgtcggatgacgaaccaatgtggtcctgactaggagtctcttcaacttatgcccatttaatgccaattgacggttttacctcgaatcacggttcgaagcttgcgcgtgtctgacagttatactccctgtaatgagtacgtaacgttcacttttgggagaaaattcaagaaattcaaattttaaaatgattgcttctcttttcagattgcttataaataggattaaggatctctagcaatagttttagccatttcaaatcttaaacaccagagcaaaaacttttagccaaatttcctcccagattcatcgaagaattctcaaaaaaacttctgacgatttcatccgagttgagcaagaaagcttcaaatcagtgagtaagtttttcatttcttccttttacatatttacaatgaaatgcctatatgatttctggattttttaaatgaatctttcctgttcttgaactgttctaggttaaccatagaatacctaggtttagggcttgaaaatctcacttatttttaatcataacatctgattatctgacttcgcttcaaatttctccttacaacattcatttccactcgtccacatggttttagtgaaaatcagattccaatttgaagtttcgaacttctgggtttgaaaattctatttctgggtgaaacctccgcttttgatttcttagtcgaacctggtcgatatataacctgtttttcattcattgctctgaccaactcactttcttgtctcctaccttttgtagatgaaccctggtgagttttggggaggcaaacatcatat

SEQ ID NO: 247359 - DNA, 638 bp, Cannabis indica
aacataaaattacaatccatgcctgataaagtagattttctagcaacatttttcgatcatattgaaaaatccaattatttaaatgatctagcatgctaccaatggagaaagataaattaaatagtttaactcaacaaacttatttcaaggagaaaccatagataaacactaacaacagataaccatagaaattgttcaaaaaattaaactacaattcagctaaaaaaaattgcattagacatacctttttcagcagaaaaagaaagttcgacctaaatgtgtctatagttttacagaattaccagcagattctacattatttgactccttaaaagcctaaaccataattccatgaaatatttcaaggaaagctgaaacctaaatttttcacatcgaatacttttcttaaaattttagctgagacactccattatttttctaattatatgttagccactctaaaatttcactgcactcgggaccattttgttctctcaaatagttaaaaatactaatctgatctcacaacttcaaatatagagcaaattgatgaagctcccaaaaattatgcagctgcagtaatagaagaaaaagaagcacattacctcttcataacggccatgtgcaaaatatagagt

SEQ ID NO: 247360 - DNA, 845 bp, Cannabis indica
tagcacatttgaaagcttctcaaaccaagcacgaggtgcttgtttgagaccatataatgctttgttgagtttacatacatagtcggggtgttcaggatcaacaaatccaggtggttgttccatatagatttcttcatgcaagtctccattgagaaatgcattgttgatgtctagctgtcgtattgtccaaccttttgttatggctattgttagaactacccgaatggtgacagccttcacaacagggctgaaagtttcagagaaatcaaaaccggccttttggtgaaaaccttttgccacaagacgagctttgtacctgtttagtgatccatccttgttgagtttcaccctgaatatccacttgcaaccgatgggaactcgattagcaggtcttggaacaacaacccacgttttgtttttcttgagagcaacatgttctgtattcatggcattattccaatggggttcaagtagggctgctttgactgttttgggctcacacacagcagataaggctttaggttttcttataccagacctgagtcgagtttgcatagggtgtgtggatgttgtagtgacactgggagttgtgtttgaggtagtgttctggtggatgggagggttggaaacatgcagtgatggttggacagggatactggcagcagtggtgtgaggaagaactggtggactgttgggtaaagaatctgtgagggaagtggtctgttggatggatgatggtaggactgtggtgggaactataggaatgagagatggtggatgacttggtggtgttggttgaggtataggaggagagaaaagagttggtgcaccagatgtatgtgagt

SEQ ID NO: 247361 - DNA, 706 bp, Cannabis indica
atgtgatttctggggtattaaacagatctgggaaggggttattttctgggttttatctctgctgttcttcgtgctcttcagtgaagaacatcgaagaagttggcttgtttctgggattgattcgaactgggttgaggaaattttctgggctgagcgtattaatttctgggttgttttgttcttctgttggggttaatttctgggttgggagattaattttctgggttggttttttgcttgtgtctttgctgtgttcttcagagaagaacaaaggagaacggctagggtatttagtagggctgtgtattgaatgtttgtggaaaagatagtatatatatgactgatttaaaatctagggttttctgtttaattcaaacgacttgtagcactgcttaaaggggctgtcgtttggctttttatgcagagagtcaaaaggtgctttgactgagtcataaagatattaattgaccttggtttcctgatttttctcttgctgaggtgtaggtattaattcctacagcaagtttagctaaaaaaaatgaacagcataactgctagttctattacatagagaaataaaaataatagtaaaggagctccacacttgttgaatggtggtttgttattatagaaatcgtaattaaattgtctattataataattgctttctttttaaaaataaagtaatagaattacattgtaatca

SEQ ID NO: 247362 - DNA, 507 bp, Cannabis indica
gtggacaaaccatcgtgccatcaatgtatccttaaaggccattagcaataattatattgtgcatttacattcttcatactatatagttggaatcatcaagcttcacagaaatagttggatttaaagagggtattgttggatgcagtggagttgagaaagaagaagaagttgtaggggtgagattagggttaggggcggcgactgttgtggggtttgcttggttagtaatattagggttttgtgtgttctcatccctccttgatggggtagagtttgtactcacaagtgatgctttctattccttaaagaaagttgtacaaattaccatggtatttatggtatcctttggcaaagaaaaaaaaaaggatataaaacacatgtcctgaatatagaaggccacaaataaagagaatacattatgaaaataatcactttctctctcctactctctatctctaccgcctctcattgtttggcttctgtctacgtataagtcagccatggtgg

SEQ ID NO: 247363 - DNA, 553 bp, Cannabis indica
tacgtataagtcagccatggtggaagggccatatccggcctctcaactcccaaatgagcttcaccaccaagaatgggacctctcgaaactccgactcgctctcctccaatcttctttctcactctgttatcctcatctacctctactcttccgcccagcaagctaacgacgggatttttcggcgcccaaagaggcctatgacaagcttctcttccgatcctctttcccatatgattcatttttaactttcatttgattgagattatttatttaattttttttatctgagatatcacataatttttttttcttaaaacaaaaagaaatgtttaatttgggtctgtgatatttagagactgtttgagatatttttattagtttggttctttaatattttctacgatgttctgagattgttttacgggtcataagtttttgttctcgtgtgttttggtgctcagattttattttataataatcaaagtgatattttaactggttgttgaacaattttgtttgattccttacacgaaaattttggaatatcgttatc

SEQ ID NO: 247364 - DNA, 763 bp, Cannabis indica
cccagaaaacccagattttagcttcgaaaatatgccaaagttaccgccaattcaacccgaacatgcatatatgtcaaaaatcacgaaatagagctgctagcatatatcagagggtcaaaacacatatctcatgcatcaaatccaacaacaaactctcaaaatttcagattgcacactaatcaaaatcatgccttaaatcaagcaaacttaggctcaagaacttgagcttcaactaaataatccccatattttccagcagtaaaaacaacaactaaaacatgaattttcaacctagaaaatccttataatcatactccaagctcaacaaacacaaatcatgcaattcaagctagaaaacactaagttcaaaatcaaattcatgaacatgcaactaaagtaacataaccctttttcccatgctcaataaaacattaaaattcagcaagaaagcaagatcaaaaaaatctgtaaaagctacctcaattccttgcacaagcaagcaccaagcttcaacacaattctccccaataatcaagcttaaaatcaagcaattcaccaaagattgaattgaaatttcaagagagggttttgagagagaggggatcgggtatgagggagataacaccagaaattaatttcctttttctccaaaaattgtattaatcaaatgtaaatcaataaagatcaaaagaccaaaatacccctagggccaaataacatccactttaacattacaaggacataattgtcatttcacactcat

SEQ ID NO: 247365 - DNA, 1033 bp, Cannabis indica
ggcttcgccgcgaccaccaaatccgtagtcgcggtggttgggacatctcaaattaatttcctctctattaatctctattccgactaggaagaatgaccgccaccgcgagcttttcctaaaaagggctttagttattttctcaactctttcctcttttgtccactctattcttgtgaatacttactttaaacatccaaggacctgaaacaaggagatttaagtatgaaacagtcctaaaactagaaataaagatcgaaaactaccctagaaagcgacccgaaacttagactaaaattagcttaacatagaccaaaattcttcctttctctagtttcatcctaataaattggagaatgatatttctaccacacaacatctcatagagagccctccctattgtagcatggtatctattattataggagaattctataaatggtaagtacttgctccatgatccctcaaaattcataacacgggctcataacatgtcttccaatatctatattatcctctcagattggccatcagattgaggatggaaagttgtactgaacttcaacttagttcccatggccttctgaagacttacccaaaatttggaggtaaatttaggatctttatctgatacaatggacttcggagctccatgaaggcgaacgatctcctttacatacaattttgcatactgatccactatgtaggttgtctaaactggaaaagagtgtgctaacttggtgaaactatctacaatcacccatataaaatcatacaaccctatagttctaggtaatccaaccacaaaatctatagtaatatcttcctatttccactcaagatgtgtcaaaggctgtaataaactcacaaatgattgttgcaatgtgtttggagatcttatttcccaaccgaggacacttctttcactccttccaaatatcaaactttgtcacattagtcggtcaacaaatattgctacccacaatctggctaagaaggcacttcgactagaagaggatacctgttggattagtga

SEQ ID NO: 247366 - DNA, 745 bp, Cannabis indica
atgctctgaacttaaatttgattcccccgtgcaagtgttgcccccaggtgtgacaagggcaatccctgcaccagacaattgatctgtacccgacccatctacgggtaatttctaggtaggtttgtcttcgttgttgctcgactggggttcttgtattggctccgagttgtttttgaaatgctttcttctttgcccgtacactcaactacaaaatccgttaaagcctgtcctttaattgttgtttggggtcggaagattatttcgtactgacccaattccactgcccgtttgagtaaccatccagaggtgtcaggtttttgtaatgcttggcgtaatggttggtcaatgtacaccctaacaggatgaggttgaaagtaaggcgttagcttccttgttgctaagattaggcagtaagtgagcttttccattagtggatatcatccttcagcctcaaccagccttttgctaatgtagtagaccggatgctggatatcgttctcttccttgatcatcacgacacttacaacatgttctgtaatagctagatatatacatagttcttctccgtccaaaggttttgagagtataggaggttttgcaagttttatttttaattcttggaaggttttctcgcattcctccgtccattcaaatttcttatttccttgtaggatgttgaagaaagtgttggaaatattttaccaggatctagatttattaccatgtatgtttcattaacatccta

SEQ ID NO: 247367 - DNA, 696 bp, Cannabis indica
tttattttttttttctgtttttgttttttgagatgttttattgttttcatttcagtttcttcatttgattatttctcattttgcaatagttttttcatagttttttaatagtgtaaacactttctgtatgaattttttcagtcgggctgttgctgagagtgcggcaatgctcatatggcgcatttggacagcacgtaatgatcaactatggagcaataaatcaacaatagttttggatgttattcggtcggcaaggactaattttggcaattggcaaaatgctcaatcacaagggtcatttccattactcaatgttaatattgggaatgggaaggagcattggacaaaaccactttttacaaagttcatcgaaagtgaaaatcggtttggctttgggttcatagttagggactcggctgggaagcttgtccaagcagttttggggagtaaaattagagtggtcgctcctgagattgctgaggtggtgggaatgaaagaagtcttgagttggataaagatgaagaacgtaactgatgtggaaattgaaactgattctttagtcactgttcaggctatcaaaggttcagttcaaatgccatctcagtttgggttacttattcaagactgtcgttcattattatctgagttacaagatgtttttatttcttttgttaaacgatctgcaaatagggctgc

SEQ ID NO: 247368 - DNA, 1409 bp, Cannabis indica
tggagctagaagtatcatggccactagagagtttatccgggatgaatcttgtttcatgattgggaatggtgatttggtggatatctggaattccccgtggctgcccagttatggtgggagaggtatgaagcttccttcaatccaagaatccgtgagaaaggggtgcggattagttccttatttaccccgaaaagtggcggttggaatcgggaggcccttgagacttggtttttacctggcttggttaaagatgccctcgaggttcctaggcttcctttggtggcgaaagatgagcttttttggaaatcagctccggatggtctattttcggttaaaagggcatacttggctcgcactcgagatcggggtcttcttgagacactttggagtgctctttggaaagtttcgggtcctgagaggattaagattttcctttggaggcttgctagagacatcctcccgtttgggtgtaggatccaacgcattttcggtaatagttctcaatgtgtgctctgtaattctggggaggactcggctcttcatcttttctttcgctgtgattttgccgttcaggtgtggagatcgggcccatggggtttttgttcagattccatggcttttgatgacaatttggacttggtcaagtggttggtgaatccttggggtacccctttgagcgggagtgacattgctaagttctctacttatgcaatctctctttgctttgtgatgtggagggctagaaactcagcgttccatgaagggcatactccggtggtgcctaaaattcagcatgatatctctttgatggtggccgattgttctgtttttgagcctccttctttggagcagcaagggcaggctcttttacaggtggaagacatttggggaggacattggactgatgtcaatgtctttgtggatgcggcgatccgtggagattttggcatcattgcgatcttggtgttggatcgatcgggtgtgatgatcgaggctgcaactgctaagaggaaagcttcctctccttttgctgcggaattggaggcgttccattggggctgctgcagaatattgcagtcggggtggcatcatgcctctcttttctctgactgccagcaggttgtgaagggcttggctgctggtttctcgtcggagtggagagctcgtgctctgtttgatgacactctcagccttcttaatcagatgccgagttgctactatcactggatcccccgtcggtcgaactccggggtgttagacttttatttgggcttacattatattttattggttttattaaaacttgggttgattggatagttctttgctgtgttagcccatgttgttggtgatcaattgttaatgggcttagcatctgtgagtaaagtctaggtgaagcagaagtgtgg

SEQ ID NO: 247369 - DNA, 524 bp, Cannabis indica
ctctgatgaaaatctatcaaaatatttgtttgatcataccttaacaaaatgtgtgtcatatctgcaaaaatgtgatgatcaggcatttccacccccgctccactataaaattcctttgaaagccctagtcaagtctaatttcaaacacaacccgtttgatcttactaactcttttcctttagaggagttgcctttgccttatggaaatgtggatcaaagtcttgcggctgctgtaagccagtttcttacaactgaggatgttggtgctggttcatcctcttctgccactcctttaaggagggatgagataatctcttaaggaatcaatgatggtattcctattcctgcttctaccttcttaggctttgagagagtctcatctgatcaaggtttcagccctggccttcgtagtgttgcccttgttgatgttcattgcgatgcttttcaatctgtacctccagcaactgctattgcggtacatattccaaatgatattgactcggttgctgttcaagatgttgctc

SEQ ID NO: 247370 - DNA, 987 bp, Cannabis indica
gagaatgcaaatgagaaaggaaatacaaaccctagatgccatagtcgatcgaagctctctctctctactcttatgattttgtttctctatctaaattctgagaaaagcttctctcactaagtggggttttaaaggagactcgggtagagaataggatgagtgagccaaatcgttttcaatcgtcaactccaacagagggaataaaatcgaatgacctccgattgggattgggagagtgaaatggaggagtcggtgaaaggaagcgtcgagctgttggtttcgacgatctgcgattgggagtgagaatggaagggaatagtgaagatattaacgtgagaatgaaacgattgagattaggactgtgagaaacttcttttttaaatttttttataagaataataagttaacgacgtctaaagaaaacgtttataaaaaaataaggatggttcttttgggttaaatttaatagaatattcttttatttataaagtatattctgttaaaccaagaaaaactattagataagcacttttaaaatataaagatataagaattttatgtagaaccttacctcacttgagtaggtttgaaaaaataagacaaaaaagacaaaaataaaaataatgtataatccggtagtattacttgttttaatcggtttcacaatcaaatatgcacgtgtctaaaaaaatatttaacttatattttaaaaataaaattttaaattatatatatatatatattttaaggcaaatatgtaagtaggttttattgttgagtatatttattagtcataccatattgatgtatttctaaacaaaggactcgggacttaacaattgtttttaattttaaaaaacaaaatatagtttttaaaaactaataatagtcgtttggtaaaattttttaaaaattaggttttaaaaaattagaaaacagaaaacatcaaaatgtatttttaatcttcaaaaatattttttttttgtc

SEQ ID NO: 247371 - DNA, 921 bp, Cannabis indica
aaatctatacgcatttttataggaattcacgatttccacaacttgctctcaattaatcaatggcggatgtgattgacagtcttccaaacagtggtttgggtttcactctacatggcaacgatggttctactcagacaggtaatacaacgaaaaggagttattattgatagagggaaatgaaggatttccagtttactctcttgcaaggaaaacctagtatatacaaagtatttcaaatcaggccggaacaatattcaaattgatttttctctctatttcttcctcgtttgggcttattggagtaatagggttagaactcttgttgggatttgcattcattttttcctactgtgatggtgtcgtcaagctacccaaaaagatatgaacaaatgagttgacaaaggtagttaggcgattgatttagatgaaatatgctacactacttggttggtttttcgatagaggaagaccagttgaggatggtgaataaccagccacttcacgaggactgtccaagtatcaatttctacattgcactccgtaaatctagttgggtttttcagattagaagttggtttgggttgtactggcacataatggctgctgtaaatggcagtgtggagcaggaaatggttatttttttttattattcaaatggctttttgactgatgtagtactaccattgagccacatgagatttttgttactgattatcacgaaacatctattgcattctttgatgttgagagaaatagaccatacaatgaggaagagcagaaaaagaaatatactggtgcagcaacaagactttgtacttggacatttgagaatgggttctcaactcattcaccttgaggacaaggtggaagtttgggtggctggtaatgttacaccttaaaatattagtctcattagtataa

SEQ ID NO: 247372 - DNA, 1079 bp, Cannabis indica
aggtaagacaaatctagattaaaaaaaataaaaatcataattcacaaacaacatattttaaatgcatctaagtgacaatttaagttttagattaaaaattaagtagaaaaaaaactaaaaaatcccagcaatattcgaacacatattttgttttttttgctaattagcacgtaaaaaattacgaacactactgaatcaacaaatcccataaatataaacattaccaaaaaataataataatcaacatttttaaccctaaaattatgacactaccatattatatcccttaaaatatacgacttgttaatatctcccaccaaaattttttacatttacagaaatttagtccttctgtttattaggtttggttccattttgtaatttaaatgctaacatgtccttgtaaattagcaactttgacaactatcaaatcgtactctttccaaataaaaataagaaagattcaacatttttttttttttggataattttaaaaaaagtaatttagatcttaaaaaaattattttgaatgattaagaaaattaaaaattaattttttgtcaatggattcaagaagatcgtaaatgagcaagatgaacacaagtaagagttaatcaaagtaaaccagtttgtgaaagaaaatttgacaaagatgaaaacgaggattttatagtggaccctctttcggcggtaacaggctaatccacttagaatgttattgatctcaatgcttgaggagagttctccagaattatgttctccaagaattcaatccttaagtgagtttttagaatgagagaatgggagctcaagagaatgatttcatgagaatcaaaatcggggtcattttacaggtcacttcactccccttatatatgttttcatctagagtttaaaatctcttaaccacaggaacaccttcctgtaactatggtcaggttaagtttaaaatacaaaaatcacatttcaaaataaatatctaaaaaatgataaaagttgaatgtgtcttccaagtcatgttggtgagtcgtgagagacacgtgtcaagttgaggctcctttattgggttgaggtgatgg

SEQ ID NO: 247373 - DNA, 480 bp, Cannabis indica
aaaatatgaaataacaatgcttggttattttcatacaacttttatcacatgtccatctatctatcaaagttgacaacgtactctccactcacatcaaagactttttcttgtcctattaaatccaatatgacaaaaggcaaaatacacatccatgggctcacctactagacttagaccgcccatcaatgtacaaaacatcactaagctaactactaggcctcatcatacattgtagaagctagacatgacttctaaaaactaatatttataaattgaggcatccttaaacagattaaagttgagtaggtcctcaagataaaattacatatggcttgtttacaacaagatatattaattcatacacgaaatttggtcttcaattattcttgagagcccaaccctttacaattcaatctaaactaactactacaaacttatgccggcccagttattctcgatctaaaatcacactataggcac

SEQ ID NO: 247374 - DNA, 639 bp, Cannabis indica
ttgaaatcagtctgaactgttaagagaggaaaaaaaaaaagaaaacaagaaaaaatcagtctctgaagtttggaagagagagtagttgtacaatatgagactccttactcataacatgctctcctctaacatcaagggggtcaccaatggcttccctctccggatcgaaatggtgaaagtggtcgagaaagaggttgaactaaaccccgattttctcaaatccatgttctccaaaattgactggaaagccctagtcgaggccgctcgctcaatcggctacactgagctccccaacgaggttgatccttctatgctcgactccgacgacttccttcgccgttttcaccacgccctcctccaacttcacctcgaagaaggcgccctcatctgccccgagactggtcgccggttcccggtcaccaagggaatccccaatatgcttctccacgaggatgaggtttgattggttttaagccacttttagtttggactcactgggtttgaggactgtttctttttccatatacagagtaggactcattatttatttatcaatttttggttaaatctgtatcaaaattaaaaaccttgttctataaatatgtgtttagctttttcgtttctttgtttactattcaa

SEQ ID NO: 247375 - DNA, 1203 bp, Cannabis indica
atttgatattatgaatcattatacgtttgttgaattgcctcaatgaaccttaatgttatgtgttcaataatattcatttaaaattgaagattgtatgcgtcaaagattataagatacgtttaaacttttttatacaaagatacatttaactttgcatagaacaaattacttgatgagtatggagatattagtgctcatagtgtacttgttcaagataactagccatatttgaggttgttgggacatatatataaggaccttgtgatctcttgctattttattatactaattgattatagtgcaatttacgatatatattttgagttatgttttagtttgttactttctttgctagtgatatggtttgatttttagtgatgatattctttataaattagtatgactttatattatcatatataaacacatatttttagatctaataatcattaaggttgattatattaaggtaagtatttgataagtaaggttgtgtctgctcataatcactacactatctaatgtgaaaacatgtataaattaatatatattcctctaaaggccattacttgatattagtaatccttacaacaatcatgttagctactcaagcttacacgacaaacatgttagcaactcttacaacccttataacaacccaatctcatgcaacaactcttacaacaactcaatcgcataaaacaacaatttaacaatccttacaacaatcatattagcaacccaatctcatatcaagaccatattagcaatttaatcttataccgcaaccaagtcaacaacacttacaacaactatgttatcaatttttataacaacttaatctcatacaacaatcattatagcaacccttgcaacaactttgatagtaacccttcaataaccaggttagcaattcaatctcatacaattgatatgaattgctataaagggtgctatctgtaaagaccgcttaagattaacaaattggattattaattaattagggtttatatatgagatttaattaatatttataaaatgcatgttgtggaaatataattaagttcatatatgtttattatgctattttatgtaaattacttaatttctgtatttgtgttcggaagctgtggaaaacgacgttgggcctttagagagtcacattttatatgtttaaaattttattatcgggatatcattgtt

SEQ ID NO: 247376 - DNA, 644 bp, Cannabis indica
tcatgttctcccgctgggtcaggtggacgaactctttcctcttggcgcttctgaccaaccgatcaaactgagtggtataaaatggcagaggcgaattaatagtggctggtttgttctcctcccatcctagttcagtatctcctattattgttgaagctcaaacccttctttcagccctcacctggtgtcaagcggcaacttcctctagctagagtcttttccgattgccaagtcttggtaaacaaaatcaaacataaatggaaagataatagatcctctctttcagattggatttagactattgtttcttctttgtctcattttctcaatgcctctatcgacttcatccctagagatcaaaatgttcttgcccataggctgacgaagagagctttggaaacaaatggagaatatgtttggaattcatgtggttccaatgtttcatttttctgattttgtgtccgtgttttccatttccttctctttttttagttacagatcagtttccaaaaaaaaaaaaaagttaaccgtttgaaatttatttttctcttcgtctggaatctaaactaaagagtagtaaaatgtgatcgagggaatcttcaaggttatagctatttgctatagccatgtaatcttagattcag

SEQ ID NO: 247377 - DNA, 1023 bp, Cannabis indica
gacgacactataatcatgaacaaatatatatttatatatgttttgaacttaatagaatttatacatttaatataatgatgaaataaatcatgtgaaccatgcaatataaaagcgatttttgatctttattaattaatgaatctgattatattgaaatggattttatttagggcacaaaacccaacagcttgctgccaaaaaaattgtgtcaagtgttcatattagtattttggccataacttcttcaatacaactcaaaattagacgattcaagatgttccaagaagttgagaacaggatctacaactttaattttgaactccaagtctagttctacctttaaagtcatcaaaatgtgcaattaagttttgtcttatcaatttgagctcgccagcttccactattttctaccaaaatatgctaaagtctttctaaatgactccaaatgtatgattagtattcaaaatagtccaaaaaaaaaattataatcacactgatcaataatttaaagaattaatttaagaatatgaatacataaattggttatatttataagacaacatatcgacttatcaccaacctggatgacacccatatcatcatacctccagttgtgaatcttcccagaaaacaataatgaagcaaaaaatgaaaagaaaagttactcggtatctaatcttggatggggttatgtacatacgtggttttttaatgccactattaagatatgtcaccaagaaagaagtcgaagggctattagtagaggtgcatgaaggcttctgcgacaatcatgccagtggacaaaacctatccaaaaagatactcagacaagggtatttttggcctactatgactaagaaataaaccacaccttgctgacagaatcccttgacgaaatagaaaaaagaagaggttaagccaacttaaagatgcatgcctaccagcaatatttttcttttttcaggtacttcaataaacaagtcaatgaaaggaaattctctgtaggagacttagtgcttcgaa

SEQ ID NO: 247378 - DNA, 1694 bp, Cannabis indica
tggtaggtataagtaagtcgggctagttctgaacaaaagcggattagatctttgtttagagcttaaaaaaatttgttcctttttaaaattattcattttttttttacttattttgaaaagtatcatactttttaaataaagacttaaaaatatattttttttacgactcactaaatttcaggacgaactctaagtacacgtaccttggttttgtagagcacattccaaagccaagtcgatagctgatttcttatagccaataacagaaaccttcttatctttaatgagatcagaagtggcatctttgtcaagtttgcagtaatcaattgtatgtaaaacttttccttcaaatatctcaggtcccttcttctctggaaactctggcatcatcgctacatctccataccttccaatgcacatcaccacaaattcgaaattgtacagctgccaagatccaattattatcatattagttgttatattatttaatataataatttgtagattaaaatgtaagaatatatgttattatatgaataatatatattaagtgtttagtaaataaattgcgtaacatatgatttatttaatcttatattgtaacctacattttataatatggagaggagttacaagattaattatttttgtaacttcttttagttaatcatatttttgtttaataaaagagatgttacacaaaattgatgatagaattcaaaattatgatgatatacttgttacaaaatggattaatactcctttatgggagagaaatgattaagtgtgtattttgaattctatgtgtgatcacctataaacattataaaagaaggtctataggaaattttctataaaggaaacacattgcttgaaaaccctaaggctcgataattcttaaagctatttcctagagttcccagagatagaggaaataagtttttagacaaaagtgtaatactccctactattctacactcaagattgtgagtgagtgatttttttcttcttcatattatattacatgtattataatcttctcttctacctttcatatatatatatccaatatatgtagtgtatatatgtgtattgtgtaacatatatttaatgaatcttttttattgttctcttattatttttataattgagttgtatatatcttagtttatcttccattataacaatatctctaacattagttaccttaatcatcagtgaatttattaattatttcttttcttagttcaacatatgtgacatgtacataattgagtacgtatatatatttacataatttggtcatacccacatatggttttagacttttttttttaacaaacatatggttttagacttagattaatgaatatacaatcaataatatggcgtaagctgctaccgctcgtacggtttgtacgtaccgcgtttgtgtaaaaaagcaagtaacgttatatatattttgtttgctaaaggagtgccgtaacgttacatataattgaccaattcttagttttgcgattaaaaaggattaattatatgagcattaattggtattataggtaccatatatggtgtccaaaatcattctgatttaccctattggatggaatctgataatgatttgcacgaataacaatatatatgatgtagtaccccttaacattctctacttaattatataccttagaaaa

SEQ ID NO: 247379 - DNA, 776 bp, Cannabis indica
attattgatagttttgcagattctattattaattgtaatctttatgttattgttgaggagaaataattgaagtgaagatataataaaatatatatatatatgtctagtcatcgcgcatacgctatatttattaatacgttatatgtcactatctaatattgtaatttaaatttaaattaatttgtatcatttaaaaaatataaaaaaatttattattatttttttagatgaattttactacaattcataatcaattatttcaatatatactcaaataaaagttgcttcttttaaaacttgcaaaacaaaatttctagaagcaaaaattttcaatttttttttttattgttgttaatacttttaaatttcggtatttatgctgacgtggcacatcggtatttgtacaaataaatttgttaaaaatatttttgtaaataaaatcaattttaagtataatattgaaaaaagaaaatttcttttttaacccaatcacatatctaacacatgagctaactcattatctagtcataatcataacttggcaactttatgagttaaatcattagagcatctccaatggtagcattctttgaagatgctctatatctccacatcatccaaaatataatattttattttatttttcttccatatcatttttggcacctttacttctaaaaacactccaatggtataatacttttttaaaatgctataattatgatatcacacattattatatatataatttttttttctttattaaactattatat

SEQ ID NO: 247380 - DNA, 1903 bp, Cannabis indica
aaaaagtttggccggtttgggcgagttaacccgacaaaactgcccaaaccgttggtcggtttatagatttttctttttaaattgggcgggttgcacttaaattttagcaacccgaactttaaattgggttagaaaatatataggataaaccgcccaaaccgaccgatgtacaaccctagtttatcttacttaaaggccaattattaatacaatactttgttgcctcttcgagagttggccggtctccatgttagaaatcaagtatcaaagttgcatatggtatccagggtcggccctgaaacaaagtgagtcacagaaaaaaattttatttttgggctcttatgttagaaaaaatgtggtattttttaaaattagtaaaaaagaatataattttaaaagggaaatttttttcttgggcccctggactaggtgggccctaggcacaggcctagcccgtctatgcttagagccgggcttgatagtatcttatttagctcttcttgaaaacaaattaactcataaaagtaataaatcacttatcgatcagatgatgaagtaacacaacaatttaaacctactcatagagtctcatccacacgtatttcagtatgtaatttttattttttacttgaaagaaataatctatttttatctcattagtcacattagcggggtgtggataacaaaattcactaaaaaaagaaataaagactcgatgtgatttattactttaaatttatatctatcaaacaaatgtgattgtagagtcaaataatctgtgtacaagcgatgtcaaacacaattcgtatggtcttcccaatttagttttttggtgaaaatttattgtttattattatgtgagttgtctaatgttttcttacttattgttaggcgctccgctaataatattgttcgttgtattgtaagtacatcctgttattatttaggatataatttgatttactacatttgattcaaaaaaaataaataaataaataaataaacaaactaactagattcaataagatgtttctttttggttcttcactcttccggggcctaacgatcaaaagttaaattgaaaactacttctttttatattcattaataaaaaaatacacttataattatattttattaaaatatacctattttatgagtaggttgtctaatatacttctactctctatttaagtctaattatattaacttaaagggtctaatgggaacatcatctataaatatcttaaagaatatgaaaattgaggtacaaattataacaaataaaataaagtgggtattaaatgtaatttcttaaaaaatatacaacaaatgaataaggtttagttaggactacccaagataattggggtcttgggtcaaaaaaaattaattgtgcttttttgaatgaaaaatttgtgatttttttttttcttttttggtatatgttagtaaaaataaaaaatatgatatttttgaaaaactagttgtcgttttctttctttcaagaaaaaaaatttaaactgtagcagcattttttaaaaataaatttggcctttttgaagaaatgaattgtaatttaaatagtggtatatatctaaaatacagtacttttgaaaaataaattagggtaaatactattatagactatatgttttgtaaaaattataaattagattggaccatctgttttgttaaataacaaaatagaccttgtattttctaaaattgtacaataggaccctaaactgacttttgtcaaaacaaaacttaataataatctgatctagagatgttatgataaaactggttatatttctgtatctgttcgtgttagaaattatttaaagttggctatattaaaaaaataaaattgttaaaaattgagtttagggtcctattt

SEQ ID NO: 247381 - DNA, 696 bp, Cannabis indica
aattaaagataattttttttgccgcactcgatacatttgtacttcattccaccatctgtcatataattttattttcttagagagacgaagttgctttattcttccttctttgcagttctaaatatactgtatatgtatcaattaatcggagtaaaatcataaaaaaaaattgtaagagtttgaaaattattaattattattggttattgatcttgaatatagattattaaaagatttgaaagttattaatgtaatcagttattgatcttaaatacgtgttattaaaaaagtttgaaagttaataattgttattagttattgatcttgaatatgtattattgaaaatttaaaagttattaattgtaattggttatagatattgaacacgtgtttttgataaacttaacaagaagggattgaagtttaatttttataaaataatagagttttattgtaaatattataattaaatggtaattgttaaaaaaatataaagacttaaatataaaaataaaattattaatattaacttttaaaaagggtcttattaaatatttaaatgaaagattaattattttaagaaaataatttattatagttaatttagttttaaaaaaaatttaaaatgttgttaacatgttattataggtaaaaaaaatataatcatcatgatcaggggcagacccacatagaggc

SEQ ID NO: 247382 - DNA, 1134 bp, Cannabis indica
aaaaattttagatatcattttgtaaaaacttgtcacacaagttagtgggccgaattctacttaaaacttttttaagtatagacttaaaaatcaatgtacaagactaaaaaatgtaaataaaccttcatgaagtcttgccttgagtttcttgagtcttggaatccacttcgggtcacttttgagaattttggtagaattatcatttttccctttaagttaattttgccttaagaaaaagcttaattgtctttgattatgctacaaaattatcaaataattagtcacaaataataatcaaatatttgttaatcctcaaaataaggagactttaagagtttgggtcaacaggcaagtctggaaagcttgtcaaaattagttgtatattttgtaactgacattgattcttcttgaaaaaattgtgtaaactcccttgtctttgtactacagactgcatcgttaaaatatttggcattaaataaatcttgaaactcatctcgggcaatcactaaaacatctcaagtgagagatactctatcccaccacaccacgacatccttgtgttacaatatttttcaaattacttttctgacctttgctaatcaaagggttttaatgaaaaatgtgatttatttaaacttttataataaaataaactttactttattgaacatatttattaaaattttgagggatcctgcatttacttttaaacttttcaaaatacattataagaaaaaaaagtgtcacccattgactagtcctgaagatttgaaccctctagtcctaaccatttggatatgtacaatcaccaacgagctccagactcaaagttgcttagccttttctttacttttacctacacatgaaactatatatgtgagtcgatagattcaataagaaaagtagaaaacatataatttgtctctataactcaacgcgcccagacacccagttacaagtttgacccgcctccaatgcatataatgagtcttgaacgttgttgacaattgtacatcctctgtaccacatgcacaaagtatctttctttatactagtgttggtagggtttattcccacgtgtgagtactaaactaaatcactagaccacatcaactctacatctttcagtaccat

SEQ ID NO: 247383 - DNA, 643 bp, Cannabis indica
ttcttaaggcgctcccctgccactgagagacagctaatgtctcgtagcatgaagtagcaccatacaacgtctatttgcagtattggaggattgtcgataaactgaaaatggcacatatccaaaaggtgaaaaataatttaaagacaattatgatatttaccttataagatgagtataattgcataagagtccaagtggaaatgtacaatgaacatgtgtaataattttatatctagcttgaagccagttcagataacagattgttctttttacgaaaatcttcagaaattttttatcgagattcattattacacttccctgatccataatacaaaggagattgtaagaattcaagaagaacattaacattgtttccaaaaagtcattttgtgtgcaaatcacgcggacgctgaattccgttctgtcaataagtagctccatcaaatgacttctataaagggagtacttggagaattttgtaatctatttcaaagtgtagaaacttaacgcatgatcgggtacgtgaacaataatagccaactcacctccatgaccttcggatcacataaagagaatgcctcctggaagaaagggaaaaaaatggaataaaagtcgtcttagtcacattataataccaagtaaa

SEQ ID NO: 247384 - DNA, 1695 bp, Cannabis indica
aggttcggtcactttaactttcacgggctaaagatcctcaagtaaaagaatatgcgagacctcccaacgattaaggatatcatcacagtctgcaaaagatgcatgcttaagaaacaacatcatcaaccttttctgtcaggcagaacttggagagccaaaaagccattggagatggttgtacagatgtttgtgggcgatgcgcactccatcaaatggcaaaatagctacttcattctcttcatcgatgattttactagaatgacatgggtttattttttcaaacaaaaatcacaagttttttatattctcaaaaaatttaattcccgtgttgaaaaacaaagtggtcactacatcaagacaattagaagtgatagaggtaaagaatacacttctaatgaattcaacaagttttgtgaagatgaagggatgaagcactaattcactgttggatacgcaccaaaacaaaacgacatattcgaaaggaaaagtaggactattgtatggtggcagcaagagccatgctactagagaaatgtctcccaaaaagttttttggtagagacagtaaacactgcaatctacttgctcaaaatagatgtccaaccaaagttgtgcaaaataagacgccaattgaagcttggagtggacgtaagccaccaacaaagaatctcaaagtcttcagttgcatatgctacaattgtattctaaaggagaaaagagacaagcttgatgagaaaactgaaatatgaatcttattaggctataatactcaatcaaaaggttatcgagtctataacttagaaacaaacaagtgtataattagtctagatgtaaagtttgacgaagatgcttcatataattgggagacacatgaagtcgaaacaaagacagccaatattcttctataccgccaagataagaactgatcaaaatgaagtttcaactcaaccaaccatagatgatccaacacaatatccttaacaagcccactagcagagaaaaacaaataatttattccctttttattagggtaggaagtaaacgtgttggtaggagtatcctatattacaataaatttttcaactactatcaaattgtaatgcaacatcagatcctattatgccacgccaataaattaacagctaaatgttaattaaagacctaatggttggggcacgtttctatacttgttatgtattaagggattttttataagccgtatattatagagggtacgatttgataattacataaatttaagggatataaaattgctaattactctatattaatttgtacatgcacttataacagatataataaaatatatttttcttttgagtaatttgcggtataaatacctaagtttaactcgcagttacaaataaatacctaagtttaattttttgcgacaataatactaaagttataattctggaacttttgttgatacctagctattaagtattaagtaaattgccacatgtcaatttttaattggtgcaagttatcaaattttattttttcgaaaaaataatttaaatataccaataagaaaatgacacgcagataatgacttaaaatttaacaattaggtacctacagagttcaaaaaatataatttaggtattattaccaccaataattaaactgaaatatttatttacaattaggaattaaaattaaatatttatac

SEQ ID NO: 247385 - DNA, 1498 bp, Cannabis indica
ataatgtactttgatttagctaccgaaatgtggaacgatcttgctgaacgtttcaatgagggcaatggccctagaatttttcagttgcaaacccaactcactcggcttcagcagggtgattcttcggtttctgcttatttcaccaaaatgaaatccctatgggatgagttgaaagaatttcaacccataaccacttgttcttgtggtgcaatgaaaattttcttggattactacaaccaaaaccaagtccttcaattcttgactggtttgaatgaatcctatgcctcggttagggctcagattttactaaatgaacccatccctaacctatcccgagtttttgctatgatcattcaagaagagcgtcaacgatcccttggatcttctgaaatttctccttttgctgttgcttcaacttcaaccaatcccccaagagccaagaagcctcggccatcatgttctaattgtggtaaaccaggccatttggttgataaatgctactttttacatggattccccccggctatggtgataagaagaagcaagacaagggaaaagggaaggcaaatactgcttccacacacaacccgaaacctgagattgataaccagattacacatgctgatcttacttctcaatgccagcatttaatctcactactcagccagcagctaggacacaccagcaatgctgtaaacccagccagcaaccctgcagcttcgaatcatgcaggtacaaattctcattatttttcttggataatcgatagtggtgctactcaccacatgtgtttcaacattaaatgtttttcctcatttactaatgttactttccctaaggttgttacattaccaaatggacaagatgtccctgtccaaaaagttggaactgtcaagattaataacaacatcactctacataatgtgttgtatatcccacagttccaccttaacctcttttccattaaagattttatgcttcataactctaatgatattgtgtttcatcgcaattcttgtgaaattcaggatcttactctgaatgtggtgattgggatagctaaaagaagtgggaaattgtacttgattcaacaagacaacccttctgctacagccgctgccattttccctttttctttcaataaaaccaatgtaaaccaatggcacaatcgccttggacacccttcgatgtgtatttcaagttttttcaataaagaacacaatatttcacatcaaagttctattaaacattgtcatatatgccatttggccgaacaaaagcgcttacctttcatttccaatcacaatttctccaagaatgcgtttgatttggttcatatggacatttggggaccttttcatatacttagtgtggaaggttacaagtattttctcactatcgtagatgacaaatctagatttacttggctttatttgctcaagaataaatccgatgttcaaaatgtcatccctacattttttaacatggtttgtaccca

SEQ ID NO: 247386 - DNA, 778 bp, Cannabis indica
ttttttttttaaaaaagaaaatctaaaccattagccacacataacactttcaaatatctattattatacattttttattttaataatcacaataactttaatctaaaatgcataacactttcaaatatctattattataaatttattattttaataattacaattactttaatctaaatacataatatattaatatttgatcatcacaacatccctaaacttaaatgaataattatctccctctctccagccgctctcttcatctttgtatcgcttcatttctattctctctacttattaaaaacgtcatacaatacataacgaatcttcttttaacaacaattttttttttcagttaccttatattttattatccatcactttaaaatttatatattagtttcttattcattcttttgattgacaatatatcattacttatttatttaattgttttaataggtattgacattaattcaaaatagaaagtggtatgtcacattttcttcatgcttttttttaccattattaacttactttgttggattttttttttccataaattaactatattttttccttttagaataataaaaatcttatattattttttcgatgataatgatacatcaaaatctttaaacatctccaagacattgtgcaagtcgttttgctgtgttcattaaataagcatatatttttttttaaaaaaaacgaccattaaataaacatgttggtatgtactaaggggaaagaatttttcttttgtttcccatct

SEQ ID NO: 247387 - DNA, 609 bp, Cannabis indica
catataagcttataccttcatactaacacatatatccattcaattatttttcttttttatttgattactttttataaataaaataaaatattatttttaacttttggacaaataaaatttaaagataaatacttatatagacttacttaaaataatttagtttttaaaaatagtttgtaatttttgaaaataaaaatatatagaaatgtaaaatagaaaaaataatcttaaaaaaatttaatctataaatatataaataataatgtttttaacaattttattaacaattataaatttcatatttttttcacaaatttattgaatgaagatacaaaaaactcatctctaaagtacaaaaaatgcttaattcattccccgattttaattatttaaaaaattgagactaaatttatgaaaaactaaaatatataataacaaaaacatttaaatagatcaataaatttgtaaaaatagtgatgttgcccctgatttcgcccaatatacgtggaccaaccggacagggacacgtggatcagataatttataaatatttgctaagtctttgtatgccactaggaaacatcctgggcataggtcccggaggaggca

SEQ ID NO: 247388 - DNA, 1132 bp, Cannabis indica
tgttaaatataactgagaatatttctatgccacgtattactcaggtattggcccacttcaataattgttttaaaaaaatgttaattaaatttaaaaataagaaaaacaattacaaataaattattatttttataaatatttgtaaataaattataaaaacaaataatcattttttttcaatctctcgatccctgccatttctagctaaaaaagaacaaaagaaaaaggaaacaacaatgaaggattagtcatggacgcaagcagaacatgcagaaatgagcaagaaaaagtgatctgccatggacgtcggcaaaacataaagatctgacatggttagtttaggctgccgggaaaaaaaataagaggatatgtggtgcctcaggtccgagattgaagcgagcaagggagagggtgaaggaggtctgtttgagccgcagaggaaggcagagggtggtggctcgcactcatcatcaatgttcatcgatccgccattgatgccaacatgaagaaaaagagagaaacgtgactgaaatttttgaggtggaggatggtggttgcccttgagtttttgggttctaattgtttgatgagtttgatttatggtttttgttaggtccttttttggcaattcagttgtcaaaatattttttaattaatgtgtattttattaagcattcaatctgtttttatcaactctgaaccctttttccagggggagttgtgtttggtacttgtgaactactttgaattaaaagttagcatgttattttattgtttttgtttttcgagtgtgatactcagggggagttgttatttgttcttgctaactttaatttgcaggtactttttgttaaaaaaaatattttgttcatctaaagtgtcaaagggggagattgtaaagtctttttttggcaagttagttgacaaaatattttttcctttatggtaagattgttttgcattcatacccgatttcttaccttgtatattcggcttttagttgctcttttctttgttaggaaagatgcacttttcaagtggactttcttggtttgaaaacttcttgtaagagaagcaattctcttatgggaagttggttttttaaggaaactttgattattgccttttcctt

SEQ ID NO: 247389 - DNA, 1093 bp, Cannabis indica
aagctaaggtatatataatgtcaaaaacaattttaaaaaattaacttaaacttccaaaattaaaattttgaactccatctaacaaaaaaaaattgaatttaattgtacttgttatttttgttaggggccaaatttttaagattagaagagggcctccaaaatatttgagacgaccctatttttgatatagtataaaaaatgatattttttgatattactttaaattaagtagttaaactaagcgtagaaattcaaatttctcttttattattcgttattagatcaaaatttgatgatttaatattttttaaaaatatatctatattaaatttgtttagtaaccattcatggtatacccattaaaaaaatgatccatatatatattaccgagaatacaaaaactctctcggaagattactgaaaaaagaatgaggagctcgatgaagtttggcgatggactaaaaaaataaatactatacaaaaaaaaattaaaatattatatatacatatttaaacaactaagaacctttttgacaatttaaataaaaataattaacctaaacaaaatattttacaataataatttcataaaaatttaaatcaaaataaaactaatatctaaatgattaacataaatcaaacatttcttgtaatacctaaaacccatacttaaacaattaatccatacgaaataattttttattacctaaaaccaattataactaatcaattaatctaaactacatttttttttataatacctaaatctctgaaactaaacaattaatttaaaccaaatatttttataatacctgttaagttattttttagtattatttttaggttaatttttagtgtgtttttaatttagttctactcttgtttggagcaattttatgctttttatcttttatttttgcagatttaaaatagaagaagattaaaaaatatcaaaggaataagattgaaaaaagataaaaagatctcacaataatatgacctataaaatagagaacaatgtacaaaaaaataaagccgaaataacttcaagcctaaattcgactagggtcttatcagattttgaagaaagtca

SEQ ID NO: 247390 - DNA, 1792 bp, Cannabis indica
cgatctcctcactcattctaattattctagcaaattctatctaaagagaattgagagagcgaggaagcccgaactccaatactgaagctattgccgggattgaagttcaaagatcaatggctggaggtatttttgatctttcattgcatatgtttacgatatgtttatattattttctgcattacatatcgtatatatatgttgtatttcatgtactatattatagtctaacaccataaccaattttgaagaaattacttcttaattattattttattgaattagtaacgtgtgttaaataaacaaatgtactaaattacatatggatggtttatcttaagctcatggtataataattacgacaaatataataaaaataaataacaaaaataagaaccttatgaatagtataatgagtttaattatattattttgacttgtgtttgccaagaaaatatactaattaataatctaaaaattgaaaacaagcatctacacatttgtagagagttctattaaagcacaatactataaacaagcatctatttgaaaacaagcaaaatccaatcaaaacacaacactataatatatacatatgctaatttaaattatattttctacaatatcacaatcaattgactttatagagaattctatacaagtgacaacatacatattatgcacacgaagacagcaaacaagacatattttcttgattcgagtccaatcattaatgcaaaataagtgaaatacatgtttacagtgcttcagtttaacaaccactttattgatttcgaataatcattcaagacagatagcacattcatcatctttaagattatttcttgtactattatgtttcctaaaaaaatataatagattaataatatgagattacttcgcatgatcaatatatattatgagaggttctccatcatcatggcgatgatcatataactaataatgatgtaagtattatatgcttgtcgtaacaacctccatatattaaagattaaagtatcataaatttctaaaagcatattaattaaatttaaatcattattaatattaattgtacggcacatatctaattaatgaagtaataggtgtaatgtatgataatgctaaattaaaagatttaagttttataagtgatagtttgttgttattacaaattgtaatcaatgtgggagtattgctattgtcagtaacaaccatattcacgtaattatacggctaataattttgtatcattgtatagtaagatcttgactttttaattttcatactatactttaaaagtttttgcttgtgacaccctcacatattatgaaatactatgaataattacataagaaaaataacttcaaagtctccaaaacaacaagtcatcacactatattttgcatcaaaaactcaaaaacaggccagttctccatcaaaaatgcctattgggaggaacaatctatcaagttttgggagcaagatgtagtttagaagtagatctagtaaaattaattaatgatctttttatcttaatcacactcattacaaaaaatcttacttagttataataaaacttgtaacaaaaagtaaaattgttgtaactaattataaatcatcattcttatgttgtgactaaaatgtctgtggctaaaagtattagtcacaaaaatcacaatttattgtgactaaatgtatgtttagccacaatacgcgttgtgactaaaactaaattagtgacaacttgtatctaattactgacaacttctatctaaatactatgttttag

SEQ ID NO: 247391 - DNA, 564 bp, Cannabis indica
tttattattattttaggatttttatttgtgctgttcagtgtcagatatcaatttgagattttattcatcgctctctaattttgttaaattttatatgttttgttattctgtatgcactattcggtgtctagtattatatacttgatttttatattttttaacgattgtctttttgttgttttgaattttttttaatgtatttagagtaaggaaaaattttccaaggtgaaggttccctttcatgatgttatgaaagtctccactggcaaaagagttattgaggtataacattttttgtaattttatttggttaatttgtttttgtagtttactagtgttttacaattgttttagttgtatttttatgttattgttctaattcggtgattgactatgtactcaattatgcttctcagattttgatatttacctaattatgcccctcgaaatttgaaaagtaccaaattatgcttcctgaactttgattcatgttagacttttcttactaaaattggacaaaagtctttaaatccaacaatctcaataatttaggggaatttttaa

SEQ ID NO: 247392 - DNA, 1205 bp, Cannabis indica
ccagctccttctctgaaaaaaataaaactgattccggttattgaagtagctgaagactgctgattcagccttcatccacggcccataagcgggaactgcagccccctgaggtggatacgcataagcagttgatcggaagcaggcttttttatcatgaccgaggtatccgcagttataacagagcttaggcaatttgaaatacctaaactgaatccattctttcctacctctcttaatatccaagaaaaaaccagatgttagttgatgggaggtatctatctcaacttgaaattttagaaagctccttctagttacggtacgttgatttgccaagtcgcttcccacaaatctccctgctttagctgctatggtacgagtattaaccccattgaggtatggagttgaaaaaccagaagctattacccagaaaatagccttccacatatccacattgaaccaatccccatcctctggccattcacgaataattagtaatttaccattgataatccagggcctattccgaagaatttccttgcaatcttcagcctgatcaaagaagatgccccacaccccgggcttcattgtcttaaacttccagtggcccttgagcttccagatttggttcagaatctctcttagcctggatctggaaacacccttaccaccgaaaaagctgactaatacaccagagttaacaatatcagctgtaagctcgaaatcaggttccagttcaagagtcattgactccagaaagttggttcgcaaatcttcgatgtcttcatttgacttttcagagataccgttggtaggcggctccaccaacccttctgttgcttcattattagattccaccatattaacttcagacaattgaggtagttgagaaggaatatcaccaataacttcaggggccccattatcaaagatattcccttctattaagtttttacgtgagttactattgtccccaataacaaccacgaagagacaaaagctaactttttaagaaagaaacttacaaagaacagtaggaaacgcacaaaatggactgaggagatactaaggaactgatctataaactagagaaaagatggatgaagagaaacagaacgacagtctgagaacaagatgaattgactcatggtcaagatgaacgacagtctttttttttgttgaaaaagactatttattgtaagctactg

SEQ ID NO: 247393 - DNA, 614 bp, Cannabis indica
cagaaagttggttcgcaaatcttcgatgtcttcatttgacttttcagagataccgttggtaggcggctccaccaacccttctgttgcttcattattagattccaccatattaacttcagacgattgaggtagttgagaaggaatatcaccaataacttcaggggccccattatcagaggtattcccttctattaagttttcacgtgagttactattgtcccccataacaaccacgaagagacaaaagctaactttttaagaaagaaacttacaaagaacagtaggaaaagcacaaaatggactgaggagatactaaggaactgatctataaactagagaaaagatggatgaagagaaacagaatgacaatctgagaacaagatgaattgactcatggtcaagatgaacgacagtctctttttgttttttgaaaaagactatttattgtaagctactgtgttagtatatctacaaataattttttgtaagatgatgattcattattattttgatgtttgcttaagattgtgtaaaattaactaataaatggaatggaaaggaaagaaagtggtctaatattctaaaattttggattttttcatgtgtatacaact

SEQ ID NO: 247394 - DNA, 661 bp, Cannabis indica
tactcgaaattcggccatcatttcaaagaagggcactgtcaaattaggaagaatatgaattaatgaatgtaacagtaattatatttgaaaatagaataactcattaatggagaagtaacagagtatatttacaactcgctgactataacgtcttaagcgagataaaaatatacaaacggttgtctcatacgttaacgagaagtcatatgccattggatgtgtaaggcgaggcatcaacctcattacgcatgaatagatgaaggcgagatataatgactgttaagacacttagcgtataatacacattatactaactaagtacaacagctagaagaacttcagtgacggatagcgagacgtccatctcgctataggaaggaatgttttcggtacttttactaatcaacttcagacatctttcaatgagattcatagtatcagcgagtcagttctctcgaacagaaggtgacattcaactaacgttggttgttgaagttcatcttgtcaccaagctcgcagaagtgacaaggctaacattattaacatcggagaagatgtgggaaaaccaaaccttcgtgttcttgcttttttgtctttactatttctattttctgtgcaagtctatcaccatttataggacgcggcgcttggtctattttta

SEQ ID NO: 247395 - DNA, 972 bp, Cannabis indica
aaattaatttatttaggttttttttttttttaaaaatttttttaaattaaaaatatgatttgtaccaataatttgttgacatgtagcattttatttgagtttaacggatcagttagattgagggaccaacggacttctagaaagtgtgaccttaggaatttttaccgccaatttttgaggttgaggactaatcggcatcaacctcaagtttttggggacttttgccgcaattatcccttaataaatttatgaatagtatttttgtaaatattaaatagtataaatgttattttttttttgttatgaaagtataaatgtttattttttttcttatagaagtataaatgtttgttttagatagttttagcttaatataaaaaaaatggattctcaaaaatgctggttcaggagttctctaaagaggaagtgaagaaggcagtcttaagcattcctggaaacaaatctccaggtccaagacaattgggagactattggggatgacatatgtgaagatgtaatttcatttttggattcaggtaaaatacttaaagaaaataactcaacaattattaccttggttccaaaaaataaatgccctaacactgtcaaagattttaggccaattgcttgttgcaatgttatttataagattgcaactaagattttgagtgctagaattcgagacattcttcctgaaataatttctcattctcaaggaggatttattaaggggagatttatagggcataacatcatgatatgtcaagacttggtgagacactataataggaaagctaacaaaccgagttgtatgatcaagcttgatcttcaaaaggcatatgacaccattgaatgggagttcttggaagaaatgctagaaggtttaaacttccccaggaagttcattcacctaataatgaattgtatcacatctcctaagttctctcttatgttcaatggatccttgcatgg

SEQ ID NO: 247396 - DNA, 904 bp, Cannabis indica
aatgagttaataatagaaagactataatgtataacatctttttaaaatgctataattaatctaaatattattatttaatataaattttcgttataataactttttaattttaattttttattaaaaaataataaatagcactaatgttacaacatagcattcatacaaatatttagaataacattctcttctctacaatggtataacatctcaatgttttgccacataatatgtccactttaccaagcatcctctaaaattttactattagagatgcttttaggcatgtatctaacattatactgactaccgatgtgacgtattaagacttattaacagtttttatattttttattaaagtaaaatgtgtggaattttatattaatttgtaccaataataatatgtcacattttctggtgtttggcaccatcagataccgcttagcatttttcaacaatttatcgtcttttcattataaattttttagagcatcttcaatcatgttctatataattaaacataatatttagtttaaatagggagtgagacttaaaaaaataaacttcaatcatataagaaatagctcttttataatagagaatgaatatgagctctctatatattgggagctacaagatttttgttatcttgtcttgaacagtttattgtatactctatctattccgagatggacaaattatcttgtcagttgtccatgttaatagttattgttcttctcgcatatgcttatatagcagcaagtttgaatatttctatcaactgtaacttattgaaacgagttatttaagtcgcatttaatgatgcaatctattattataatcgttgagcttattcatattccttttgaaatcacgtgtcagcttctggttgatagctgaattt

SEQ ID NO: 247397 - DNA, 734 bp, Cannabis indica
agagtttcaaaacctgagaggaggaaatccttaatgtcctgagaatggtgagcaatgaagaaacctgcaagacttgttttttcccaaatttttctagctctggagcatcctaggagagaatgggtgacggtatcttggccgtgagagcaaaaagagcagtaaggagagggaattattttcctggagaaaaggttggaggaagtgggaagaatgtgatgataagcacgccaaatgaaatgtttaatttttggggggatggggagatgccaaagggttttccaccaagttttgaagaaatcccgattagaggttgagggagcagagatagatgaagaagcagaagaagtggctagatggtaagtagtgttaacagtgagatttcctgaagggtgggaactccagatcagggaatctggctgagaaatgtcgatggggatggtgagaatggccttgacaatgtcttgggagaaataagtatggagcttatgaacatcccaattcccagagtcagtgataaaaaaggagacagttgaggttgggggggggggaacgatgggtttgtaagtgatgttttgaatccagggacccagtagtgacggagagtatcagttgttagaccattgccaatcttggaaatgagacctgaagaaagagatctcggccccataaagactagtccaagtgtaggaggggcagtgacctttgaagcagagagaagtcattgtcttgaagta

SEQ ID NO: 247398 - DNA, 765 bp, Cannabis indica
cttaaataatatcaagagaatatattgtattcttccaaaaaaaattatgcctttgaacatacatgatcatcctcatcaagaaaccaaaccaacattataacctggtattacaacagaaaatatccacttcaacaaaaaattcaatcaagacttcttaatactgcatacacagcatattttcccacaatttttgtcattctttttctttttccaaaccttcagaacactttttttttatacaatatttggagatcaaaaaacatttgaacttgtgggaacaaaccccatgcgtgaacattttagctaaccttaacactatgtttggtggaggggagaggaggggaggagagagggagagggatagaggaattgatgaattgccttgtttggcaagaggaagaagggaagggagaggattaatggagagatccctccaaatacacaatttctaatccttccaaaaaatgggggaattgaagaaaaaaaaactatataaaatgacttttctaccctttaaaataaaatatataattatattaaaaatgataaaatagtaattttaatatttattttactctctgtccttccaactttatttctaaaattaccaaacaacacgagagtaactatcctctccatccctcccacttcccatccttttaaatctctctattcatcctactctccttccttcctaccaaacatagcctaagaatgcctattaacttacatcttgcaaaagcacaaaaaaactttcagttctag

SEQ ID NO: 247399 - DNA, 1336 bp, Cannabis indica
taccaatatcatttaaaattacaatatctaatcagcatttcttaaacttgagattaatctcgatggtgaagctattgagattaatctctttcgctagtaaaagtccagtcttgatagcaacaagttctgcatttaacacgcacatatttctttagatgaaagaagtcttggcagagatgcaatgtccctaaaaatctcgaacaactactccaattctgctaccatctacaccagatttgatactttcgtccacattaattttgtaagaattttttgagcagtatttattagttctttaggaaagaaagtggaatcgatttcattgatattgaattatgagtcaaatgattacaatggcagcaatataagtatatataaacagtgtagagtcggttaggacaattaactaacttactgtatataaaattacctaactaacttcctataactaacataactaatttatccacttaagtctaattaggccctctcaaaatgaaatataaaggtttctaatattcattttggatacaatattgtgaaagtgagtgagaaaagaggcttggtgaggatatcggctatgttggacttggaagtaatgtgatttattttgatgttgtcattgttgactttttctcgtataaggtgacagtcaattttcatatgttttgtgtgctagtagtagatatgttttttgagatgtgaacgactgcattgttgtcgcaggacagtattgatggaagcttggtttggatgccaaagtcatggagaatggaatggagccaagttagttcacaagctgcaccagccattgctctgtattctgcttcagcagaagagcaagatactctatgttgttttttggacttccaggagatgagagatttgccaaggaagacacaataacctgagatggatcgcctagtgtccaagcatgctccccaatctgcatatgcaaaagcttgaaggtgtattggttctggtgtggaggtataaaagaagagtccttgtctaggtgttccttttagttattgcagtatgcaattagttgcttggaggtgtggctctcttggagcttaaagatattgaattagtttgtttacagaaaagaaaacatcgggtcttgttatggttaggtatatgagtttgtcaattaagcttctgtattgggtagggctagttaggagttttcttgactcattgttgagcttgttattaggttccatgggagttgaaaatggtttaatacctaggcagccagtgtcttgtaatagttgtagggtaaagggcctttgtgtgacagaaattgtaacgccctaatgctaaggcacgctac

SEQ ID NO: 247400 - DNA, 573 bp, Cannabis indica
tccaactcttccaagaatacaagaatttttttggttgatcttcaccaagcgagttgaataaaaaagcgaaagcgataagcaacagaagttaacagctgatatgcgagtagtaaatcagtcaatgggtggaacattaggttccatttctcgttttctggttaggcttgagcggagccaatcacagattaggatctcgtcccaccaattgaatgaaaatggtgttgaaactatccccagaacgaccattccaatgacgacgaactaaattcttagagaaaaaaaattcagcaaagcacgatcctatttcttaggcatgatctgtctaggacagataaagaaaagccctcaaagaactcggtaccaaacaggcacagctaaggaaccgtgctccctcccaaatgctttcttttacgtgagccacagctgactgcgaagaattctgccacgcaatacgggacaagaggaggcttgctgaagtttcctgaaaaggagacagatgttgattgacaagcaaccatttcccaagaccgcgcaagcagcgcctgtggcaaagaagaatcatcgaactaatgg

SEQ ID NO: 247401 - DNA, 1369 bp, Cannabis indica
taacctcatgtgccacagtcttgtattgtccctatcactgttcttaacaactaattttttttctttccaacaacagttttttcttgcagataataaatgtcatttttgatgtctcccttcattactatcttagaacccttcattactttcattgaactgtctatcttaatagtgcaacctctagatataagttcactaattgaaagtaaatttctcttgagttcagggataaaccggacttcttgtatgagtttgacttgaccatcatgcattctgatcaacacacttcccattcttgagattttgcaagctttgttgtccccaaacagaactgatccaccctcaattttcttaaattcactaaacagttcttttcttggtgtcatatggaatgaacacccatagtcaagaatccaatcacatatgtttcttgacttgtcacaaccaaagcttcagcagactcataaccatcaacggcaatgcttgcatcacctctttcctttcccttttctctgatcaattttgccttgagtgccctacattcatctctgtaatgtccttccttcttacagtagtaacactgtttttctggtttggattttgtttttgatttgtacccttgattatgtcctttgttctgattgttcttataatttgtcttgttgtaattacccttggaatcttttgaatcacttctgcctttgacaaacaaactgtctacaacaccatcagacctctcatcattctttttctgtatctccttagaattgagtgttgccttgacctctatcatggtcaaagtttctttgccatataggatagtgtccaaaaaatgttcataggatttaggtagtgagctgagcaacaagatacctttatcctcatcttctattttcacacctatgttgctgagatccaagatgatttgattgaactcatcaagatgctttctgagttctcttgaatcttccatcttgagagtgtacaacttcttcttcaggtatagcttgttagcaagggatttcttcaggtaaatcaaggcaagcttctcccataatcccaaagctatttcctcatttgaaacttctctcaacacttcatatcccaagctcaacaagatggcactatgtgcttttgtttcaatttctttaatcttcttcttgtcatttcccaactctttcaattcttccttgtcaatggcttggtatactccctgatgaaccagaaatgctttcattttaatcctccacagtctaaaatcattggctccatttaatttgtctacttcaaagcgtgcagaagccatagatcactttcttgattatgttcatgcttcaagaaaccttagctctgatgccaattgttgtga

SEQ ID NO: 247402 - DNA, 824 bp, Cannabis indica
tgaaggcccccggaaaagatggtgtaccgggtcttttcttccaaaagaactgggataccgtaggtaatgaggtaacttcagcttgtcttgacattctcaataacaatgctgattgcagccccattaacgaaactcttatttgcctcatcccaaagatttttaagccaacaaaaatgaccgagtatcgcccgattagcctttgtaatgtggtatataaagttgtctcaaaatgtcttgctaaccgaatggaaatttgtttggatgccatagtttcagcaaaccaaagtgcctttattggaggtagaattatacaagacaatgctatcatcggctttgagagtcttcattgtatgaggaaaggtcgctttggaaatggaaagaaaatgacaataaagttagatatgtccaaggcttatgaccgagtcgaatggaactttttagaagctatgatgaattctctgggctttgatcatcaatggattacaaagattatgaactgtgttcaatcggtctccttctctatcctcatcaacggttcaataaaaggcttcttcattcctaagcgtggtcttcgccaaggtgacccactatccccttttctatttctattatgttctgaaggtctctcttgtttgatttttgaagcggaaagagctgggaaaatccatgggttgaggttcggtaatatggaacaaaggttgtcccatctcctgtttgcggatgatagcctaatatttcttgatgcaactatagaagaaagcactagcttgaagaaagttttggcaacatatgagacactttcgggtcaatgtataaactttgac

SEQ ID NO: 247403 - DNA, 2271 bp, Cannabis indica
gatttaatgacgatagtgaactggtgatcgttgtaaagtacaaaataaagatatttttttctcgattcttagtttcatctttgtttacttttttaatttattgggagacttgagaggtatgagactatgatactatacctgggttatgacatttttttttcttctaaattataaactacaaaagtaaaaaagatacataggacaaaattatcatccaggggcggatgtacacatggggttatagtggtcgtggcccccccttattttttacaaatcatacatagtaattgatatacaattacaactaatatacataactacaaacaataaaaaaaaatactttgaaaagtcaaagcaaaatcaatatatagaaatgtatgtgattgcatttcaaaagagtaaaaaaataatattttaatatgaataataaaacataaattttaatttttaaaaaataaaatattagttaaaatcaatctttataaactattttttttaaaaaaaataatataaatataaatatataatcgagtaggatagggtaggataataaggaagggtacacacccatacccaaccttatacatgtatcaggtacatattttcatacccttacaccttattctataccctaattcaacaggtaattaatatcgtaataccatacacatacaggtagggtacccacaggtaaatagatttttgggtaaaattgtcatttctaatgaatactatcttgaaatggagacattggtcactaaaatttataaacatgaagccttatttttgtacgtgttgcttgttattggccccccctaatatttagtcctagctccgcccctgttgtcatcccaaaatttagacaataaagttataacatcctcaaacaaaacaactaaagggctagaactttaacttgtaacactaaaagacttcttgaaatatctcaaaaaaaaaaaaataccaaaaactaaattatattacaatacaatctacaaataaaataatatatcaataaaatattaaattctccaaactctaccatttaattctatcaagtaaaataaaaactaatgaaatatatatgtatattaattctatttagttaatgatattttgttaaagtcttgcattgtctacattatatattaattcaattcaattatttattttatttaaagtatttatcaactacaattagcttttaaaagtactatttccaacaaattgtcttatagtattttgaacaaaaaggccaaaattaattttaaataatacaaaacttatgcaactctttcttatgcaaattcaaacggagtgaaaaaaaaaaaaacataatgcaaattcttttacttatgttcttttaccttgaaaataatataatgaacaaaaataattattataaatttatgcatgctttaaaaaaaataaagacatttcctctacatagttaaaagttaaaatctgcattcttagtacatctaaagaacaaagagacaaagtcgtagtagtttaataattaatggtagcataatagaacacaaaaatttgtttcaatatgcaacttcatcacattagcgtttcatagaaaaattacaaaagtatagaccaaacacaaatagatgcaactgtacttaatatgaaccttaaagtgcgtaagaaaaagaatggtgactaaatattacttattaattcctcgctaatatgttttattaatgctcatgaaaataagtctattggtgggtaattacttatgaaacatctctatgaaaatactaagtacataatgctaaaatataagaaataaattactccagagtttactcaagtcaatagctaaaacccccatatgggacatctaccatcaccaacttgtatgtcgtcataactggattgcatttattttgaaaaaaaagtaaaataggagataagtaacttatacatacatacaaattatacaaattatgagggtacctatgagaatattagtaagaagatcatacaaaagtttggttcatatttttttcaattgtaaaaggtatatatgcaaagttaaatcaataatcactaatacaatacccaagaaatccaaaaaaagaaagaaaaaagacaaattaaatggcaactgataactaaaaaaaaaaaaataatgattcaaagcatgaaggcatgtaaatacatagatgcaaaactatgcttaaactactgttaagaaagattcaaacctgaacggaaaactatcaattgatccatagtgtgttgaaaagaaaa

SEQ ID NO: 247404 - DNA, 2189 bp, Cannabis indica
actgggttcatttgtttcctccaatatttgttcttcaagtccttcctcgaagattacttgaggttgatcatttttaaataattcattattgatacgctctttctttataaaattgttaattgcaaaacatgcaataacgacatctctttagacatgaaactcatatggggtcatcttatatctagtattagaaatcttactttcaaaactctaaatgaacgttcgatagcatttctaagttgaacatgagcatggttaaccctctcctctttcgttacagcacgcctacgatgataatctcctaaccaatatcgaacattttggtaaggaggtaaaaatttatgggcgtgtggatatgctgcatcacataggtaatacttatctaaaatttatatgcactaaaatattaaattagttaaaatagataattaagttatcatattaataaataatatttcagtaatcacttattttgattggctactatctcttttacaactcgcaaatcatgtgatactccttcccatcatgcataaatataagtaaagatcatgttgaagtcacatatcgttataatattttggtagcatttacccttttctcttcctctataagtgatttgtttatcacgtgagattagcatccactagtgttccaagtgcaccaattgcccctgcaataattaaataagttcaaatatttataataaatattatataatacaattataatttagaaatacaataccttaaaaaattctaatatttttttgagcagttggaatatcagaataaagatcaattgtggttattatcatctcttttgcaaagtgtaacatttattctataacctcataaaattatttgtgaacagtttgtgaagaattttgaaatcttcgtttcatgacaataaatcgctcattatatgctatgatagtttaaaacattgctatcttttatacacgtttacttgttagttttatggtactgaattaggtacacaccaaaagagttaattctaattattattgtatcatatgcctaagatcaacatatgtattaaactgaaagtaaatagatgaaaagaatatttacctcttgatgcctatcaaggtatccttaatttctttcgcaaattgtatccttagaacagtaatagaaaaactcacaccttgattttcaagactttccaccacacacaaggactagtgtgggctagtagaataatagtgtatatgaagttattgattaaatcacatcacatgagaaaaaactatttcttttgtgatagagaaaaaaaaaaaaaagaatttctgataaaaacatttttaggcttttagaaaagttacttgaaaaaacttatccaaaatttagtttatttagaatatttaaataaactcaataaggttttatttaattaattatttaaatttgaatctatttattaaataatatttaattatttaaataaattgatatttatatcttctaactgattgagagaatatctcaattaattaattttcaaattcaaatatttatctattgaattaacaatataattgattaattaacctaaaaatgataaaaccaacagagacaccctactatagtggggtgcatgcactgtgtttgaacacagtgtatgtggcgcctctctctatttaaattaagacaagagatgtgccttttgttctgataacttttgtcttgacaatttttgtgtctttttccaatttagttagtatgaaaaaaaaattatttattacaaaaataaataattattattttgataattcaaaatatattttatttcaccccttgacagtatttcaaggagatgatcaggggaacatacacctataatcataagctccaataatctaaatttatttattgaatctcatcattcaaattattctatttattaattctatgattactccattataaatatggaattgaactcttagtaattatgaaattatatttattgagttttactgaagtatctattgatataactgattctaatgtttagcctcctagtattggttcgtagttagttttggtaaaaatgtcattttacccttctaattactttttctttttcatttagtacttttaattcactagtaaaagcataatttagatctaatctaaatttgtgcacaacttttcagtttcaga

SEQ ID NO: 247405 - DNA, 780 bp, Cannabis indica
gggagtgatacatcatcagtgacattagaatgggcattatctaatttagtcaaccatcctcacattcttaaaaaagcaaaagctgaaattgatgaacaaattggtgaacataaattgatagacgaacaagacctttccaaattaccatacctccaaaacatcatctttgagaccttacgtctattcccggcagctccaatgctcctacctcacttgtcctcgaaagattgcactattgagggatacgacattccacgtgaaactattgtgtttgttaatgtttgggctattcacagagaccctacattatggaaagaccccgaaagctttaacccagagaggtttgagagtagagaacatcaaagtaatgttaacttgcttatgccgtttggactcggaagaagatcttgccctggcaatggtatggccctacgagtaattggtttaactttaggaactttgattcagtgcttcgagtgggaaaaagttagtgatgaaaaaattgacatgactgagggaagaggtattactatgccaaaatttgtgcctctacaagtattgtgcaaagcgcgtcctatcatgaactcagttctctcacaatgattttagagaataatatacatatatatgaatatgtatatttatgtattaataaggtttagtttttattcaacaagtgtgactcgctatttaatagtgatcataaaagaataaaagaggattttgattgtcttccaaaatattacctttatcaaagtggccctatttgaatttttgcat

SEQ ID NO: 247406 - DNA, 793 bp, Cannabis indica
ttttggtgcatgagttggtccttcttccgttatgtggtaattttaatctacaaatgactactaattcagattagaacctttgagggacaatacttgcattatattcctcttcaaattttcctttgcatctttcatgcttgctctacatataagtataagtaactcaaatttaatatttagaatttggaaaagaacacaaaacaagagaagaccactcatatatgaaacaaacttaccaaaatgtttaactataaaacaaagaaagttgtacactttaaaatataaaccaattattcacacgtcagccatgttatcaaacactaaaaattggcataggttaactacaagaaatgtcaaataagacattaaaaaacaaaaacataataacccaagaactaatggtcaagtgagttcatgttataatggtctctttaaattcattccaagaactaagaagaatcaaataagactaaataacccaataaaaaacataatatttttccccaatagaatttgagatgggtacatataaaaccaatcaaagcagccacttgtttgctgaatagagtggacatctcaaacccaattctagatggatgctccacttgtagccacctttcccttcattataacatctctgaacagtgagtcaatttcattactacagcaacaaaaattgaaaaaagaaaaaaggaaaattcatataagaaaagaaacaaaaatgtcattaagtatggagactaacccatgtataggccaagtcttcaaaaatagcaagtcgggaaacacagag

SEQ ID NO: 247407 - DNA, 515 bp, Cannabis indica
gacttcgacttccccagcaacgcaggcgatcgatgagtcactttcttgctcagtctcgagaaaccacccactttgggacccgaacggtttgtacctgcgagcccaccaccagtccccttcgtaggagcaccaccgggaaaccgactaggagaggggatcaccgaagatgcacgattcggcacgaacgagttagccccagagaacacatccagatatgttgaagaggttgagagccatggaccaaaaagaggaaagggaataccatttcctttctccactgtgacaggggtagagagggcgcacccccgccgttgatgacccaggcatccacagttgtagcagaaaataccaatcctttcaaacttgaactgaatccatttcttaacccctgaactcaactcaaagaaatagcccgaatgtaaaggtttggcaatatcaattaccaccctaactctgagaaagtcacttcaggaaaccggtttgtctttgtctaattccactttaataacttcacc

SEQ ID NO: 247408 - DNA, 1729 bp, Cannabis indica
tagagtatttccatattgagttgcagtagataggtttttggtttaaaacctaagtcccggttgtgatttagcgtatcacttatcctcgtggttatcgatgtgatttaggagcctgtaattcgccgagcagttgttccactcaggttggccggcacacctgaatttggaattgaggtaagattagtataatgatatgcatatgttaatacatgtttagcgtacatgttagttgccgtcagaataacatatcagggtatcggtgaggtgtacatagagttgcaccgagataccaacagatatatgttaggcaaatctatagccatcagattagcatatcagggcaacggtgaggtgtacatagagttgcaccgagatgccaacaaatatatgctaggctatcaaatagtatgagttatctgccacaacatcagtacgactagagtactgagtataggctggattcacagttagtcattgtaaagactgctttgctttaatttggaaattagcacataattaggatttaattatggaagttatttattaattctaaattattaatttatgatgatttatttgaattcagaatgcatttttatgtcacatatagaaatttcataattcttgcttattcagtgctcgacaatattggaacgcggtgtttgactattacaatcacatcttagtagttttagtatagtgaggcattatagttagacattgagaatttcgggaatagacgagattttagaattgaccaaaatacccctaagtgaccatttatgatttttagtgtgggaaggaagggcaaaatagtcttttgccaagggtttcttttgtcttttagtatgatttattttaagtttattttctgattattcttcagataatttagtagttaatgcttaagttattacatttatcatttttttcttcataaaaatcaaaaatcaagaaacaagctctctactctctctcactccttctctctctctcgagccgtaaaagaaccaacaactttttggagttcttcaactggtttgtgattagtagttagcttttggtgtttccattgaaggtaaccctcttttagcacttttttctcccataattttcttaggctttaagtaattaaatattgcatggattgagtattagggttctgaggtgttgattatgttttctttagttgaattaggttttatatgttggtttaagcatgttttgattgcttggtttggagtttagacaaggtttgagttagaactcaaactttggtctctaatggtgaaaattgattttgaggttctgtagtagttttattgcttgggatatgttctttatggtctaaataattagtctggaaagtttggtagagtttggggatgaattgaagttgttatggaatttttggtaattcctgcactgaaccggagttccggttgagggggacatgtaggaaccgaaattccggttggtctcaaggaaaccccacagaactagaattccggttgggaaccggtctaccggttggggcaattttgagaaccctagtttttcccatttttgtgatgtttaaggtattgccatgttgtttatcgataggaaaacttttagtttcaagtttaagtccccggaaagtgatttagcgtgtcacttacctatgttatgattgatgtaatttaggagcctgtaattcaccgagcagttattccactcaggttggccg

SEQ ID NO: 247409 - DNA, 1479 bp, Cannabis indica
cctgatgaaaatagtatcaagatcaatgttgacgcggctctttttgaaggtggaaacagttatggaataggattggttgcacgtgatcaccatggtttcttactagaaggccgaactgattttttcatgggggctactacaccagaaattgcagaggcaattggagtccgggaagccttgagttggataaaacagaaaaattggcaaaaggcgattgttgaaactgattgtttgacggtggttcaagccattcgaagttcaatcaacatgatatctttatttggccaaatcattactgaatgtaaacaactctatcaagagttaagaaatgtgtctgttatttttattaagcgatcagctaatgtggtagctcataactttgcaagagcttctatattatttcctggttgtcgtttcggtatggagtctgttcctaccgacttgttaccttgtttggtaactgatttcgttggttaataaaattattttccattcaaaaaaaaaaaaaaaatcaactacatctatcgcgtcactcgttttatgataaaactgaataaaatatgttagaagaacaacattattgtaaaaattatatttcgaatagtattattaacgagccatatattataaggacacaatttaataatgtaaaaaattaaattgataaaaatgttaattattcaaaataaaattagtgtgtcatgactcaatagtctcccctatgaaaaattaggccaaaataaatagagtagattgtccagaagcccaattaaggggtaaaggtaaagaagaaaactaggtaagaggagtaatagaataatgaataaggttaggtgagtgcagggtacacagaagaatggcaataatagagcagataaggctgacttctctttatcaattaatgaccacctgcactgcatcacttcaccacttctggactggaccctgcctcccttggcttcttcttcttctctttgtaaaataattcaacatttagtcatgtatgtacttcatgtacaagaattaatgtgagcttttaataagaatatgaagctgtacttcgaaaaatattaagataatagtataaaattattgttcaccttgataatgttatttggggttatatgacaaatggtttttttttcttaagcaataattacttgcttaactagctaatgcctgtacaaaataaataaaacaaggctaaatagtggcataagtacttaaagttttgagtttgtaagcggcataaacccaatgattttttttagtggcataagtacccaatgtttgtaaaactgtaatttttctttattttcgtcagtaaagactctgttattatcttatacaggacacatataagactcaaattctagattatttggtctggacgaaaatatgtagtatcagttattaaaaaaaaatcaacaaactatcaaaatatataatgtaattgtaagaaatttatagtagaaatta

SEQ ID NO: 247410 - DNA, 1248 bp, Cannabis indica
ataaacatctttattcatttatgggtcgggaacacgcttgttaccgtagtaacttacatagaagctattatattgatctagtccgatccttagcttaataaacaaaacaaattgcataaaataaaaattgtactttcacaagtggtcacccgacttcagtactttcttatttcatctgaacctttgggcgtggtccgcccagaaggccactcatttaagagcaaatgttcttttgtttcgtacttaagatggtcatcggacctggactgtcactggcagtattttcttaagtgttccccgttccaatatcttggtaccacaacgagttgcattttttcatcgtacttacccaatttgtatgctcctgattctagaacttcaatcacttgatatggtccttcccaatttggtccgagcaaacctgctgcgttatctttggtgtttaagaatacccttctaaggacaatatctcccacaaagaatttttgtactttcactttcttgttaaagtactgagctaccttttattgatgggctaccaatttcaagtttactgcagttcgcttttcttctatttcatcaagtgattctacgaatagtgcatgattaacctattggtcatatgtcaatattctgtgggacggaggttcaagttctacgggcagcatagcttcataaccatacgccatggcaaatggagtctgtccgatttttttttctcagttgtgcagtacgaccataatacttcagggagttcttccagccagtttcctttagcatcttcaaatcgattctttagagtatctttgagggttttgttgactgctttgacttgaccgtttgcttaggaatgtgcgactgcggagaaacttttatgatcccatggttcgcatagaaatcattaaaggattgactgtcaaattttttgccattgtccgatagtatcttttatggtagtctgaaccgacaaattatatttttcaccacgaagtcttgaactttcttggatgtgatggttgccaatggcttggcttctatccatttagtgaaataatcaactgcaaccactgcgtactgtgctccacattggcctttgggtaattctccgattaggtcaatttcccaaatggcaaaaggctaaggactttgcctctgagttagtgcgttgggcggtgcatgaggtatctttaaaaatgtctggcacttatcacatttcttagcgtatgccttggaatcttcaatcatggt

SEQ ID NO: 247411 - DNA, 1034 bp, Cannabis indica
gcataaaacccaacaatatggtcatcaccatataccaaatcacgaagttctcaaatctaattgcaccattgtattcataaacccaaataaatggcgaataccaagtcccgtgccgattcaaataatattaaagatatttacaaaaatatcactgccgtaaaaactaagcatcagcatgccaccagcatgcacactaacatatgccaccacttggacaccttgtgggcatcacctagcttgtatcgtgctatgttggctcgcacgttacacgtagcaccctcttacgtgttaatatcgctattggtccaactaagtatcgaattccatatagtttgatgtaataacttttagggaatatcactagccaatcgtaagtcgacatgtctagaggtgctacacattactggtgcccaataacaatgctctatggaatggggtgtggttgtgaaaaataatattcaataggatgaatttagtaatggcgggtaattataattttggctaattaggattttttcccccgaactttgacatgtaccaaatcatgccccttgaacttttaaggtcgttaaaaatttcccctaaactattgagattgttgaatttaaggatttttgtccaattttagtaaaaacagtttaacatgaatgaaagtatatgggacatgatttagtacatgttaaagttcaagggacatgatttaatagatatcaaaatctggagagcatgatttggtatataataaatcaataaaatagtaaaattaaatgaaattagacaaaagtccttaaatctaacaatttaaatagttcagggaaaatttttaacgaccagaaaaattcaagggtttgatttagtacattacaaagttctgggaaaaaaaatcctaattagcctataattttttacgggtgtaaatataatttgttaaacttcacatagattatgaactatctaaatatacattaaacatcattgttcataatcattaaaatcaaaatcaatactttatttagagcattaccaatgtaaaa

SEQ ID NO: 247412 - DNA, 538 bp, Cannabis indica
agattttagatcatatattcacagctaataatttaaggttatatataatactcacaagtcactagattattatcatatggtgcaatattagaaaatacaatgtgatcaaacattaaaaatattaaaacattacacacacacataatcatacatattattcataaagtttggaatgaagacgaggtgtaagaaaaacctcaagtggagtagctctcaaattagtcaacccagtagtctcagtcatatcaacctcttcattatccaatttcttactaacttcaaacccatgcaaaaacctagccaaacccaaatggaccatacgaagagccaacgacactccagggcaagaccttctccccccaccaaacgacaccatctcaaaccctaatttacctctcaaatccacttccttgtgactcgtcaagaatcgttctggctcgaactcctccgagttatggccccacactcgctcctcccgttggattttccacgtgttcaccatcagacgtgtccccttgcgcacgtggtagccgcacgt

SEQ ID NO: 247413 - DNA, 964 bp, Cannabis indica
tatttttgaaaatagcccccttttttttttcaaagatactgtgtatttttatactgtatactgtgttaagttttcactgttgttccacagttgggtttttgttgttcgactgttgttttaattgttaagttttgttgttttacggttgttttataaaaggcagtatatttaataaaaaaaaatcgtgtggcagtaaaattgtaaacttttgcccaaaattcagtatttttgtgaaaactccttttcaattttttcaaaccaaatcagtattacgattttttaaaatttaaaactaaaccaactaattaaatgatcaaactaaaccgaaccaatgtccactaaaaatgtattggtttgaatcaataaaatcattatttgtatttcatagttgatctaattttttcgggtaaataccattttagatcctgtgttttgcaaaagttacagattggatcttctgttttgttaaatgacaaaatagaccctgtattttctaaaatggtaaaaatatgaccctgagcttaatttttaacaactttttttttttaatataaccaacttgaagacaattcctagcacgaatagatacagaaaatataaatagttttgtcataacacttttagatcagattattattaaattttattttgacaaaaaattaagtttaggatcttatttgtacgattttaaaaaataacagggtccattttgtcatttaacaaaacagaaggtccaattggtaatttttataaaacacggggtccaaaatggtatataccctttttttttctttacaataattgttttttttttttagtttaattttataatacataaataacaataaaactattaagaaaacaatattaagtgaatgtcaatattttatctaaaattgttcataattaaatatcaatattgcatccaaaaaaaaataatattaagtatatatataaataaaat

SEQ ID NO: 247414 - DNA, 732 bp, Cannabis indica
ataccaatggtgagagagtcttgcttgaggttcattaaacttttcctcaaattatagatgtgtggtccattcctctgatgaaatcgcaccttaagatcagtccaaatgttagcagccgattcatcatacaatatgctggatgaaatttcttttgaaactgaatttaagatcgaggatataactatgttgttattcctgattccaggcattatatagaatataatcggtagcaggtggtttggggatagaaccatcaagaaatcctaatttatttttgactgatatagacaactgcatagctctactccaagaaacataattgtcttgtccagtgagaagctgagagactagaacattacctgggttatcaccatgatgaaggtagtacgcgttcgtcggatcttcgagtggactctttgaattgacgaagtgtaaatcttgatttccatgtccgattgaagctgaaggtctgtgagtggttcttggtgtttgatcttcaccttccacctgtgtttcagttggaatttcactcgacatggcagcagattaaagaacagagagaaggagacacagtgaacggcgtatcggagaagaagagggaagcacgatacagtcaccggagatggaagttaggatcgttcagggaaagtacatctttcccgctctgataccataatgcggaaaatgaaaagggaaaagttcattgatgaagttgaattgatacagattaag

SEQ ID NO: 247415 - DNA, 935 bp, Cannabis indica
gatcagtccaaatgttagcagcctattcatcatacattatgctggacgaaatttctttgaaactgaatttaagatccaggatataactatgttgttattcctgattccaggcattatatagaatataatcggtagcaggtggtttggggatagaaccatcaagaaatcctaatttatttttgactgatatagacaactgcatagctctactccaagaaacataattgtcttgtctagtgagaagctgagagacaagaacattacctgggttatcaccatgatgaaggtagtacgggttcgtcggatcttcgagtggactctttcaattgatgaagtgtaaatcttgatttccatgtctgattgaagctgaaggactgtgagtggttcttggtgtttgatcttcaccttccacctgagtttcagctcgaatttcactcgacatggcagcagattaaagaacagagagaaggagacacaatgaacgacatatcggagaagaagagggaagcacgatacagtcaccggagatggaaactaggattgttcagggaaagtacatctttcccgctctgataccataatgcggaaaatgaaaagggaaaagttcattgataaagttgaattgatacagattaagaaatacagaggacccgaagtgctatatatacaagacttacttaaccgactaagaccatcaaaataacaactgtaataacggtaacaactgtaaaataaacaaagtctaaccaactaacagtaggcctaactaatgtaacagtagataacaaatacacagtagacttaataatttccaaactttaagtacaaaatagtttaactaataaatataatttatgtaatatattatgtacacttttattaaaaaatatattaatcggtttagttcggtttattcgggttaattgggcagttta

SEQ ID NO: 247416 - DNA, 638 bp, Cannabis indica
cataattatctaattagggttttgctaatccttttcttaattccaggtattacataggctggctagcttccagacaccatgtggccagccagcatgcactctggcaggtgcatggccggccagcttttgcctggcaagtttttgatgtatagctttcattcgtggataataagtcaagtaacgaattgggccttaacaacacacaaaaatagagcgaaaatatcagcaactttcctattttcgagggacaatttagtcatttgaaactttattaatttattattaaataatagctttatttacatatctttaaggatgttagagatgtaagctctactatataaatggtattagtcaaaccctaactctctaagtcttaaaccctaagtcttgatgtaaagaccgcttagctttgttttggacatagcaaataattagggtttatttatgaaacttgaataataattataatttatcattttatggagatttatttgaattcagaatgtattatttatgtcatacatgaaattttatatttttgcatgttgtgtgctcgacaacactagaatgcggtatttggccaatagaatcacattttggtatttagtagtagcggagcaatatagttagacatt

SEQ ID NO: 247417 - DNA, 1119 bp, Cannabis indica
tgtaagtatacctatcgctgattatcatgccagtccaaattcagtgaactgacaaataaggaaattaaacttttgaacatataatcatgattatattccactgtgcagacaacactataatcaggaactaatacatatgttctggacttaataaaatttatacattaaatataaacatgaaataaattatgtgaaccatgcaacataaaatgcaatttctgatgtttattaattgggcacaaaacccaacaatttgtgccaataaaatttgtcgtgtgtacactgtgtacacgtaaacgatccagtatggcacttaacacaccaaaagatggatggaaatggtaaagtactaacaaaacatggattttggaagttttaccgccaaaaaatgagttttgggggttttgccgcaattaactctttctaaatgatttttttaatttatttttttaaaatatatatttatgtgaactaataaaattgtgacgtgtacactatatttatgtagacaatacaacctagcacttaacaactaaatttggatgaaaactgtaattgctaatgttatcgtaattttaggagttttaccccaaaaaaaaaataaatgttgatattaagtacaaacaaaatgaaagtacggacgtgccattttttggttagtttgtgctattttatttggctattttgtaccattttttggctagtttgcagtatgttattggctcgtttgtgcatggatccaacctcaaaaagtgctattataaatttttacagataagttttaatcttgctttttaattatatttttaataattttagacgaatttctttctattatttttatcattgttgtcttatcatttatttgttaggctattgaattttgttatatttttttgaaaatagttaattttaattaggatttgatttattaagtttgattaatatctcaaatccttgtatggtacaggttatattagctagtatagttctacctcggaagacttagttctaataattgaacataacaaattagtttcgattcaattgggatttttgagtgaaaaaatgattcaaagataagttttattttgttataataataattgtgttttatcc

SEQ ID NO: 247418 - DNA, 693 bp, Cannabis indica
tgtatgatctatttgtaagtcttccttacagtaagatcccttatgtaggtcctcacctatcccgatagttctctcattgaacttccttataagttcagtggcctctcaaccgcgacagttcaattcatcttggtgagcctgcagggtggctgcctggccatccatccatctcagaaatttgcatctctactgagagaatgcatcacatacatcaacacgtgtttcttcttgtcttgtttgagtgacctgacctacagcttctctgagcctaaccagctcagtatcatccccaaggtccaagcgaggttcgctaatgggaggttggccaactcttggcccaatttctcatgcataaactagtagggcattctcattagtattatgagtaagggttctctatgttgatttgctcttctgcacaagatcctattggtggtctagctttggaggtatgaaaggatcagcaagatttgcaggattggttagattgacagtattagccagattagtaggaccttttgtggtgggaggaacatgaacattgggatccaccgtcatgggatcatgaggaggatccgagggagcagttctgctggttagaaccttggtgatagaaggctctcaataaaagcaccaaaatgttgacatgaaatttagccaaatggtagcggagccttattaagtactcaattc

SEQ ID NO: 247419 - DNA, 601 bp, Cannabis indica
aaataacaatagtacaatataaaaatatattaaaagagcgtcttttatgtaaataaaattttaaaaactgttaaaatatttaaaatttcatacaaccctatttttgtaattttattttttttttaaaaaaataatgggataattatcccacatattgaaattttaaatttatttacttttatactgtggacggattttttttaaaaacactatttttttctaaaaaaaatattgttcaagttttatactgtgtactgtgttaagttttcactattgttttacggttattttttagttattctactgttgtttttaattgttctgttttgtgttccagtgttgttttataaaaatactgtactttttgaaaaaattactgtgtgagtatttttgtaaaagttaactaaaatttcattactttgtaagtttcccaaaataatccctatgaaataccctaaaaaaaagggctatttacaaaaatatgggaaaataaagataagttttgatatatatggcataaaaacttaattacactaaatatggcattttttttaaaaaaacttacaaatatgggaaaaagtcttgagtaatgccataaaaa

SEQ ID NO: 247420 - DNA, 549 bp, Cannabis indica
aatgagttttatttagggtacaaaacccaacaagtaggttgttgaaattgtacattattttttttccatccaagtagtagaagccaccaaagtgttaagcaaatcagtaagagaatggttttaattttgtggtgctacaggagaatagtaagaagttgtttgaatatattgattgatcccactataggaagtgtaagaataatctctccattgtttattggatgtgtaaaagtgtcgtagtagggatcatattaatacactaatggtgagatataatatggatcacagtattggtgattgtacattgccatgtttctaaagaaagatatgaaaattaaaactacaactcgaagaacaaattagcaacaagaaaaaaatgaataaaatagtccccgaaaatggtgccaaaaatttgatgcatgtcgtttaccacaaaaaatttactaatttttatttctatattactaattaattcagtataacggtaattaaaggtcaatcccgcgaggactatttttaatttattattcaaaaattagtaacaagaat

SEQ ID NO: 247421 - DNA, 1062 bp, Cannabis indica
ggtaaaagcaccaaaaccaaacaccatcttgaaaagatgtttgacccattgtttttgtgcatgctcatgggcttagcatatattaattatataaatttatatacatcatacatagatgcaacgcactcattttctctcattcattaatgactcttatacacagttacatcactttaactgctttctagaatgacgaatgactcatcaaaccaacacccattttaacgttttttgaaaaaactggaaggaggtcactttcaagattacttcaagttaagcatacttggatcaccgaaaataagatacaccttattgatataaacaatactcatcaatctatttaagccctcttcaactgaatagtcctatacctacacagtcttatagaatcaccacacttgaccgttcctaaacattgtgggattgcacagctccttatggatcacaaaactacagtcactgtgattgctgattcaagtaactctaatgcatgccttctttctaaatcctcaaacgggtcattgattctggtgccacagatcatatgacaagtaattattccaatctcttttctacttttcagtctcatagtcccacttttattgttaccttagctgatggatcaacatcttctgttcttggatctgacactattgttcctacacctatgctcactttgtcatcagtcttacatttgcctaatttttcctttaaattgctttctgttagttaactcactcgtaatctaaattgttgcatctcattctttctcgatcattgtttggttcagaatcttatgacgaaaaagattattagtaaaggacatgaattatttagtggcttgtatgttcttgacccacttccaccagcttctattgcttgttcgagtgttgctttcgcttttaaggctcattgtcgtttgggtcatccatcccttcctttactcaagaaactttgttaccaatatagtaagatgtcttcattagattatcatcatgtcagtttgccaaacatcatcatgttagtttgagtcctcgaatcaataaacctgctagtgttcct

SEQ ID NO: 247422 - DNA, 1631 bp, Cannabis indica
cgtccatgggcttccttcaatcacacgttcgatgtctacctcatggtagaattggaaaatataatgattatggctaagttctttaacataaacgcctctacctggttgccagagagaagtcattttgttttgcattgcttgaaaatcaatgttacgtttcgtaagaaaacgtcccaccaaacaccatctatcatcaaacccggacagtttagggtcttcatcatcaaacaccaatctacccatgggagcctcctccatccgaacatcaccatagtcatcttccatttcaacgaaaagagcagaaaaacacaccggaacaagcaagttaaaacttcagaaactaacagcaaaacacatacacttcacaccatgtcaaaagataagaccttaattttttgtttttgaaattacaccattcttcccttaatatatgttaataagtgatataataaagaataagaaaatttttttcttgctgggattatactattttgtcgatcttccaaatgaaattattaaaaaacaaagaaaggaaattgttattagttactaatgatgtaaatttttgtaacatttaatgtttttatttaatactaaatagtgaagaatgatgttactacttactcgtgaatcaaaaagaattagtttaattaccaaaaaaataattaaaatgtatacatattattcatactgtatattaataatatgctaaaattaatttttgtaaactaaaataacattacattacacctataaatattgcattacattaaacttctacattaacaataatcctacactaaaacaatacatgtatgtgtgtattacaatatagctgttaacatttttttgtgacaatatagctagtgagatataattaggttttctcaacaaataaaaatacatatagattatcatacataaaacaatatattttcatcaactataacccgtaaaatgatattttacaatgagttcaatattttactttttaatcaccaatacctatttttggggcaccatcatcgaccgaccaccaccaactggccaccaccacctaccgaccacaactctcacatcctaagaaaacacccttaccatataaaaaaaaaaataactataatatacataaactataaataagatgtaagaaatatcatgtttaccttttatttttggaaattcaaaaaagttcattgagctcaataacaacacttacaagataatgttacataaaaagcttttgttaaagcttccacccactctcaatctattttactcaagttcttagctttcaaagagttctctctagcacaaacactattaacaatacaataaaaagtcaccttaacaataggaagtttttgctcccaaatcaccttgtgtctagcatgccaaataaaataaattgttgttgtaatgacactcaaaagaacctttcttttacctctagaaacttttgccttctgaatccactttaggacatcatggagtctctttttttccaaccagtaataccaatccagagccacacttgatgaatcaccaaactgttgtaaatacaataaaaaaagaggtgagaatgactctccacttcacttccacacaacaaacacaaggaagttggtata

SEQ ID NO: 247423 - DNA, 738 bp, Cannabis indica
gtttgtagctttgtcacgttgcttacccctcttatttcttccatgcaggtagcactaggtgttgaataggggaggtgacagccgcgtaggtccatgttattttgtaattatggccagcacaaagtagactggtggtatagtgactctgtgcgacccccatgcggttaggttggctacatggggtcgagttgagacagtagaagatgctaccaaacctcatgttgatgttagccctaagaccgaccatagagatgagagtcccaatgttggatttgatctcgaggaggccgtactggttaagaggaaaagactcagaccttgtgttgtcctctccagctgtcctttgggtcattatgatactaatgttaatccgctgaacatgctgggtgagcctttgacacttggcttggatcatgtctcggataagtcttctgagtctgagattctggatgcgagttcacaaagaaataagtcgttttcccctgtatcttctatctcgacagatagttttgagagaatgtaggctaatggactagtggtcggtatccattgtaagatacctctataggatcaactaccgcatagattggccctcaattggatggcgtcgtcagagtaccacatagcaaggagccatgctacctctttatccgtacttcgatgatgttgttgcttatttcaggatgttgttgccacgtgacaatttacttaacacttaacaactatatacctacaaaa

SEQ ID NO: 247424 - DNA, 811 bp, Cannabis indica
ctttgtgagaagtcattacctcgatttgtatttctgaaaccaaactgacctgcattgtattgagaatttcctctgccaagaaattgctgctgcctgtatcttcgaaaagcaaggttggcctccaataatggatcttgatccttcatagtcagattggcactagcttcaaactcctttccagatttctcaattctggattcagaagctaataacaaagcttcaatttcaccaacggtgtagttctcaacacgagtatttgtggatatgacaaaggtatcatattcactcggaaggcctttaaagattgcagccacatgatctcgatcgcttatgacttcacctacagatgcaagatgatcgacagcctgtttgaccttcaacagatagtcattaagactcagatttcctttctttagattctgtagctttgttcgaaactcaaggatcttggaagaaacttgcagcgtgaagtgtttttccagggattcccaaatctgtcgagctgaattacagccaaccatacgcgtaagaagactttcagtcatcgatgatagaagccaagaaaccagcaactgatcttgaacttcccaatcgccatagatcggattaactctgttctgctgtcgatcgtcattgtttaggtactcctcaggtggtggctccttgatgaatctgatcaatctatttcctttgattgctgctaggacctgctgcttccaaagaaggaagttatgatcattaagacgaactgaaatgctgtggttgaagaaaactggttcttgattcgagcgtgctctgttttcagcttgag

SEQ ID NO: 247425 - DNA, 567 bp, Cannabis indica
cccctcaaatacaaatcgatcacacttcatttccctcccattcctaatttctcaattttggagttcttctctaaaaatttcaaacttcaaaaacttttcaacagtttggattttcatttcttatgaatgatttttcgaaggcttaagaacttccaaagtgatttctcgaattcaggagaacaaatcttcatacaaaaaggttggtatttctttctcaactcttttgtaaattaattctttctaaatgttcgcatacattatgggtatttagatagaaattgcatgagatcaataggactagagaatcaaaatttagaataaagtaaggcaaagctcggaattttctctagaaaattcttgcctgtaacttgaatgcttacatatttcatgatgaatctttgaatatttgcatctttatattagatcctttttgcatattcgcatatttaggctcatctgcctccaaattgaaaattggcagtgattgggtgtttcacagagattaaatgcttatttcttttggtaacccttaggtcactattaaactgttagaatatgttttaccag

SEQ ID NO: 247426 - DNA, 622 bp, Cannabis indica
aaataaaataaaatgaaaaaatggtaaaactgacggtatattcaataatttataaaataacgttattattagaattaaatgaaaaaaaacgtgtccacatataatttttcctataatttttatatcgaaaccaaaactctctaccaataggaacaaaaataatgttcatattattgtcatcttcttttcctcatgataagacaacaatttttcagtcctcataaatttttattattaataataaaataaaatttaagacttttcgtggatgtccttatcttatatattaatacaaatatgtgacatatacatatagtgatatatagatatttatataatattttctttgaagctaagatagaatatgggtgtaaaattaattaatcattctcatatatatcatttgagaacattaattaattaatctttgttggactgagattggaaaattgtaccaattaataacatgtacgtgcttcaacgtatctataggtacttctcaattctcattcccatgcatatatatatatatataattaagccctagccatatatagttcacttatcaattttttccttatatattacgtatgttgaggtataaatatataattatatataa

SEQ ID NO: 247427 - DNA, 1376 bp, Cannabis indica
tttacgtggacgacatgctagtcaaatcaaaagcatgcatgagccatgcggacgaccttgcaaaatgcttcaaagtagtacggaggtatggaatgaaacttaacccgaagaggtgcacttttggagtcaagtcaggataatttttgggatttattgtcagccaaaggggaatagaggcaaacctcgaaaaatctaagctttattgaacatgccttcccccaagaagcacaaagatgtgcaaagagtaactggaaaggttgatgccttaagtcgattcatttcccgatcaaccgacaagtgcatcccttttttcaacattttaaagaagtgttgaaaatttgaatggactgaagaatgcaaggaggcattcagaaaactaaaagaacacatggataaaccactgattctatcaaagccagttcacgaagaagccttgttactatacttagctgtctccgagaatgctgttagcgtagccctagtctgggaagaggacaaagtccaacatccggtgtactatgttagcaagcgcatgataggggatgagatacggtatcctttgattgagaagttagttttttgcctcctgatggcttcaagaaagttgagaccctatttccaggctcaccccattaaggtacttacaaaccacccacttcggcaagtcttacagaagccggaagcgtcacgaagactcctcaaatgggccatggaattgagccagttcgatatacactacgtaccatacatttccataaaaggataggccttagcagacttcataacggagtgtaatgaaggagaagctagttcaagcgtgccagtaccgcgaaccccagcatggaaggtattcgttgatggagcatcaaacgaaaacagatccagtgctgggatgacaatgatatcaccagatggacttcgcctccaggaagccctgcgttttgcattcccagcttctaacaacgaagccgaatatgaagccctaattgcaggattgaagttggcaaaagccgtaggggccacaagagtagaagtcttcagcgattcgcaactggtggtcaatcaagttttaggagaatacgaaacacgtggagagaaaatggttgcgtacgtagctattgtccaggactgctccatgagttcatagagcccaaagtggaaagaattccaagagagaagaatgctcacgcagactgtgtggccaagttggcatcggacagtgagatagagagactaggggtagtacccgttgaacacatcgcggagccaagcatcacaatcaaagatacagtggctgcaattgagcaagagccaagttggatggactccatcatcagatacataacgaaaggtgagttgcctcaggaaagggccat

SEQ ID NO: 247428 - DNA, 782 bp, Cannabis indica
taaattaaatagaaccggttctacaaaaaatgagcaaaaaaatacaacaaacaactactcaaaaactaattatattttttttttttaaaaaaataataatataaatcaaccacatcaaaaaactagtgcatttttaggagatccctttgaaattagctaagaaataacaccaataaaatgcaacacgatctttaactaaatgaagaaccaactgagaaagattacaaaataaatacaacacgatctttgcaatttattagcaaactcatgattgggtcaatattcaaatatgttagctggaaaaaaaataaaaaaaaataaaaaaatataaaaagtacttggaactggtgaaaattaattaaaaaaataaaaaaataaatacaaacaaaccttctcatctaaatgttaggttatttttagtattaaatttagattaattttagcatattttttatttagtttaaatcatgtttggagcattttcacgctttttatcttttaattttgcagatttaaaatagatgaagatgttgaaaatgtcaatagaaaaatgataaaatatctcataaaaatatcccggtggaaaatatcaaattcaaatccaaaaaaaaaaaagataaaagcacggattatagagcagaaggccacacgggccgcggcatggtattagcatgccatggcccgcctacgtgaaaaaccaaaggagatatcctaggaatgccacacgggccgcggcatggctttagcatgccacgtccgcccttatgttagcagaaaaaaaa

SEQ ID NO: 247429 - DNA, 973 bp, Cannabis indica
aattaaaagcgtttataaataaattaaaagagttagacctcgtggtcattacaaaggatagcagtcggaatagtagatatctctaccataccgttaatattgttggcgaatgcccaattagccacattatgggctacaaaattacactttctagaaataaaagaaaaattacagcaaaccatcaaagtagagagaagagtacattgtcttgtatagttctcaatcccccataaagattcaccaccttttaggttcttgatcacactttccgaatcgctctccaccataacaaaaggatgttgccttgaggccgccgtctccatagctaataaacaggccgccgcttccccaataagagaatcagcaaactgaagcatcttagaagccacccacaagatagactccttatgatccctcgcaattgccaccacacacatagaatcacctccgacacggacgtcgcaattgattttgatccaatcctctggtgggggggaccaaatagaagaaacaacatcctgaggcggcatggacaaacaggagctatagtctgcgtaacaaccagagatagagtcaatataatgaatcaagcttcccatagtgttgttatggactttgtcattacgagccctccagatcgtgtcaaccactatggaagcataaagaaacaaatcatcagtgtccacccctctagttttaaggttccagagaaagctaacccaatcccacatacgggctccagagtctaaaaccggcataacaccccacggggagacccgccataggtgggatgcaaagttgcagtagagaaataggtgttccatagtctcatccccgaccccacaaatggggcaggaagtctcatcaatattcattctcttagcaagtagggccctcagggggagagcattagaaaggatgctccaccaaaggactttatgacgttccagaattttagagttccacagtttgt

SEQ ID NO: 247430 - DNA, 2597 bp, Cannabis indica
tcgccataggaagacatgcacacaaaaaagatcatctcgccatcagaaactgtggttgtcaaattcagagtaaaggcaacgggatttacattatcaaccttggtaagaaatacgacaaactctagcttgctatcaagattaactgtactctattcccaacgagacattccattacgatatggtttacaacatatttaacacacgttcattttgacccagtagaagcgggatattcacagttgtgtgatattcaaataataatcgcatttacttaatgcgatatgtaatcagatcccatgattttaggggataatcgttgtaaaaacatcaatcaactctgtaattaattgcctactatgtgattataaatagaggcaagtgggatcaaaaaaggaggacaaaaaaatcataagaaaaagaggccctgaaaaaactatcagaaatctaataagattgactcgtggactatgtagaaatttaattgtaaaaccacgtaaaaaatgtcttgagttcatctattttactgcttttatttttctgtgtgaaattatcactattaggctctaattttggttaacaaaaatctgcgttaacagtttggtgctttcattgagaatcttcgtgaaaaaactcagaaaaaagcctccttacataaaaataatggatgacaacaaagaaaataatcctcatgaaggaatcaatcatcgtcttggaaaagagccactgagtccccaaggatcatttgattcatcacctgaacaggccactaactccgggaaaacccagtattggggactgagactcgaagggcataggataagcaacggccggtctcttcctaatcaagtcgttgaggatggcgcatacgacccaacccaatacatacctatgttgatctagaaaaccgccatcttaggcgccgattggaggaagcaaaccgttgtaatgctgaattagaacgtgagatatctgcagtcagggtggcacaggagaatagttcccaaaatcaacctgaccttggagacaaagatccacgaggaaaacctcgaaactcgcaaccaaaggggcaagagacaacccaaaggtattcccaaaactctcagtagaggcaacctgaggaagctaagggataccttgaaggtgggatgccctataatcaaccaagaaccaagaaatcggaaattccccataagaataaaggaagtttggggacacagcatgggatatgtggaacatcagtcggagatcgccagccttctctccaagctcagaaagaaagagctcgcgcaaatccctatagggggaacgaggcgaatcaaaccttaggaagaagagcatgacgtgaagaggcgagggctaccgcgaggcacacagtatcacataatcgatcaatgcaaggaggagagaacgctcgtcacaacaatgatcaagtagaataaggtctatgggtggaacaagattagtcagtcgtcatgaccaattggacctacaggaacgcttgaaccaaaaaaaacttgatcttcgccaacaacttagtccaaagcaaagggattcaatccatttgcgaatagacaagttggagaacaagttcaggaggtatcaatttgaggaaccaggaaaacaagtgggatgcgagtctggtgaagaattcgagtcagaagcttccaaataaaaaaggaaagacgactctaaaaaattgtccaaggacaagaaacacaacaaatatgtacccctttatactgattataccgagcttaatgaaactcgggaaagtatctacctcgcacatgaacaggaagttgtttttagggaaccaaaacctatgaaacatgcgagacgtaaaagggacccaagcagacgatgtcaataccatggagaaatttggcataccacggaagaatgtcgtcagttgaaagatgagatagaaggtctaatagcgcaaggacacttgcaacgatatctaaaggggcaggacaatgcccataattagatcgatccacccagtaactcaagtgaccaggaatcataaccttcctttgttggaggaagggattcgtcggttttcttgagagggaatgtgttgcgagaagacaaggggcagttagtccggtaaagcaatcacataaaagtattgcgaaggaagcaaataccagctcgcgatgactgccatattgagctgctacaaaggaaagctggtcgtcaaccagtagcagttaaagacaaatgaataaaaccaggagtagttcgcctagaacccgggaatatgacagggatcaaccttggatattgaaataattgtgggaatatgttagggattgaccctcaacatcagaacctattttatcaaaactagatgcttctagaatattgataaaataagctattgaactggggaaattcttatgagattaatgattgtaaatcgaatcgctgatataatattttgagcttcagttgtgaataaagtaatcatttctttcaacaagtaattacaaagcataaccatttaaaattacttgaggggcatatatgtatgattaaacaaaatttatctagaaatacataacacaatgcaaacccatcacttcaaaaaaaaa

SEQ ID NO: 247431 - DNA, 1208 bp, Cannabis indica
taattggtcacacatctcattctcacattcataattttttccacacaccatgtctacctatatctcaatctttaccacggctagacacacaaaatacaccagaaaaaactggtatatcccaacaacacaccccaacagattgtgtttctggccattctcccacaccagcagcatttccgcttgccaaactagcacctagtgccacaccagctgcttccaaaaccacaccagatcccgtggttgctgatacgttttcagcccctccattcaacattactacaacacctattgctgtcaatcacccaaacaagtgccaatctgatatatcaattgacatcccagttgattccccacctgatatgagcactaaaaaacctaatgtgagcattaataatctcacaattaccgcacctggttttgatcaacataaccagtccaaaagtggtcgaatcatcaataaaccatcacatttcaaggactatatttgccacactgcctccaccgcttttccaatcgaaaagttcatctcctatgctaaacttagtccacaattccgtgtcgctgctcttgcagcctattctcatgttgaacctcgttcatattccgaggcatcacaattcactcattggctcaaagccatggatgatgaaactgaggctctaggaaaaaaccacacttggattgtcaccaaattacccgatggacacaaggccattggatgtaaatgggtatataaagtaaagtacaatcaacaaggagaagccattcgatttaaggctcgccttgtcgccaaagggtttaatcaaaaacaaggaatagattatgaccaaacttatgcccccgtagctaagttcaatactcttaaaatattccttgctctcgctgccatgtacaattgggatatccatcaagttgacatcaacaatgtatttcttcatggtgatcttcatgaagaagtctacatgaaaatcccacccggctataacgctcctcctaacagcgtttgtaaactcaacaagagtatctatggcctaaaacaagcctctagagtaccgccttaaagtttgaaggttttcaacaatctctttttgacaaatccttattcatcaaaaaaactccaaccttccaaattgccatcctcatatatgtggatgacatgataattgctagcaacaataaggttggcatcactcaattcaaatccttct

SEQ ID NO: 247432 - DNA, 549 bp, Cannabis indica
atgagggggagttaattcatactacacttttttttcttttggccaagtttttttagcaaggtttttaatgagacagttttgatggacatctaaggagaagtgttaagaaatattatttatggatgtccaaatcaccaaattaattatcatcattaatgcttggttgtattttcctttatcacattgatttagtttctcattcttttgtcatatttttgtataaataagagttcacctagggatgcacacggggcaggaattggcggggagtactccccccgtccccatccccgttaagaattttaatccccatccctgcttatttcccatcaggggtggggtgaggaataccataatgggggcggggaatttcctaatagaaaaataaaatttataataatatttttaatatacaaaaatattaaactatataaagaattaaaatattacacattaattattattcaataagctaattattatccaaaacacaatttaaaattcataaagaagatactactatactaacaaaatacaaacataaattat

SEQ ID NO: 247433 - DNA, 783 bp, Cannabis indica
aaaaaatcctaattctaagaggattcatctatcttttcaagcactataaatagaaccttttaggctatgaattccaagaccctagagctaccaaattgagatgaaaacttagagagagcaaggaagagacgtagatcgaggcttcgaactgttcttcatcatagttcttttattctctttaaactcttactattcattatgattatcgttataatatctagtttggagtagtttccttttagttaaaggttatttcaaaatccaagacatgaatttttaatttctatgatgaatgttagtttctagtttctattatatgagattatttctattcttctatgttcagtatcataattattattttaatcttgtttggctggctactaaagtaggttttactttaatctactctcatcttaggatttttattcacctatagtctaggattctaagtgtttgtgataaattacatattttaatattgtcaaaggtattttaattgtgataaagaatcaaacctaggttaaatggattatattcttcattaatttgttgcctaaattaatcgatctccatgaatctcaaagctttatctaagttaaataaattgcatgattcgtggatttactgcttaggtaaaagagttaattattgagcgcttcgccttgattacatgtaatagggagattgagataattgattgctttagctttatttgggggattaatagtttgattggaaactgagattacattcatttataggaattatgaatgattgttg

SEQ ID NO: 247434 - DNA, 695 bp, Cannabis indica
gtccattttttcaagaaaaattgggcatttgttaaaagggtgaccaatgatcccattctccatataatacatagaaagtcgctcatagcgaaattcaacctataactcatctggtatttttggtaacgtgatcatttttccttagagtaaaggttgtctaatatcaagtctaccccaaaaatgaaggaaagggccccaaccttcattgcacgagtcgtcatatacttccaaaaatttaccaattaaagagccgaaagctttagtcaaagaacgtgacttacttaggaacagaagcctataagcttgaacccaaaaaggagaaaaaaaaacccattgaatatagtgtgatattctgtagaaaagatggcgtatgaagtataatgtgttgattttcaaaatgccaagtctcactactacaaaacaaacttttagaggcgcttttttcagcataataataaataaccgacgccatagggttgaaccgacgccatagggatcctatgtcgtcggttgttatgaaccctacaacatcacttggaacagcgtcggtaacgaatttcgccaaaaccaacgctaaaagtccttaaaaactgcctctaaagcccaattttgtagtagtgtctccatccttagagccctttctttgttccattacaccaaaaagtactaaaaatcaaacccgagtgatgcttagt

SEQ ID NO: 247435 - DNA, 952 bp, Cannabis indica
gactcatgatctcagaaatgatctaaattggaggagaggagtggacgatcagcttgacacgctgatcgtgcagcccggaagcccgcgctccaattcccgcttaaaaagatgttgatgtgactcagatcggccaagatgccgaacaagttagaggaacaacgatctcgagttggaccgagcacgtggaacccctttctcccctgagattaatatcctggagttgccccacaagtttaagatgctgacctggaagatgtatactcaagtatttcgagatccaaatggatcagcaaggagtacgaggagacgtatgttgcagaatttttcctgccactctctttgaagccgcccaacaatggtatttcaagttggcacctggaaagttcaactcatggaaggctttatccttggagttccatgcacaattttcctcctctcgccaacttccgttgcacctaggacatctggtcgaagtaaatcaaagaacaagagagcctctccgagcctatatcagcagattcatgatggaggcggctaaggtttcatgggtaaccaaagacggaaagttagccgcgatgatgggggcattgatgtcattgctgagctatggaaggacctaaggaagaacaaaccagtagactcgatgagtgattctcttaaccatgcagaaggttttatcaaacttgaagaggctattcagcgagcagaaggtgaacaaaattctagcaagtcaaaagctccttctactcccatctgtccaactccccattcaccaagtaattcaagatcaagtggtaaacgatccagcaataataataggaaagggaatggagaaaagggaaagttcaccgacaagaccgaacaagcttcccgagagaatcctgccaagtatactgcatttacaatcctgacggaggacatagaaagtgtttatatggccactcagtcacta

SEQ ID NO: 247436 - DNA, 643 bp, Cannabis indica
acagtgaaaacgtttgtaaatattttataaatcgggatcccgtgactttttgtaaaatggtttataagttaatgaaaaagcaaaattttaattaatcacgttttttccataaacctcgttgattagcaacgagctgcacagtacgtttaaaaatcacgtaatacgcctaagttagttagggtgttacattggtcttccctgcgtcatgggccgtaataagaatgccattcttggctttctgaaggataagatgcagaaaagaattcagagttgggaaggtcgtttgctttcaaaagcgggtaaagaggtgtttataaaaatagttgcccaagctcttcctacttatgctatgtcggtgtttttgttgccggtggaaacttgtaacaagttggaaggaatgatgagtaaatattggtggagttcgggttccaatcagagccgtggggtgagttgggcaagttggaataagctatgccgtcataagcatcatggtggtcttggctttcgacatttacgggattttaacttagccatgttgggaaaacaagcttggaggttagtcacacaagatcactctcttgttagtagggtgtataaggcccgttattaccctcatgggacttttctgagagcttctcttggg

SEQ ID NO: 247437 - DNA, 757 bp, Cannabis indica
gaagaacttggttttggttatagcaatccaaaaaaaatttcatggctccacaagtgcaagaggtaatgggttgaaattctttcaactcatcccaaatggacttaagttttgtgaagtatgatgaaacagaaagatcaccctgttgtaatcgggttaattgggtttggagttggaaaatgcgaggaccatttccctcattaaaacgatcggccagatcattccacatgtcagtggctagatcaaaatacatgatcgattgagctatttcaggagaaacagaattcactaaccaggacataaccatgttgttacaacgaagccaagaattaagggaagaattaccagtttcaggtcgaggaagactgccattgatgaaggcgatcttgttcttggcaatcaaagccatcgttatccctcttttccatgcttggtaattagttccagtgaggacagtcgaaacaaggaccaaaccaggatgatcgcccgtgcttaggaagaacgggcttgagtgatcttcggtgagatcgcgaacagcaggaattgctgtattgttatctgcagcagtggcggaggtttcttgatttggaaccagatcaggttcttgattctggttagaaatctgttgatgtcgccgaggaactgctgaggaattgtgattgggagctggaggatgatcggaattgatctcagctgttgtgtgatcagccattgatggaggagcaccatcttgtgatcgagttgtgggtcttgccatgga

SEQ ID NO: 247438 - DNA, 968 bp, Cannabis indica
ttggtgtggcgttgactagtgcccagatgagttgtttcaaatcgctctttgaacgtaatttgaaaggatggtcctaaatagaataatatatgcatgtgtatatgtgttaaataatatatgcatgtgtatgttagcccaggtggcttggcttctgcaaactcatcacttttggatctctcctaatttttattttcaattttttattattttcttttattgcaaggggcaaactagattgggtatggattacatagttgtagagatactactgtactttactttatatatttataattttgttacttattctttttgttatttgtacaatatgtttagggtataacttatttttctggtttagctgactaatgtttataattattttgttagtattaacttaaaaaaaagtatattttcttttcttctctctcttcttttttttttttttgttttttttttttttttttgtaatgcatacttaaggaagtaactttgataagcaattattaggctgtcatggaagaagttcagcaaaagttgttcaaggagttgaactcattggttcaagtttgtgagccagaagattagttttctttcttgtagtcttttcctaagttatgttggattcttgttgaactatgtttgtttgttttttttaatctttggcccttatagataaataaaaaggagagtaatattttaattgtgtactaactggtgaccattttttcaggtagctttgagtttgatttatgtagtattaaacttttgttaaagttagcattttattttatgttaatgttgttttttaggagaatttgtttttgtgttttttgctaactttgttatacagtatttgaacataaaaaatattttgattatctaaaatgccaaaaggagaaataataaagtctatttttttttttttttgcaatttaattgtcaaaatattttttaatttattttat

SEQ ID NO: 247439 - DNA, 571 bp, Cannabis indica
caggagcagtatcttcattgggattgacagttatggttggagaatggtgagaaggctgctgagattggttaggacacacagaggcagtggtaattgggtttgtagcagtgtcattgttgagataaatggcagtaggtgagattgggggattgtttacatttagaaaagatactataggaggaacaccagaaggtgaatgtgaagagagttcagtggtggttgagtgatttctaggctgagaagagtagggaaaagtgtgttcatcaaagacaacatctcttgagatgtagagcctgttgtctttagataaacacttaaaccctttgtgtgccatgctatagcctagaaaaatacatgggacagacctatattgcagcttatttttgttgtatggtcttagattgggatagcataagcacccaaagaccttgagacttgtataatcagggacagtgtggaataatacctcaataggtgatttgtttattagaataagtgagggcatttgattgattagataggctgcagttctaaaagattcatcccagtatttgagaggaaggttggcttg

SEQ ID NO: 247440 - DNA, 641 bp, Cannabis indica
agttccgtcgccggctacggcaacaacaaccagtaacggaaacagagccagagattccttcatcagcgaaacgaatttcgacaccaacatgtaaccggttaaccgaaacgctggagcaagctgcggcgagacttgcgagaactgggttgaaaaagatccgactccggcaattacccgattccgagcactgaatgtccgatctgttagggggtttttaaagatgaagcaaacgacgtcgtttttggttaggcaaagaaatcaaattgaaaacccggaaatggaggagaaagttcgtcagaaaatgaaagaaaagagttgccggaaaatgtttccggtggagaagaagttgccttcccaccatcgccgctgcctccggattttaatagcaaaacttgatcgagagaaagaggaaagtaaattgagtgttcacaaatcacactcacataaccgaggagaaaactcaagctaaacacatccgatttgacagagaaaacttctccttgaacgtattctggtcgtgacatgtaatgtaagcactgttcaacattattatttaatgaattatgagatataagttaattagtttgcattggtttccaattccatgcatgaattcccacttcataaatgagtgtcaagat

SEQ ID NO: 247441 - DNA, 495 bp, Cannabis indica
cggttaaccgtttacactaggtaacccaaaaatttaaaaatcttgaccaattcataaccaaaccaaaccaaaccttcaagacctgcttaatgtaccccaaagaacatattccaagcaacaaaacaactaaacaaactcaaaatcaaaatctaccattaaagagcaaaacttgagctcttaaactcaaaacttgctcgaatatcacaacagcccctaaatccacttcaaaatagcatgaataaccttaattcaactccagaaaacaaactcaaatactaacccaaaacagcaaaccctaatactcaaattcatgcataaaaccataactttaaacttaagaaatcaaagaagaagagtctaagagctttaccatggattggatcactaagaatttggtaaattactcaggaacaagctgaaaacacccaaacccttgttggtttctatagggctcgagagagaaagagagaattggagagagagagagagagggag

SEQ ID NO: 247442 - DNA, 516 bp, Cannabis indica
accatttcccaccacataagggcgacatcctgaaattgaaacaagacaaaggttacatggtcatttttggtgacactcataaaattaaggatcctttcaataactcttagccactattttgccttcttgacatcaggatctcctataatggttggaggctttttttttacaaaattgctcttataaaggctccatgcgattacgagcaataattattctgctagcaccactagcaccaaagttgctggcattggctgaggaggcatagcaggaggaccctgttgtctcatcctttgaatctcttaatcttgctgattaattagggcatgcattttctgcaaacatttgctcctaatcttgaggagcatgtggttgattttcataacatcctcttttggaatctaccacgacttctgccgcgtccatggggatttggaggattttgacatccgtgaccacctcaagtctcaaccatattgccatgactccttgtgttgttggatatttattttacca

SEQ ID NO: 247443 - DNA, 688 bp, Cannabis indica
ctaaacacgaattaacatacttcccacttgaagcagcctacaagatagacattgtacatacaacatttttataaataaatctagtagttctgaaaaacaatagttatcaccataagaagaattcacataccaatgaaatgattagtttaattaattagagcatccataatatcaatcctgcaggaccacgtgttcattgagaatacctggaaagaattacccaatcagtaattgagtaaattgaaaacagcaaagataacatcaaatcaaagtgcttttatcaacttacagaagcaagaagagagtgatgaagaacattatcgatatgtgaaactgtaacagacagtgccttcaaactcgtttatcaagcattaacaaacaaaatttagttgatcaaaataaaaagtcaaatttgacagaatgttttaacaggcttcatacaggatgtctataaagtaattacatgataaatcccatgaaacaaatgaattaacttctttgacaaagaagcaaaagaacttgacaaaaaaaatagctttagatagagagcttaccacgagcagtgcaacctcatcaggagcaagatgtcccctgtggtgcatgactgcaacaagttggttatacttgtcactaatccccctaaaccagaaaagataaaagaaaacaataattaaattctcacaacaaa

SEQ ID NO: 247444 - DNA, 644 bp, Cannabis indica
aggaagttgagaagaaaaagaagactgatgcattcaagtcttcttcctcccatgccattagtgaagaagatgaggatagtttatgtagtgacatggaggacttggcccttttctccaagaaacacaaaaagttcataaaattcgaaaagtacattgggaagaagccacaaagagggagtgactcaaaagaaagaaagaacaaagataatccatcaatttgctttgaatgcaagaagcctagatgcatgaaaatggattgtccaatgagaaagaagaacaaatacaaagcaagggcaatgttggcggattggctaactagtgatgaggaggactccgaaaatgaggagaagaatgaagtggcaaacatgtgcatgatggcacttgatgatggggtaagcatttctagccaaaatgattgtgataatgataacttaaatatgccatatgatgagttgtctaattcatttaaggagctatttaatgattttggtaaattgcttgctaaaatccaaactcttagagagaagacccacatgctactaaaagaaattgagattttgaaattaaatgaaaatgaacttttagttaagtcgcaatgtgctacatgttcatcatataagaaaaaaattgttgatttaaatgct

SEQ ID NO: 247445 - DNA, 1913 bp, Cannabis indica
ttgtaaatcacgttgcataggctgatggggcgaaagttagccattcaggtaggcttgtcaatctttggaataaggcagatcaaggtatcattaatctcattcagtggtctaccttcattaagaattcccgaacacactttggttacttcctcaccaattttcggccaataaagacggtagaaaagaccaggcatcccatcacttccaggagccttgtgagggtgtatgttcctcattgctgcatagacatcttccttggtgaagggcgctttgaggtactcattcgtttctcaggaaatcttattcggaactatgcgttggaactcctccaaatcagcgatgtttgctgaatgtgatgtaaaaagttgctggaagtagagacaagccacttgacccaccattttgttaccatgaacccatttttcattgctgtcgaggatacccaagatggtatttttcctctttcgggtgttggccttcctatgaaaatatttggtatttcgatccccttcttttaaccaaattgcacggcttcgttgcctccaaaacttctcttctttatcaaggagaacattatttttctgctcaagttcttttaaaaattgccaatcattgttgtttgtacttctagagaggattgttattttatcttcgtactccttcagcctatgcttcatttcggccttcctactcttattccacttttgaagagcctttccacagcaagccaacttatccctcaacgccatagccgtgttacacctgccccccttgtcccaactctccgtcactatttccgtacatttatcctcatcagcccaagcatgctcaaaatggaaccgagagtgccagcgagccccattctcattctcatgatgttttaacaagcaatgaaggaggatagggcagtgatctgaacttagccgatctaggtgattgactttagcttccgggaaaagatcaaaccactccggattgccacacacacggtctaatctttcaaaaatcagctcgttcttccttccattacaccaagtatattcgctgccctcatactccacctctcgaagatcgcttccatttagagcctttctgaagttgtttatcaaataactcggctttggttgcccacccaacttttcctggtttcttaagatctcattgaagtctcccccaatcacccaaggccccgaatacatccttcctattattgccaggagtttccacgattcacacctttgagttggatccggatcaccgtaaaaacccgtgaaacgccaccattgcccttcctctttccgaatgaaagaatcaatatggaaagatgaaaaagacatgatattgcagtccaccatgttagaccaaagtaaaattagccccccacttttcccatgggcttccacaacaaaacaaccatcataacccaaggacaccctcaaagcctccgcttttcctttcttcaaccgagattctgaaatgaaaaccaactccggagcccaccgattcacaagggattttaacgtacggaccgtccaagggttccccaaaccttgaacgttccaaagtaagagtttcatggttgtaggcgaccctgcccagcagagttcgcctcttcctcattctgtcccgttgttgaatctcttgcctgagaaacttcaaccggtatggtacccactttgctcttcctattctttgtgtccttctttaccgccacctttcttcgatgttcctttgacatattatgtttacccgatcccaagttaaaggaagatcctccatagaaagcatcaccctccttagcaaaggcgattgggacatcgaatagttgtggctgtccaagggaatcattagccgaaatatctgttttttggagtttcccataccccattcctgcttgtgtttctaccattctt

SEQ ID NO: 247446 - DNA, 1281 bp, Cannabis indica
cttcctagaatgacgattggccctacaaaccaatacgagtgtttgcttcctgaaaaaacttcttagaatgtcacccatcccaagattactccatgtcaagcacacttcgttggggttttatactttaaataaaatctaatttcaatataatattatttacttattaataaaagatcgaagattaattttttactattgtatatggcttggctcacatgcttttcataatcatttattcaatatataaattttgctaaattctaaacatatagttattcacgattatagtgttgtcactaaagtggaaaataatcgtgaatatatgcttcaaactacttagtcccataacttatcagagcactggaattacactaacaggataataaccgatctggttttcttacacttgttaaagtggaatgtcatttctaagatattagcaaagtaaacttatatttgatgtatatgatttatatcggactgagccaatattaacagtggaaaatatatcatgaatatattattttatctttttaagttaatatcacttagtttatcttagatcaattgatctcaatcctaaaattattaaactttaagctagttgtattattataatttcttgacttgttcgttacaagcttacctgttggtttagcccatacatacatcttaaaaactcagtagttcaattgagttggagcgttaatcatagatatagaaatctataacttctatgattatttaaaagtaatacaatagtttcctttgagcttggataaacgaattaaatggtggagtacttatttcagtaattacattagtaaactgaatatcatttacaaggagctgagtgtttaaaggataaaatatattgagggataaaatagtaattttgttcccactcaatgtagaccatctatagaggatcattaattagtttgattgaaataatagataatattaattagtttgattgaaataatagataattcatagtgtatctctattgcatatatagagtattctatatattcaaaagggcaattcctagtctataatgaagtcgtgaggaattaataagctaagaaatttactcagtaaattttagatcaacttaatgggagcttaattttataagttcatggtccccacattacctgggatcatcttgatgactcaatcaattgaaattcgaaacttgactatgtttaatttgagaattttcacttagattggaaaaaaaattaagaagaaaagagaaattagattttattcgtt

SEQ ID NO: 247447 - DNA, 2101 bp, Cannabis indica
aactagtagttttagttttagggttaggggatttgtcatgcatgcttttatttatgtaagttttgtgtacttttactacttgtttttgtgtaataaaatggcgcaccttatatattattagattagaattatggggttgaatttaagttatctttactgttcatggagaaaaatgtgtacaaaattgtttttttttctttgttttttgttttatacatccaatttagggtaattaaaatttttacttttgaattttgacatgtattaaattatgttttaatttttcagacacttaaataatctttttgaagaatttaaaaatatttgtttcattttatttaattttgttaatgtgactattttttatatactaaatcatattttttgaactttaatatttatttaaaaaatttatcaacttttattgaatatgatttgctacatataaaaatttaaatgggacaaaatcataattagcttctaatttatgaaggtcatggaaaagaagaagagaataatagagatgtggaaatttaggtgaaccaagtaatgacctaacaaaagtttgggcaacataaacagtatttctttgtaacctttcttttctatgataagaatagaagaagaagaagaatagtaaagaaggttatagatctttggtttggtacaaccccaattaatctaaactaataataataataattaattattaaaatgggagggcctaccctaggaaataatagtagtcataatccaaattagtgctacgtcgttatctttctataaactgacacgcgtaccaaaagaagaaacaaaacaaaacaacatctattattaatttatacatacaaccttagctatctaaatatatctatatagtgccgacctcttttttctcttttctgccaaaacgattcgtttctcatctctattattgtgttctgcaagataagatttacataattattattattatttatttatcaactacggtgcaatagaaaattgattttcatcttccaattttcgtagatatggtatggtgcaatttactagtttattgcattagtattttgttaaaagatagtgtgagaatttaatactattcattagttcagtttattattactgagataaaagagtaatattaatagatacacatccaaattccacatttatcatctactcatcaagagagtttattaaaaattcagatttttagtactaattttattttttacctcactttaaatatagtattagagctaagtaaatttctaaggaatatttgatccacttaataccatataaagaatgtatgagttaatttactcattcttcattaattttaagacgaaatctatatatctaccatataccactctcgatttattttttcaactacactttcatattttaataataatcatataaattattaagtattaatgatgttttaaattataataacgctttgacatatttagtagatcatattagagttatattgtattcaaataataaagaacatattgtttagataaaattttgtattgtataaattatcacaactgtaaattttaatataatgtgaatcatattatttaatacatgacaaataatccgtattagtttgtattataatatttagactcgaactttggctacatgacaaataattcgtattagtttgtattataatatttagacctggactttggccctagaccccaaacttgaatccgaacccagacttcacctggacacatccctggaatcggaccctgtactcagacttagaacctaaacccgaactcacaccccgaatttagaaccaaccctttacccaaaaccagacccaaacccgaccctagacttggctctaaatcccgacccaaacccaaccttagactgggactcgagcccggacccgaacgtaatcccacttggacccgaactcggagtctgcgtcccgactttagacctaggtcaaattagggttcgagtctgaggttagggtctactctaaggatggggtcagggccaaggttgctgactcggagccagagatgggactgggtttcagggccgaagtcgaggt

SEQ ID NO: 247448 - DNA, 748 bp, Cannabis indica
tatcaaatattgacttaataatttattttaataaaaaaattatctaataatgatttttataaaatataattcataatatcaaataaaaaatttaagagttagtttttttactttttctatgtacaaattaatgaaatttttgtatatgtgtaattttttaaatttatatatatttttagacatttttttagtgaaagaagatagactttatatgcaaaattaaagctacaggatcatagaaataataattaaatgtaatggtgaacattttagttatttataatattttataaattttaaaaaaatttgaataatttcctatcaaatataagatttaaacaagttattttacacgcgtataatataaaatatacacatgtacaaaaagaagatacttttttttcggcacattaattatactagataatctgaacatttgcaaaaatatattaaataattataatgtacatttcttttagcatgaaacctgtatcctattaataaaaagcaaagaatcctagatacaaattacaattgtaaagataaattcttctacaaagcagcctcctgatctaggcctaaagtttttttagctagataatgggtagcttcatttgcccctcttgagatgtaactaataaaagctttagggaaatgtaatctactaaaaccttataatccgaaacaatggcatctggataaatagaatggttatgacactaagaaagagcaaagtataatgcatgtg

SEQ ID NO: 247449 - DNA, 763 bp, Cannabis indica
ctttagtttgccctttcctcacatgcttcttttcttgtccacgccacacatcactggttgtctcagtgggtttaaaggctcgagactgagcttcgcaaagttagggaacataaggatgttgtggcgaagaagtggagcgactccgaagttgaggtctctcacacaaaagaagaagcaagaagcagcatcaagccgaccaacaaaagatcaaggacctcgaggattctcttaagtctctccaagctgatctcattaaaaaacaagttgataacggccaaaagctcacagagttggaggactgaaaccaaagaaaagggtcaacaatattggtaggaggactgtttatcaaatttggtcattcaaccccaagttggaattcggctttttgggtgacaagattgaggatatgcttgccttttgccagaagactgagaaggaagaatcgggcgaggaagaggaggttgaagtagagcaagaaggtccagccaagtcccctataataatgtagactcaatcttaagtgttatagtgagattttatcacctagaaactcgagactggactcctataaaaaagacacgtgtattcactctcctcgaggagagttgaggtgtcaatgagagacccctcgaatatgaacctcgtctgaaccagattcagcgagatgatgcgaccataaccgagtctagtcgcatttgtatggtaagtgtatctataaaaatatctatgttaatttcaaatttattaattatttaatttgtca

SEQ ID NO: 247450 - DNA, 1344 bp, Cannabis indica
acctggtcgcgaccaacttaacgactggtcgtgactacaggcaaatctcgaaatactgaggttctgccaaaactccgagtcgtgaccgtggtcgcgaccatagaaaagggtcgcgactagcacgatccatggtcgcgactactgacacccaaagagcatatttttccgatttttcaccagtttgtcccttcttttcatcaattgactgaatttgaactttgataccctggaaacctgaaacaaggaaaatcaagcgtaaaaccgctccaaaagacaccaataactgagaaaatgcttacttattagacccgtaacataggctaattataacctaacaagaacatcctcttcgaactcatcaccttcaacaagtcagtcgtacaccaagctctcagctccatatccaaaaactacaccattcatgctttcatcatcgacttcttctgtgctgaaacactcactgtctctgctcaactcaaaatcccctgtttcattttctacacctcatcggcttttgacttagttgcctttctttattttcccacccttcacagaaattcccagaagagcttcaaagaccaaaatatcatcctcgatattcctggagttccgcctatgccatcttctgacatggcaaagcctttgctcgactgccgtgacaaggcctatgatagttttcttgcatgtgcggctaattatttatgtgaatttacaagaatcattgtgtacacgtttgagtcctgaatatgacagcaattgcatgtgggcctatgatgaggttaggggacccatttaagaggcctaaatatgacagcagtgatcaccgtctatcattcactaaatgacattatttttcattgaatgagctcccaactacatagctctcttatctctcttttagaccttctaaccatcacctattaattataaccttaagcttttaacaagaaagccagccaagttttggttactaaaaaaaactagcaattggatgtacttttataatgatttttatttgtaataagttgcatactttttttctcttttgttggataagttatacatagtcggggagttcgaaaggagtaagtaaatgtacaaaaatcattttctatataattaaggaatatatcaacttctcgtgaaccaactaaatttgtacataccaaatttttatctgtctcaattgcttatctactaaattcaaggcatagatcttctttgaattccaaccagaaacaaaaatataaacctcatgacttgtgacataagggcaaataggagccaagttctcaaacacattgatacttataaatgacatatacagatgtacttataataaac

SEQ ID NO: 247451 - DNA, 662 bp, Cannabis indica
ccatatgaggactactggaagaggtagccaaactttttttttagtgcgagccatagcgggtaacatgatggccaatttcacggtggctatagtagtctcggcaagggggagctcccctgacgcgtcaatgggcacccctactggaatgctagtctgaccggaaggaagggtgtatgtcaactctcggggcaaataagatcgtatcccctttccaagctcccagatgtgcatgttttatgcttcaccacctatcgtctctcggtagaggtggttgggcgtttccgacccactactagacccttcgcccccagacgagttgtgtgggggcaacgctggacaatcttcgaacaatattgaagaagatcctcgtctactcggtgctcacctccccaataatcactataacacatctataaaaaggaaaaagcggggagatgagtgcacctagtattgctagtaggctatccatgatggactcacctactagtacaaaggtaaaaggggaaggaaaacatgcataacaaaaatttataacgagagaacaaccatttgtgtagctaaataaagggggcaacaatgataattacacacttaaaattttaccaagtgtggaaagcaaaaacaacacatggaagcatatatttaagaccccgagaggtaga

SEQ ID NO: 247452 - DNA, 603 bp, Cannabis indica
agtcagctaaacaaccatactcaggcggaggtattagaccaacctctcaaccaagctggtcaaatacgaagaccccttgcacatcagtgtttgaccgactaggtaccgtacacgaccttagaaacaatttgaaccacagaagaagactggactaacaaaatgttcctcctatcatccagccaaataatgtgaacaactatgtctcaagtccaattctaagagatcctaatgtgacactcgatcaacaggttggccaagttcatccacttgtgcaagcacaaatagatcagcttaagagcatcgtaaaaggcctgaccggcccaaaactcatagatcttgaacttgatcgggcaagaggatcattgttctcaccagaattcaatgctctcaacctacccccccaagttcaaaatgtcagcatggaagacgtatacaggaaaagaagatcatctatctcacctgaaatactttgagatacaaatggacttgcaaggggtgaaatgtaatgtatagtgcagaatcttcccagctacattagcataggtcacccaacaatggtacttcaaaatagcttcagggaagttcagttcatggatctctttt

SEQ ID NO: 247453 - DNA, 927 bp, Cannabis indica
agtcatcagtccatgaagcagccaaagtgacgtactcgtgtataaaagctattcattccgtgggtgtaaggacccaatggaggcttgaagcgaggacgttacaatattgtatcttaaaacaaagcttattaatatatttatatatatgtttgttataggcatttgttgatgtatggaagcaagcgtgtgcatatagtggaagaggtgttgttttgatccccaaagggacatactatgcaagctctatggtgttcaatggaccatgcaagggtcaaacccttttctccattaagggaattcttaaggctccaattgataaaaaagcttgggttggtcttgaaagttggattagttttagatatattgttcacttggagattagtggaggaggctcttttgatggccaaggatcttatgcttggccctataatgattgtcagactaacccacattgcatccaacttcctactgtaagttctctctctataattctttgccatattcttaactattgtgtaaaaatttatgttcatagaagaatctgttcgatttatatgtaaaagatgtgtagagtacatgtatttagctctaacaattttatgtttttattatatacagtccatagggcttgaatttgtgaatcaatcattaatgaaggacataaaattaatcaacagcaaaagctttaacatgaaagtgtttgggtgccaagacacaacttttgaaaacattaaaatcagagctccagccacaagtcccaacactgatggaatccacattggttcatccactggaatcaaaatcttcagctctaacatagccaccggggacgattgtgtctcaatcgggccggggacagacaacctactcgtgagtgggttgacatgtggccccggccacggagttagtatcggaagccttgggaaa

SEQ ID NO: 247454 - DNA, 1282 bp, Cannabis indica
ttggaagactgtgaaggatccaaatccaagagaaggacattcagactcagatcttgattatactctgcaatagaaaggattcaagggttagagatctaagtggaaggagacatattattccgctgcacccaatgtaaggtttctcatactttatatgtgtttacttattatcgtttagaagttcatatttaggttgttaatcaacatacttgtgagtagatctaagatcctggtaaaattaattccaacacaagtatcctttgccaaggatagatgacctatttgatcagctgcagggaaagccttcttctccaagatcgatcttcgatctgtttatcactagttaaggattcgggaagaggatatccccaagatagcttttcgaacccggtatggacactatgaatttctggtaatgtcctttggattaacaaatgcctcggctgcatttttagacttgatgaccgagtgttcaaagacttcctggatgattttgttatcatctttattgatgatattctaatttattcagacacagaagagacacacgaaagacatctttgaatggtgttacaacacctcagggagcataagttgtatgccaagctcaaaaaatgtgaattttggttgcctcaggtaggtttctagggacacgtggtaagtaaagacggtatcttggtggatccggtgaagattgaggcggaacgggactagcctcaacctaagtcggcaactgaagttagacgtttcctaggattggcgggatattatagaagatttgttgagggttttgctaagatttcgacgcccttaacagaattgacttgaaagcactacaagtttatttggactgaaacaaagattaatttccactcctgtgctaactttatcggtcagtgatgaaaaattcgtgatttattgtgatgcatccaaacaggggttaggctgtgttcttatgtagtatggaaaagtgattgcttatgcatccaagcaattgaaagagtatgagcagcggtatcctacccatgatattgaacttgcaacagttattttcgcactgaaggtttgacgtcattatctatatggcgaaagatgcgagatctatactgatcacaagagactcaagtacttttcactcagaagaatttaaatatgaggcgacgacgatggttggaactggtcaaggattatgactgggagattctctactgtcttagaaaagtaaatgtggtactgaacgctctaagtcgaaagggcctagggcaagtttgtgaattaaaga

SEQ ID NO: 247455 - DNA, 648 bp, Cannabis indica
gcagacatgtctctgaagatgctggatgctctgaagaagagagttggaggaagctcaagcgcctctcctccggccaagaaatccaggggcggtgaggcaaccccttccaaggaaaaggcaccagccggggaggttattgacctttccgaggagctaactgttgcgaacccctctactccaaaagttgctaagtcgaaggattctagaggaggaagctcggacaggcctaagaaatcaaaaggtggatccgagctggccaagagtggattcgagcagatgcgggttcctactccacctttgccattgcttctagaggccaagaaaggtaaggagatgctcacccattacatgaaccagttggttcctgaagtgagggagcaactagctggcgctgacaacgaatcttctctagagctgctgatggtaggagtctttaaggaattcacaagggtaagtatttcttgaccgttccctttagtccttctttacacagttcagactctaaatttttttctctgtgtaggctggtctgaagttggcttacacttactcccgagctaagtctgccgcctccaagaacggtgctctgtccaacaccatgggggcggaggtggacttggccaggaaggacgctgatgatgccagggt

SEQ ID NO: 247456 - DNA, 4762 bp, Cannabis indica
ccatagggctggccagaggggcggccggccagcccccttgaggtggatgaatcgtcaccttgtcatcccacttaagtattcagacttctcattggttgaagtgctgagtagatgacttggccttcttcttagcgagctgtactgccacatggcattgatgttggccacattaacatgtcacgtcaggtgggtaaaaatcgagataacatttcttatgccccaaattggcttacattatttctaaaaaataataacagcaaaacctacagcaattatatcatataattaacaattcatcacttctcatacattcacaataaaattaccatccattcacatacatatctcatatatataaatacataaaacccatacaacatttaatgtatacacattcatggaactactttgataccaattgtttatttttattgtactaaatcaggtacgcagtggaagagtttcgtattatctgattatcataataccatatcttaatagatctctgcatgtttgtacattaaatcaaaacagtaaaaggaataatttaaagtatatatcctcaaaacttctcgtaagttgtattccctaatcccattgatgaagaattatttcaatttggactcacactagtgtcttctaaatcgatcctccacacacaaggaatagtgtggactacggaaatgaaagaagtctaccgaaagcccttggtacttgtctaatcaattactatgatagcttcaatatttcattaggataaagtgtatacatttttttgagttctcaacacatgagcaagaacaattgagagaaataacagttcagaaggagtgagaagtgttctcaaattttatgttctgatttctcaaatcagactcctatttatagtagttaaatccttttaattaaatcatatttaattattttaataaataaatatctatgaccgaattggattacttatatttatgagagaatatcttaacaatcttgaaatatctataaccacttttcaaaattagatatttgcctaattgaattaattaaataataaattaacccaaaaagataaatcccataaggataggaacaatcataggagcctaccattgtctttaggacaaggttgatgtcttctgtcctaacaacttttgtcttgacaaatgttgtctcgaaaaattttatcttaacaaattttgtcttttccctttttaattaatattaaaaattttattcatttattaaaaattaaataattactattttgccaatttaaaatagaattttcgaatatatttatacaactctttatcccctacccttgacattgacaatatttcaaggtggcgatttggggaccatggacctataattctaagctccaatgaactagattatttattgattctcatcaaccaaataatctcttgtttattaattccatgattactttactataaataagaaattgtactcttagtaattatagaattatattaactgagtttaactgtagtatccattgatatatcaattccagtgattagccctccatttgttggtttataattagttttggtcaaaatactattttacccttctagttacttctttatcctttagtaccattaattcactagtggaagtataattcaagattccgtctgaattttgtgcacatcattccaattccataattaacacttaaagggaaccaacattcgatttgttagaaaagtcaggatttcataattgtacatcttgttcctagccatccatgttattagattcccaaaatagaacttttaagaatcattttctaaacaagtgaatcaaagaaactaataacatgaacatgagttcatgataactcaagatttagaccagtctactattgatcatcgttatgatatgaattaggtctttaaaataaacgacatattaataaagacaacttcattcatatcagtccttgtcatatataatatctattatgcacaacaccttcacttagatgtctcactacattagtaatccaaaccaagattacttgcaccgtagaacagacatcagtgaatcgtactatcaactattgattaaagattctataactgtaatatgttgttgactattttaaacatagctaagtggtcagaattctctgtacagctacaagcaacaaccttatatatgataaaagattttttcgatatttaataaactattcaataataacttaacgttcacacatatatcaaatgtttaacactttatttaataatcaggaatgtctttactagctttttagggtataaaccctaacacgctattcataccaggaaccttaaattcagacaggatgccaccaagcatcttatcaacgataaagaactcggaaggcttaaaaggaacctttgaaggtatcctagctacaccctagacttttggagacagaatctttgaaaagtggtatgtgttgggagatttggtgctgtgatggatgttaaaaaccaagtaaaactctacagccaaaggaaaatgacctttcgcccctttgaaggcaatggcgaaacacgtcagtattttacataatccattggggtgagttggagaggggcgatgataaagtaagcaagtatttcaaacaaaaaaatggatggagagaggtaaggtggcgccagtcgccataatgtatctactgaaggcctacccccccccccccccccttacgtggggggtgatagcaagctcatcttgccaggccttgcgcaaagttagaccgttggtagcgcgcaccttgaaggtgtccatcaccctgtgaatgccatcagcggacatagtactcttgatatctgaatagatagaggatacctcattaggcaatggagggatgtagcagataggagggagtacgcccgtaggatgtggtagaagacactagttatttgggtagagtcatacctacagacatataaaagttatcataagcacgagccacatgttttctatttcttttaggcctcttacaagctcaggccttgaccctgggcactctctggagcaagagggtgccaaacgtgactccctattcctcgcccaaagaaggcctgatagcctctaaagaggaaagaacgtcaggcacaggaggaagggaactctcaaggaatctcatatgggtttaagattcaacaaatgaatctctaagcctagaaagatacacgccagagtcagtaacaaaataatgttgttctcctttcaaaattgaatggatttcagcttaaatcctctcaatgcgctctctacaagtaataatgtgtttaaagtgattggccctctcagacattagcctagcgtatctagcatatgggtcctcttaagtgtccttcaaatcagaggataaaatgtcaatgatatcagtcgtcggaaacatctctttttggagttgctcccaaatgggacttagaactaaaaaattcaaagagacatgatgccttgaaacccctatctaaaagttaaaatcaaggcattgagctcactagacattattacattgggttgtaggcccctacagggatgtaggtgtgcaaaccgacaccacaaaggtaacatacaaaccacgactgctagtataatagacacgtagtgtagaggtaacgaaaatggaaaagatagagataatcgtggtacctcttgaagcaggaaagatcacaaagaaagggcaattcactctagagtgagtaaagatgcatgttatccagatcaaaatgcaagcgttaagacgccactccagggtcaaaggtaacacaagccaagtaaggcgaagacaagggtagaaaatatccaagtatattcaagtatgtatgaaaaaataaaaatagatgtgtatgcctaaataagagaaataagattggaaaaagtaacctggggaaggatcaaagacctcttggaaaaagtgaggaggatttgccactacaccaaggtgatgttctgacgtaaaaattcaagcaagggaggccccctatatatagtgggcacatcctcgataaacgtgaagaagataatgatcacactgcaacaagaaaaattccccaattcacttagtctaccagaaaacttaaagaattcttgtaaactggggccaagtgttaaccccaaaaattagcgttgttaactctctacatttgttgcctcgtaactaaatgattaacaaggacatattcgattcccctactcacttgacgtgtatctctcaaagtcaccaacaatactaatgagccttgggggacacccgagcagatcctagattagctccgcaagttatgtccgtgtgcgggggtgtgagatgggggcttgcatgcaagcccatgtgagtgctcacatgcgagcatgcatgagtgtgtgtgtgtgtgcatctgggtgtaggggtgcaagacgaggggctcgcatgcgagcgtgcgtatgtgtgtgtgcggatgcaggggtgcaagacgaggggctcacatgcgagcgtgtgtgtgtgtgtgtgtgcggatgcaagggtgcaagatgaggggctcgcatgtgagcatgggtatgtgtgtggagatgcaagggtgcgaggaaaggggctcgcatgcgagcgtgcatgtgtgtgcagatgcaggggtgcgagacaaggggctcgcatgcgagcgtgcgtgcgtgtgtgtatgtgtgtgggtgcaggggtgcgagacgagaggctcgcttgcgagcccatgggggggctcgcatgcatgcatgt

SEQ ID NO: 247457 - DNA, 692 bp, Cannabis indica
aacatgatgttacaacaaaaatatgcaggaccacatactcaatacatgatcctaattaaataatatgtatcctaaataactatgttatagtgatatattctagcatcttttaaaatatacactctagctaccatatctgccttcattattaactatttcttttatcatcacttcatcccctcaaatcaggtttgagttaattagacttattccttaattaaaatgtacaactaattacttgtgactaaatgtaactactacaacaaattactattgttggtgataattttttaatcacaacataattttttgtgactaaatttacaacaaaatattacttgtgactaaaatatagtattaaatattgtgactaaaaatacatttagtcacaacaaattataaattttttgactaatacttttagttacggatcttttagtcacaacatatgaatgatgatttataattagtcataactttttttcttttacttttagtcacaaattttattatgattataggtaaaaaaatttgtagtgactgtaaacatcggttaactagacacatacttaagccggcccaaaaataattcttttaaaaatatatgtacacataggtggcgtttggtaacacttttttaatcaattttctgtttttaaaagtagaaaaatgaaaatatttttcaaaaacat

SEQ ID NO: 247458 - DNA, 1217 bp, Cannabis indica
tcaaactctataggtctacatcgagaataatcttcagcaaaagggatacgatgaataactaagggagacttaccggatccggaggtgctggcatcaggagccccagtgttgagaaccgggagcagtaacttgggccgagacggcaccggctctttgccagcctctacccggagagtcctcccggcagcagcttgagccttaatgtaagctagctcatgttccctcctaaagaggtatttctggtaccggtcctctgctgaggcgataatgttcgcccggagtaccgtttcagcatcaggggtgcgaatgttggggcaaaggaccttagagaggttgaagttgtccaccgattggccctccgtgataagcttagccttcctgcagttcaccatggtgaccaagtcccccacattaagaccctctttgtcatatgtggaaaagaccttggcctgctgaaggaagagttgggtaggagcagtggggtgcatcgggggaatcctaacccacttcgtgagcagttctgggcgttccacggcttgaaaactggaagagaagaaaaatcggtgacgatactccttgacattctgttggaagttataagggaccaaaccctcgttggcaagatgggtccggagtgtgacaaaactgtctttaaatttatcccccttcttagggacagacacaagttcgtaaaaatataaaatttccgcccgggctacataaaaaataaataaacctgagagcaggcggtacgcttggggaatgagttggtaaggcgcgaggccaacaaaaactaaaaaattaataaagtaatcttggagcgggagcatggctccgaacatgaggtgggtctggctccaggttccaaaaccaccgtagttgtggttgggcgtctcttcctctcgaggcaggcggtgaaaaaccccagaagcggacggcttgataccagccacggtcacaatcttttctagctggtgggcacaagtcaaggttgagcgaagtaggtccgcttcccaaccattcgattgacaggtgtagttctcctaaacgatagggcccttcatcacttcctccagggtagcaagagtaaattcccccttacgggaagatttgattccgaacgcagaagcaaacatttagttctgtaaaaggaaaaatccagcagttagcccccaaaccaaaccctagtgttaaaagagggaatgggggtcccctaa

SEQ ID NO: 247459 - DNA, 893 bp, Cannabis indica
ctcccaaacaaaaccttattcatgtaaatattattgtagagaaacaacacacacattatttgactttatatgtattatgtatatcattttagaggtggaacactctgttcatgccagaagaagttatccggatcaacttcacttttcacactgaccaatctatcgaagttagccttgaaatacttttccccccaaactcttgattgtttaaagcttgtagtgttgttcatcttcttgttcctcccaatatcaagatccctataattcacataagcttcacgtggagacatggaaacataaggagccatatactcgtacaactttctattccaattaatgtgtttttcagggtgtttctctccaatattccaagtgttaaagtacagactcatgaaaatgattcctttcctatgagggaaaggggaatcagattccggaatcacgctcatctttccaccatatggagtccatattatggccgcttgaatatctttctccaacaacctttcccacagcccctccagaccaacatctggtatgggtttcttgataaagtcagactttgctttgaaaaaggtattgaatatagatttcgattgaagaaggtactccactggtgttccattctgtcttccttcaagaaacgccgcagtctcaatccaactcatttccacacaatctttcttgatcaaacccaactcaggaaagctatgatccataattcgtagaagtccattagtgtttcccaggaacagagcttcataagtagttgctatagttctttgaccaatctttgtaccgttagccactgtcgtagtgaccctaaggaataaatcttcatcaagcttatccgcaatatgttgccacttatggatgatcttcttcgctccttg

SEQ ID NO: 247460 - DNA, 1212 bp, Cannabis indica
gtataggatgcaatttcctctttttattaatgtttattgggcttttttaaaaattttcaagtcttttaaattaggcagcagaaaactaaatttaaaatactaatttgggctttttttagggctgaaatagcccatttcacacacaaaatttgaggcgcacgcctcttacgcctcaacgcctcacgcctcaactcaacgcctcaccacatgaggtgtacgcctcacttcttctcaggcgcacgccttgaggcactagacgcgcctcaaaaacgcctttttaaacattggtttaagcattgtagtgttgatttccattccaatagactgaaacaattttatctttaattctttgatttgatgatatgtgttggttttagtgcttacaaagtgtttgatataattcctcactgagttcttaaggtgttattggtgagttctctttctctttctctttaccctcttttcctttccacactcaaatctgattacaacaaacaccaaacacccaatttctttgttgataaataaattactttcacaaacaaactaatgacacatgacaccgtgcaggcatgtttttgtattccttctccataaaatatattagaataataaaaagaaaatacatttaacaaacaaaaacataataacaataataggaaaaattacggttcccatttcccagtcgcaatgtccagcgcaagccaccatcacctccttcgcctggccctttcatgtcgaaaaatcacggctcaagtgacgagcccttcctcctcttcgatcgtagctatggcttcctccaccgagcaggagttcttgtcccactaccgcgccaagctcaaccgattccctcgttcacacaacttctgggacgctaagatcgcctcccgcgttggtgagaagctagcctttcgtcttaaagaaatcggcgtcaccgccgtacagatcgaccttcgcgaggaactttctcgccccgcccattaccgcctcatgatttcgcccttattcgattcagtccgccgtgctggtgtggccgttgatggagccgagaatattggggtcggcggcgcacatatttgtattgattctgattaattaacagtggtgataataattttttaaaattcaagaattttccttttttttgttaatgaagttattttttctttcattcaattattattaatgaaggaatatacaattatacaaaac

SEQ ID NO: 247461 - DNA, 1184 bp, Cannabis indica
aaatcacgtaatacgcctaagttagttagggtgttacatgatcgctctttatcccaaatctaatcgcaaatacaatggtggtgcagactcgtagaggcgtggttgacccagaaaatccacaagcggtggatcctgcactgcagaacccggggaacacgagggtttcgccaaccacaaattccaaacaaccctttatcgtaggtcacggtgtgacgactcctgtgagtggaatcgcgcctggtgtgcaagagactgagaataccaattcagcaaccaaccagggcattcctaacactgtcgtttcgcccgcaaccaatgttcgaacaaccatcggagatgacactgaaatccaaaaccttcgtgctgctctcggagtcatgcaaggtcataccaacaccctgcatcatgatcaggaggaactccgtgctgcagtaaatctcgcattcgaagagcaaaggcgcatgttcgctgaatggagagacaatgagatagaaacgttaagggctcagcaagcagccattgacaaccgaacccgacaggccactgtgttaatacgaaaagcctaccaagctaccggacaacagcttataactgtcatccccttgggcgagacagacgaagatccagtggtgaacacctcttagactataaatggtcagctgtccaatccccgatcacaagttccacctgtgggccaaacggtaggcggacagaccctgtctagcaattcatcaggagaagtcatacctaacaattccaaccaggttaatggtggcggccagctgatgggccaaaccaactagtcccttagacagccgggtgtttctgtatttaatcgtttggggacaattcatgatctctgagatgatctaaacagaaggagaggggtggccgaccaacatgacacaccagtcgttcagcccggaactcgcgctcaaaattccactcaaagagatgctgacgtgactcaggtcggccaaaaggctgaacaagttagtccagccgtgcaggcacagctggacgaactaaagaatatgttccaaggcctggccggtcagaggaacaatgatctcgagttggaccgtgcacgcggatcccctttctcacaagtgttgaatttacttttacctgacgggaactaggacacacttaagctccataacctttttgaccatgaaacaaaa

SEQ ID NO: 247462 - DNA, 748 bp, Cannabis indica
actcttgatataaataacttttgagtgtgcacactatcaatatgttctagcgtgtattagattaattatttataaaattaatatttaaatttctgacactcaaaacacaaaaagctgaaaactttaaatataaaaatattgaagaaaattaatgtttattcagccattgcattgatatccagtagaagcctataatagttggttttccattgaaagatttaagttactatgcttcaaattacagcccaaagttttactattcttaccaattattttaattttcaaatcccctctctttttaatcctcctgcttctattattgtcgaaccaccaccccaccgactcgcacactcaaatcccaatacggtcaaatcttgcgatcctttgtgacctttccctctctttcacacccagccccgtcgatcttccatagtcctcccttccgtgaacgcagaccgtgatggactgtcggatattcgcacgtcgaagcctcctctttccttgcttgagattagagctgatcacttaaacctttaatgttccagtttttcgtattttatatatttttacagtatatatatacttccatatatcttttcacaaattaataaaaagtagaaagtttgaataaattttaaataaaaatatttatttgttagctaatcactttcattttgttgtatttacttttattaagcaatataaattagttgtgataggtttcatcataagtttcttatctttccaa

SEQ ID NO: 247463 - DNA, 1171 bp, Cannabis indica
tgttatgttgttttatattttggagtcttttttctgtattaatttgccactaatattcatactcttactatgtatttcttatatttttttaatggttatattattgattatggtgtttgcatttaatcatgtgtatattttttttcttactgttttttttttcttatttttttaatttattttaagttgtttttaggttttttaaatctttcaaaaaaataataactttgtttttttcccttttttgtttgtattttattattatcaagaattttgttaatttcaatgacggagccactcaaattgatgttgaggctactgttaagtcgggtgtgaaagtagttgagattatggtaatgttgtttgtttgttgatttctggttgtttaatggttgtgaatgtttaaatttttctaattttttttttaagaaaaaaacagatgtcttcaggtgggtttggtggtgattctggtaatcaggttccagattctgaagattttgagattaaggagggtcctggtcttggtgttgtggtgtggttgttttaccgtttttgtttagttgctcaatagttattttataatgactgactttatattttttctcctacttgtttttatatatatatttagatgggtacaacagatgtttgtgttgattctaaaattaaagttgtggagatcatccaattgtgattaagcaaactcctattgttgaaaagagaaaatctaagaaaccaatagctttgacgtcgctctttatggagtttgactcttcgatttcaagttctaaatatggtttttggttatggagttgttaagtacgtagttggtttgtgtcctcttgacaataaaattggagaagatgtagaccataaagacgagaatgattttgacttgtggcttggtgaaggtcgccgaacaaagaaagaccagtatgtgtttttttaatcttttttttcgtgtttcttttctttgataataaattcttatttgttattttcattttttttatcttttaatcatgacaaggacaaggtttaattgaaaggtaaggataagattgttccaccatttcgttttggcgtggaagatgttgcatccaagatgtggtttcataagcttgcatatcctggccaatatttaattgattctgtaagttattttattttt

SEQ ID NO: 247464 - DNA, 573 bp, Cannabis indica
taacctggtccttgacataacaagcatcagcatgaaattcaaacaaaacattgttgtcaagagcaaatttggaaacacttagcaagttcttagttatctcaagtacatgcagtaaatttttaagaaataaaggcttagcatgattattagaggcaacaagagtttgaccacaatgtttaatcgacagacctattccattgcccacatagatctgatctaaaccagtatagtctgcattggtcatcaagttttgtagataaggtgtacagtcatttgtagcacccaagtttggataccaatttccatcatcagcaggtgtggtatgtgctaaattagcttgcattgaaggagtttctgcaggtggaacagctcgagtaaagctcttatcaaatcgatagaaataatcaacaatagtatgtccaagcttgtgacaaagctggcattaaggcctgttttgatgatgaggtggttttcctcctctcgttccagcattagatcctctttcaaagttaaaggtgttggaaatattttaccaggatctagatttactaccaagtatgtttcattaacatc

SEQ ID NO: 247465 - DNA, 1174 bp, Cannabis indica
ttgtgcaccaaatggatgttaggacatcattcttttaatagtgaattaaaagaagaaatttacatggatcaacctaaagggttcatgatcactggccaggaatataaggtttgcaacttagataaatctctgtatggtcttaagcaggaacctaggcaataacatgagaaatttgataatttagttatctcacatggctttaaagtgaatgaaagtgacaattgcatgattatatgtctatatgtggatggcttgcttatatttggttcaaatattcatgttgtgaaatcattgttatgtgctaactttgatatgaaagacctcaaagaagcagatgtaatccgcggtattaagattactaggtctaaaaagaaaatttctttggttccatctcattacattgagaagattctaaagaaatataattactttgacggcaagcctgcttgcgcactatatgatccaagtgtagagctatttaagaacactggttacagtgtgagacaatttgaaaatacgagcatcattggcagtcttcgatataatacttgttgtatgagacctgacattgcctatgtcgtgagatcattgtgcatgtttaccaatagacctagtatagagcattgacatgctattgaaagggtaattagataccttaagagaatcacaaaccttattatcaaaagtttccagctgtacttgaaggatacaatgatgtagattggaacactttgtcagatgactccaaagaaacaagtggctatatagttagcatagctggtggagctgtttcttggaagtcaaagaaacagactattttagcttaattcaccatggagtctaaaatgatagcactagcctttgctagtgaagaagcaggttggctaagaagcctactagttgatatccctttatgggaaagacataccaattgtgttgatccattgaaatcgtacagcgactattgaaaaatccagaaccgttattacaatagtaagaaacgaaaaaatatgtcgcaagcacaacattactagagagttcctctcaacatgagctattagagaggatcttgtacgcattgatgacaatttagcagatcctttgaagaaagaaatagctagagagaaagtccatcaaaacttaaaaaattgtccttagaaagatgagtcactca

SEQ ID NO: 247466 - DNA, 691 bp, Cannabis indica
attctctgggcgtggccccgtggactagtagtgtttgaaagaacactgataccacgttcaaatctcttttgtcaagtaatttattatctgcaattatttttatattctgccagttctgatttgtttctgcaaaactaatttctgcaataacagaattacattctgctgctgcagacgtatacagttatatatatatattataatttcatatttattattgatatttgcaaaaactcagtttttcagaagtgaatattccactccctctatatgtcacacgacctgaaaaattgggttgaagtgggaacaataagctctggagctatctgtaaaagataaacaatataataataaaaaaacgtaagagcaaacatgataaaaaatactaaatcatattgagaacttgctgagaacccatcgataatcagtaatcaccaaacatgacagctaaaaaactaattaatactatcgagaacctatcgagaatatgtcgataatcaagcaacattaatcaacatgacaacaaaaattataattgttatcctaccaaaattttggcaacataacgactataatttaactagttcctcaaaaatttaagcttactataaacaacaaaaaaaataatacataacaataaaaaaataaccacccatccaaccacagtgtaaaaaattgcagaacctacttc

SEQ ID NO: 247467 - DNA, 1747 bp, Cannabis indica
tcgattggttgccaaaggtttcaatcaaaaacaaggtattgattatcttcacacttttgcccctgttgcaaagtttaataccttgaaacttatgctcggcattgcggccattaacaattggtctctataccaagttgatataaacaatgcctttcttcatggcgatttaaatgaaactatctatatgacactcccaaaagggtataaacccaagggacaaattcccccaaatgttgtttgtaagttaaccaaaagtctttatggcttgaaacaagcctctagacaatggtacacaaaactcagccattatcttctctccactggtttcacccagtctctttcagatcatacattgttcatcaaaaataataaaggcatttttctcccccaattaatatatgttgatgacattgtgattacctctaataatgatgatgctgttacagattttaaacagcaacttaactctgtgtttcaacttaaagaccagggtcctttacattttttcttgggtttggagattggtcgttcttcctccggaatatctgtctccaaacgaccttttacccttcaacttttaactcacacaggtttttaggagcttctactgctcccaccccaatggaatacaacattcggctctcatctgatgttggaaaaccattagacattcccaaaatctaccgcaacctcattggtaaacttctttacttaactattacacggcctgatatctcttttgccataaacaaactaagtcaattcctatccaattcgagagttccccacctcactactgctcacagaatattacaatatctcaagggtacctctggtcaaggactattcctttactcagcatcttccactaacctatctgcttttgttgaaactgatatgtcaaacatagactttcatctaaaaaaaaattagatgctgattaggcctcttgcagtgacactagaaggtctatttcgggttactgtatctttcttggcagatctcttatttcttggaaatcaaaaaagcagtccactatttctcgttcttccgttgaagcagaatatcgggctatggctcatgccacttgtgagatcacctggttgttggcactccttcgtgactttggcatccagcacaaagtcccgccatcctttattgtgacaacactgccgccattcacatctccgtaaatcccgtattctatgaacgcacaaagcacatcgagatcgactgccatgttgtccgagagaagatccaagaaggcacactcaagctaattcatgtcaccaccaaaaacaacattgctgacatccttaccaagcctctttttccaaactattttcacaccattgtaaccaagatgaacttaaaaaacatatatagttcatcttgagaggggggtaatagatttcggcccactgggccttattttcggcccacttattctagggttaccttccctcttaccctataaatacactctttgtatttaccattttattcttttggcattactgccgtgtaaaacaatagcagttaataaaagagtttgtcatttttattaaatggaagctctcgtctcaatcaagatctgctcgctcaactcagatttgagtcacaattgtgtaaaggtgaaaaaaaaaagaagatagagagatagaagaaaaaggcgagggatgaaagatccaaatcgtctattaaatgaggaggagagagagagagagagagagaggagagagagaga

SEQ ID NO: 247468 - DNA, 526 bp, Cannabis indica
gcaaagctcccaaagacttcttttccccaactatgaagctctcggccacactcctcaattttttcctcaatgccgtgacttcccattctctcccaacatcttcggacaatctcttcacacccatggtgagtcgtccaccaattttcaaacttgaaccggtattcatgtgtgagagccgaacccatgcaaagctccataagcaacagagattgatccgaaggagaaatttctagattagtaagcttggccatcggaaatatgctcaaccaatcattgttcaccaaagccctatccaatctagcttcaatccaattaggagaatccctactctttcccaagtaaaaggatgaccatgcaaccccatgtctctcaaaccacataaccgaagtgcctcttgaaacccttcaataagccacaccggataaggttgtcctcccactttttcggattgattaaggacattattaaagtctcccataaggcaccatggcaatgctgagcgactaagaagtgttgttaaaagatc

SEQ ID NO: 247469 - DNA, 652 bp, Cannabis indica
caaaacctctagttggtcacttgtaagaggtttcatactcacagaaatcttatattgataccttttttgttttagtctaattaaggttagtcaagtttcatgccaagcagttgtgttaaatatgatgttatatctaataacgatctcataccttggcataataaaaggtttgagaggatgaggagtttgttgcgacagtcaaaagttggagaggatgagggatatgctgccataatcaaaggttgccgaaaatgagggtttttttcttgccataattaaatgttggagagtatgaagagtttgttgccataatcataggttggagaggatgaaggattttttgccataatcaaagttggaggaggggatgagggattttctgccataatcaaaggttggagaggatgaggggtttgttgccataaattaaaggttggagaggaaacctacactcttgaaccaataatctcaagtatttgaggctagtcttttctttataattcctccttccattgatgaagtatggctcaatcatcgtctcattttaaggtattttcaattcccctcgtgatttctagatataattaagataagtttttcatcacgaggataagtattcaagtgggctcagtgtgactactgtaatcttgca

SEQ ID NO: 247470 - DNA, 664 bp, Cannabis indica
aacataaaatgttatttctgatctttattagtaaatctgattatattgaaatgggtttcatttagggcacaaaacccaacataacctagtttacattctgtcagacaactagagttcttgagacctccttctttcttcttctatttcaaaatctccttcattgttattcattaaattttgaacctacagtgagtgagtgcatgcccacccatagcaagtctagtactcaattatagtgtgtaagatcgtgaagaattcataaacctgaaggagaatcaggcttagatcttgataatactttgtaacagaaagaaacaagggttattgatctgagtgggaggagtcatattattctgctacaatcaatgtaaggtttattaactttatatgtgttaaaattctattgttttaaaaatctatatttaagatgtaaataaatgtacttgttagtaaatctagattctggtaaaatatattccaacaactggtatcagagccatggtaatgatttactttcaagaaatatggatttaaaacgatgtatgtgtgatttgaatgtgattcatgttgatctatgtgtttatttgatgattgcttgatgcttacataaattttatgtaaaataattggattcatgatctggatttattttatttggataata

SEQ ID NO: 247471 - DNA, 1866 bp, Cannabis indica
aactctcacacaatgcccaaagaagaggaattaacttttcattaaataattattattcattgaataagtccaatactttgtcaataccctgaaaaggacataacacttattcaaggtgtaagtatataccttatcgtcgattatcatactgacaaatcatgagacttaaacttttgaacgtataatcatgattatattccactatattgatgacactataatcatgaacatatatatatactggacttaatagattttatacattaagtatataatcatgaaataaatcatgtgaacaatgcaatataaaataattttctaatcttttattaattagtaaatctgattatattgaaatgaattttatttagggcacaaaacccaatacgtacgatcttcgggacaacaggttgtattttgttagtcactagacgacaacttttgtagttaatattttgtaatacaattataacttttaaaagacgggactcgactaagtaaagttcaattatttaaagttaaaaggctaattatgaaaaaaaaaattaattaaacacgttttccaataaatgtgttgcatagctagcatttaaatcacgataacacgcctaatctagtagggtgttacaaacccatagtcttctaacatacctctaaagccatccaatagccagttaggctacaccttccctcctctcttctcatcattactccccacattattcaggtcaccaataatacatcacagaagagaagactgatcgttgaagttacgaagcaagtctcaagtatcttggctaaacctcatattagctaggctcaccatatagatcggttagcctccatgccaccaaatccccaaccgaaatatccacatctatatgttttttcaaataaccaagtatcatagcctcctcaacagccctccagaacataacaataccaccactatggtcttgaccatcaatggaaacatgcccttcataaccaatgcgtaccctgaatcttacgacaacctccttaccacaaatagtctcatataaagaaataaatttgggtttcttttggataatcaaatccataagaaatcgagacgttcgtaggttctcaagctcacgacaattttagcttagagtactcatggtaattggcgggcctgctccataagtctcgccacaaaaacattatttggaaggtcattattgtcaagatccataacctcactcgtgacacttttcgtcccaccactatagtaaccacaacaagcttcctctattttaaatccaccaagtcaatactttcctcattagaaacaacatcattacccccaccagagtaatcacaattaatatatctattcgtattggcattaactaccataatagctttaccactcaatgtcgaagcaataacaccagccgctatcccccccccccccaccttcaccctcaactccactgccaatcgaacctgaagacaccccccttccctcatacctgcatcatcaatcgaaacaccattatcctcactccctcttctccctaccatcgacttcgatcgcaaccacctcgcaccaacaaaactcacattccattgtgtattagctcacataaaattcccatatggcttctccaacaagttagtcggagactcggagtaatatacatcttgtgacactttctctccgtgtgacccataataccgcatataaacaaaaggctaattaggatttttgtctcctgaactttgatgtgtaccaaatcatgcccctaaatttttaaggtcgttaaaaatgtcccatgaactattgagattgttggattgaaggacttttttccaattttggtaaaaaagtctaacatggat

SEQ ID NO: 247472 - DNA, 504 bp, Cannabis indica
catattccataaaggagccgaataaaattaaagtttcacctttgattctgaattcgagacgttaaattaaaactaatgaatcaacatccactataacccgtaaccttccaagctaacgatgcagatttgattcccgctacccgcttgtacttgcttgatttcttatctctattcactattcctaataggcttatataaaaaggatgttatacgtgttataccctaaggtttaagaaaccgaattagcgaccccaacttgtttaattatgtattaatgaggaattatattattatataatttaatatacattctcatgatttgtatccaagagtcaattacgaattgaaaaatttaattgtggaattacgaaacataattttaaaaaattggatcaatacttccaattgaatgagtatgagtaagaaattcatggataaagagagaaagtttatttctaaccttaactaaatcttccatttttttttgttataggaaatattgaa

SEQ ID NO: 247473 - DNA, 982 bp, Cannabis indica
ttgatctaagatagagggacttatgatattacaaacttttcttttagtagtaacttcaattgtctatgtgtgaaaaagtagaaattttttaataccaccaagagtttacttaagaaataaaagctaacatgttgatattttttacttcttaaggcgattagtaggaatagccataagatgtttagccctaggagtagttaaaccaaactcttcactcatatctagctcacaagccaacatgccactagggagttcccaatcaaagcaatgaacaagttgagccaacataagcctaaccacagtcaaaccgagttgcaatcccggacaacctcttcttccagatccaaatggaatgagctcaaagtctctaccctttaaatctatgttgcttcccaaaaacctttctgggaaaaacttttctggctcatcccaatactcgggatctctcccaattgtccaaatgtttatcattacacgcgagtttcgtgatatgtgataaccattgaccgtgcagtcttcattagctgcatggggagctaacaatggggctactggatgaagcctcattgtttcctttatcaccatgtctaagtagggcaagttttctagatccgattcttccaccattctttccatgcccaccgtggtttcgagctcttcttggagttttttcattgttgttggattcttgatgagttcagacattgcccattctatggctgttgaagatgtatccattgcacctacaagcatgtcctatacacatatcaccaaattgaagttaaattagaccaattttcatctttttaactacatgaaaaataaaataatatatattttgtactgatttatttatttatttacaaattgtttatgtatttacacattgaaaataagtttagtatgaaatttcatgtatgttcaagatatatatttgatatgagatacaatgaccacaatttttaaaatgaaaataataata

SEQ ID NO: 247474 - DNA, 458 bp, Cannabis indica
ttgccatgtaattttgccagcaatagaatggcactcgtgttgtttgatgatgtccatcatgctatagttatattgattttcacccattcgctctctcaaactttgatttatcattttgtcactttcccaaaaatatatttttggcagctttcaactatatgcttgctgacttttattacaaaaagaaaaaaaaaaaaaataatattatgctttctgacttgttaacccttattttattactttttattacaaaatataaaaaggaacaaaaaaaattacttttaatattgattgtccttttttcagagagagtaaaaagtaagagcaattatgtaaatgttagaggaaaagtaaaaaaaaaaataagagaaaggataaattaagagaaaaagataaaaaataataattataaacgatgatgaaaataatgtcagaaaaagaaaaggtaaacaaaaagg

SEQ ID NO: 247475 - DNA, 871 bp, Cannabis indica
ctaaaagaaacatcaccctgggatagtaaccggaaagccaacttccagtgtgggttgttcaggcacctcaagaaaaattgccctcaactaatgaaagaagaagcaaagcccactccagcacgagtatttgctatcacttaagctgatgctgcagccagtcctacgatagttacaactcagcttcttatcaacaactaaaattatattattctgtttgacttcggggctacacaatcatatgtagcgtcaagagtaattaattagctgggtagccctagtgatatctttgaggtagggtttggaaccctactacctagtggagagttggttatctccaaaaggtgggtgaggtctgcgctaatcagaattgagagtatggagttaagtgtttatttggtggagctatcattgaccgattttgacattatactcgaaacagaatttttatccaaatactagaccaatattgactgtaacggaaaaagataacttttcaacctgaagatgaggaaccatttgtttatgtcgggtccattcagggttcttggattctgattaatatagctctaaaggctagagatttactacacaatgggtgtgtaggatttttagtggttatgactcaaatagacctgaaacatttgggcttgaggatgttagagtggtgaaagaatttctagatatattttccaaagagttacagggattaccaccataatgagaaatagactttataaaacatacatgtttacaggggtgttcgcggtgcgggttgtgcatgttgtaatatttttttcaaactaaaccgcatatgccttttttgtgatttctcaaatcacaattgtaccgtgagatcttaaaaacacaaaaa

SEQ ID NO: 247476 - DNA, 1806 bp, Cannabis indica
tgccatgctatattactaaaagcaccatccattaaaaacatgagagtacaaggaaccaagttttggagccttgactcttgtctcaagaagaccaacaagccccaccctttgattatgaatcaattgcttgatcaaattttgtttgtggaggttgttggctccccggacattccaagctaatattctatccatttggtttggaaggcactccccctccctttgtcttgtctcggtttggtgttagcatttctaagctgtcaccatctttagattcgggttcctgtagaacagaataagaatttctggtattagtgctttcggccaaatcagtatcatgagtcttcagtcccttgtgaacttgttgaaaaccatcttgatccccacgaaccactggttttttccccttgagtatttcagcaaacgtaacaggttgttccccatcagaagggacacttaaacacacaccagaagtggtttttgctggtgtataaccagctgtatcagtccctggtctcaccacattatcctctttcaattcagcccttttgtttttcacaatccattgctgttgaggagcagatggtttcctcctacattcatcagtgctatgtcccaacccattgcaattcttgcaaatgattggtttccactcatacttaatcccaattgatgtcacatagccatgttcatcctcaaatgaaatagccgaaggcaaatcttgttccatagaaacttcaacaagtattctaggaaaggagagtttttgcctcatcttagtgacttcatctaccattataggctctccaatttgccctataattttgtacaaagtgttctggccccaatatttcagttccaagttttccaattgaatccaaattggcactttatgaatatccccttttctgaaattggtgtccggatcccatgatttcattatcaccggcctcttgttgaagaaagtataacctccattaaggatgctatcccttatttcaactgaagtgaatctaatcagaaaaataccatatgagagaagtccaaccttgtccaccttctccttccatattcttctagcaaaaccttcaagaacatccagtggggggtttgcacccaacacataacatacaatagcagagttccaatattcaatttccccttctatatcctccattgtgatttttacaattgttttctcattatcaggtttctgtttctcaatcgaagtctcttgaaaagaatgatctaaagatctaataacagaacctgacctaagaattgggggaacaggggaattacctgtcatgacttctcgtctgcaactgtggttaacttccaggaagtgattgaaatcatttcgaatatcgtcgtgcctctgcaactcacgaagtgatgatcgtggtgaaagaacttgatgctgttcaaaatctggttcgtgcgcgtcatcttcttcatcagtgaaatcgatgggttctattcccagaactgcgtccatcgacttggttttcttgacatctccagatgaggatggacctcgtttcttcacaggcttgtgattcttcgagagcgatgctagttttccatgattcttggacctcgtttttgccatggcgccagctcgggagctgcgagagcaagaaacagagaaaacttggacactgcaatttttcagtttcatctaatggtaaataattagggtttatatttatattatgagttaatcaggtaataagtgggattatgatcctactaatttatttcggcataaattaaattttgctataagtgagtaaataatcgtaattt

SEQ ID NO: 247477 - DNA, 1195 bp, Cannabis indica
ctttttcttttttcttcttcttcgtccactcctcgtcttctgcagagtcagtcgcagccaggtgttatgcactgcccaactcaaaaaggcttgttattaagggcaaggtaggcttgttgtatgttatcgtctaccccgtcgaggttattcaagctttaatggtggccgaggaagaggaggttaacagatctggatctgggttaccgatctggatcaccaagcgggggagagggggcaacagatatacatcaattatcgatatgacccaaagaacctgcccggagctagaagtgatcactggatcgtcatggctgccattggaggattcctggttactgtagtcttcatacgagtagagaatatataatctgtggcaaaatcgaatcccttggaactggagttaggcctacccgacgatccagatgccatagctgctaagatcaagagtggagaagagtttcaaaatatcgagaatggttcgttagtcaagagtggacgaagaagacaagcagtggacgaagaagacgagcagtggacgaagaagacgaagaagaaaagaaagaaaaagaaaaaaattatttttaaataatttatttatttattgtttttatttttaaaattaaaataataatttgaatcaataatattttgatacgtggcaatcttaaaaaagtaaacggctcagttaaaattaggactaatagataaataaaaagcatgaccttgagaactattaccgctattttttgaggttggggacttatctgtatcaaactgaactttttgaggatttttgctgcaaatttcccatcaagatttaccatatgacaattgtccggtaattccaaatgcgagttaaacttaaatatttataccataaattatttttaataaaataaaaaaattaattatgagtagtcaaagttgagttttctttggtcatgtcttggatgacgggtgaatatttaaacgtttgacaatgtccaacaaaaaaaataaataaatatactttaaccgtctcaatagttgaataaatatggccaataatatataataaaaaaataaactttaatttttttttacataatatacatctttcatatatataataagagtctaaatcacatcatgcttgtttgtctaatatatccccaaattttaagattttaaaagcctttcattgtcttttcacatt

SEQ ID NO: 247478 - DNA, 1205 bp, Cannabis indica
tttaaattcaaccaaatctaaccaataaaattcagccattcaccaacatgttcttttttctttggaaagataggttaaggttttaaatattattatttaatttttttttattttcaaaaaaaagtatttggtgccgtttggtaacacttttgttttctaattttttaatcacaaaatgaaagtaaaatttttgtttttaaaaattttgtttttaaaaaacaaaaatgcgttctgcaaccacttttgttttttcaattttaaaaatagaaaataaaagtgtgttctgtaaattttatttttatttttattttttgatttttgtttatgtcgggtctaggtccggggtcggatttgggttcagcgctatggctggggggatttgggttcgggtctgattgaagtctaaaatattgattaagaaaaaaaaactgtttagaaatatattaaaagtgacttttttttgtttttaaaaatttgtaactcaatttaaaaattaaaaataaaaacaattttataaaatatattttgaaaaatattttattttttaattttaaaaataaaaactaattaaaaaagtgttacgagatgtattgaaaaatatatattttgaaaaatatttagagtttttctacaataaaataactatattattgatccatgtctacgccacgtcaacctcatcgctgctaacacacgccttcatttcgattccacaaatatccaactcaaatcatcaattcctttgcctatttctgttcctctctgctttactttctatgaaaactttcaggtttgtttttctactttcaaacactcccttttacctcttgttttcaaatttttcaagtgctcttatgttcaatggtgatttgatgattaagtttgattaaggctcagcttaagccaattgggtattgattgatttgctccaaatgtgtatctttgatcattttcatgctttcaagttaagattactagctcgtttctggaaatgattttgtttgagttgaattatgaggttagaacttaggtgtgatattggatctagacctggatttgggtacttgggtattatagctgaaattaggccaaaaagtttgataagttggagttatgtgattcatcaatgcagtgagaatttaaatgtgaaatctattgtttctctcttgttgtcaattatattattgttttcactttaatcactc

SEQ ID NO: 247479 - DNA, 798 bp, Cannabis indica
  modified_base (786)..(786): a, c, t, g, unknown or other
tctgttaatgtcgtcatgatgaacttgagagggctcagcagctgatgaacttgattattttttatttcctagaggtttttcatcttagataagatatatataatcaattggtggtagtagtactactagataccattaatacctaataacagtgttcttttattttgagcgagatagaatggccaaaagtaggtgataaggggagaatagagttctgtcgaagctctatgatgtatattactctttcataggtataaaagctccattagagacgattctggttaaatgatactgacaactcacttggaagaattttctttttgaagcaacttggaagaattactttaaatgtacacagctaacatgaaagcacaaaactttagcaattaatattctccactcataaatttatttctatccataaaaatcaaaaggttatttttcataaagtgtcaaattattcgttagatggatgtatatatgataaattttgggaagaaaataaataaaattgtataatttggagaagtaaatgctttggatcctaatcttaattttcacatcaatatatacttaacgtagaaatcccaagaaaattgatacttgggttatggtcggggtggggagtagggctcaaggtctactggggtccgaggtctggggttggggtcctgaccaaattcgagtctgaggtcaaagccggggtcaagactggagtccaagcaaggttgagtccagtgtctcggtccactggctaagttattcaaggtcgagtcaaaatatatntaaaaataaaaa

SEQ ID NO: 247480 - DNA, 630 bp, Cannabis indica
acagacttgaagcgaaaacctcttttttgctctaagtttgcataatgggaaagtggtaaaagtgaatttgtggatgatgctcagccctatttataggcagaagaatgaaaaaaggtaatcatttgaaatgccttagatgcattggttcccccctaaagcaagtattaggaatcaaatataatcaagtgtaaccgtcaaacgtggtgagagaaaactaggttttgaagcattaatttggttagagcattattaattagccaaaaactgaagatacgcctggtccgcctcacattgaatcacgaacagacgcgcctgacacatgtcacccatcgaaacgcaaggacagctcgaatgaagtctacacgcaacttcggaagtcccatacagacttgggggcaaatattatctcaatttttgcacccttacgtggcatcacacgatagtgacacgtggaatcaattctatttacctggtcgcaagaaatatgacgaacaaggcaccacatatattcgctcggacgaagccttcttaaccgagtagtgaacaatccgcgtagcacgccaacacttaataaattcagctttcgcatcgtaagtcaccgaagaaatccctataactttgggatcagat

SEQ ID NO: 247481 - DNA, 631 bp, Cannabis indica
ttctgaagctgattactagttcaaaaacaagagacttgaaactaccctaatttaagtaattcaccttgttagagaagtgaaaatatgttgtgaatttaaatgttctgacttcatggctcttagtttttatgaaaaactaaacgaacgttcgatgcaaaatcagaattagattagcagaactcagtgcaccaggccatttgtcaacctgagcgttggatgcttatttcagagctttcgagatgtcgttctgatacttccaatgttctaaaacttgaagacgaggtctcttaccctatttttgaccattttagagagaattcttagagcagaattaacatttgaatgatcaaaactagcataccatgttgattgtcaacgtgggcgctgggcttaattttgatgcccatgtgattgtgtttttcctccagagtttacttatatcttcgttatttctgaagacgaaaaaatggtccaaaaattgattagaaaaagctcaagttgacaatatatcaacctgggcgctggtcttagtttcaagccacctggaagtcacgtttgatcatcaaaaatagttgaatctgaatctttgaataaaatggagaatatgctcggaagacttttcaaaaaaaaa

SEQ ID NO: 247482 - DNA, 902 bp, Cannabis indica
acaacctggttagagtgattcaaaacaacagccccaacactatactttttcctctgaacatcaatggctgcatctgtgaacatctgaaaagctccctgagaaggggtaagttgcaaagatgcctaatctggtgtggaagcagagggaggaatagggacctgctgagcatccaaaaacttaaagaaaaaagtaacagcccagtcataaacatcaaaaggttgactatcttgcttatgatggaaaatattatttctttgattccacaaagcccaaagaaaacaacataaaatacaaacataatccttgtctagctcttgagaaacactacaaaagaaatcataaatattcagatgcttatatttagagtaaagagtagcaaaccttgaagatttccaagctttcctcgatctagaacaatctagcaaagcatgcgtaaccgtttcaggatgtattttacacaaaggacacaaaggagaatcaataatacatcttttatgaagggaaaaagaaacagggatagcattagagagcattctccagataaacaccttaacttttggaggaatttttgacgtccacagcttagaccaaaatttcttagaatcagaaaaagaagaagaagatggaagatcatgagaagagaaagcaagatgataggctgacttaactgtacactcccccgaactatcatgcccccaaacaagatcatccttaccaagttcacccataagagggacactaagaatatcatcaaccaaaggaatagaaaaataatttgtaagtttagaaacatcccaatccctattctcagtaataaaataggacaaaaaaggagaaggaggcctatgttcagaagagaaaaatttaaccctattatgaggaagccaatgatcttcaatggt

SEQ ID NO: 247483 - DNA, 1363 bp, Cannabis indica
ttacttctattgattttatggtactaaatcagcaggtacgcagcgaaagagtttcgtattatctaattattattgttccatattctaatggatctcatccaaatgtatgtacattaaatcaaaaacaaaaatagtttagaatatacctcctgaagcctaaaagggtatcctcaaaacttttcgtatgttgtatcccttaatctagaggaaattacaattagactcatactagtgtcttccaaattattccaccacacacaaggaatagtgtgggctattaggataaagtgtatagcttttttcttgttgatttctcaacatatgagcaagaacaaatgagtgaaaaatcaatttcctttttctctctataatttcaaaaattaagtgttcaggaagtgagtattgatttcttaaatcaggcttctatttatagtagttaaatctctttaattaaatcatatttaattgtttaaataaataatatctataactgaacacgattactgatatttatgagggaatctctcaactacttgagaggatatttcaacaaccttgaaatatctataatcactttataaactagaaatttacaattaattaactcaaaaacacaaaccccatagggacaggatatgctaggcgcctaccttgttgtttaggacaaggttggttcttttgtcttgacaacttttgtctcaacaaatgttgtcttgaccaattttgtcttaacaatttcgtcttttccctgtttaattaatttgaaaaaaaaattatttatttattacaaaaataaataattactactttgtcaattcaaaatagatttttctgaacaactttatactactctttatctataaccttgacagtattttaaggtggcgattcaaggaccatagacctataattctaagctccaataaactagattatttattgagactcatcaatcaaataattcttacttattaattccatgattactgtaacaccctaaataattaggcacgctacccaagatacttatgaaaccctaatcccctaattgggattactaataaaattagggcggaaattaaactttaattataaacgaaattaaaataaaacttgtaataattaaaactttacaatctaaaagttatagaagttgggatcccaaaaacatttacaaaatattattacaagtccttcttctttcagccggcctaagcggcagaacagagtctcaaaaaaaacaacactggtagaccccaacccgcttggtctgatatagctcggacatgtacattcttcgtccagctcctacactcatggctgatcagcaatagtcttaccctttcctgcacagtagagcacc

SEQ ID NO: 247484 - DNA, 529 bp, Cannabis indica
cctaagggcatttttggaattttgtataattaatttactttcaacaaaaggcattgtttggattaaaatgagaagaattttttggtttgtcctcacccaaaaccgacccctatctctctctcaatccatctctatattttgttgaatttgttgataattgcttggagttcaagcttggaatttggtagtgataaagtttgatctttgctagaagcttgaggtagtttctacagctttcatttttttgatttttagtagctaaaattgaagttgatattaagattttgagctttgaatgatctagaattgcatgtttgtgatagttgggttgttcttattattgtgagcatatttgtgtctagagcttttgacttttactttgagtaagttttggagtgaattatttggtgatatttagtgttaattatgtgatttctagatctaaaattgtttgctttaagttggagtttatggcttgattgtgtaagtgtttgaagatggagttgtgttgattttagctcaaggtttg

SEQ ID NO: 247485 - DNA, 605 bp, Cannabis indica
atttggaaataaaagtctcaaaatattttggtataagcatcataattgtgacactaaattcttccatgcattaactattattgtcaaaaatagtggagtttccacattcgcctacattctagaattatctagaattctgtaatttttaatctttagggagccaatcatattgtaagagaatattttctgttacagatatttttattccctttttactatatatatgtaccataatatacgctattatataaatcaattaaggaaatcaatacaatcttcaatcttttcatatatgtctctatttcttgttttctctgcttttaattttggtatcagagcaaaaatggcatcccaaggagattctttaatcagcggtgcatgacctatagccgtcgatgctcagcctccagctccggctccactcgcaccagctctggccatcccagcacttctacttcaacctctagcgcccattatgattctccgttcacagagacaactatgcttactggcattcttaggtcatccataccgttcgtgcgcatgaccttgatggtttcctctttggaacacggttgttgttggatattattttaccaggatct

SEQ ID NO: 247486 - DNA, 842 bp, Cannabis indica
caaaagagatccacattaacatgtttagtactcagctgcactttagttggcaaacaaccagtaatggctcgccacaaaaaatgcaagactttaggaggaacctccaaattccatagtttcttccaactaataccatcaaacaaatcggaccaattgccttgtgtagattgtagcagtttgtaggcgcttttaacagaaaagagacccgaattttccaagttccaataccatttgtcaaccggcctatgatcactaagttgaatagataggattaaaatcttatctctttcaacaaacaaatcttcgagcacctcaccatcccaggaatggctgtccacacacaacagcgatgctacattttgattgacaaggctaggatgcaccgtttcaacataaggatgaataggatcaggcaaccatggatcattcaaaatactaaccgtgtgtcctgaaccaatcgacttccgagcaccttttctaaccacttcctgagcttcaaatatgctacgccagataaaactaggattttgtcctaaggaagcagataaaaagctaccgttaggataatatctagccttatacattcttccaaccagggaactctcattggttaacaaacgccacccttgcttcgcaagaaaggaaaggttgtaatcacggagatcccgaaacccaagaccacccttgtgcttatgttttgtcaatctcttccaactcatccaactcacacctttactagaagagttagattgagatttccaccagaattttgacatcagtccttcaagatcagtgcagatttctttagtaagcaagaacacactcatagcataactaggcaa

SEQ ID NO: 247487 - DNA, 556 bp, Cannabis indica
aaagggttagaatttctagtgtccaaaaacgagaaatatcatgtaaacaccatagccaagagcttaataacagtaactcgtggactaaaattcattaatacccaacctcgtataaatgtgtcttattttcttcttaatcatactttttttagcttaatatttattaaatttagttttcaaacatctcagtaaacattacctaaacacactaattggtaattaaacttaaaatttaaacttttcctatcgataaacacgatgaaaatatcttaaaaatatcaaatacatgtaaatcggaaaatcttggaattccattactagaaatccaaatttacaaaccgaaaccccaaaattacagaccaaccgaataccattgtccattctcttgcaaagaagacacttgttttagatgagtttcgtatttggtagcaggggcttcctataatttttgttgcttaattttgtgtgcctctttttatattttgaaacttattaagctttgtgcatgttaatatgaattatctccgtttcctttaaaaaaaaaaatagaagaaaa

SEQ ID NO: 247488 - DNA, 647 bp, Cannabis indica
tcgctaaacatatgttgtttgtcacggcccgaataggctggcaagccaagataagtttcatgacagtcagttattgacatggagagagttcgatggaagaaaatctgagcagccagagttgtgtttggtgaaaaagacatattagacttttcagcattgatggtttggcccgaagcacggtggtatatgtcacgaacgcgcttgatagagaggcacgaactttcatcagcatggcaaaagagcaggctgtcatcggcaaacaacaaatgtgaaattggttcagcccgcctggtgagcttatatccatggaggttacctgacaattcttcatgttgtagcagccgagagaacccttcagaacaaattaagaacaggtttggtgatagggggcaaccttgtctcagaccacgggttggtgtgagggagcccgtagcttctccatttagcaagaaactgaagtggtttgtagtcaggcatgtcatgataagagctacccattacgaacagaaacccattttttccataacccgctgaataaagcaccattcaactcgatcgaaagcttttgacatatcaagcttcatagcagcaactcctttgcgaccagatgttctcagtttaattccatggattaattcaaaggccac

SEQ ID NO: 247489 - DNA, 1123 bp, Cannabis indica
gtgatttctgatttcctctcttgaccaagcaaatctattataaatatgatcaactcacacactaacaatccaatcccactgatctacatagccaacttatttcttatcatccctaaatttcccagtcatgctaaaacaattgtcaaaagcaaaaactcaagggttaaagcaattcaaagagccctagaagttcattccacgcttgtcaggggatatggaaagataatatctgaagaatttggcttctacctagactacccatttgccaaactgttacacatgaaaaataatatattcatgccaaaaagggtgacagctctctactggtatttggcaagttcatacactattacgtatggtcgaaatccacacaatagggttccgcacatcaatctgtacctatatcaaacgccttcacctcaggcttgctacaaatatccaacggctataggctgcagtggttcaaaacattgcctgaatgggacgcactccttacacaagagtgggaaaatgtccgcaacaagagactcgtgggactcaattgcccagccactgaaaacatggcaaacccattgcgctgtttcaaaattttgctacttaggctacatgtcaatccaactttttcatttacagcaagtgtcaaaagacacaagtaaagtgaacacccacttgtcgtgataggtagctcagaagcaagacaggtggaaaaacacctgtttgccattaacatggtgattttagacgccctctagccaaaactcaaagatgacgcatcatgggaatattatccgccagagtatctccaacaactagaagaagatatgaatcattataaaaaaaacactacgctgaggaaaacgaggttgactattccaagattcgcaatacctagatactgtttgtaactgcccatactcactcaatgaccttgatgaagaaatatgtaggggactgtctatatctccacttgtcaacaacaaacctattgcatcaacaagtggcaacaaaagagcaagtccttcatcagcctaccaagatgatgatagtgacacacaggagtacatgaatctcagtccctcacatgagcccattaacaaaaattggtaaaactcctgaaccactg

SEQ ID NO: 247490 - DNA, 541 bp, Cannabis indica
aaagaatacatatctaataaaatattgaaaaactaaaattaatgtaaagcttattaatccaactaattgcacagtagaatcaatattaataatggagatattgaaactaaattgatgagcaagaaccaagccgagacgaatggcaagcagctccgccacattagcagagaaatcacctagcacatggatagaaggaaaccaatcaaaccaagcttgattacatacaaagcgatctaaccgttcttggacatgtgaactaccttgtcttctattcacccaagtgaaaatcggcccttcgtaccctaggtcatctagcatacactcgtcgagagcattttaaaactcactcatccccatcacatcacggtccgtcccaccctttttttcattcatagatagaatctcattgaaattctccccacagatcgataatattttaaaaaaaaaaattacataatagattaatataaattttaaaaaaaattgcaaaaatatattaacacggaatttttttttattttactctttgaatttttttatt

SEQ ID NO: 247491 - DNA, 2193 bp, Cannabis indica
gacttagaattgcatgacatatgaaagttgtgatattgagaaattccgctaattctatgagtttcatttaaagagaaccatattattttatgagtgcttatttgattaacattgaataaagatatcgtgttagttaatttaagctaaatctatcatcgctctagagagattagtaggttacattaggattcttgaaactacaaatattatgataaattgggataatcggtaatttgaggttcatagttagaaatagggaaattaatgctctaggtttttacttcttgattaaaaattgttacttgtctacttatttttctatttactttattacttgattcttaattataatttactttgggttatctaattaaagtataaaattaaagagtataataattagtaaaatttaattatcaattcttgtggttcgacaaccttttattagtattaaaactttgctataacaatgttgtacgcttgtagcaaaaatagtttatcaacttgcattctatataaatgagtgattcaaattaaataaaccaagttgaaatctttgcaacagtggactaagcagaccactctgactgaactactataatttccttatgctccctttactttttacttttatgtcatctgtttagtagctaatagtttgactactcgctactctaagtgagtactcgcacatttttaattaagtatttttaaatgtattaaatacacgcaccattttggtgttgtcttaaattctccgaccaaagagaagtgtctgtctattgagttttttttcttgcttttttaattaattaagtttagcaaatacatattttatgttattcatactacaataataatggatatatatacataatagcgcataaaaaaaatatttgttgattgtttttttacactttttttacactttgtgatggaatcatttcgataaataaagtgaatgtgaattcaaaaacttagtgtataatgtgatgcaattatatgacactacaccgaacttttgatttagttaataatgtcactaatattatacatttatttgtgattatatcgtagcaagtgtaattgcaatcacattcaaagttgtagtaagtgtatgatgatgtcaattaaaaacttctatataggagagacatatagatgcggattaattgtcactcatcatattaaaatatatatacctataatatataagtaccatatttgcctaggaaaaatgaaaaccttggatcgtaaacgaacgactttagtgggaaattttgtaggcttttgcttagttagtactcttaatgagagtctaaatctaaacaagatcactaaattaatggctcttttgctctaaaagcacgtaatcttaatctaatataatacattaaatatatatataatttggtgtagtttagatatataatatgtaattcatattttaaccctctcatgcgcgtacaattcagttctttttatgttttggtatagttataacaaaattagctacattttgtgtcttgcttttcattagctgcattttctgtttcttagttaatgtatgtacgtaaaacagatatatggattggatgtgaacaaattaggtttgtattgcacagtaatatattaaattgtataattttgatatatattaaaatattatatttgtatatgcacacacgagttcatacccaacatcgtattatataatatataatataatttaatataaaaatataacaatatatatcattatactacaaacccatataattatttctatgaggttggtagtgaacaaataatttaccataataagtacactttaacaaattataacgttatatactatatttctatatcaaactatactaaatattaaaccaatggtgcaagttgtggatttgtcgactttgattgcatgtgcatgctttatttcatagttttaattgcttgataagaaatcaagctataatgcacgcatgtgcaactaattcgatacccatatatatttctatcaaaacaatttaaatgttaattggggtactatagttttggcagatcgataggtaattaatgcaaggattttagagaaaacacaaatatatataataaatatacatttatgtatataaacaattaaaaaaaaaacaagaatgtaaaggaatttaatgaaccccttaatta

SEQ ID NO: 247492 - DNA, 1807 bp, Cannabis indica
tatataaatataaaaaaatatattctgtaatctcatttcggtgtaaaaatagattaaaatattgtaataggagattataattagaggagctcctttttattatatatatagagagagagagagatacgagtcatatatatgagtatgagtatgtgtggggggagacgtattttgaaggggcttgaggagctgtcaaatcggggcatttgtcttttataagaagggttagaccattttgtagaccaagagaccgacaccagggtgcggccctgggctctcggccaaaatccccaagattatgcaccatgtctccttactcatttcccttactactactcttctttctctctttcacactatacactgcgcccatcacccatatccttaattattattattattattattcatctttacctatgcccctttgatcatcttcaattctttgaaatgacctttcattctgtctactctatgaattgatattttatatacacccacgttcatgaacagaaattccacgttcataattttggaatttttgcctttcttttttctttcaatattattgtaaatttttaatggtatgtacatgtccaattatatatatatattcatgaataatatgattgatatatgcttgtaactaaaagatttattttatttgttttcaatgtgcatgtatatatgaacatatatattatatgttgtagtctataatatatgatctataacaaaaatctataaacatattctatttatttgattatatttcacaacgttatctttatctataaatttttgtacttgtaaatgtattagtgcatgcatatatatgtaattaatttcagttagtatataacaaaaatatttcatgctagagaacgttatttaaaaaataattaaaaaaaaaaggttaaaagaggacaaagaaggtgacattattgatgtgtagtaagagaaattagagagcatagatatattcacctacaaaagaatctcacaacataattctgagaatgattaagatttacgaaattctattatatgctgtggttattctttagctagaataatatatataaaaaatataattcgtataaacatttcacaccttatcttctctacagctacctatagctatagctagtctacatatatactttttaaagtggttcatcacaaaaagtaaaccctatatatatactcttttcataaaaaaaataaataaatataaatcaataaagtcaatcaaacaaccaccattaatttctcaatctatataatatgctcaactcaacatgcaccaaaatctttttaaaatttccacgactccatcgagacaacttaaaattatgaaagatttgttgtgtaactagctatatacataatacataatattgcaacaacctttctaaatataaatataatataaaaacatgtgttatattatttatcatacactgcatggatagagctagagaaaggattgaagcttatctaataaataaaagtagcaggaagcaactgggtttgtccccttttttgtttttaccatataaatgtattttcatttttccctcatttgagttgggctttttacttaaatttttttggcatttattttgaagtcggtctaataaaagtatacatatcacacagctggaaagaggttaaatttgacttgtaagcttgcaaaaaaaaggccaacaatagtaaataattaaaaggaaactagtaactagtaagggacagctgtgaactgtctagcttcaattattttcctccgtcgtctatacttgtcaaa

SEQ ID NO: 247493 - DNA, 728 bp, Cannabis indica
tagttgagttcataggattgttgctggagacattttgtggtgggagagaagtagttactggctgtgagttgttgttggtagtggagggcaagtgatcaggggaaaactgaggctgactattggggtgagtggattgtattggtggcacagggacacgtgggctatctatatggggagaagatgacacatgttgggatgagtctttgttattagtggtggtgttaaggacatgtgctggtacattatgtgtttgagtaggcatacgtgaagacatatcaaatgctgcagtggggaaattagttgcaaagggggattgtacctgagatgcagaattgtgtattgtggctgggaagagttgttcatgaaacaccacattgcgtccaatgaacagtgggccctcacgattttcacataaatagcctttgtgagatgaggaatagccaatgaatatatattgttgagttttaaaatccatcttgtatcggttgtatggtctgatgtgagggtagcaggcacacccaaaaggcttcagaatactgtaatcaggtgtttggccaagtaatatttctgttggagatccatagtcaagcacaggtgtggcgagacggttgataagaaacacagcagtgtgaaatgcgtgctaccagtaagagaaaacaaggccagattgtgcaaggattgtaagtccaatttcagtgatatgcctgtgtttacgttcagcccttcca

SEQ ID NO: 247494 - DNA, 882 bp, Cannabis indica
atatttatatgtttatcatgattttatgtggtgtatttattattgatacaaaatctatggtatattaatcgcaaagagataataccacataaataattagaatttaaattcaatgtttatgaataattgtcatttcttaagaaattattaagattttatttaataaaaagatcttttgatctgaccgggggggaagaagttaatgatatgtgcaattcaaaaatcttttatatctattaaactctagactatattcaaaactccacagaatctctataacagttaggggtggaagaagttattgatatatgtagtttaaactctttgaactatagactatacttaatataccacagaatctctatgacacagatattttgataagacacatatataatataataaacgaactagcgaactagtagaacttattcttgatcctgtaagtattccaataaacatgctactatcgtaactgtaaatagataccagtgaagtccttggacatagaatcacagtaccttatcttagtgggaggatttttccagtccattactatttggatgacactagtgatagcctactatgatatgttcaagaaaggaactttaaaataaaactaagaaaagttaatctaaccattcacgtggataataataacttattagaagaatgacgataagataggaaatttttaaattctatttaaagactcaagcacaattcctggtccttatgaaatattttatggtatctaaaatgattcttaatcttaacaatgctatgttgatgacttagtctagatggaaattatatttttagactaagataaaagtgtcaacaacaagatgtccctaagtactcaatagtaagaaggttaat

SEQ ID NO: 247495 - DNA, 462 bp, Cannabis indica
gaaaaagaaagcaaaagttctttgctttattggcaagtgaaagtcattcatatgtgtttactagcttttggtatgtaggttcaattttcatgcaaaagcttttcattagtaaatgataaatattaaaataacaaaggctaattacattaaaagtaaagaatttttttatctatcctaaaaacatacagaaatacccaaaaagaattcaacaataaaaccttaatatagaaaaaaaaaatctaacttgtgaattctcatccaatccaaaaaaaaaattaaaaaattattagtattgttaatttagattttcgttaacattaactgtaggaaataatggcagcaattccgagatgccccctacacccaacaccaacgttcaaaaacaagggcaattctgtctttttgttgtgatgcggatctctagggaatatgctttcctcaaaaaccgaatatgccactttt

SEQ ID NO: 247496 - DNA, 567 bp, Cannabis indica
tgcatgctgcaattcaaacaggcgacccaggtaattaattaatattatccacattaatttggaaccttttatttgagcaatgctataattaacagtgcccaataattacaatacacaatattatctaaccattaattttaacaataattattatattaaaatatgtaaaatccgactatctctttacaaatttaattaatttgaaccttgacttacatcacatctgcatatagtctagaaactaagaagcaatatagaactcaattcacacagaacagtcaaagtgcaaactgttaattgatttgcatctattttcaaaacattttcagatatataatttgttaagatttatgtgccacattagtcaatggagctatagaattgctattgacttatgcttgcttcctctctcattaattgcatgtggttgggaggtcagcttttcttctataaatagatagaaggagctctttgaagagcaaggtatcggtttcatgaccaaattcacgaacataatttgatttattttttttaaaatataggaaatttcaataataaaggagaggt

SEQ ID NO: 247497 - DNA, 2414 bp, Cannabis indica
actaaactgtccggaaagaaaaccagaattatattattttgtttacataattaggaaaggtaatcgaaatgctttaatttgacaaaattgccattattagaatatgtaattattttttctttatagatttttaaggggtacatttgtctttattatttttaattaataaaattaaaattaaaataaattaagtaagaaaagggaaagacattctctataaaaataggaagagaacctttccctttgtttctccttaatttgtgtgggtcctactagtttccccttttccataatttagtaaatatgggaatcaatatcatatcatttaaccaaacaaatgaatggaaataaaattatttcctttctattccattccatttcattacctccaaccaaaagccaccaaaaaatttccatataatattcatccaaatagttaaaataaaacaaaacttaacttatcatatactgcaaaaatagaagctgagcaaaaataaataaatatcgtgctctcgccaaaaaatttataaatgggaaaattttctttttagcttttattttttctattttcatctaaataacaatctacattatagggaaatttcccattatagggaaaactgaagaaaaaaataacaatctacatcaagttcagtgcaaattttgtgttacagcaaattcatttgtctatgagactcaaaatctacatattctccgttaggacggccattgaagccatacacatcaaaaatcttatcatcggaagggatgttgccctctcgacctttaaaaccctcagcccaagcacctgggtttgaggcgttcgaactcgcttcttggtttatggttatagcagctgtactttgcggtgaatttccggctcttctactggatgaatttgcagcggtcagagaaattgatgccgatggttgttgctgcaattgctgctggtttttcatcggtgacttgggtcgaagagattcaatttccggggttgtcacaaccagatgaggtgcctcaggtggtggatttcgtcccccgcctccttgccaaacttttccatccttgtcagaaaagttcctgatatatgcctggatatcattgcaaatcataaagtcaaattctcacaagaaaacagccagttgaagtaagaaaaactatagcgagtaggatggttcaaattcttcactttagccataacatagaaaagaatgtcataatacatacaatatgaaattggatgaatatgcattatatgataaggcagaaattcgtacctcattattgaaatttgatgaagacaattctttaccaacggtcatccaaccagaccgaatgttatgatcctcgccaaaaagctccagcctcctccgtccaagggcaaaatgttcaattatcctatacatgtcttcgggtttttgggttgaacctgcaaaattccaaaaggaacaaaattatcagcgagcacatacaatttctgctagggtgagggactgcaaagacgggataaacaattaaaaatatcaccacttaatcatctaaaagaatgaaacatatcatagatgtaaatgaaatactaaccataaggtggttcctcagcaattattacatcagtatcaatgtttgcatggattatatgaccatcagtgcttcgacgaacagtgccttttatccccatcaagcagtgctccttcatcaaatatataacacaacaaaatatttaaaaactgagttttatttgtttaacttgtcgtatatccaagagatattgaaataaaaaattgagatatacaaaccattcaatgaacagtatcatgtgacaaatgaagttgctagttcccccatcagaagaaaaaaaaaccaacctttgaatgctgaaacaatgtgtgagcatcgtgccgcaatcctggagttgcattacttttgttggtcttcacccaacaaatatcttcacatctacggaatccccactgcagtaaacaacatattatatgctttcagtaacaaaggtatgctaggactttggtaatgaagttatgagaagtgacgatctaaaattatattacagtcctaaaggtctaagcaaataccttcttcagacattgacggccctgctcaagcccaacaccatcacccacccagaggaaaataaaagaaggtgtgtctgctattgcctgtgattacaacaaataaataacatataatcaatttttttttattattatatttaaaaaaatgatgcaaacaaaagttaaattgcaagaatcaagtgctggtcattagctagaaatgaagcagaaacaatcatagccacaaaaggtgcaagctatcagaactagagttagcatgttcctaggcagagtaagcaaatttttgatacgattaccagtatactgtactatgttttaaaccag

SEQ ID NO: 247498 - DNA, 787 bp, Cannabis indica
ccagtcaaattttaaagattgtgttataaccactgagttttgtaatctaaatgaaatagagttacttcctatttctcgacccaacaatatggttttattaggggtagcaaaatgtaatatcgtatcgtgttcatgtcatattttaattgactcacttctatatttcgtgtcaaatatatcgatttgttttcgacgtgcatataattttctcaaccctagctcagtttggttttatatattttataggtttagcaattaatgttactatatacatgatttttttcaaaccaaagaatgcacatactatatatattgtttttgtctttttgtgtctttgtacacaaaactcaaacatgttttccaagtaataatttgaatagtcatcgtgaataaaacatgcacgtggagttgattttagtatatatatcacttggatgtgtcttcgatccccactctcactgctgaaatttcaaaccttttatttatgtttgtagcaatatttttacattcaaatagggcaagtatattaggtaaaggtcctcttcgacgagataagataaatttctgaaatacactgttcgtgaaagtgtcaatctctcaatgaagcaaagttctattttatcattgcatctcatagcactcaacgttggactcatcaaattggtctcgtttcacgtaggtggcgtttggttggaggtaatgaaatggaatggaatggaaatgaaataattttcattctattcctttgtttggttgcattttaaagtattggaatggcattccaatg

SEQ ID NO: 247499 - DNA, 507 bp, Cannabis indica
tgatcactttttgaggccaacaacatcaatcccagtaaattgagtagtctggatttaatggcatacgtttcaagcatgtcgtatgaacggaagaaactttccttctgattcatctcccagatggagttgttgaatttctaagcgggaggcagaattttggccttcccttttcttttggactttttgggtgtcatgaatggagtggactccgggatagtttcatgggcagcatccaagtgtggttctcctacaggaacttccgcatgagttctctcagtagtttttcccttagcaggaggaactgttgtgtcctcttctatttctaccgcaccaagatagaactcctgattcaaatccatcactgggaaaatgaaaggaaaagaagggctaagcaattaaacacccactatctgaatgacaaaatgggtatcgtggaaggcctcctctaaaatttcttggagaggtcctcgccagacctatcactcccaaaaatctattttacctaga

SEQ ID NO: 247500 - DNA, 454 bp, Cannabis indica
ataggattaaatattagattgatttaggtattacatcatgatgggagctgaaaccgagcatgcaacctagctacttcaaaatgttgctggcaaatctagaaccacgcaatatatatacagcgcttgaagcaattctcagcaacaagtttctaataaccaattcgaaccaaatcctaatcccaccgctcacggcccatttttcacacataatgagtattaaacataattcattcttaaggctatgtttagaagtagatgtaattactaaattattaaggtattaattacataatttattaattaatattttaaaatacaagttgtatttggatgtgaggtgataattatgtataaatttctaatatcatgtactagatagttaattcattcattcaaaaaaaaaatagttaataattacataagaaaataatattttctaattattaatattttt

SEQ ID NO: 247501 - DNA, 837 bp, Cannabis indica
tcgatacatatattataatatgatctaattaatatatgtacgagaagataagatgatcttctgtcattataaattaatgtgtagttttaaaaaaaataagaaagaaaataaagtaattaataatataatatacattcttgtcatcaaaataattaaataatttagaatagagaaggaagtagaaaaaagagagaaagataattaatggtctgattcatgaagactacaagcaaacaaaattaaacatatgtaaatcatttacagtgatcttgaaacaaacagagaaaaagtttacatagaagaaataataaaaactctggagattagagatggcttacaagtatagctggccctggctgggattttcgggcggtttattgtgactttcggctgaaatttgatctcagccgcgctggtttgctctgctggttcgatactagttcgaaaatgaagaaagaaagtgaagagaggagatgggctgagatgagattgtggaaaatgatcaataataacataattaattcttatggattcttatatattaagtatgggctccacgtcctagctgttcacgtccaccattgttggtggtggcccatgctctaccaaaaaagaatgatttttttttaattagaatttttaacttataacgtccaccaccttttttatgtcaaattttgttggacattatgaaatttttttatgtccaacaatgttagactaaaaaactttccaaaacatttttcatgtccaacactattttacatcataaacagacttcccactcccgttcttgccaatgatactcccctgtacaaactttttcacaaagaacca

SEQ ID NO: 247502 - DNA, 830 bp, Cannabis indica
ctatgtatccaattgttttctactttggttggcgggcaaaattttgatgagtcacgattgagtcgggggaattaattttttaacactacacttatgtttttccattttatgttaatgcatgccacatatgtttttaatttttattttcatgaaactggaaagatcattattaacaaaaaattaaaattggaaacatcatgtttcggatgttcgtagcacaaagatatattatgatccaaatattgagtcccactcacaagtctaatagcatatttttttttggctgggtacaactgtaaaagtgtaatagctagtaaattctctgttttgctcactttcttggaaaattgaagtattaaaacattgattttgctcttatcctagattatgcgtggcatcattgctattaatcattaggtgcctagctagtatcatctataagtaaagatcttgtaaataattagcgattatttcataataattattaaattaaattatataagatcgatacttaattacacaaatagtgggttttcctttctcctagccgcccggttcattcttttgttctgaccaaggctcgccaattttctttgggctctgtcgtggctttggtcgagagtgatttttgattctcaaattagtgttttcagtggtttcgtgattctgttgtgaaactgtgttggggtagatctgcgagggtgccgtttggtggttcatgtgggcctttgcagtatcatttgagttttcttagtcgactatgatctttgttactaaggatcatttgttggaatctggaatagttttggtgttctagtggcttcctgatg

SEQ ID NO: 247503 - DNA, 936 bp, Cannabis indica
tttttccaaaatcaagatcagctaacaacctaaaattggtgataaaacaaaagtacgtagacaaacattaggcattcttgaatgaacaaaactttcttactaaaaatatttataaaacatcaacaaaattcacaatttaaagttcattaaatgttctaactaaaataaattagttcatgctcaaaaacataaaaatacccaaaatgaaaacaaagaagtatatagttaaaatacaacagctttcgttgctctgctttcttctcccatggcgaggaagaaaaaggtgggacgcaagccagtcattcgatcccctatcgacgattcgcaagcaggatgtgaggaatctgaggatgtcgatgagagtggttcgacagacggactaaacctaattgcagacttggttaaaaaccaagataatctgtcttctgaagatgttggtaaaagcgagattcagagatccactagataggcgatggaggttgaggaggaacagagcaggcattcgaaccctggaccatcaccgatgtctgtgaagaagacctaagaaacattcacaaatggaaaagtaatgaatcgggatcaaaagcttcttttcacagaacctatgataaggaatggaatcaagatagcacaagttgattaggaggaggttagagaagagggaaattgttggaaatcaggtgtaatctgtaaagttcttggagcaaatcctcctgttcccatttttgaaggcttcatcaaacgagtctggggacatttagggatccactaggtgtctaagatggcgatggggctaataatggtgagatttcgagatgaagcaacctgtgatcaagtgttggaagaaggagtaatctaattcgacaaaaaaccagtaataattcgaccttggacaatggatttaaatgctttcaatcttgttcattcggttccctt

SEQ ID NO: 247504 - DNA, 1002 bp, Cannabis indica
gagatgaaactggcaaaaccagaagacaactgaaggaaacagttaaaaaccataagaggattataaactgccacagagcaaaatatggcagatgctcgagtttgtttcaaatattgtgacggttgagcacctaatattaaaataaataaacttataataattttaaaaaaaccactaaaaagatttttttttacaaaaattctctttttaatattattttatgtaatttcaatacttattttaattttattaaaaaaaaattacgtataattttttaataaaatttcatacaatttttttgtcataatatttaatacataattttttttatttaaaaggtatatttttgtaagaatttgataatgaagtaattttttttttaaaaattattataaattaaagatatatcttatataaagtaaaaattatagaaatggggtgcatgtaacgccctaacaattaggcatgctacggcaaccgatatgaaaccctaatcccactaatccgggatcactagaaagataagcacgcgtaagtataaactttattaacaacagaatgaaaatgtaacttgtaataatagttttttaaaactttacaatgaaccaaaagatacaagtttcgggatcccataaatatttttacaaaatattacaagtttacttcatgtgtcgacctaagcggcaaatcaaaaaatttcaaaaaaaaaaaaactaataaatcattggtagaccccaattaacttggtctagtgtggcttgaacatgtacaagcactgccaagctctcgcactcactagctgatcacagactgatttaccatttcctgcacaatactgtacccgtgagccaagctcagcaagacagtaaagatatcaataattacaaatcataccacatatataataatgccaatttacttattgtctatttaatatagacatgcgtgttatgctcacatatccatttacgtctatgtggcatagacccacgtgttacgctc

SEQ ID NO: 247505 - DNA, 610 bp, Cannabis indica
aaatttcttaagtctgatcatggggaggttgttaatagcttggagggtattagtagtattgtttcttcatattttgccaatctttttcaaactcaaggttgtgattctggttctgttgagcagattctttctgttttaggtccccctttgaataattttgagattgactatttaggggagccttttcgggctgaagaggtgaagaaagctgttttccagctttctggggacaaagcacctggattagatggcctgaatgctttcttttatcaaaagaattggtctactctaggtcaagatcttgttaaggctgtgttggattgtcttaataatgatagagatttttcctatattaatcagactttaataactcttatccctaagaaacaacgtgctcaattcaagattttaggcctatcagtctatgtaacacattttataaaattatttctaaggttttagctaatcgtttaaaagttatcttaagtaagattgtttcccctgctcatagtgtttttgtttctggaagggttatctttgataatatacttctggctcaggaagttgtgcatgctattaccaatagaaaaaaaggtaaattaggttgggc

SEQ ID NO: 247506 - DNA, 1057 bp, Cannabis indica
agagaagaataacagatgcacaactgcaagtcgaaactctcaatacagtccccatcgaacaccagcagctatgaattctttgaaaaattctgagtctttgttggatgaattgttggagcaagaggagatttattggcagcagcgctcccgcgttgattggttacaagtaggagaccggaacactaagtttttccatgctaaagcctcagcaaggaagtcgaataacacaattaaatttttgcttgatgagaatggtaatcgggtctcttctaaatctgaacttgcagctgccatccatgactactttgctgaaatttttactgcttctacattggatgaagttgcccttgttaccactttaaacaccatcccttcaacagttatagccgagatgaatgccacccttctaacaccctttgaagctactgaagttgaggctgctctgcactcaatggcaccagataagagcctgggtatcgatggaatgtctccaatgttttatcaacataattgggatgtggttggtcacttagttacagcagctgttttaagtgttttaaatgatggagcagatcctacaagtcttaacaaaacacttattacactaattcccatgatcaagaaaccacaacgattgcaagacttttgtcccatcagtctttgtaatgttatctccaagcttgtcaccaaggtgcttgttaaccgctttaaacatgtccttccttatgtcatttcggaatcacaaagtgctttcttgcctaatcgtttaattacagacaatgttctagtagcttttgagttggtcaatgctattaagaacaaaacattgggacgtaaaggtgttgcttcgttgaaacttgacatgagtaaagcatttgaccgggttgaatggagtttcattgagagggtcatgggtaagatggggtttgctagtgattggataaggctaattatgagctgcttgcgtgctaataggttctcctttatcttaaatggtgaggtcacgagatccctccttccatcaaaagggctctgtcaaggttgtccactatcgcca

SEQ ID NO: 247507 - DNA, 2033 bp, Cannabis indica
ttagatttaggtttagggtttaggattaagcatttagagtttggggtttagggttatgggtttagagtttagggtttatggtttaggattttttagggttaagggtttagtggtttagtatttacggtttagggtgaggggtatagagtttagggttttgggtttaggcttctagattttttgggtttagggtatatggtttagcgatttagtgttaagggtttagggtttaatggtttattgtttacactttagcgtataaggtttaggggtttagtttttagtgtttagggattagggtttatggttttgggtttaggattaagggttttaagatttagatttagggtataggatttaggatttatagtttagggtttaaggtttgggacttagggtttagggttttgcatttatggtttagagtttatggttagggttttgggttttggatatatggtttagggtatagggtttagggtttatggtttagtgtttagggttttacattcaagttttagggtttagggtttagtgtttagggtttagggtttatggcttagtgtgtagggtttacggtttagtgtttaggatatatggtttagcgtatggggttttgggttttgcatatggggtttagtgttatggtataggttatgggtttagggtttaagatttagggttttgaatttatgctttagggtttagggtttatgtttttgggtttaggtttttttgggtttatggtttagggtgtatggtttaagggtttagtttttagagttttggggtttgtagtttagggtttagggtataaggtttcaaggtttaatgtttagggtttagagtttagggtttagagtttagggcttagggtttagggtttaggtttttggatcaggatttagggtttagggtttagggtttagggtataggggttagggtttagggtataaggcttagggttttgtgtttaggttaatggtttaggatttaggttttatggtttacggtgtacagtttaaggtttaagatataggacttagggtttagggtatcgagtttgtggtttagggtttagggtttaggggggtttagggtttaggatttagggcttaaggtttagggtttagagtttacgggtttagcctttagggtttacggtttaggatttaggatataggtggcatagggtttaggggtagggtttagggtttatggtttagcttttaggcttttgggatttgcatttagggtttagtgtttatggtttcgcgtatagaggatagggtttagggtttagttttattgtataggttttggatttagggattagggtttagggtttacagtttaggtttgggattttttgtttagtgtttaggatttaggctttagggttttgggtttagggtttataacttaggatttagtatttacagtttagggtttcaggtttagggttttacatttttttagatttaggatttatggtatagggctttgagttttagtgtttacagtttacagttttatggtttatggtttatggtttagggtttagggtataaggttttgttgtttaaggtttagggtttagggtttagagtttagggcttagggtttagggtttagggtttaggttctgggtttaggatttagggtttagagttttcagtttagagcttagggtttaggacttagggtatatagtttaggggttagggtttagggtatatggtttaggatttagggtttatcctttagggtttaggtttcttgtttaggttttgaattcagaatgcattctatatgttatatttagaaatttcatatttttgcatgttcagtgcccagcaacattagaacgcggtgtatggctcagtagaatcacatcttggtattttactatggtggggcggtataattagacattgagaatgttgagattagtcgggaatttagcatttcccaaaatactcttagtacccctttttatgtcaatttaatgtgagggcaaaaaggtcatttt

SEQ ID NO: 247508 - DNA, 549 bp, Cannabis indica
tccttatttcccctttatttatttttatttttttggcatgaatctccatgtgtatttttatagaagactttcaaatagaataaaaatatatttcaaatagtgcttaagaatacttacttttaatataagattggtttttgttgttttctatatatatacatactatttggatgattagaagttaaaaagtatttattaattatatcaattgattagaaaataaataattaagagaaaagaaaaattgtagaaattcaatggacaaaaaaatataaatagtagtcaataaattttcattgatttaggtggaagttgaatatgtatggtgatatagatttagtcaattgtataaatgaataagtagtaagatatgagtatatatttaattgggttgttatactttcttccttaatattctgtgtggaaattcaaacaagttcatctgtgatgttctaaatacatgggatttcatttttatgaaatttgaaacagttttttaatagttgcaaaatcgttttgttacagttgtgaccctttgtaaatattaag

SEQ ID NO: 247509 - DNA, 887 bp, Cannabis indica
cacttcattgatttctttctcatctaaattccatgcacaattttcctcttctcgtcagcttccctctcatttagaagacctgatagaagtgaatcaaatacaaggagaacatttaagagcttacatcagcaggttcatgattgaagtagcaaaggttaaggggctgaccgaaaaaggaaggctggaccgcaataatgggaggtattgaacctctaggagagttgtaaaaggatataaaaagactaactgtgggattaatgacataaatcctagatcgagcagatatttttgtttttaaaatagaaaataagtaaatgtggttcacattttttgaaatgttacagaaacaaaattttaaaatttgaaatttaaaaaatttgttttacatatatatttcatattttttttacactcctgcatcattttttttttttttgcgatcaaaggtccaaagtcaaatctaggttgagtctaggagttaggatcgagtccaaaactagggctagaatgtattcagggccaaaataaagggtagggcttcgaggtccaagcgaggttcaggaccaaggtaaaggtttgaagttcaaggccatgtcgggtaagggtatggggctaggaccaagccaagggtgtaagtctagggataagtgtttttatatatattagcatatttttttttacactcttatatcacttttttctcatgatcacaagtctagggtcagagctaggttgagtccaagagctaagattgggtcccaagtacttagggtcgagttcgagaatgtagattggggccaaaaataaggggcatggattcgaggtccaagcaaggttcagacccaaggccaaggtttaaagtttagggccaatggtcgagtaagggt

SEQ ID NO: 247510 - DNA, 937 bp, Cannabis indica
aatatacctcttaaagcttatcaaggtatcctcgaaacttctcatatgttttatcctttaatccagataatgaggatgatgcaattagactcacactagtgtcttccaaattgatccaccacacacaaggaatagtatgggctattgaaataaagtgtataacctttgttcttgttgagttctcaactcatgagcaagaacaactgagagaaaaaccaatttctgtttttctctctaaattttgaaaatttaagttcatgaagactgttctgatttctcaaattagactcctatttatagtagttaaatacttttaattaaatcatatttaattgtttaaataaataaatatctataaccaaattcggttattgatatttatgagggaatttctcaactaattgagttaatattttaacaaacttgaaatatctataactacttttcaaattagatatttacctaattaagttaattaaataattaattaaatctaaaaagataaacttcatagggataggataatgttataggcgcctaccattatctttagaacaaggttggtgtcgtacacttaattatggtgtgtgttttaaatatttatactcgcaagtgcacgaatcggatatggaatatagtgttcatataagtacgaggtcgaacccaaaggagtcgatttatatctaagagagactttttaaactcaaaattaatcaaactctaacctagctccaaataattgatgagatttgtttcataaaataaaataaaataaataaaatttaaaataaacaaggtaaaagggatttgatgattaaatggtagatgaaagattattaagactttagaattcacaatatatattaataatatttattcctcattgatcaagcagagattgagtccttagaacgaccttttaaagagtctttggggt

SEQ ID NO: 247511 - DNA, 1263 bp, Cannabis indica
atgaagttgaatattggcaatcgactatggtctgttatgtattgggggaaaatccaccaataggagcttttgaaggctttactaggagggtttagaaggaaagaggagtggacaaggtcagcttgctgaaactgggcatctttattgtcaggttctaagctttgggtactaaagatgaaattatggaagctgggtttttattctttgacaagaagccgataataataaaaaaaaatgggatcctatgacagatttgagaaggaagatgttcatgtgattcccacatggactcaaccccatggagtagatttgaagtattggggagaaaggtcattattcaaaatagttggacaattgggagagccgcttatggtagactcggtgacgaagaatagggaacgtcttaattttctaagaattcttttaaaagtccaattgcatcaagaattccctggcactatctctttttacaatgaattagatattgagattgcggttaatgtgaagtatgaatggatcccggtggtatgtaaagaatgtaagaaattgggacatacaacaggagtgtaatatcctagaattaagaaatggactagcaaaaccttaattagataattattaataattgaggaattatattattatatagttcaacatatgagaatttatttgattaattatatgttaagaccccgttggtgagccaatggcattttagtaattatgacccgagaagggtaaattgatgaaattaatttgaatatgtgcttaatggaactatattattatatggtatgcatgtgttgtcttttcaggtgtgttcttataggttggcgcggtatagtcacaattgggtatttcgggccgaaccgggttcgggcctgaaatgcaaattggattgaattatttggaattttatttgataatgtaaaatctgaattttatttgaaaatttatgagtatgaatgacttaattgcccttgagagtgtttattcatgctttatggccctaggggcaaaatggtcttttgacctccgttttatacatttaataaaagtttgaaattttgagataatgaaaagaaaaattttggcttaatctccctcttactcgacccctctctctctcaaaaccctctctatttgttttaatattgtttagtatttttttatatattgttgtgttattttgtacggtgatattattatgttatgttagtttattatgtaagattttatgttttggagttggcaaaaatttaa

SEQ ID NO: 247512 - DNA, 511 bp, Cannabis indica
ccaaatggttggttgatgtttttcgagtcctctaaaagtgctatggggccctcaagaaggatgtctttactcatttgatatttataagtcttggtcaaagttacaaggatgacttttttaattttccaaaaattaggtataacatttgccccccaaaagtgtgtcaaaaactttcggaaaagatttttgttattgtaccctttttttcttgaaagtaataagcacgtcgcatttcgcttattttgtcatctcttggagtactctgttgatactgtcaacgttgcgagtcgtttgtcttcttggcgatttctctcaaaatttgtgaaatttaaactttattacgtgacaagaaacttaatttgtctaaaaatggcaaattttcattctttcacataattaaatgtttaaatcacaaattttatcaacacacatgacaagtatcataaggagaggagtgccattgacacttaatacaaataacatgtgttaaataagccaagggcattttgga

SEQ ID NO: 247513 - DNA, 704 bp, Cannabis indica
aaaactttcggaaaagaattttgctattgtaccttttttgtcttgaaagtaataagcatgtcgcatttcgcttattttgtcatctcttggaatactcagttgatactgtcaacgttgcgagtcgtttgtcttcttggcgatttctctcaaaatttgtggaatttaaactttattacgtgacaagaaacttaatttgtctaagaatggcaaataagccaagggcattttggaaagtcttggccataagtgtgacacggccataaggcctttttcttttattaatgtaattttctcctcttttttcaaaacatctcactcaattcaaacacaaaccattcaagagctcaaactttcaactcaaattttaaggaccatttaagcactattcaaggtaatttttttttctttccactctttttcattctcattcaatctctcttctcatccctttcattaaacttgaaattcaccaaagcttcaattttccctattgtagccgtaacaccctattagtttaagcgtgtaaacgtgatttaagggtatttattccgtgatgtaccctaaccgttagatggattaattatttaatttgatggttggggttaatatagagatatttaagatgaaatatattggtaaccagttcactttttgtaataaaaaattgataaattttaaaaagtaaaaactgacatgaccaccat

SEQ ID NO: 247514 - DNA, 1021 bp, Cannabis indica
tggtatctgaaagaattttttagcttatttttttataatcctctatgttgtagtgatttaatatattttgtaaaattttaagaaatttggaaaaatattacaacgtaagaaataggatttaaacaatctcttgtatgtgaaatgtcataaataactacaacgtatacgattataaaaaaaataagactaaaaaaattctctcagatactgaaacagataagaagtgcatcgacaaatcttttttagaaggtgtattattaaatttttgtatgatatatgaatatgtatatatgtaacaacttatttggtattctattcacacaaaacataaatagatagatggttttaagtttggtttttctttctttctttttttgtatgaggaattttaattacttgcacatatcaaatgagaattccttctttttccttgcatgaatgatcaatttggtttaccctatatatatcaaagcaagtacctatcaatattgatagagccaatatttggttaatatcaatcaagatatattttatctttttgcacaaaaatcatgtcaagaaactacaattatctatgatcccttgcaaatgacataatatatatagtccatttaactatgataaataaattgggaaatttttaaatgcatggaacaaatattgagtggctctcacacaattttaaggtgattatgacataaagaacaacaaaatataattattaaaaaaaacaaaaataattattgaaaacttgagatgatgtatcattggaccacaatatatgtgtgtgtcacccacaaagtgatcattatgatcaccttatcatcacttatgtgtgactatcatgttctttgaaaatgaggtagtagtttagtttatgcacttacagcttcaattactttttatttttcaagaatgtatattttaaatcactctttaacatttaccatttttagtaatccattaagttcattttgttaaagttaaaaagtaaaaaaagttctatgatgaaaccactcaa

SEQ ID NO: 247515 - DNA, 673 bp, Cannabis indica
ctctttccatgttagacttgtatcggatcaggccaaaaattcaaatttgctcgaaaaacatatatctgaccatttcaatcctaaatctgacctaaactagaaaatcacagtcctttaattctaaatttaaataaacgtttcaataattttatatattttaaccctaaatcataccaaaaaaaaattaatacttatctttaggggcagacccacatagaagcgaagcagggccgtcacttcctgaaaaaataattgagaaacaaatgtaatttaattagttacgatacatatttataataaaagataatatttatagacataatattagttttggtataatgattaagataagttacatataagatattagttaaggactcaaatagagtattttttttttcattacacccctcattttaaatcttgagtgctccctaatttcatcactttaaattctagttccgctactgcttatctttgacgatagtactgatggagaagttattgggtccacagtgatcattaggtctgtgaatcattggatctgtggtctcggtggtcgtggagagaatgaatcgagattatgaattgtggattgtgggtcgagtccttggggtaaggtcgaagagcgagagagagagaaaagggaggaagagagaggttcggtcgggtg

SEQ ID NO: 247516 - DNA, 541 bp, Cannabis indica
gggtttttttactatgtgcaaaaatatgtattttttttttttcaaaaaaagttattcaatgggaattgtttaaaaaaattgaaaaaaattagataagggtaactaggcacctttaggggtaaccagttacttccttatactatttgttttattaatttttttcctaaatttttctataaaatattttcttaaaaaaaaaaccataaatttgcaagcttatatcataaaaatgaaaattcctttgtggaaattacacatatttatgaatttcatacattgtttgcaaattatgactttttcttctcaaaaaaattattttatgggaaaaaaggttaaaaaatattgaaaaaataatttaggtagtactttgccaatattcttaacattttgtttattatttttttttttcataaataacttttttcaaaaaaaaaaaaacatatatttttgtaaacttttactatttaaaagccataaaaataaaaattccatgtcaattttcattttccattcattgcatattagtattagaatataatat

SEQ ID NO: 247517 - DNA, 730 bp, Cannabis indica
aaataacacacattctgtattaacatgaaaaccatttcaacttctgatgatgcacaacaggacatactgtgctgagatagctcacaatatctcaacccggaagggtatggagattgtggagcaagctgctcagttgaatattattattaccaacaagttggctaggttgtgcagccaggaggatgaatgagcatttatgctttcatttttgttcatttactttgtgagatttaccctcgggcactttttgttgaaggtactttgttcttaattttgcggtttgttttggaatctggtttcttgtattgcttgctcaaataccttaggggctgtttggaattgattaatatgttaggaagggaaaggtaatcttgatgataacctagtttgatatgaagttttaaattttttaaacccttgtaatatcttctcttttgccattttctatttcaactatttatgctttccttattctactatttcaacacattctctataaaaagaaattcatgtgcaaagactgaaatcttaccgcgcctcatcttcactacacctctgaagacttcaatgttgttgtagcacaaagatagtgtgccaatcgacatgacctacgcatatgtattgaaggtaaagataagtttcaaatttctgaaaaacaaaatttcttgattcatgacaagtacatgattattcgtgaaaccggaggtgaaaacaacaaaaaaataaaatc

SEQ ID NO: 247518 - DNA, 978 bp, Cannabis indica
gatatatattggagaaaattaaataccggaattgtgcggggttataatttttgaccattttacccctaggttggaaataagctagaattaatctttaagggcaatttagtcttttgccaaggttagtggtttggtggctgtctagaaacttgacacctagcagccattattgagcaaggatttgaaatccattatttttcatttagagaaaattagaagagaaagccaaaaattagaaagattactctctcctttcttctctctctctcaaaaccagctggaaccaagggagattgttgtaattcttggtgattttagcaagaaattcagagaaagatcaagccaaggtaagccctagtaacacttttccttagttcttgaattttaaggttggttgaatatgtgatttttaaaagtaggggctgttagggtttagtttttgtgtagttggaattttagggttcatttgagttggttttagtttctagcagctgattttgatgtatttgattgattttgtgcaagtttgagctttgaactcaaagctttgaactttactggcataatatgattttgtgggtttttctataaaatactggttgtaaaatattgtgtataccctaattaggtactctggaaggtttggttgcatttggtggaggattgagcaagaaatggaaattttggggtgaattggtgtaaaccggctagccagttttaccagtacctataaaatgggagggtccccgaatgctccattttcttaattcttgtccattttagtgtcgtagttgggtgtttccctatttcctgagttagtgtaatccctagagagtataacagaacctagagtggtgggttcgagtttcccggattagggtttcgatcatgtgatttacccagtttcattatgtgattagagcatccatctagcacgagactttccgttcaggtcggccagcacacttgaatttggaa

SEQ ID NO: 247519 - DNA, 589 bp, Cannabis indica
ggataaaggaagagattattcgaacatttccgtatcactataaatatatataataaccagggcaccaatttcaaatgcatatcccatttttgcccaacagggttatgaaaatccacgagaagcggcaggccgtattgtatgtgtcgattgtcatttagctaacaagcacgtagatttcaaggttccacaagcggtactgcctgatactgtatttcaagtagttgttcgaattccttatgatctgcaactgaaacaagttcttgctaatggtaaaaaaagaggcttgaatgtgggtgttgttcttattttacctgaggggtttgaattaacccctcccaaccgtatttcgcccgagattaaagaaaatatgggaaatctgccttttcagagctatcgctccactgaaaaaaaatattcttgtgataggtcccatttctggtcaaaaatatagtgaaatcacctttcctattctttccccggaccccgctactaagaaagacgttcatttcttaaaatatcccatatatgtaggcgggaacagaggaagggtcagatttatcccgacggggagcaagagtaacaataatgt

SEQ ID NO: 247520 - DNA, 750 bp, Cannabis indica
tgacacctatcgtaatgataaacaactcatctcgacgtgaccttctcttgaattctcaaaatttctgtcactccaccccaacaagggcagaaaaccccttattgtcttggttgtgctaccgaagactctggggaagtcggaataggagagcactcatcttggggtgggcttactatttagatactttcagcagttatccgctccacacttggctacccagcgtgagagaaaccatatccctctctttcctctttaacgcccccacatcgccacacgggagggtcatggggacgtaaaaacggggatcctatcaacttattctgacataggataataagctcatgagcttagtcttatgtcactattgagaaacgaaagaagacttccatatccaagctaactcagacgtggctcgcttctttaataagtcaatttataatctttattaccattctttcggttgatctatagcatactctattctcataagatgatatacagtagctaacagtccgtctggcgctacatcataggcacattgagaacgtagataattgtaaccatatacatatgaaatggcagcaatggccctaataaccaacgaatggcaagtgcttttccttgtgcggatcctatttcaatgggaacgtgatgagtaaatctgcctacatgtcttatttttaatgctgtatcgggagttactccacatattgcttgacaaaaaacagatagtggatttatttctgtctt

SEQ ID NO: 247521 - DNA, 506 bp, Cannabis indica
ctgacaaaagagcaaaaaaaacatggtatggtgtgatgaatcaatggtccctttagtagatagagctttcaattctaaactagttagttggaagaaagaaagaaggtacttgaattcaacaaccactaaacaatacacattactaaacagcaacccgaacgaatcaaaggctattatttaaaatagccattacatttttttccctctaaatgtaaacttcgacaagttacaaaattgaggtctagccttaaaacaaagtttaatctacttacttagcaacatgctccttcaaaaatacaattaattattgcaggtgcaccatatgaaatagacaacaaatacaataactgccgatgataacgaagcagccaatccattcgcctgcccaaccgggtttctaagccactcaccgagactaactggccaaattaagaagtaagtaatcacctttctagaaagaggagatgaagatgagattcagaaaataactcacaaaccaaatataa

SEQ ID NO: 247522 - DNA, 1794 bp, Cannabis indica
tgaatgcaaggatggtgggattgtggctgaatacaccgatagtgggatcgtgtgtgtgccacatccacgtaagttgatctctgagttatagggattgagctggtgattcatgatgcgttaagctgaacttgctaagtgttgatcattcggcacggctcgttgagtattccattctggatgtgccagcgaggcatcctgctcggcatatcgttccgaacagatgctccaagtggagtccacgtgtcaccattctcgtgatgccacgtcagagtatcaattttgtgataacaaatagtaataccaattattaattacatatactataaattaaggttcaaagagggttagttgatgatgaaactggagaagcacataacaaaggaaattccttgaagaatttgaacatagcatgaggatttggacatacaatataacagaaatgttaaaccagctgtgataattgaataaaaaatagggataaatattaggattaccttaggttttcaagatccaagaacaaaggtttttccaatggtagtagctgaaaagaaatgttatgactgaaaaagaaaaacaaccaagcaattcaggagctatttacccttttaatactcaccttcgcaaacatccccattattataacactctctcccaattattgttcaggtttattctttcaattttattgtaagccgaacaatcacagtcccattcaaaccaataaaagactcaaatcaaatcaaattaattttttaataatcctaacaaagaccatttttaatttggaattttgatttgagatttatgatagataagatggtggtcattttaaataaaaaaaaatgaatgttatatttatgaagaatatggagattgcggaatggagattgcagataaacatagggaaatgaaggaaacagaagtcttatgtaattgaaattcttaccttaatttggatttgacgggagagatttgagtgattgaaactcacattccaatgatttggggacggatcggagagctaagctccgacaactttggcatgattgcaacggagctctgtttcgttttcttttttttctttaggataggcgatgatttgggggcgggtggatcgactggcgcagctccaaattcagcgttaatggaggttttctccggcctctggttaagtataagatatacgttgaaggttgaaggtagagatgaaagcctaaatacgtatttttgcaaaatataatctaattgtggttaattctcaatataaacgtatttttgaaaaaaaaaaagttcattaaaaatgcaaaagtgaaaagagccctaaaataaataaattttcgaaatttcttaaaataaaataaaataaatcataaaaaaatattctaatttatgttgctccaaaattaattaataaattaatttttaacataaatataattttcctatttaattaaatattaagaaaattattaaatatttaagtttcatgaataaaatccacttaaatattaattttctatttaattaaatataactagaaaaatacttcaagcaaacagaaaataactatctagattttcactaaataatctctttattttctaactaaaatattatatattttaatctatttattttaattgatcaggaatgaaaaatctaattgatttaagttgttctaaaattaattaaaacttaatttcaaaatttaatatatttttcgaaaaaaaaaatcaaaattatctccatttaaataatccaatttcgaaatttttggaaataatgattaataaa

SEQ ID NO: 247523 - DNA, 1303 bp, Cannabis indica
gtggtaaccaaacccgaaggagagaaagagatccaggttcaaatcttgataatgctctgctacaaaaaggaataaaaggctagagatcttgaacggaatgagtcattatatttcgctgcaatcaatgtaaggttttcttcaacccttatgtgtttatttcattattttagagaattcatatttaggatgttaatcaacatacttgttagtaaatctagatcctggtagaatattcccaacaaaagggaagtgatggggccaagcagtatgctcaagaatattcagagcaatagcagtatgctcaagaatattcagagcaggagaagctgagcaagaagaagaagaaagctcccttgactaagcaagcaccagtggaacatggtatcaggatcagggaacctggtatgcctgctcggccatctacccctgtagagggaaaaggaaaagtcgtcttggtggagcaagaagacgactctttagatgatgatgtcccatctgtaattgtttgcgaaaatgcccctgtctgcgtgtagggtattttagcttgcatttacttctcttatattatgcttttcacgtacattatatcttcttctaactgcaatattttatctgtgcacatatgtcttagaagatgccccaggccttaaagaatagagtgggagatagcccgagcctgtctcctctagccaagaagtctaaaggcggtgagactccatccaaggagaaggtgccagttgatgaggtcattgacctttctaaggagcgacccgttgtggaccttccagtttaaaaggtctcgaaatccaagagttccagaggagggagcttggacgggtctgaacaagctaggaccccttcaacaaccgtagcactgagcacggaggcaaagaggggtaaagacatgttcaagtactatctgaaccgatcacttcgtaaggtgagtgaccaactgtccggggcgaacaatgagttatccttggagctggtcctagaaggggtcttgaaggaagctactcgggtaattatctcctcttttttatctcattctcttttatgtagcttggactttaacacgttttccatgtaggtcaatgtgaagatggcttatgcctattcctgaaccaaatcaactgttcccaagaacctcatcacaacaaacacattgcagagggaggtggatgtggccagaaagaaaattgaggacatgaggagccaactcagagaagtgaggaatgagcttgaggaggtgaacaagaagcttcttgctgctaacaccgagattgaggagctgaccaaacag

SEQ ID NO: 247524 - DNA, 1115 bp, Cannabis indica
cttcgacattgatgagtactttactttccaattcttccttattacgccgacctacggttatgggtacgacttactttaaactttattaatttattaaattattatgttattgtttgggtaggtagacaagtcttatactctatatttattcagtcttttgattttggttaaataatatctgttagagcatgggggtgttcgtttttattttctgggtagtttttactatttttaggaaatgatttcgtttcgtaatatcttctgtaaacgacattaatgtaaaccactagctacgacatcaaatattaaaaacgacactaacctgaaacgacgacattatcttggataggaaggaagctaggatagtgtagaaaacgacagacaatgtgaacttagaaaacgacaacataacaatattaacgacattaagtttgtattttccaatacatctgcataatttgtcagaatattttgtctgagaaaaagggaataaataaataaatctgccagtcacttggattgggattcaatgtaacttggtatttctttttttcaacccaaactttctggaaattagtcaaataaaacgtggaatgccatgtactttttcaacagtttaatcatcaacataaaaagtgtaacgtgaacagttttaattaaaaatgtgataccattgcataatgttatggttttcaccaatggaatcttccataaaatgactacatgtttaaaaacgtacttattttttcgattgttagagcatctccaaccatgttagctatcctatacattcttacgaaagatttgtcttttttttttcttttctgcaaaaagatatcatccactttttatgtaattattgatagagaatttgaatgatactttcacaaaaacagaaacaaaataaaaaaaagaatttgaatgatactagccaaggagtttaatgtggagagcaaaacaatcctagtcaaattctctttcttattagtttagtattcaatttgatgaaagcactcacttttaacatgatttgtccacaacaaggtctatcaaactatgatcaacatgatttatttagttatcaacttagctatatcagtcatgagcgatggtca

SEQ ID NO: 247525 - DNA, 804 bp, Cannabis indica
atatattactaaaaaagattaagaaattagaagtttgtgtctttttttaattaatatatattatatattataatttttttaaaaatatatatataattaagtgcggattggattggatcggttactttttgaggtcaaacaacatccaatccgcacaagtgcggattttaaatttttcaatccaatccaatccgcacaagtgcggatatccgcattttgcggattggattggattggatcgtgcggattggattggatcggatactttgtgaacacccctagttgtgttgtacagcagacataaaaaaatgggaaacttacaaaaatactgatattttggttaatttttacaaaaatactgtcacatgaaaatcttttcaaaaatactgtgtttttataaaacaacagtggaacacaaaacaaaacaactaaaaacaatagtagaacaactaaaaaacaaccgtagaataacagtgaaaacttaacacagtacacagtataaaacgtatacagtatttttgagaaaaagtacattattttttaaaaaaaaaattctgccccacagtataaaagtaaaaaagttggaaatttcagtatgtggtgtaattatccctaaaaaaatataaatcgtgtcgtgttgtgccaacaatttaaacgataggtctgacacaaaacaactcgtaagtcaatattttcgtactgtgttttacttggattatcattttttataaataggttagcttattttcttatacgagctcgaattcaggtttcatttttccactatttttttttacaattaat

SEQ ID NO: 247526 - DNA, 520 bp, Cannabis indica
tgactaaaaataaaattttttatcgatagtatgtttgtatatagattttcttttgtaattaattaaattgcttgtgaaataaagtattagcctaattaataatcttttatttttccctaatcttaatttgatttttttttggcagttaccttgggctaaagatgataagagaaagacagcctaaaactagaaatctcgtgaagttattgacttccaattattcaaagtaaataaaattatatatttttatggtcctatacaataattaagattaattatgatttttatcttccaaaaataatgtatcaaattaaatttttcaaactttttaaattattaaaaatttattctaaactattaagaatattattgggtttaaagatttattctgttcaattttactaatgtgttattgtccatgtactaaatcttacatatcgtgctcccaaattttgatatataccaaatcgtatcctctgcacttttattcacgtctctgttagtaaaatttgatgaagat

SEQ ID NO: 247527 - DNA, 866 bp, Cannabis indica
aaaggaggactgtttggttgatgagaaaaagagagttaaaattaaaagagtgtgattgttgtggccatggctaaaggttgaagagagaggagtttgaggttatttatggctatgttattttatttatttattttacagcatgcaaattgatattattgaagtttatgtttgaaatgtctagtaacttacaaaaagaaaagcaaattttcatattccttccactaacttagtccaaatttatcctcaaatattcaattcaaaagattcttctttcttcttttttttttttttcaaagttatattcatgaatatttttcttctcttacttgtaaaagttatggcaattaaaattgaacacaagaagccataataagttgtaacaaagatgtgcagggagatcatcaaagaatagaatatagatctctgttttgtgtacatatatcattacttgaagaaaacccacttcggaaaaggctagagagatgtataacatttacttaagatctctgttttgttagttggctcaggtattttatatagaggacaattttataggatatataaagagttagttcttttcaatttgtacgagtctagattttcacactatctaactattggatttttgagaatttttatgtattccatttcagtacatctacatattgtttttggtttttttgttctcttttctaatacaactaaatttagatggtatgtgtcatctaattttttctttatttaatttagatggtatacgctattcaagatcttggataaatatatataaacttcataattttatgattcatttgaattgtaatgatattattttgtatgaactggtgaattcgtatgaacactga

SEQ ID NO: 247528 - DNA, 1862 bp, Cannabis indica
ttctcattggattggatcgattttatgcacacccctatccatgtcagttaccttctcaaggcttaatcaagcaattcaacaagactagatctttaaataagaatttagttctcacatccttatatattgatttctaaatagtccccactttattattcaataatattgcaaaaaaaaaaaaaaaaatccattgttggagtggagactagctataggttttaattcaccttaatttgatcatcaaacagtttgttcttcacatgaaccatcatcaagaaaaatctatcaattgtcatgtgattaagcataaactttcacgcttgatcatagcttgaaaatcgtgatataaccatatcaattctctaagtaaagattaagaactgctgatggctatcgcttagaaatttagaggtatatataattaaacttatctcgtgtatagaattacaagtcataaaattttctcaatcctttaactttatttattcacatatagagtttcttactatgttctggctaattatagggtcgacaataatctcagtgaaaataaaacaagagattaatctaattatttcttaaataatcttttgacatttgactaatgtcagcataaaactctaacatgactacatttatttacttataacaataatatctagaagagacagacgtatacaactttgtattgtcaataaaatctttgagatgatcatcttttcttagacgattaaaatgcaagaatgtcaaatgcaattctattgcctatattagagttgataaatacaaattattatctaatcacaacattaataacaacattaataagcatattcagaataaaataatatgatatattgaacctcaatattctgagagtcactacaaaaagacttagctcatatgatctctttagaaaatatctaacatagttgtgaatatagaattatgtttgtgattatattagttcatacaagattctaatatctttcccacttggacagatataatcaacaaacaccatattaatctctatcatacaatatgcagttaaaataaattatgtatgatatcatatcgataagatatgtatattacacataatttagcttgggagacattcaaatataataacaacaattaaaccaagatgcatgtagtacaacaattacgactatctatcagtcttgttgtatccttgtcactttgagaaacaatacacataagaattgactgcatatcattatgcatgtttagattagtcactttaggtattttctactattaaagcattttaaagcataaaagcttttatactttgatgagtcaaaaatttgagaagaatgtgctcaagataataatacatgagagatcttaacaaaagagtaataaatactcgatatctctcaaaacttgcatgcaatataaattaatccttgtgaacaatcgggttgtaaaactattctctataattataatagtcattagcgatgaccatgtgtactaaaattgaataaatcaaaagacgtatatcctctattctttccatttctcatccaagattataattaagctatcaaagtcacaatatgaaaaactttgtttaaacttgaatcgatccataattgttgcctaactataggttaattatcctcaaacttactagcaacaatgatatgatatcgagtacacattcattaaccaattatcttgaattcactatatttatagacatgcacaattaacacaattatctctttgggatagacaacgataatcatacatccatcgtcaatttattcaaaatatatccacttatgatttatgtcttatcttgaaccttaaccataagaatatcgtaa

SEQ ID NO: 247529 - DNA, 662 bp, Cannabis indica
ttagatgaaatgaatttaaatacatatgaataaccttatatatgtgcgaattaattttatgaattgaacatatactaaagaaatgattgaaattatgtacctcagctccaaccattaattttgatacttgatctactaatgttagacctgcaaaagaagagatgaaaattagtgtaagtaactagatttcttaactataactaactcttttaaatagagttacggatgacaacaaattaattatatacaatcacaaatataatagtactctttatatacaataaattaactaattctttattattgtgttaaatataatagtactcttacaaatttttcgtatggtgccttttggtaacatttttatttttaaatttttaaattataaaaataaaataaaatttttgtttttaaattttgattttaaaaaacaaaaatgtgttctataaccacttttattttttaattttaaaaataaaaaataaaagtatgttctgtaaattttatttttatttttatttgttgattttatttaagttaagttcgggttcgaagctgggatcgagggttgggtccgagtttagagtcagggccatggttcgtttgggtttcaaggtttaagttggagtactcagagtataaaatattgatcaagaaaaaaa

SEQ ID NO: 247530 - DNA, 2704 bp, Cannabis indica
attgaaaaataaaaatagttttacaggaacatttttctaaaaattattttcacttaattttaaaaacagaaaactgattgaaaagatattaccaaacaccacctaaattttgctggtcttaattttatctaaacatgaagatctttataataagggctttttttttgttggtgtttactagagtttgctcaataggttggacttttttataaactagtttgtttaatttataattttttgagggttgggctgtttttcagtgggcttattgggtaatgggctattttatttgggtttctaccatatttttgtaaatactttttttcttcaaaaaaaatactctgtgtggagcttagaaagtttaagtataagaaatagggattctcaaattttgcagtagttagcaaatatactattttctatgccaaaaaataactaaacatttaactaaacatttactagacatcttctcactacaagactagttgaaaagcaaacaaaaaattaattagaagcaagatgctacctattttttttttttttcaattagcaaaatcagatccgatttgttaactagaatctcttagcttattaatttttcacaatacctgatgctcaggtcatattgactatcgctagtagcccatatgttgggaatcatgtacttaaataattctgttaaaccattactgaatataataaattataattgagaaatgctaaaatgtaccagtggtgcctagcaccttcctatgtgtcaatatcgctattggtccaactaagtagcgggtcccatataatttaatataatagcttttagggagtatcgctggccaatcgcaacgcgacatgtcgagaaagtactaagcaccactggtgcatcatagcaatgctcattataattgtgtttatttacgtatctagaaaacatttaatattatttaatattgtagtgctgtaaatacgtgttgaatttttttccacggcatgaaatcgatacgagcacgattcaacattaaaaaaatacgaatttaaacacgacatgacacaatagtgtaaattgacactgtacgacacgaaaaaaaatagacttaaacaataacaacaacaacaacaacaacaataataataaaaagtaaatagcggcataagtacctaaacttttaagtttataagtggcataaattcaatatttatttttagcaacataagtacctaatgtttgtaaaactgtaatttttctctaatttcgtcagtatagactctgttattgtcttaaataaggcacatatataaggcccaaattttagatcattgagtctagatataaacatgtagcattagttacttataaattttttaataaattaaaatagagtctgtattgatgaaattagaaaaaaattatagttttataaatatttaatacttataccgctaaaattaaatattgaatttttgttgctcacaaactaaatacatatattctcatctaaaatcaaatccaaaaaattaagtatacacgttaagtccaaaatattttacaatgagaaataagatcaaaaagtcaacaataaaaaattaaagagagtggatagaatgatgcttcacaattgaagctcgaccaccatgcctctatagagagagagagagatctttacctttgcaataatcgaagcttgccagagtggtggtgactaagcgataagactatacttgaaaatatgctacggacgtgtgtattagacttcgaaggttcctgaagcaagtaccttcctctgattgagttttcatataacaatagttattagagtactattggtatggcaccactacaagaaatatcactttcgccagcacatttttgtgctggcaaaagtttggtattgtgctagcaaaatgaaatctagttttgatgtgttggtaaatcaatgttggtattagaactttcgccagcgcaaaatgaaaagtgatggcaaaaatgactttttccagcacgcaaatgcgctagtaaaagttaaatttttgccactgcaaatgtgcgctggtaaaaatttgacctttttgccagtgcagtttgcgagatgtgttggtaaaagttacttttaccagcgcagtaacgaactgcgctggcaaaactgacatttcttgtagtgcaccgtgtgaaatacaatatggaaggaagtgtcgttcacccattcattgggatgaagcaggtgaacggagataccttggactcgacgcagtccaaagaacaagtgaggctattgagaaaatttgagctcgtatgcttgcctcacaaagtagacagaaaagctacgctgatctaaagtgtagagatattgagttccaggttagggactttgttttccttcgatgagtgttgccaatgaaggggattcggaggtttgggaaaaaacaaaaactaagtcctagacttattagtccttttgaagtttccagataatggaacgggtaggtcaagtagcctattggctagctttacccctactttatctagagttcacaacgtgttctatattttaatgcttaggaaatatgtgcctaatacgacccatattctaagttatgaggacattaagcttcagccgaacttatcatactagagacaaccagttcagatcttggatagaaaggaaaaagtattgtagaataagatcattccgctagttaaagtgctgtg

SEQ ID NO: 247531 - DNA, 1366 bp, Cannabis indica
aaagaatgtgtaaaaatatattgagattatttcacaaatacataaaaaacaacaaaaaaaaaattacaaaaatatggttacacggatttttaaatatttttacgatttttttgattttatttacagaaaatacggtatttttatgttgtactcttattaatttgttgttgattttttgttatctgtatgttactttttgttgttattttaatgttatttagatattattttcatgttacttttatatagttttcttattgttttcgtgttgtttctataaaaaatcttaaaaatgtaaaaaaaaaaaatatatatatctttaaacgtaaaaatatatttttcttaatgaaaaatagtaccttatgtaattattccaaatatatttccatggtatgagtcattttaagttcattttacatataactattgttcatcttcaatatatattttatttataattataaatgtaacaaattgcatattcatagagaaatgctactttcccctatttatccaatagtaagatatgaaaatgtaaaaaaaaaaaatagtaaatatgttagaccatttttaagatctaaatataatattaaatttgggaaaaaaaaaacaaattctatatttagtataattttttttattatacttaaatgcacaataatatgttaagatgtaaactaatacaaaaagtaatatattattaacaagcaaatatttaaaatgaataattaatgacattatcgtaatatgtgtattaaaattaaaacctatggttaatcacaaactataatcattattgtgtggagagagtttgtaaaaaaagatcaaattgtgaggaaaaaaattgaaaaaaaaaacaaatttttaataaacatttataagtattttttttttgcatataaacctttttataactaaaaaagggattgcgtagtggagatcccgtccctactccttcggttttaaggtaatttcaaaaatcacgtgctaattatggagaccttagttatttttccttattttttttatttggatttacttaggtcatcgatacattttctaattaagtcatccagactcattctatctctttaatcactctttttaacacgtactaaattcaaacaagaaagtatgttattggaaaactaagaacatgtttggtattgttttctgttttttgttttcaaaaaaattgtttttagaaatgagaacaaaaaatagtttttgaaatttctaaaaataagtcatgtttggttagtgttttttaaaaacatattgaccaaaatgggttttaaaaacagaaaacacattttgttgttttcaaaattctgttttttgtaactttgttttctgaaaactgttt

SEQ ID NO: 247532 - DNA, 684 bp, Cannabis indica
taattgcagagaagaaaaagtactaaaaaggaaggagaaaaggggaccgaagtgtagaaagagaaggacaaaagaggccctttcactcttatttttaggatttgtcttctctatttctccctattctttctattcctctaaatttctataaaaactgaattgtagccatggattgtaatactttgttttggattatgaaaactaaagtaagtatgagctgattttattaaggcttgaatggctataaacccctatgtttagtatgattaatattaagcatgattttagcaatttttcctttgttcattcaagtgagtttactatcatttatttatacttattggttgtaagtattgctaagctagatctggttctgaaaaggctagatctagtacttacaaatttgatgatacaagtgaattcctaggttaggtttcttttagtaaatggaataggaatatttcattaccttgcataactttagaatttatgtttaaatattgttctgcaatctggtttgatatacgaatatattgaactaagtggtagaatttaatttgtgagttttggaaaagtctcataaacatagaagaaattttgttaacccggtacaactttgctgaaataatgctgaagcaatgctgaaaaaactgggcagattcaacatagggggatttagctatt

SEQ ID NO: 247533 - DNA, 804 bp, Cannabis indica
tattaaaattgatacacgttctaagtttgtttccacttttatagctcttatattgtttatttatctttttgttgaatatatagtgttttttttataaacaagaatgtataactgttctgtaagtaaaagaaataattttctctgctatagaagcttcaacattccaacctcctttcactgcaactaagaaaaataatattcactgcaacaggagcttcaaccttctaataccatatttacggtaatctctagaaaataatatatatttagcatatgttaaacataattattttttttataattaaagtttaatttcatgcttataagtgatttttgggattaaaggattttaatatttactctaattatatttcagcaaaaaaatattctgctatcattctacaaaatttgggacaaaaaggcttgggtcatcaacattcttcaaaattaaattttggcttatgtgagttttacttgtcctgttatcttttgctattgcttttttttattctttttactgttattaatgatatgagtataatagaaatgtgtcatataaataggatttgttctgaataatatttgggcataactatggtttgaccatttcacatcttttgattgtctctcaattttattgattaacaacatcaatttacctaaaaccagcattttggctctgcactgccataactacaagctgaaaacaaaaacaactacccaaacccaacaataccatgaaatctcaagacttgctacaaatgaaatcttttttgacttggaatattggaagactttacttgt

SEQ ID NO: 247534 - DNA, 1640 bp, Cannabis indica
gttcgggcaaatgctcttgccagtgtgacaaagtactacatcttgcaatttcttgattttcatgccttcatatattttatactttcttctgactatattgtttttattctgtgtagaattgctcagaaaatgattgaggctttgagaaagagagtggagggaagctcgaacttgttccctccggcgaagaaatccaaaggccgtgagactccgtccaaagagaaggcaccagctagagaggtcattgatctttttgaggaacgacctgccgtggacattcctatcacgaaaattactatatctaaaggttcttgaggagggagttcggagaatctaagcaagcaaagggaggatccgagctgattagaagcgggtctaaacaagttaaggctcctaccccacctctaatattgccccaggagacgaaaagaggaagagatatgatcacccactatgtgagttggtcggtccctaaggtgaacgaacagttggctagggcagacaacgacttgtccttggagctggtcatgggaggagttttgaaagagctttgacgagtaagtcttatctaacatttccctttcacttctctttcactagtttggattgtaatgtcttctttttgcacaaactggttagaagatggcttatgcctattcccgagctaagtcggttgctactaagagccttgccatttccaacacaatgcgaacgaaagtggacttggccaagaaggatgccaaggatgcccgagttcaacatggagctgtgcgaacagagctgggagaagtcaacaagaaactcctagcagctgagatcaaagttgtcgagatgaccaaggagctgtaggatatgccatcaaccgaacagcttgaggctaatattgcttctttatctcgcgaccagtctccaagacaaaagagaggatcttcggacccttcttcgcaggctggaggttgaaaagaaggccatggaggaggaactcaaagctgaggttaataaccagaagtccgaggtggtaaggcttggggagaaggtgaatgcgttagagacagctggtctcgagatattttatgacttttggaaggccaatcccaaagcaaactttgactatctgggcgcttccaaagacatgtttctcgactactgcgctgctcaggcagcctatggggagcccgaggcatgcacttccacttctcctaccgatcagaatgttgaggctccttccacttagaatgatgatcccctagctccttcaaatccagctgacccgtacaaggagcctaggactcctactgtttaagggccttcttttatatctattcggccaataggccttcttttaagacaaggtcaccggccaagcggtctttaaacttggaatatatttttcattttttgaacaactggttggcaaggcagcctttaatcccggacctgaatgctttgtaattaaatgaatttcgttccttgtttataatcatcgcacaattgtgtttgttttgtttttttacctaatgctttgtacacgtataggtgccccccaagtgactgagcagacttatgactcttggtcactttttttttacaagtatgctttttttgtctgttcggggttttgggtacgaccaaaccttttg

SEQ ID NO: 247535 - DNA, 538 bp, Cannabis indica
cggtgccacaagtttggcctcctttagatagagctataatgacctgccagggcctgcagcccttgacctaccaggtcctgcagcccttgacctaccaggtcccgcaacccttgacctaccaggtcctgcacaccttgggcggccagacctcccttgtaggtctatagtcggccaggattacctgacaggaatctatagtggctagagtaattaaagcatcccggtggatccaagtggcaggcccctgcctccaagggtagacccgccattggcacctctgactgaaggataaatccttggggggttacccccaagaacaacaactgggtttcaccgctggtactatacatgagagacgagaccatgaattggcgagcctcacctaggcttgggagaagaccttgagttggccaaactcagggaagttgtaggctatgcaggcctattaaagaaccacgcactgctaactgcgatatatgttgggttttatgccctaaataaaacttcatctcaatgtaatccattttattcaccatca

SEQ ID NO: 247536 - DNA, 790 bp, Cannabis indica
gttctaaacacaagaagccccatctattcgatgttacctgttgggcaatctacgctaagaatacttttaattcccattttcattcctatagtggtattcctactgaaaaaattgacatttttaagtttgttgactttccggcctaaccacgaacaagacttttccagacaaccccaaaaatttcggacttccttaacattagctcttcccgaaaggataatgtcatccgcaaagaagaggtgagataatattggcccatcactacctagcttaattctttgattctaccacttcccaaagcctctttcaacaatctggaaaggatttcagtcgccccaatgaaaatgtacaaagacaaaggatctcgtggcggattccgcactttagaatgatcttcccaattagtcctctattaagacaaatattaggcgaaaatgtagtaatacattggaataccagtgatgaaatcgctctaggactccaaaatttttgagcacctgctctataaacaaccaactcaacttgtcataaactttgaaaagatcaattttgaccgcaaaaaacccttccttacccttcttaagcttaaaggaatggataatttcttgcaacaagacattattgtcctgagataaaagcggattgagtgggacagatggatctaggaagtagaggcttcattcgattagcaataatcttagagagcactttataaatgacattgcacaagggtataggcctgaactggacaccttctggggatttaggaccttcagaataagcatcacat

SEQ ID NO: 247537 - DNA, 1043 bp, Cannabis indica
aggatttctttcttgagctcatcatcactaggaacacaaactcgagctttatacagtaacattctattattcgagattgaaaagtctttaggccgaccaaccattacctcatctcgaattttgactagctcggaatcttctaattgcgcctttctaattatctctaacaaatcagactagagtgtcaagttatgcaactttccaactatgaattcaattcccgcattaaccatttatgaagccagttgaggagatatcataacagtagtgaaaacctgcccaggacctcttctacttagtgcatcaaccacaacattggctttctcggggtgatacaaaatctcataatcgtaatccttaaccagttccagccaccttctctgcctcatgtttaaatctttctgggtgaaaaagtacttgagacttttatgattagtgtaaatctcgcatttttcaccataaagataatgtcgccattatctatagagaaaataccacagtagcaagctctaaatcatgtgtgcgatagcactgctcataatctttcagttgacgagaggcataagctataactttgtcagcttgcatcaaaacacatcccagaccctgtttggatgcatcacagtaaacaacaaacttttcacgatctaatggcaaacctaacaccaaaattgttatcaaacgttgcttcaactcttgaaaacttgcttcacatttgtctgaccacacgaatcgtcttggcccattcttcactgatttaatcttactcgggtcaaccataattccatccttcccgacaatatgtgccagaaaagatacccctgacaaccagaattcacactttttgaacttcgcatataacttatgatccttgagtcgctgtaataacattcgaagatgatggtcatgctcctcttctgactaagagtatacgaggatgtcatcgatagacactatgacgcagttatcgaggaaatccttgaatactctattcatgagatccataaaggtcgcaggagcattagtcaatccgaatgacatta

SEQ ID NO: 247538 - DNA, 9241 bp, Cannabis indica
tttaacgaccaaaaaagttcagggagcacgatttaccacatgtcaaaattcaggagaaaaaattactaattttgttaggcgtaatattattattggtataatttaatatgaattctatttattttattttaataaatattagaaaaatttactaatcaatgtactaagcactatagtgcttcattgcaatcatctttgagcattgctattaggcattagtggtgcctagtaccttctcgacatgtcgcgttgcgattggttaacaatactctctaaaagttattatattaaattatataagacctaatacttaattgaaccaatagcgatattaacacataagaggatactaagcaccactggtaccctttagcatttctcatcatctttttataatgcttggattttttggataaattttcttggtaatgcaaataataaagatcatcaaaatcctcatgacagcatggtcaatactcaatacgttgactacactttacttcatccaagaaggaaactgccactaacctgtactaataagatattctatttctactgttatattatatttatcatcgaatgtaacgtactttactatgaaatttaataatgaaaaatattaagttgtacacatcgtaacaagaatctattctatgcaatcatcgtacacatgtgggaatggattgggataaataaattaaataagaaagaaaagaaaaatatatatttatctctttacaactcactcaggctcaggctcaggctcaccggagagaaaagtggtaactaaattatgaaagaagaaaaaaacaccaaccagaccagaccagaccagaccagaccacatatactatactacatattatactactactattactgctactacactctaaaaaagaagaaagaaaaaaaatgtatgtaatgtaagcaccaaaagccattactacaaatcagaaatcataaaccaatcaaccaaccaaccaaccaaccaaccaaccaaccatcaatcttgattcatcatatcactcacttgaatcgatgctcccactgcgagagctactggcattgcgactgtgcaatgatagccctcttatatgacccggcaaaccatccaatttgttttcctgaaagaatttctccctctccatgtgttttgatggtggcggtggaatagcaacacccccaccaccatgtccgttcaataattcttgtgatggctctgaagacagtggtggcggtggtggtggtgcccgtataagtggactcccaccaccgtgtccatttgattcacgtgatggttccaaagatagtggtcttataagtggacgattcagcatttctccaggaattgatgatccgagcaaccccatgtgtggtcgttctactggcagctcttcatcttctggccttgcacaagcttttcctttccgtaacctgttacagtttgcagtcattaaacagagatttgttttacatagtaaaaaaggaaaagaaacaaataaacatttggaagaatggacaaaccttctgaaaagttgttcagcctcctcttcctcctctgcttcttctgatctcaaacgattcccagttgtttccggtctcacatgatttacagttgaactaggcttagctgaaaggagagcatcatgtcttgcaagaaccttctggagctgctcatttaactcaatagctcgagataccaccttctcatccctgatattaaaattaagttttaacaggagtcaattcaagactactcaactaagcatatgttgagtattttgtggcaaaagtgctaataattaaccgagacattcacttggaccctaatgccatctcaatgtccttgtcaaatctatgaattcaatgccccctcttcatttgaattgcttaaatgtgaagaggaaggaaggtagatgaggctcataggtacaattccaagaccaaacacaaactaaaggaactaaaataaacaattttgactcttacatatcgaagactccattaactgtatgtaatacaaaaaaaaagtagttcaagtagttgtgcatgtaatttgctctcatgaggtctaaagttcaaatccctcctaggcacctacataaggaatctatagtttattggtccccaactacaaatgggaagctcaatcaacaacaaataatcagagataatatatagtgtgcattagaattattggctctttcaaacacagaaattagccttaccgagaagccatcactagatgcattaccctttgcttttgaaatgcacactgttctacaagatcaagtgtaaattcatcctttgctccctggaagaaaattccatcagtcattactatacaaacccataatgcaagtacatatcatcaataaaaccaaccaagctatatgacatgcaattaagagtaagaaatttcagggaaagttgagacttgagagtaggcatttcagtaataacaatctagccgagtaagataaatcactctagtagagctccgatatgtaagattcacatacagtatgtgacttccaatgcaagggtaaaagaattggttattgtagaagcagtcaacttaaattgctaattacttagttctcactggaaaagccctaattagaaactaatctttcacttctccaattcaatatattgaaagagacaaatgtatgattttgaactaagaatagtagaccagtaagatacctcaggatgttgactatctacagcatcaagaacttctttcaacacctccagtgcattactggccttttgaatgatactgcataagaaagctagaacagataagcggcattgcatattatgcctttcacatacaatataacatcacacaaaacctgaaaaatagatagctgaaaccagagtttaaccccactcctcttcctcccagcctctcaaacagatttgcttctctagatgatgctatgctagtatgctacaatgtaatagagagaatatataccttgattcaggaacctcttgaggctcagcttgcagagcacgcgtttcatgtctagatgctgttacttccccattaggcaagttgttgttatgatttggttgtgatgtggggtgatttgatgtaactgcgggaggcctttgagaaaactgcactcccgcactctgaatacaataatgaaaaaaacaattaacagaagttgaaaaacatgaccagtaaactctaaaccagagagtacatgatcagatcacccaaagactatatttagtaataggggatggaaatagacaagctccaagttcacacaagcactactcctcaatctcaaaggagtcataagaactagctaatactgtcatagacccattacaactcttatcactctgtaaccaatgactaacagaaatttcaggtaagaagaaacaacagttatgttaacaccatatggaagttggatgtttctacatacataccactaactcataataagcattgtagtactgaggatattttccagaagcacccccaagagatgtttgcgttgcatctagaaggagaaatatacgctctcgtactggcaaatctgactgcaaagtgataaaaaatagaaattttataaatttagaaagaaacaaaaaaagatcaaatttaagatattacattaagtaaaagcacataccttcttcttgactatctttacaagaatagggagaatccctgtatcaataacctgcttatgaatattttctccaatattattcattaacatctccagcaactgcattccaaattaaacccaaaaaaagaaagaaaacgaattgatttaaaagctgagaggtgagaaaatgcataatccaattccaaatgatcccatccaaatttgtgttaccaaaacagcatagagctgagtatttgtgtgtttactgcctaatcgtttcttgatagctttgactgcgtctttagcttgtctgcataaccaaaaggaaaagaaatgtggttagattgaaaaaaaggttaataattgatgagagaaagagaagtatgatttagttacttttgatcgtgagccaccaattcgcagatttggatgttctttgtccaatcaatttcaggtagtttctcacttgtggcagaatggacaagttcagccgccatgtttggaaggaaaggaaaggaactacagaatcaatcagctacccctgtgagaaagattgagactttgagattgagagaaatggatatggattgaatgattgattgattgataagaaagagtaaagcatcagatctcaacatgaaaccattatttcctaatcaatcaatcaaagtaccttacaatacagaagaatggatgatgagaatgtgaggagaagaaccctagcagctgatgatgatgatgaagatatgcattaaaactgagctgatttgatttgatccaaacaattgaagaaataattatatgaagaagaagaagaagaatacaaagctgatctttttgttcttcttatgatgatgatgatgatgatgatgatggtgatgatatacagctatagttacagctataactacaataataaaaataaaaataattaagaaaaaaaaaagaaagaagaagaagatgatgaagaaaggaaaagaaaaaaaaaagaaagaagaagaagatgatgaagaaaggaaaagaatctctcatctcatctctaattcactttttatatttatatttattttatttatatataaaaaaaaagacagagaggaaatgaaatgaattttataaataagttaaaatgctaaaagataatattggtgtcaagtattttttttgtgttatgacactattagtgtactattagtgtactattagtgtaattaagtatcgtatcataaaattttaaaaaaaattgttttgaaaaatatcgctaaccaataacacactcactattagggatgttcgtgatgtaagtggtgcaggttgtagtctttttttttcaaactaactgcatttacagtttttataatttctcacactagagattcactacgagatcttaaaactacaaaaattttacagtatcatcattattaaacattataataaaaaattaaaaagcaaagtttaaaataaaaaatcttattaaagtttaaacatcataatattattaagtcattatattaaattgtttttaaaaattaaaatcatatacacatacatatttgttcttatatgaaaaaaaaaaataaaaattatattgtaaaaattagtaattttataatatatactgcggtataatttgaaccataatcattaaattcaaacatgcaaatcgtactctgcagtttaacaaaaatgtaaactgcaattacattgtaaaagatttcatataatatataatactatcagtttgtgcagtgtagacggtttgataaagactcgtactaatatagatataattaattattagaagattaagcgacttttgtcttggggccatgcaaaatacaaaccttttttatattatttatttttttatttattagcttaaagaaaaagtaaaagaaataaaaagaaaaaaaaaaaaagaagtaatttccatcaaattattatgggaattggggaaaaagtagtccccaccgccttccctaacttaaattactttactttatactcatttttatttgattctttttaattaataattcattttttaacaatgaattaatattattaataagtgaagtgtgtaattatataaataggattggtcataggtcataggtatgccaacctatactataaacccttactctatctctaatgtctcttccaattacaaaatacaaaccaaactaaattaacatttctcttataaaaagcatacaatttcttcttcacaataataattaaaaaaaaattatttattaatttggacaatgtcataaccacttacttgcttgcttctaatcaaaacaataatcatatatccacacattttatacattgatttatatttaagataatatatctcactaagttgtgatatgtcaaataaatatgtataatattttggtgtgcacaaactaaccattaagaatttgtttggtattttgtgtaagctgtttagtactccatttaacatataagctttatgtattatattaaataagggaaatttatatatttatatagagtattattaataggtatgagtagcgcctagtactttctagacgtgtcgttttacgattagttagcgatacttcataaaaattattatacattaaactatatagaacctgatacttaattttaccaataacgatataagcacgtagaagggtaccaggtaccaataatatccttttgacatttctcatttatatagtaacatgaactgtatcgtattaattacgacacttattttaaaataacttatagtgcattgtagaataaataagaaaagtgatatatatgctcgtattataatattttatgaacttcagttgtatcgtagtaaagtcgaagttggggtcgaggtttgtagctaggtcaggctcgaggtcagggtagatgtcgagattcaaggctagggtcaggatccgaggctagggtcgaggtcaaggttcgaggtcgaggctaaggtcgagttcagggctagggctaggattgagggtcgggcttggggtctgcaactgcggtcagcgcctgggttgtggttaggttggggttggagtttaaggtcagggtcggagtagagatcgaggtcggagctaagcctagggtcaaggttccagaaagatttaataggatcgcaattaattcacatattttcattcatttaaaataaattctaaaacatatttatatgaaattgacaataaaatgagtatgtaaattatcgttaaggaaacgtattcaaataattcattccaccaatctttttattctttatttttttgttatcgcaaaataataacaatagattgataattaaaaaaagttacaagtgaattgagattttaattatggtatacaacctctataggaggtttgagagtgggtcgcgattggggtcggggttcagggcttaggtcgaactccaagatcgggtgttggatttattttataagggtcttatttactaatacttactttagtaattaacctaattagtgaactactttaaacatgctttctataacaaattaaaacaccttaagtttgagtatacttacaacagtgatacagtaaaattaatgactcctttcgttaagtattataacccttgaatcatttatgtagcagagtatcatcaagtactgaacccaaatattttttattgttaaataggtgactgaaacactacatgatctttctcagtgtcctgtgtatcacatatgactaatgtggacaatttctcaactaactaagaatatagtttatggctgaaatcttcgagaaagaaaaatagataaatatttgaaattaatatagagaaagaaaagagatgtagttctcatgttttctaacaactatagaataagtcaagtcattggcctaattctagttgcatctatttctttatatatgtattcaagtggcatatgttaaatgaaaataataatattttaattgtgttatgctcatatttcgagcgctaaatatagacatgacacatgtccatataggtctaaaagaataaagagaataataaatacgatgaatgaataaatgactcgcctcaggataaaactacggttaaaagatgtattaacctcgtgtagcacaatctatacaaatgagttatgagaataacaggaacataagctaatcctcggggcttaaccaaaataaacgagatacgtgaattacttgaaacaatgagttaagtcgaaagggtagataatgagttcgttaagagcttacaactcactaacccacacactcatgagtatgttgaaaggctaaaggaaacaaacaaggcgtgacttgtctcagaattcctaaagactagcccaagaattactatgaaaggcaatagtgaggacaaacatcttaaccaagcttcttacggaatacaactagctattcttgaacactattgaaaaatgcgagccatagttagaatatgtaatctcagcaacgaaagtctatcctgataagaacaaaaagcagttatcaacaattatttcattttatcatgttgtaaatttgaaacgtgaagattgtctacgtttcattaatggttatttatataagatcaaaagagaataattatcattcttaaaactcctataaatggaaacataacctacgggaaaagggattgatcatgctggggaagaaaaagctttgagagattaagtgaatatccaaagaatatctcttataattaagaaactttagaaagaaataatactgactcgtagattatgtagattttaactacaaaaccacgtaaaaattcttagtatttcatttatatttactaataataaataatcaattttatttacaagacttcatttattgttaacgaaaatttaagttaacaaattagtttaattatttaaatctttaataatatttcctattagaaaataaccaattaaaataatattttaaattaattaattaggtgaaataaaaagataactagccactataaaatatgtgggctgaaatttatagtgttgaccccacaaaatatttttgtctttttgccactatttttcagtgatatacatacatggttgttcaaacttcaaagttagccatatgtccaataaacccccattgaagagagattaataagggtgactatgaaagtctaaaatcatgtaagcttccgaaaggagcaaggtgtaatattagaagggctcccaaagatcagttatgactgaagcctgtaggagggtgagaagtgagaacctccaagacacatgatatagttgctcactattttcctacacttatctagcatcgacttctctttaaaccttaaccatgtatctaacccaagacctacactcagagttcaacctcgactcgaaaaattaataagaataaaaatgatgtgagagactatagaaaaaaaatatattaacaataaaaaaaaaggtaaataccattttggactctctgttttacaaaagttatcaattggaccctgtattttgttaaatgacaaaatgaaccctgtattttttaaaatagtacaaatatgaccctgaattgattttttgtcaaaataaagt

SEQ ID NO: 247539 - DNA, 1415 bp, Cannabis indica
atgaaagtagaactgtgagtcaacaaactcagtaagaaaagcatataacaaataatataataccgacttgtatctaggcgcccatacacctgtttacaaggcttaataaataagcaagaacgttctttactagggtaaaactactgtaccacatacactacgtaccgacattatacgagtgttggtatggttggtttcgtaccctgagtatcactaagtgatataccacacacaccttgtactttcgcatacttgtgctggtaacactgtaatatactcttaaacattttacactataccaatgcactatgtaccacttctgtacaagtgttggtagtgtactaagcataataagcatgcatatatatttcacacatacatacattcgcatatagacatcacatgttctacgctattcttacctcatttctgaattcaagtgagttggccgacctgaacggaaaacctcgtgcaagatggatgccctaatcatataacataatccgggtaaataatacgcccaaagccctaattcaggaaatccaaacctccaactaaaggttctaccatagacaactaaaactataataccctaagaaacagggaatcacccaaccaaggctctgaaatggacacgaattgacgaaaagaattgttcgggaaaccagtcctagatccggttaaccagtttgccaagtccaaacaattcaaaacctatccaaaagatgtccaaatctcaccaaactttccagaagacctatattgacctcccacagcataattcaagcaatagaatccaaaatacacacaaaatcaaaacatgccatggatgaaccaaacttgagttttcaaactcaaacttgtgcatccatgtcaccaaacctccaaaccagtaacaaacataaaaaccaactcaaaataaacttagaaaataaattataaacaaatctcaccctaacatccccaaattcacaactttgcatattcaaccaaaatcaaagcttcaataacacaagattaagagttctagggttacctttgcttaacacctacttgaattcagctagctctccttcaattacaccagaaaagtcccaagtcaaggctggtcttatggtggtcgagcaaggaagaaagagaaagagaagtgagttttctctaatttttgtttttctttaatttcctattttctacacaatgaataaattacttattttggaataaattactaattaccgcttattttggaaattaaaacatgtgcctattcgactatcaggctactaacatgtttcctatcaggtttttcttaaaacatactattaaaataaactattaaagcaattaaggcttactgaactgtgagtcgagcaaatcgctgatgatgattatacatgtcgtgacgatcttcggaa

SEQ ID NO: 247540 - DNA, 998 bp, Cannabis indica
tccaagatattcttagagatttaaagctagttgaaggtactttcaccttaaagtacctgggtgtccctcttagaccaacaaaatggaaggccgaggattgtgggatcataatcaaaaagattaaataaagactccatacttggtcgagtagacatatgtcttttgctagaaaagctcaactgattcattctgttttacttgggcttcagaattattggatgagtatttttgttcttcctcatagtatcaccaaggaggtagaaaagttgtgtcgaggctttctgtgggctcttaatgggaacaggaacaagatccacttcgcttcatgggataaagtttgcctttcgaagacttatgggggcttgggttcaaagacggtatcaggtggaatcaggcaatccttgggaaatatgtttgggctatcactaccaaaaaagatctgctttgggtcaagtgggtcaataacatttatctgaagtcttcgtgcttttggtcttataatctaaagcaagattcaagctggtattggcgtaaactttgtcacttaagacaaaagtttaatcaaaatgagattgagaaagctggggcctttggtggttttagaacaaattggttgtacaacaaaagtttgaatcaaactccagtcaactatcacaaggcagtttggagctctctaactgtgcctaaacatagattcttcctgtggcaagtgatgaactctcaccttcttaccagagataaattatctcgatttcaaatagtgcttaattcgaacctttgtccggtttgtgaggagaaggaggaatcccatgaacatctcttcttcagatgtctgttgtcccaaaaagtactggatacaactttctcgtggttgggattcagggattggccgatagattacagtggatggtatgattgggtaattgtgacaggtcgagctagagtacatcggatcaacattactgttttggcagttgtaatctataatatttggctca

SEQ ID NO: 247541 - DNA, 1223 bp, Cannabis indica
aagcagtatatagtattaatttatgtaaaaaaattaactcattgattaaatattaattattaattaataattaatatttttgttacttatgttttacgaaaccaaatcctctctccctagtttttcttgtctctctgtcccaagctaattaaaatgcaccactgcaattaaattgtcataccatcatttaacacatttaacagaattaaaggactatttattctagttttcttgtcataactttttttttttctttgaaacgttctttctatagtttttttatttattttttatttttagaataatagtaaacacggcccagatcacaattcttccaaggaagttgctaaaagatgtagaaagcatttgcaaagtctttctttggaaaaggttgacagtcactactcgtcctggtttagtagcttggcatcaggtctgttcaccaaaaagagctagatgtttaggattctgaaagatccttgagtggaacactgcagcaatgaggaaatacgtatgggcaattgccactgaaaaagataacttattttttaaatggatcaatgaagtttacttgatggagaagagttggtgggagtaccagctaccaactgactgtagctggtactggaagaggatggtggctatcaaaaatgctctcaagaccaagatcgatcaagcttcatttgtagccttgaggtatgacataaaactggtcttgatttattctttactcaaactaccgagatgagttggagtagaatagtttggaatagattgaatgtcccaaagcacaggattattctttggttgatactgctgcggaaactcagaactaaagatcaagtccaaaagtttaatccactagtggataaaacatgcttgttatgtggaaatggaaatgaaaattacaagagttttataatgcaatctcaccatttctttaacaaagttatatattttacaatatatgatgatcagacccattcatcataatctccatccatggcatgtatatgtgattcaagaaaaggggcctagttggtgcatataactacaataaaagatttccttaatcaatttattatatatctttgaataatatattgcaatggatgatgtaacttcatcatatctaagcgcattttcttttagattttcatttcagagcagattgattttaagaattagttaattgaagcttcggttaccaaatggcggccaac

SEQ ID NO: 247542 - DNA, 653 bp, Cannabis indica
ggcataaaacccaacaaggagaaactgtctaaaaaaacctttgccattccagtatcctcatgccccagccattaccattgttgatgtagacctctctgatttgtcccaaggaggacaagtagtgaaccccattctcactcactctattggtttgacacctcttcttaactcccatctagcctctatttcatgcctaagtgcccccaaaaattcttgaagtggtatgatacctaccctagttaacccaattcagggtcaagttggtgggttttttaatcctctgagtattaattcccagtctactggtgtctccactgatccatctatgattagtggtgacttgatgaatcatgaagatgtcaattcccaccccatactgcaaactcggaactttaactctgtttctgctgactctgttattgtgagtgatactccatctttccccaacccagagttagttaatgttgcttgttctcctgttgatgctttgccatccttggttttgggtcatacgaatgctgccaacccaacttttcaagtcaaagcacctcggccaaaccctcatgtcaaaggaaaagttctcgcatgtgcttcgggtgtcaaaagaccttatttttaaccttctcaagttaatgtggggggctctatgaggt

SEQ ID NO: 247543 - DNA, 1142 bp, Cannabis indica
agatcctggtaaaataaattccaacagtatactcccactaagcgacttctggaaagatattagaaggatattaaccaacaacatgaacgagtttctcgatagagcagacaactttatcaaacttgaagaagccatacgataggcctaggcagggcatgttaatagtaggcagtcatgaggcacccaacagcctcatgacccactagggacacaggcaggcaataacaatgttgcccagacctctagtggtaaaaacactagaaacaagcgcagcaccaacaactctgggaggaacagtggcagaaaggggacgtttagcacttatcccacaccacagaagaacaaggaggagaagcacacttgcttcaccctcctaacaaagaagcctgagaccatcttgatggccactcagggaacaatcccataccgaaagccctttccaattagaagggaaatgggcaagggggacatggaaaagttttggtgataccacaacgccttcaaccatgacactaatgagtgtcaaaatcagaagagggagattatgtacccgataaggcgtaacaatccccacttgcgtcattatgtgcgagaccaccagacccaggcgcaaagaggtcaaaatggagatccgatgccaccacctgtggcagaacatctacgggtcataataggcagaccccacatttctggtgaaaccagcaaaactagggagcgctatgctcggacactccgtcatgagcccaaaggcaaagtcctaactgtcaaagactggagctctaagcaacagaagcctatagagcccacgatctcctttggtgaagaagatgtagcactagttggtttctcgtataatgatcccccggtcattattgtgcaaatcgggaatatgactgtggctagatgtatggtggacaacggagcctcctccaacattcttttcaaatcaacatatgaaaagatgaggctccaactcactgacatggaaccttgcaaccaagtcatgtatcacttttttggccaaggcatcgcacatgtcgggtatatcagtttacccctcatagttgaacgaaaatccaaccacaagaacattgatggtgcagttcatcgtgattgacattccctcagcttttaatgacatg

SEQ ID NO: 247544 - DNA, 628 bp, Cannabis indica
ttatatagacatgagtacattgtgtaaaaatgttgaaagaaatgctattcttatataagacaataagtgtgaaataaatacacaatactacaaatagttattacatttaccgtatgttaaggttagaatttcataggtcatcttaatttttttttttttgaaccataggtcatctaattaacaaaaggaaagttatcagttttttatttattactgaattattttttaataatgagtggtcttttcaaaccaccaatgtaatattatgatgcttcttcttcttttatcttttcattaattattcatacataaatgttattaattaaatagagagtagggatgaaaaaatgaaaagttttattaaataaaaatactaattaaaaatcaaataaaatcttaaaatttgagaaaacaaataacaataagcaaaactcatatagaagatgctacatcatctccttagtattctcatctcatttatataagtatatagatagataaatatagatatatagatatattgatttgtaaaataatttatattaatgcatatactggtataggtaattttttttaaaaaaaaaaagaaaaaataaaacatgaaacactaaaaaaaagagtaaaaata

SEQ ID NO: 247545 - DNA, 774 bp, Cannabis indica
ggatcaagatcctaaaatcggtggctgcaagaagttaggtgttaagttagttagacaataactaacttaaccaactttacttttagcgagatctccgcgttagcataagaataagtgcttccaggaacgggtatgagagcttccagaaacacggatcaaagttacttgctgaaggagctttcgaataggaaggagccaactggagtcgactattcataactctttttctcaaagggaacagctagccattcgaaactccttttcggaggaaggctagcttcctataatacccttcctagaagtaaaagagagccttccaagaacctacctacatgactaacagaaaattgagttagcgatcaagcgatgatttggcattatatatcatgtcaactccactagatttaattataaattaaataattaaaaataattactaaaatcaaataattaaagtaataaaatcaatagaaaattatttagttgaaactatacatcacattagtaccaacaaatgacacataagcatttcgttagttgacgattgattaaaactcatagatcaaaaggcataatttagtaacattaataattgggagaattttcaacagacggtaaaatcagtaaaacgaatgataatatatagtttaagaagaataaatccaatttattcattatattcttaattgttacattgatattactttaatcaatacattaaattaatataatattaaaaatttgacatgatacgcttaccttttaatattaata

SEQ ID NO: 247546 - DNA, 635 bp, Cannabis indica
tcatgaaacaaagagacaatagctggggtgtggtcaaataattcttctgttgcaaaaataacttcagcagtagaaaaattatttaaccactgttgattggccagaacttggtcaatttttgagcatatcttctcactcccttgtcttttgttattccaagtatagaagctaccactatacttgatatcttctaattgacaatgccccacacagtctatgaaattagtagtagctttgaactttactctcttcctgattctttcctctttgaacaaaatatcattgaaatcacccataaccatccatggttccggactattcaagtgctttaaatctgaccaaagcaatttcctcccttctaacttgttaaatgcatacacaaaggtaactagaaagccatacttaccatctaaagtagccacttgcaaatgaataagctggctggtacactttagtatgttcaccgaatagctaaaaggattccatgccacaataattagacctccatcatgccacgcaatattcgatgtaaaacaccatcctttaaacatataaggccccaagcttcgaggcctcaactctcgtctcgaggagaccatcaagaccagccttgtgaacatgtaacatgctcttaa

SEQ ID NO: 247547 - DNA, 909 bp, Cannabis indica
tctatgatatcttggaaaagtaagaaacacgatactgtttcgaaggtcattaattagctgaagcagaatataaggtaatggccaatacttactgcttctgaaattgtttggctcttacctgtcctcaaagagttgaaagttgatcccgttttccatgagagaaccaagcacattgaaattcattgtcacttggtgatattctgacacggccattgtttccagctcagttgaaggtgtttaaagagagaaaatgagcatatatgatacagcttgagggggagtatttgtattagttacttaacttagaattagcaagttaggtcctatgaattctagctagttacttgctcattaatcacatgtagctaagctagcctacttgtatataactcattttccattgtaattctcttctatcaatcaataacatactgctatgttcacatgtttttttttatatcgttgttctgtaatttgctatacagtgtctatcatagctgtatgtaaccacggttttcctcggccataattaagtgagggctatcagataataaaattgggaagaggtcacttgtggacatatgaccttcatctcttctcttcctatggtcaactctacaatgaaaaaaagagtataagtgatgtactacttactggtttaattgcagccaggacaggagatagttttttatgttataaatagaaaaatgctaagttatcagctcattggttgtttaaaagtgggagttagaaagtgattttggttgttatacaaaactcagtagattgtatagatcaatttttaaacttttcaagtcattttagattggaactaatattaaacatgagagtcattaatggtgcaatggaataacttgctcccaagtttctcaatacattgttctactc

SEQ ID NO: 247548 - DNA, 1897 bp, Cannabis indica
tgatgattcggctgggttatcaatgtcaatgggtggaaaaaattatgaaatgtgttacgtcgtttagttttgcatttctgatcaatggggaagtgaagggacgagtgaggtcggaacgcggattaagacaaggtgatccgttgtctccatttctatttcttttctatgcgaaggcattctcttgtttaattcaagctgaggaacgaagaggactattgcaaggtattaagtttggaagaacagatctttttgtctcgcatttgttctttgttgatgacagcttggttttctttgatgccacgatggaaggatgtcaaacattccgggagttgctaaataaatacaccaatgcgtcgggacggatggtgaattatggcaagtctgagatctgttttggtaagtatgttgatgaggcaaatcgtactcagctagctgaatttatgggggtacggagggtagtttcgcatgggaaatatttgggcctgccatcttttgtggggcgtaacaaaaaggagctgagtgacatgattaaaaacagggtgtgggcgaaaatgaagggatggaaagcgccaatgttctctatggctggtaaagaggttctcattaaagcgattgtccaagcgataccaacctacactatgagctgttttaggctaacgaaggggacaatttctaacttacatcgaatggcggcacgattttggtgggggtcctccgaaaaagacaagaaaattcattggtgcaagtgggagcatctatgtaagccaaaagataaaggtggaatgggctttcgagatttgggaatgttcaatcaaacactgttggctaagcagatttggtgttgtataaggtatcataatgctctttgtaaccgtgttcttaaggcctcgtattttcctactacttcggttttggaggaaaagtgtggtacccatgcatcttttgtatggcggagtttgatgtggggtaagaaactaattttgaaggggtaccgatggcgggttggagatgggagcaacataagagttctggaggatccatggttacctagaccagtcaccttcaagatatatgataagccgcctttaccggagcaccttcgggtagttgatttgaaattgggtgatggtacgtgggatgaacaatttattagtgcggtgtttaatcaagatgatgctgagatgattctttcacttccaaactcggggtgggatattgaagataaaatcctttggcactatagtgaaaatggtgagtactcggtcaagagtggttatcgcatggcatgtgaattaaagacagaaagacaacaatcggatgaccatcttgctgtccaatggtggcggaaattgtggcgcttaaaaatccctccaaaaatcaaagtgtttgtgtggaaattggctcatggttggcttcctacttctaccgtgttggctaaacgtcatgtctctactaccgatgggtgttcgaggtgttctctccatatttctgaaacaatcttccatgctctatgggaatgcaagaaaagtaaggtatgttggaaactttgtgactttcaacaagaagtcacgacatgggcaggaggatgaacttgcatttttaatgcggttgtcaactgtgatgagtaagaaccagtttgaaatgtttctggttattacttggaacttgtggaatacccgaaatgcttgtattcatggtggttttgtaccacaaccgtcggagatggtggaatggagttataagctgctggctgattttcagggaggaaaatgttgtccccaagaggccatgcgcagggagcagggggtttggaaggtgtcgaggcatggggaagtgaagattaatgtggatgctggtgttaagaagggggctaggtactcggggctggggtgtgtca

SEQ ID NO: 247549 - DNA, 500 bp, Cannabis indica
tttgtttaagttattggttacttttttttattaaaaaactataatagaaactataaggttacttttaattctaaaaaatttattcagtaaaaaaacttattgttcccacatatcaaaatgatcatctcaaaaaaatagattttaaaaatctatggtaccattagtaagctcaaacgaatagtggtgtagctagatttattttttaagggtttctttataagttattttaaaaatctataaatattgttttataaaagaactttgtgagaatacaattagtaactaaaatgttacctatttaatattgttcttcttctttaaggtgaacaaacatatcattttctcacgtattaaaatgatcaattttagagtagattgtaatgattcaattcttaagcataaataattgttggtgtggctaaaaaaatattttaaaaattgatcaatattgcttcataaagtataaacttatatagcatacaatttaataacttttaaat

SEQ ID NO: 247550 - DNA, 901 bp, Cannabis indica
ctattatagtgatcattatattaaaaaatattaaaatgaaataactcattaaatgctaaactggtagagtatatctataacgcgttgactgtaaagtcttgagcgagacatggatgtacaaactattaattcacatattgacgagaaacccttctacgtcagatgtacaaagcgatgcatcaacctcattacgtatgaagagaagtagacgagaaatgttggctattaaaatacttagcacataatatacattatacaaactaagcataacagttgaacgaacttgaacaacgaatagcgaggtaaccatctcattataggaaggcgtactcatggtactttcactaatcagctccaaacatatttcaatgatacccattgctccgtcaagaaagagctaacatttaaatgatgttgactgctgaagatcacctagtcaccaagaactacgattgtcagatggagcattatgtcttcaatcgccgaaacacgagatttgaattattaacctcgaaagacatgggaaaagctccagctcactacaagggttattgttgctctgttcccagtcgagatgtcctaacacgatacactttgcaccgtatttaaatcacgtgcgcattcacccggtaagagcgaataaatcacaactgtgtgatttttaaaatataaccgcatttattttacgtgggacagaatcaaatcccacaattttaggggactattatcaatagatatcaatttgattgtaatttcttaccctcctatatgactataaatcggagcaagatacactgaaaaaaggacgaaaaatcctttagagaaaaagccctagttttgtatcagaaatctaataagatagactcgtggactatgcagaattttaactggaaaaccacgt

SEQ ID NO: 247551 - DNA, 539 bp, Cannabis indica
attccattccattcctattcccattcccattcccattcctattcttatattttcattcctcccaaccaaacgcctccttgatgtccacttcgtgagagacaaagtgttacagaagaaactcgaaatccgctacatcccttcgcatgatcatgttgcagattgcttgacgaagagcctgtcacctagccgctttcaattccttgtaaacaagctcagcatgacagagtctccgctgaggggtggagttaaaagcactgaggaaatagcagagtaaatagcagagggcacttgtgacatcctgcttcttttcccaattcgttggaatgatgatgtaatagaatctttcttatttttgtgcctttaccgttagcattgggatatgcaatatttcttttttctgctttaacaaactctatacgtgtatgccttttattgactcttgtaatatcttcttctctgcctttaggctatataatatgcagcagcctcactcagtattttgagcagagattttcattttgcttccctgctattttctt

SEQ ID NO: 247552 - DNA, 1111 bp, Cannabis indica
acttgtctggtaagaaagaactataatcactttctatttttatccataaataccatgctaatgtatttttcatgtaagtttttcctcatcataattttatcatggtagactagattaaacccttaaagcctcaaactaaagagggtgtagttcaaaattcttcaaaataattaaaaatgtgaaaactattgtctgttttgttgaatcaaatctttgcagagatcatatcttgcagtagtaaaacttcttaatatttttttataatccaaaaccaaaaccaagaattattgactttttttagtcaagtgactccattaacctatgtaaatagaattatttattaaaaatattttcacatctgtccagaaaaacgtcataaaataatgtaaactttgatagtctcaatccaatgatgacatcgttgataacaaaactaagcttacaaacaacactagacctatttatttatcatgctagatcaaactctataatctttttattaaaaaagactctttaatctttacggcaacttcttaagttgaaattaaattgggtgttttaaggtgcattctttttaagggtacattaatacatctcctttatatatttttgatacataaatagttgtaatcttaggtatattgcaaagttttagaaaattcaaagtaatctataatttaaaaaatatagtttgaaataatttatttaacacatatataatataaaaaaaaatatatgaatacgacaaactatttaaatattttcaccatgctaatttttctttgaattttttgaaaatttatataatctttgataactatgttaccaactgtcataaaatataaattaaaattaaaactatttagatgttgaaaatgtaaaatgcatcggtagactcctttcaaaacaacatcaccatacgtagaggtgtgtataaatcatccaattcaatgataactgatcgatctaattacaaccgaccgtcaaatattggatatccaattgtgatcggatcggattggatgttattttttaatatccaattggatcggatcggatgttggatggggtgtcccaaaatccaatacatccaacatccaatcaaattaat

SEQ ID NO: 247553 - DNA, 489 bp, Cannabis indica
gattataatttatatttcataatgtattatttctctctctaagtgagtatttgactgctaacagcagtaatatatttgtgcctagctttaggataaacattttggtagaactttctctatatttgatctataaaaatgtaaattaataagatagttatagatttatgatgtatctctctctagccagtcatttacataatttgaagccttgtgtcaacaagtgaagcagttgggtgttataagataattttacaagcctcaaatgagtccctattaaagagaccacgaattttatgtttctgccaaacttttcttctttattatttttggtggatatttttggttgcatctaaagctcgtgaatttgtcacaaaaaatatcagtttggtagggattatacctcatcaacagcttttgggaatcgtgccttcaatgtgaatatcttttgacaagagatcatctagcctacttagtggggaaatccttgac

SEQ ID NO: 247554 - DNA, 715 bp, Cannabis indica
attaaaatctcaaattctattttaaaaattaaaaaataaaatacattacctaattaaaaaaattgaacatacatgtattgcagtttacatcatttaattaaacctaattaaaaaaaataaaaataaaaactaattgtacgtgcattgcacgtaacttcaacctagtttatatatagaataattctacagtagccacatctgttttgttcatatagtataaggacagttttttgaccactgacatatatgacttctgattgtgcatattattagatatatagttgtgcgtacctaattaaaaggatcgattttttttttttctaaaaacaaaagaaaaaaaagttagacagtccaatgctctctcacttcagaacgttgttttatttctctttctttctctctttaaaactcatcattctctctcttctgattgcacagccttttcctaatagctgtactttgagaaaaaaaggaccattgttataaaatcaaaatcagaataatatttttgtgaaaatatagatctattccatttttatcctttagattagatctattccaactattttcaaaagggaaatttgattttctatgcatttttcatacctaaatttgttccccaaactaatagttatagctactgaaaaaatgggtatacttttccctaaaccctaaaatacccctctcatttttctcaacctctctctctctctct

SEQ ID NO: 247555 - DNA, 529 bp, Cannabis indica
ggctaaaaatgagcctatacatcaacaaagtcgtataaagattacagaagaaagattgtttactgagcggttctcctattaagagtgataaattgaatttgagccagtatccaaagaataattttaaaagagaagaaatgaagaattccttatgcttcttctctcagaagcctaatgtatgctcaagtgtgcacaagactcgacatcgcttattttgtcagtgttaagaaattttcaaagtaactcgaccactggaaagctacaaagaaggttatgagataccttcagattgtactaagaattataatcttatgttcaaacaaactgataatctagaagtagttgctactcggattcaactgtcgttggctgtatcaattcacgtaaatcaacatccaattatgtgtttatatttgttggtggagctgtgtcatcatcgaggagtaagaaacaaaccttaaccactacttctactatataggttaagttcgtttttttgttttgaggctacatcacatggtgtatggct

SEQ ID NO: 247556 - DNA, 636 bp, Cannabis indica
gctacatcacatggtgtatggctaaagagtttcatttatggtctcagagttgttgattccatatcaaggccattaagaatgttatgtgacaattcaactactgtttccatgattaagaacaacaaaagtagaagttgaagcaagcacatcgacattaagtacttatctattagagaacatgttaaagaaaacaaagtggacattcaacacattatcactgaattgataattgttgatcctatgataaaaggcttgtgacctcaaagattcaatgatcatgtatagaacatatgagacttggttcccttatgtaatttttgtacaaataaagttattatgaaactcttattttgatattttctcatattaatgcacatcagaataaacatagatttagagtttattcgcttcagtacattgccacataaagtacagtgttatgtaatgaaaatatcgtaatacatggaagataatactcgacatataatgaggacctatcattatgattcatgtgtttattatgtatatgaggacgttaagtttaattaagtggtaaaactaaatgacgaccaagtgggagaacattaaaatattttttctatatatgtacaaaatcaattacattgatttttaatt

SEQ ID NO: 247557 - DNA, 1399 bp, Cannabis indica
tttcttttttttttttataaaggtcagcccacaaagtcaaaagaaacaaaaaaaaaaattataaaggactaatcttcccctcaaagtaaagttaaactttaaaataacctaggggcattatggtaattttactaatccatcaaatcgacattctaaaattctaaactagttcaaaataccctcaaaataatccatccattaatgttgtgacatttctaaccacatcgtcaagtttccacagtcggcgggccagaaaatatttttatttatacccacatatctcaatataaactccgttattaataaattacgctttatataatcagttaatagatttcactaattaatccaagtaagatcataatcttacttcattacaaaaataattacatatttaataaaatatgtctaattaaatatcattttattttctaggatattacaaccttggtaccagaacaagttccatttttttgttgtacttacctagcttgtatgctcctgattcctgaacttcactcacttgatatggttcttcccagttcggtcaaagcacacctgtcgtgttatctatggtgttcaagaattaccctttagaggaccacatctcccacaaagaatttatgtgctttcacttgcttgttaaagtactgaactaccttttgttgatgggctaccaatttcaggattgctgcggttcgcctttcttggatttcatcaagtgattctgcgaggagtgcatgattaacttcttggtcatatgtcaatcttctgtgagatggagggtcaagttctacctgcagcatagcttcataatcatatgccatggcaaatggagtctgcccggtcgttgttttctcagttgtgcagtagaccataatacttcaggaagttcttttagcatcttcatgtcgtttctttagagtgtctttgagtgtcttgttgacagcttcgacttgacctttttcttggggatgtgccactgcagagaaacattttatgatcccatggtttgcatagaaatcagtgaagtattgactgtcaaattgtttgccattgtccgagactatcttgtatggtagtctgaacaaacaaattatatttttcacaatgaagtcttgcactttcttggatgtgatggttgtcaatggcttggcttctgtccatttagtgaaataatcaactgcaaccatcgcgtactgtactccacctttgcctttggacaattttccgattaggtcaattccccaaatggcaaacgtcctaggactttgcatctgagctagtttattggttggtgcacgaggtatctttgaaaatgtctgacacttatcacatttcttgatgtaggcctttgactcttcaatcacggtcggccaaaaataaccttgcctcagaa

SEQ ID NO: 247558 - DNA, 2222 bp, Cannabis indica
gtgagaagagagaaggagagccctattgggcgtgtaccagagagagagaatagggtttcaaacttagagtgatttggagcttagtgacttagaggcaacttaggtttctaggctagggttaaggcctttaaataggaggcctaaaccctaaattacaagtttaaatccttgatatttacatagtttgttagatgattacaaaagactaaagtgcccttgaatctagatattatacaacttttttgttgggcttttaaagcctaatttgcaacacgtatctgttgtccaggtgcagagctgtccaacaaagcctgcagtgatctccttgtctggctaggcccctgtgatgaccacggtgccccgccggggtgatggccagggtggccgatcaggggggctagtcagggtggctagtcagggtggctagccagggtgttgtcccaaggctggctggctaggggtggccgaccagctcctgagagggagctggtttgttgcttgatccctgtttgagtgccggggagtttgtttgcttaggtgttgacttcaccttccttttagtgagctgtactgccacgtggcacttgttctgtccacgtaagcatgccatgtcacgagaagaaaaattggaataacaaatagtatgaagtgtaatttttttaaactcggaacagaaaaataccttaatctaaagtcaaatcagcagacctgtaagactttagagaagactatggccaagttgcttgcttctcaaaatagacagtaaaagatatgtagatctgaagttcaaaaatacagaaatcccaagtagggaatcatatcttcttatggatatcaccaataaaaagaatgagatactttggcatgaaatgcaagatatgccctggatttccaaggtttctttgagaaggttaggttagtggcatgcctccaacattatctgtagtacacaaggtattttatgttttagacctggcttatattttgagttacaatgccctagaacttcagtcatacctatttgatgaggaacaatcagagtatatctcgatgtttaggacaagtccttcagaacaagattattgtattggtttgggtaaataataaggtggaggacaccacttgggaattagaatccaatttgagggctcaatgtcaaaagttattcaaattagatttcaaggacaaaatccttttaacaggggataatcgtaacgaccgcatagttaaatcatgagaattatcagataaataagagaattagttattttatgatttacgtctttcatagtagaaaattatggcttattgtcagaaataggccttaggaagatattttttcaattacagagatatatttgaattctagatgccttatatatgttatatgagaatttttatgattttcatgttttatgctcggtaacagtggaatgggacgatttggccattaaagtcacttagatacagttgagtaccttagaattattaaaacatgatagttatatatttggaatgttgagatttatttggggctaggttctttgactactttactcttagaaagtaaggttacctcatagtgaagcaaggggcaattcagtcttttttcctaagtgttatcttggttatgttagtggattttttagaattatccctaagttataagttgaaatgaaatagaataaaacttagatttataattaagattaatcataaaaccaaataatgcaaaatcaacctcttggccttctctctccttctagtttcgaccaagcaagaacccaaggggaaaccaagttttgcaccaccaattacagaccaatccaggttcttttcagctaggttggttggggaggatcaaaagtaagtctagtaacctttctaccttgattttcatagttgaaagtttaagttttcatgcaattcatagaaattttagaatttttcatttcggtattttagataatgttttcttgggttgtttttgagttatttaagctgctatatagtcttttgcttggattttgcaggttgtgagttaagttgagcttgtaagctcaagcttgacccctttaatggtgatttcattttacaaacttgatgatggacttaattgttaaatgtgttcgttaaactctaaataagtgttctggaaggcttggggtgaattggtttcgatttgtgttagttttgagatttaggggaaaattttctatgaa

SEQ ID NO: 247559 - DNA, 1199 bp, Cannabis indica
aggtatggctcaataggatgagcagtggtagatgtgtgacatacataatctagtaagtgtgctggtttctttttaggtctgctactggggagaatggcagccgtaggatgtgatttttggtgtgggacagcatcattttgctgaatcgcagcattatttggtggaattggagcgatgtattgctgaattgcagcagtgggatgctgatttgcatcaggtttgtgctgaagatttgctagatttggctgactttcagcatgagtacgctgatgtgcatcaggagatggctgaagtgcagcgatatgttgctgaattgcagtattattgtgctgatttgtatcagtagttggctgagttacagcattattatgctgatgtgtatcaatattgtgctgaagtacaacacggttttgctgaattgcagcattattgtgctgatttgtatcagtagttggctgagttgacagcattattatgctgatttgtatcagtattgtgctgaagtacaacacggttttgctgaattgaaggtgttggtggtgatatctgtcgtacagcaccagattgctgtgtaattggtctagagcagggtaaaatagcctgattaagacatgtgttaagttcagcatgattgttgatagttgagaagggaaatatatgttcatgtaaatgtgtttggtttctatgtcaagaagcaaatatgctttcattcccgaagggtatccaatgaatatggaagctcgacttcgaggtgaaaacttatgtcgtttggatgagagagttgagccataagcaagacatccaaatgaccttaagtggtcataaacaggttgtttgttgtgaagtaattcaaaggaaattgtacctttgagtagggcagaaggggttctattgagaagatatgtggctgtttggacgagatatggccaatataccaagggaaggtgagattggaatcgtaaggcccttgcaatgttaaggatgtattgatgtttgcgttccaccacagagttttgttggggtctttcaacgcaagaatgatagtgcatgatgcctttagaagcatagaaagaatgcatattgagttctttggcattgtccgatcggacagctttgatatttttggaatattgagtacaaaccatgttgtaaaatgatggtattatagtttgaacctcagatttggttttgagcatata

SEQ ID NO: 247560 - DNA, 811 bp, Cannabis indica
gtcgactttatggtgagagcttgatcagaggcccaatcccaatcggaggtcaatcggaaaaaaagttataagaaaactcctccattttaaatcgctatactgaacgactcttccaaatcaccgactcctccatttcactttcccaatcccaatcggaggtcattcgattttaatccctcggttggagtcgacgattgaaggcataaagaacgttttgggttcttaatcgctactttccaatcgaaaattgggagttcagtcggacgccgccactactagccccaagggtcgtagatctgactccagatttcttcattggtatattcgacatgagaatcggttagtatctccacgcccaaaatatggatttcagacccaacccagttcaccgtgttaacctgtgatattatgcacctattcattgaatttccaatttccaatttcaactgaaccagacaagtagtaaatctccctctcatttttaagacttctatgattccatctgtcaatgtttttaatattgccaaatattactttttttttatttattctcttatctattttttattttaggcagctgttataaaacaaagatcttggatggttttgatgtgcagagaacctttggcttgagtgacacactgaagaagtccaccattcatatttcttgtgcagtggtaatgtaagtgaatattattttttttatttgatgttaagtgattattacttgtattgcactttttctgaacctggttcaacctacaattccaacagctggagagaccaactgcatatgattatttattgaatc

SEQ ID NO: 247561 - DNA, 690 bp, Cannabis indica
ggtcctattgatttgggaatgcaatacatgcatacctagctcaattatattatcaaacagaataatcatgtgcagaattatatggcacaaaagagtctttttaatgagagtcaggttactcaacttaactctcttatcactcgcatgaacattgggatcgaggactccaactacttggcgtactcatcctaatttcaaccatatgatcagccgccaccaccaaaccccttttgatgggtgtctcaggtaaatctttcttcccttggattttatgtcacattggggacaatgtaatattttaagtttaggggaggggctttaatttttttttttttttgattttcattgtttaatatttagttttgtttgtttgttttagttgttaattaattaagtcaattttccattttgttgttgttattatttgtggaattgattgaaatttcaaattgtgtgcttgattctttgactctttgaattaatttggatgcttgtgaaaaaaaaatgtattgatgtaaattgtcaatgtttgaattgtatcataattgttttgcttgattttgtggaatgattgcttgaatgatgtagaacttgcatgatttattatcttgaggcgaaatccttgacaatgttcgctaggaatatgatttagacagttttcttggacagtttgagcctttcaagcccacc

SEQ ID NO: 247562 - DNA, 817 bp, Cannabis indica
ttgatggattcaatcaagctttatcggactgcaatttgagggatttggagcttactggctacccctttacgtgggaaaaaggaagaggaacggacaattggatcgaggtccgattggatagagcgttggcttctcaacattggttagaccattataattcagcaaaattattcaatatcgatgttactagttctgatcatactcctttacttctagtcccctgctcttatgatacagctgcccctaaaagaaggtttcgttttgaaaattgctggctccgtgaaccaatgtgtgcccaagtcataaaagatagctggtccagttgtccttctgatgccattactgaaaaaatagcacactgcagcaacattttacaaacttggggagatagctactcgggtaacttcaaggacagaattaaacatctcaaacaagaggttcaatactggaagaaaggaagggatgctttatctgtcaataaacacaaagaagctgaacaaaacttgtttgaagtctatactcaaagagaggttttttggaggcaacgatcaaaacaactttggttgaggggggacaaaatagtaagttctttcatgcttatgctactactcgaaaaagaactaactctatctctaagcttcaaaactcagctggctattgggtggattggaaaagtggtttggctgatgttattaaagattattttactgatctattcaactcctcaccacacacagctgatgctattactgacagcatccccacaacaatttcgactgcccaaaatatgcttctgcttgcacctgttaccgaagag

SEQ ID NO: 247563 - DNA, 654 bp, Cannabis indica
actccatcttgcctttaactttcttgattattatgctttcatatttctcatgcttttccctaaccatgtttgtttcatttcgtgcagacatgtctgaaaaaatgcttgaaactctgaagaagagagtggggggaagctcgggcttatcttctccggccaagaagtccaggggcggcgagacaaccccatctagagagaaagcgccgaccgaagcagttattgatctctccgaggaaccaaccgtcgtggacccttttgccccaaaaatgactaagtccaaagactctcgaggagggagctcggacaggaaagagcagtcgaaaggcggaatggagcagatcagggcccctgccttacctctgatgctgcgtccagagactaaaagaggcaaagatattctcattcactacatgactcggtcggtccctgaggtgaatgagcaattggccggagctgacaatgacctttctctggagctggtgatgggaggtgtcttgaaggagtttacgagggtaagtctttcctgacagtttcctcttatccttctttacttagctcagattttaaatttatttctctgtgcagaccggtctgaagatggcttatgcttattcccgagctaagtcggctgcctctaagaacactgccatgtcc

SEQ ID NO: 247564 - DNA, 557 bp, Cannabis indica
acccgactctttgtttcgcacgattctgccctgtggaatactgattggttggcctaaccttggggcttgagcatccatttctttctgttggggttggtcgattgctctttagttgttctgtggaacattgtgtgtgggttttctcgaagggtcgcccattacaccctttcctttgttattttctagagcagacaatccaactccaggatggttaaacttcttagcatgagggttttcttctggaggatgtaacgtagaatgatatcgagagtctttcgaatgtatctttagttgcttgttcctaattatcccatgagggtatttaagtttgtcctggtggaccttttagcttttgggcaggataatatctccagaaccaaagtggtctagcattgttgcttctataagtttgacttttgttcagatccagagccgtagcctgagtctggttgtgggatgatctattgatttgattgggcccaagagtgggcccgtcttggctaatattaggccttggaagcatacgtgtcatcaatctagaaatgcaaataacactg

SEQ ID NO: 247565 - DNA, 771 bp, Cannabis indica
atctagaaatgcaaataacactgatgtatgctgtaatgtaagagtttgaacaaaaataataaaaaaaaaatgatgtttcaataatgtaatttgaaggacagagtagagaaactatgagagtgctctcagtcgcaaatatagtattacaacgtattattttgtatagtattttattgaattgtatttatgcaatatttttgtgcaaaactatatggggtattaacttttataaacacctaaatatataatattttagtattttaaattgaaatttaatttaatattatataaaaatatgttatgtaacccaatttaatataataccatacaattggacttacctaccaaacaagcccctcctaaatattattccacaaagcataacaaactcttcgcaagaaaacaaaaacaaaaagacaggaaaaagtacattaacattaaaaaaaaataacatcaattgaaaaaatattaatacaaggatcgaggcagcatatatatgtaaccatggcaggtggtctatttctcattattattgtctaatattaaccttaatctctcatggtggaatacactaatcaactctcagaaaatatatatgtactggggaggggtgtggggtgattttgtgtggcacaattggtatagctctgataattaatttgatgttctaccgattcatttcaggactcgttcttggatcgagctgctgcatgtgtaaagaggccaaaatggttgaattttatttagtaaacaaaaaccatataaattaat

SEQ ID NO: 247566 - DNA, 499 bp, Cannabis indica
catgatgtcgacctaactgaagtgactaacatcgttcgtgtgaatactaaaagttgtgatttagattatttcattattgatgaatatgacacaaaaaataagaaaaataaaggttcttatgtcggaaaaaagaaagtaaagagtgtccaaaatgatgaaaataatgtaatacttaataagtatgatgaggaggaggagttgtagactgaaaatattgtaatatttaactcataattaattatatcaattacatgtttcctttgttacttaactagttccaatgtaataactaattttattattaataaatatatattatgtatagaatgtttggtgtgggtaaagataatagtaagaaaaaaaaagggttaggaggagcatacatggggaataatttaggaaagcacttgctgataagccctaggggcagaatctgtaagtttttttgtccgtaaataaaatctatttcaatataatcagatttactaattaataaaag

SEQ ID NO: 247567 - DNA, 765 bp, Cannabis indica
ttttttaaaaaaaaatcttatttattttgagtatattttttttttttttgcacaatcttagtaaaaaaaattgcattgtttattgtcttatgttagattatgttaatttttggaagataatgtgttgagaaaactcatctgtgaatattgttgttattcgtgtttctgggtagaggacacttgtaattccaagatggttagctcaattgttctaagcctaatagcaggccaaattaagataatggattggatccattagcgaagtcaagccttctggatgttggacagacgactcgtctacgcaagataaacctccagcaccgtgtgcatccagatagccccaagtagggcttccagaggagtagttaatagacattcaagtatccaaactctatatcacattcattagttatcatattctacaatatcaggatttaattcccaagatcatgtccgagaatcatatcttctgaatattaaaataaagtaatttccaatcaagtatttatgtgtccttattatccacaaaagtaggacacggtttgacaactatcaacatgatgtggcatccacgttaacaaaaattaaatacctcataggtcaggcttcaccagaagagcacgaaatcaatgtattatctatatttactccattagggggcaaggtttacatactaacactataaatataagaacaccaattcatacaaaaggtgagaatcttattccttgagtgctcaggcaaattcttgttgagatttttatg

SEQ ID NO: 247568 - DNA, 870 bp, Cannabis indica
ccattcacggggaagatttgtacttatatcttgccatcttcaagaatgccgttagcgcatcattggtccgagaagaggaaaagattcaggactcggtgtactacgtcagcgaacacatgataagtgcataaattctatacactttgatcaaaaaattagccttctgcctcctaattacgtaaagaaaattgaggccaatttccaagcacattatatcaaagttttcacaaaccacctgctccggcaggtcctacagatgccagaagcctctagaagactcctcaagtgggcaatgaaacttagttagtttgacatacagtacataccccgcatctcgatcaaaggctaggttctcacagatttcattattgagtgcaatgaaacagaagccaatgctaatgagccagacctggatacccctgcatggaaattttatgttaatggccatcaagtgagaatggatccagagccgaagtagcaatgatatcccctgacggactgagactccatgctgccttgaggttcatatttctggcctctaataatgatgcggagtatgaagccttgctagcaggactgaggctggccaaagcggtaggagccaagaaggtggagatgtacatcgactcccaattgtttgttaaccaagtatttggagaataccaaacttgtcgagaaaagatgtttgctaatgtctcaattataagagaatttctacaagaattcaagaattacaagattgaacgaattccctaggaaagaaacgttcatgcggattgcctgcttgttggctttgaataataaggtagaaaaactaggagtagtattagtcgagtatcttacagagccaagtatcaggcgaaaggcaaa

SEQ ID NO: 247569 - DNA, 1406 bp, Cannabis indica
ggtgctctactgtgcaggaaagggtaaatctgtctttgatcagccatgagtatgggagttgggtgatgtatgtacatgttcgggccacactagaccaagtgggtttgagtctaccaatgttgaaacttttgtaactctattttgccgcttaggtcggctaaggagaaaagacttgtaatattttgtaaaatgatttttgggatcctgaaacatgaaacttttgcttgtaaggttaaaattattacaggttgattttcattttgtttttgtttaaagtttcatttttgcgcttatcttattagtaatctcgtttaggggattacggtttcttaatcatcttgggtagcgtgcctaaatgttagggcattacaatttggtatcagagcgccaagatttttaaacttcctgtagaccggccgaacatgtacaatcatcgtcaaagacaagttcaactcatggtgcagtaagtgttgagaataaatacttcactgcttatgagatcatttaattaccgctttccgctttaggcattatgtaagcatctagagtatttatgtaatatgtgatgccatgcttaaaattctgtatgttaagtgtttatttatatggagtacataattgagttagggtttaaggcaatacgtgcataagtgttgtattggtgcttaacttggtggggttgttgattaccggggtacttgtaaaatggaccctccacaatcatctacaccacaaggcgagtaagtagagcctggggttgaccaaaccaatccatcggcactgcctgcacctccgtagaatccggaggataatgcgggggttggcaatactaatccacctgctgactggcaatagatgtttcaagaaatgcgacgtatcaaacttcgtcacaaagaagagttgcatcgattaaggcaaccggcaccggctgcccctgttgagcaagtgtaaccaccagcacctggccagtgttgggtaaccaggggtttatgatgccgcatagagattctgtgtttgaacggtttgtgaagctgcaacctccaacttttctgggaggtactgatataattaaggctgagcagtggatgagtacaatcacccgtatccttgataatatggcagtgacgggaatagagagagtgaattgtgcagcttttatgttgcaagatcatgcccacgtctggtgggatattttgggacagagtcgtgacgtcagtgtgatgacttgggatgagttcaagagtctgtatgaggaaaaaatttataacgtcatagtgaagacttcacatatggaagattttgtgaaactaactcaggagaagatgtctgtggccgagtgcactctggagtttgatcggctgtccaagtttgttggtgatatgttgcccatagatttcaccaggaaa

SEQ ID NO: 247570 - DNA, 725 bp, Cannabis indica
ggagagtgcccgccgctaatagtgccgccgctaaagggtgtatttgttgtagtgtaagaagagagtgtaaaagagagtgtaaaagagaattttcttagcactcccttgtactataattatattttgtattaattgactatataaaccattaaataattaatacaatttatttttaataattttttttttgtcttttatccttccatatattttttttattatctttcttttttaatttggtatcagagcttatgacttcaacttcaagagtttttgaggaattacaagaatagattttagtgacacacttcaagagagtctaaagatttttagtgactcttcactgtgggtcactaatgtgtttaactgaaaagataatttttagtaacccttcaatgcgtgtcagtaagaaccttttatagttcctcatcgagtgtcactatatacttttagagtcctaccttgttaaactctaaagaaaccaactaccatcacagcgcgtcattatatctattttttttaaaaatattatataaattattaaaacaataattaataaattaaaaataattaacaaattattttttttttcattaactattattaaaaagaaaaagtaacttaacatttttgttgagaattaaaaatttaaaaaacttcaaataaaatgttatacattatctcaaaataaaaatgttataaatcaaaaacaattgttatacatt

SEQ ID NO: 247571 - DNA, 879 bp, Cannabis indica
tcaaaatattttctaatataatacttatacataaagagatcaatataaaaaaacatataaaatacgcataacaatgaaattcatttttttattgtatatataaaatacatatatataatcacatctaaagagcaaaccaatgtagttgtaatagactaaaaaaaaaaatttgaaagatcaaaatctcaaaccctatttcaaaaattaaaaaataaaaatatattacctaattaacatacatgtattgcacttaacattacttaattaaagttaattaaaaaaaaactaattagacatgcattgcacgtaacatcaacctagtattaatatatacacatatcctcatacaaaataattattaactcaaaacaattaataaaatatgtttagtattttataaatatagagcatgagcacctccattagtgtatttactctatttttcaaaataactcacaaaaaaattactttatttattttacttctaactctttagaggaggtaccagtgaatgttcatcggggagctcatttgatccctacagggtctattagacgatattcccaacactcgtgaggtgacacattcatgtgaagccttccatctactatccatgaaaatcaaacatctaagatactcctcaaagtgaagttccactaagtgagaaagcgctcctagcaatagcaagtttacctagctatagtacatttcactaaattaaaggaggcacttaagttgatctctgaacataacatgtgtatttagacgattgcatatttgtcttatcaatgaaatattttcactttacatatgacatttatcactctccacatgtttgcctaacttgctcgttgtacttgtcaattgaaattgccaaag

SEQ ID NO: 247572 - DNA, 1249 bp, Cannabis indica
tttttttttttgcaacaatagttaggaactaattttaactgtaagttttttgtttttttgttgtaaggaattttaactgtaagtcagcacaatagttacaaacttattttagtttgtgaatatatgtggttcaaatctttgtaatgttttcttttttttaggaagagcatattatatatttgatacaacttttaacatataattcaagaaattatctttagtgcgagaaaatggcatacattaacattttattagaaatattcttagttaattaaatatcaaactggttgtatcaatattaattgtataaatatataaacaaaaagttattgttggaagacttttttcttagagaaagaacaaaatattttatatttgtatatctttgacactttttaatacataattttaaagaattattttttataaagctagtgctaaaaaaatggttatacattatgaacttaacattttatagaaatactgagttaattaaagatcaaaccgacattgtgtcaaaataattatataaaaaaagcctcgttttaattttcaccccaggcccctcaccggtttcagacagccatgttctccattccgagatcatcgaccaccatggaagctcggcaatggacttgcgacgtccagatctatccttggacagcacaccgggaggcgttgggtggtcaaacactattggtacaataggcagggagcaacgacaattgtttctccaccatcggggttttgctttgagagaggtacccaagttttccgtgctctgttttctaccatctgggttttcctttgagaggggtatccatgtgttggagaagttcattttgcaaatgagcttatggacattcattgtgataaagagcacttgaaagtgactcttttgcaggatggatggcgaagttggtaatgttgacgaaggaaaatcaagaattctacataaccagtgtataacttcatatttgtattagttcgtaattctctatgtcattcttcctcattcaggtatcataagcataatacagtaatttcacaaaagaaatttgtgcagtgttgggtcttcaatcgaggaagaacgttgatttgtttgggagtttctttgcgacccagacccaagtttctaaggagatggctaagaaaatgacatcactaaaatggtttttttgataaagatcggctctccgagtgcattcggcattcgttctttcgcgacttgtgcgatgagccaaggaat

SEQ ID NO: 247573 - DNA, 533 bp, Cannabis indica
ccctttaattgaggctattccacaaaatggttgtttgacaacagaaatgctatacaggtagtttagagattgatgcgattatccttcaccttgaggacaaggtgaaattcgatcggccaataatgttagaccccaagattaataggagaggatatatagggtagtgattgggagcgaattggttagtatatataggtgagtaagtgacaatttacaggtattatgagattagtaattgatacacagcatcaaggagagacccagactctcgaaacttgtggaatcttgtactactttggccatttcattttcaaatttccctaagttcttcatctatgttgctggtttttttctcaatatttgctattgttctattgctattgctctatattttggttacccccgtcatcgattcacatatttatcttactaaatgcatacatatgagattttaatcttttttatactaccacacataacctctacaagagtttatggaaagaatatagcttacctcagttaacattatggca

SEQ ID NO: 247574 - DNA, 810 bp, Cannabis indica
agagatttctatcgaagcattttgagatgaaagatcttggtgacgcctcttttgttttaggaattcaaatacatcgagaccgttctcggggtattcttggattatcacaaaagagctatatcgataaagtactcaaacggtttggcatgcaagattgtagaccaggtgatacccctgtcgttaaaggagacaaattttgtcttaaacaatgccctaaaggaagccttgaaattcaagaaatgcaaaagattccctacgcttcggctgttgggagtctaatgtatgctcaagtttgtacgcgtccggatatagcgtacattgttggagtgttaggcagatacttaagcaatccaggaattgatcactggaaagcagccaaaaaggttatgagatatttgaagagaacaagagagtacatgctcacatataggaggtcagatcactttgagatcattggatactctgactctgactttgcgggatgccaagatagtaggagatctacttcgggctacatatatctgttaggtggtggagctatatcatggaggagtgcaaaacaaacactcatagcttcatccaccatggcagcagaatttgttgcatgttatgaggcatccaaccatggtatatggctgaggaactttgtcactgggctgcgcattgtggatggaattgaaagaccacttaagttgtattgtgacaataaatcagctgtattgtattccaacaacaataggagctcgacgaagtcaaaacacattgacatcaagttccttgctgtaaaacagagtggacagatttgtatag

SEQ ID NO: 247575 - DNA, 518 bp, Cannabis indica
atgaacccacacaagtggcttctcaccggcctaggttgttgttgtttgtgggttaaaagatcagatttgattgtgaaagcaatgcgagtcgaacccgagtacttaaaaacgaatggagtagtactaccgagtctaacccagtggtgaacttcaaagactggcaactaggcgcatctcgaaaattcaactcaattcgattatggattgtgcttcgtagccacggtgttgagaatcttcaaaaccatattcgatccgatgttcaaatggtagccgatttcgaaatgtttgtaaaatctgacccaagatttgagattgtggtgccaagattgtttgctcttgtgtgctttaggctcataaaccctaataacaataattctgaagatgctaatgagttgttaaaccgaaagcttcttgattttgttaactcatctggaaagatttatgtgtctcacactatagtgggtgggatatatatgttgagattttgtgtgggaactatgcttacagaagagtgccac

SEQ ID NO: 247576 - DNA, 611 bp, Cannabis indica
tttttctaatatatacttttttcttgaaataataaatgtaatctaaagatactcaatattattttcatatgatatctatttcaacgtatatctttgaaacttaacatatttctttttgatttggtgaataatataagatatcttctataataatttttgttcctctaggcatcgatataatgactcttttggagccttcaatatattgtatgaacatttattttcattcttgatgaatttaataaatatatatcgcttctaagtattgtatgagtggttgcgttatccgccaaacatatatcatcaccattatttgtgaaatcatgtataagatgataaatgttcattacttcattaactaacaaaaaaatatatatataataagttcaaaatataaatacttaaacaataaaagttcattacataaacatcacaaataaaataaatcaccttaaagtaaataaaaaataaaaaataaataagaatgagaaagaaaaatgactctaattgtggacattaacatctctactatcgatattcatatttctattaatgagatcttcattaaaaaaatatgcaacatctaagtgttgaactactacagattatga

SEQ ID NO: 247577 - DNA, 552 bp, Cannabis indica
tgaaagaaaaaaaatgtcgtacaataattatattgatcaaatttatttcctaaaaataatcttcaaaagtataagtttaaaataaaaatatcactaagaattgttcaaaagtttgaaagttttaaagtttttgcatggatttcaaaaaaaaaaaaaaaattgatgctaaacacaacattggcttgaaagaatagtacaaaatattaatatatactccaaaatataccaaagtattttttagctagattcatgaaagaatgttaagaaaaaaataatcgaacacaaaatataaaaaaaatttattgaaattatgacttaatttagaataaatataaatattctaaattttgtaatatgtatatgtattaattagtgggaattaccttgagaggaatgaagctttcatggagtttttctttttgtgcatgtagagtagagagaagaaagtaaaaactgataattattataattgggagaactaacatatagttattagtgggaaaaagaaaaaagtagtgggagaaggaaaaataagtagtgggaaaagaaaaa

SEQ ID NO: 247578 - DNA, 546 bp, Cannabis indica
attgaaaaatatggaaatagtccttacaaaatatatattatatagaaataaatattttagatgaaatagatactttagatattttttaagagaaaaataattaatacataaaatacttaattaattttataaaataaataatatataaggtttttgaagtagtaaatttatataaagtgtaaaatttaagaaaaatacattaatataatgtttgtctttaaaagtaataattcaatagtaaataatatttttgtaaatcaatatagaaggaccaaaattattgacatttttattatagatgagagaaaaaatttaactgtatatatatgattctatcaaaattcaattaatacaataaataataatcattttattttaactagaagttatattaagggagattcgaacttgaaacctccttgttgaaatttattattctctattaatttcaacttttttctttttattttgtaggaaatggattagaatttgaacctcctttacatgaaaaaaaaatgtgaaactattagactatacttatgacga

SEQ ID NO: 247579 - DNA, 1131 bp, Cannabis indica
gaatgtgaatcgatgccatatctcttttggaataactcattaactgcgtaagtatcggagtatatttgtaacatgctgactgtaaggctttaggcgagttattaatgtacgaactggtacttagtgtattaacgagaaaccataagtcgctaaaggagaatagcaaggcactggagaagagtatcacataccttagcttacaataagcaaactcagtgtcaaagtcggattcgctcaaataacaagaatgcgagatgaccagctcgcttcgaggaaacttcctatagtttcatccaattaatggaagcgagactcataatcctggcatgtcagaagattttcatataccagcaatcgacgtaaatcatatcatgtcgacctcagaaatgagaatggttccagctcgccattgggatcactacaattaagtttctgtcgagacatctctagactcaacaattgaagacgtgtttaatacacgatatttctgacccaataaaatcgggaaaatcacagctacatggttttcaaaatcgtacaccgcatttacatttcatgatatgtaatcaggtcccacaatttaagggataatgactataattacattctggtcagccttgtaattaactaccactattcaattataaatagtggcaaacaatctcaataaagaggacgaaaaaactcttatgcaagaggccctaaaaaaatactcagaaatctgaataagatagactcgtggactatgcagaattttaactgcaaaaccacgtaaaaacctggtgttcatattttatttttctataatttttattttttctgtgttgagttatcatcgtgaggctcgaatttggttaataaaaatctgagttaacacatagtattatataaaaatatgatatataatctaattcaatataatacaacttaatatgttgttccaaaccacccactaaacaattcatattggcataaggttaagttcaggtaggaagtaggggtgtaagtcggtcggtttaatcggtttacgttacattttatttaacctaatataaagatcgagttacaaaaatctaagtgcaacccgcccaattaagaaaaaaaaaaggtttcaatccgcccaatgaattg

SEQ ID NO: 247580 - DNA, 1528 bp, Cannabis indica
ccctcatttcttttgaagaaaaaccacctccttcatggctgaaaacccagaaaatgttaataccccacatgagtaaactcatcattgtcccgggaaagagcccatgggctccagaaggtatatcaacccacagtccagatggaccaccagttccaggaggattcaacctgagcgtggccccagcacacggaccacacgttcccggaggactcaacctgatgttgatcctagtacgccaccaacatgcttgaggagaactcaacgtaggagtggccagaactctgggatgagggatgaagagcccaatggtagaggtacccagactatgggagaaggtacttatgaaatggaaaactaccgcctaagacaccgtctggaagaggcgcagcggcaaaacattgaattagaacgtgatgcagccgcagccagggtgacataggggatgaatgctcaaaatcaacctgaacttggagtgagaagaccacaaggcaggcctcgtggctcacgaactaggagacaagaaaatgcctaggaaaaacaacctagggaaaatgagataccccctgaaaatcagaatgatcagccagaaccctctccttgaaatgagaatgggaggcaaccggaaactgatgaacgagagcataggtcacctacgagaaatcaccagcattcttctgaacccataaagcaagggctagcacagaccctaatggggaaaatacaaaaaactacactaagggggaaagaacaaagcgtgaagaagcaagtgtgacctcgaggcggtcaaggacccacaatcgatcaactcgaagaggagaaagtactcaacgagctaatgatcaagaaatcatgggaactagtaaatccgcgagttacccaaagacaaagtctatgagtaggacgcgatttgtgagtaagatgaggtctatcagcaattactcccaaccagatctgtgagagcacttgaatcgaaagaaacctgacctttgccaatatctcggtccaaagcaagaggatcccatccatttgcgaataaaccagctagaggataagttcaagagatatcaagtgggggaactagggagacaatctgtctacgactaagatgaggagcttgagctgtatcatctagatatcatgagtaccctttttccttcgggattaaaaaactcgcatgtctcgtcatatgacagaaccactgatccggtctcgcatttgaacaactttaatacaataatgcgagcgagcaatgtgacgaataatttatgctgtatcttgttccccacctcgcttgttagagcagcaagcagctggtttaacaagtttactcaccattcaataacttcttgggagcaactgtccagggatttcaagaaacagttctaggctgctagggatagacgacctgaatcggcatcgctaactaatataaagtagcagcccgacgagacacttaaggcatacttaagttgttttggcacgactgcaactagggttcggaattcggatgacagtacacaacttacag

SEQ ID NO: 247581 - DNA, 787 bp, Cannabis indica
tttcaattcatttttaaaaaattagtcaaggaaaaagaaaaagaaaaggaaagggagaaaaataaaattatttattattatttgttgtagatttttttttttttgggaaattttattagtatatagatatttttagttgagggctattttttttaaatggtgatagctatatattctaaatttaatatcaagacaatgtgtataaatatgaattattattgtaaatcactaaccatatcaatatctatttatttataaactattctttaaaaataattgtagatattacccaaaaaataattataagttctccccactaaatataaactacttattcaagacgtacacaaaataccaaaatcatattaaacatatgtaactaaatgattagatgatatattagtattactggaattgattcaaactacagtttgatgaataagtacattttttgcagctgagaatgacaacaataatcaggagtgataaaaagattattgcgttccaaaaaaaaaaatttaataaaaatatttttttcttctccaacttaccaaattaagaatctctttttatatcattgcaaaaaaaaaatctcactttatattttccatctaaggatattgattttactaactaatataataatttgacattacactatatttcataaaataaaaaacctgcttattaaattataatagttatcgtggatatttagaagtacactaatataaagaaaaaaaaaaaatatataatatacatacatactcttatatatattaaatgt

SEQ ID NO: 247582 - DNA, 613 bp, Cannabis indica
tagctgaattgaccaagtttacgaagcgtcttacttgaaagcatagtgggtcatatttgattcggaagaaaaagatctggaaccatgtgtaagaagaataatagatggacccttgccgaaacactttgaatgcctcagatggagatacacgaaggcagaacggaccccaggatccacttatctaaatacatccaatttatgcaagtagtgaaggcaagtgatgacgcaaagtgcctctataatccgttaactttattaaagtctattcaagattgatggaagagactgtctcccggctcaattcgtaattgaaaagatttacaaaccatgttcaaataacaattcatagttgcgaatgattatgacatggaggtcagtttattgaccaatataaaacaacaatcgggagagagtctcaagaaatcaaagcaaaaaaattatttttgtagtagtgttattttcagcacattaataatttttttaaaaatcttttaaaattttatatgatgtcttaaatacatacaaccatgaaaaaaaatagactacaaaattctcacaaatacaagaacagataaagagaagagtacacccagtgccggccctgaaacaaagt

SEQ ID NO: 247583 - DNA, 995 bp, Cannabis indica
gtaacaagtcttaggaactgaacttcacttgagtactgcccatcatccacagacagatggatagtctgagaggaccatacagactttagaagacatgcttcgctcttgtgttttggattttggaggtagctggggagaacacttgtcactagtggaattcacatacaataatagctaccaagttaatataggcatggctccttaagaggccttatatgggagaccatgaagattgctattgtgttgggaagaaccagatgagcatgtcactattggaccccagattatcactagtaccactgataaaattaagggaatccaagaaagacttaaggttgttcagagtcgtcaaaaaagttatgtcgatctcaatcgacgggaagttgtgtttgatgttggtgattatgtcttcttgaaagttactcctatgcgtggcgtaatgagatttagggtgaagggtaagctagccccgaggtatattggacctttcaaggttattgagaggattggggaggtcgctaatcgattaaacttaccaggtcagttgagacatgttcataatgtgttccatgtgtctatttgagaaagtatactccagatccatcatatgtcattgagtgtgaggctattcctctttaagaagatgtgacttatgaagaacaacctatcaaaatcttggcgagagagctaaaagtgttaaggaacagagagattccaatagtcaatgtcttatagaaaaaccatggagaagacgaggctacttgggagttagagtctaagatgtatatgaagtattctcacttgtttaattttcaacttgaggttgtactttaaaattctagaacataatttccttaaggaggggagaatataaagactcagtttgaccgagtcaaaagaagaaaaaagaaatatttaatcaataaataataataataataaaatatatgtatataaaaaatcaaatcacccccatttcttctctctctctctct

SEQ ID NO: 247584 - DNA, 510 bp, Cannabis indica
ggatgtcaacctgggcattgggagtagaataaccttcagtaaaacggttatagctcactcaatattgatctagttcactcaattcaacttactttttaaagctatttcaatgctctattaagttatgtttcacatttcaatttgaattctgaagttatcgaccccaaattttaccgtcgagggagttacgaatttaagctacaagttacacgaagtgggttccgtagacgcaactcaatctccgaaaattcacgaacaacattcagagtcaattatatctttagatcatcatctacggttaaaaataagttacatgtatttttccacattttttagaattttttattattattttaataagaactcctttcttataaaaggagagctccactagctcatttttcaagtttagaaaagtttccataagtcagagaatttctctctagtttctctctctagaaattagagtacccaaacttagctccttttttgtaatccatctcgtgagaa

SEQ ID NO: 247585 - DNA, 2906 bp, Cannabis indica
cggtttgttaattttttttgtacaaccctacttagaatatggaattattaagacaatcagtattaattaattatattaaatgtaattaaatatgtatttattttacaatgtatgtcatatttttaaaaaataaaaataagcattagagttataatttcttaattttagagaagtatcatatatgtgttggaatttattttactaggatctagatttacttacatgtacgtttcattaacaccctaaatatgaaatcttctaaaacaatgaaattaaacacataagagtttagaaaaaccttacattgatgcagcagagtaataatgactccttctgctcagatctttaacccttgttcctttctgtcccagagtaattataagatttgagcctggatctctttcttttcttcgggttggttaccaccgtagaaaggagtctctcatctactagttgtcagacatagttagaaaactagatttggtaggttgaaaggttggatgagaatgagagcatcatgttccttttataatatttcaactagggtttaggatttaataatatggattaaaaaagaataacataatgggcaaaaatacacttaagtggtcgaccattatgtgggcctcactagttagaattttgccactttatttcaaccacttatcttcttttaataatactatatttttcaattttaatcctataaatatcaaaactatttatattaaaaatccattttttaattcttagttataattcttgaataataaattgataatagtcatcgtgggattgacctgtatttgttgttatattgatgtaattagtaaatctaaaagaaaaattatttagtaaattcagtatggcttatgacacgcatcaacggtacccacctgagcgtttgtcgggggagctggtgcacatcatcaacggcagcattgtcaccaccatcatgagccataggccttgtagtggtgggtttggtagaccatggttgttgatgtcaactatggtaagtctttcttcaagctctcaatgaaagtaccaaaatatttactgagatttttaaaaacggactaataaagaaattaagcttaaagaagaataaatagtagataatgtaacaaggatttataggtggttttaataagccttagtccacgagtcaatattattaaagctctttggctatggaatattttacacaagtgttcttgccaaatttttgtagagtttctagccaaagttcgtaaccccttgtgtttaatgagaattttagaaattgattatagttatatcaaagttaaagaaatagatcaaaataaagaacaagacaagagaatttacatggttcaaggattaacgacctctagtccatgagtcaatgttatttggctggaaaagcctttgagtattacacaaatgtttgctaagtttatgaatcctagaatttgccttagctcttaagtattgagattctaaccttttgcatgaatgagttttcttatatttatagactgagggttcttgtatgtaaacctcacccactaatgaggtaaatacaaataacttattgactttgggtctatttggttaggaatggaaaatgggacgggtctgccccgacccgctactaacctgccccgacctgacaagccattgccttgccccgacctgccccgattacctcaaaagtttaatcgggtctgactcgactcgactcgaccgggtcgtatttgacccaacttttttttttaacaaacactcaacattcaacaatagtttcattacccaaaaaaaatgacataatagaaaattataaagtttagagatttcgtttattttgttcttaatttttaaataattatcaagggcataggttatttgttaatgttttattattagttattacaattttacaaggcaaaattatttaatacaaaacaagatacaagacatgcttttggtatttaattacaagacatgttaaaatgttaaaagagattgacaaaattccttttacatctcttgggttttatttatttatttatttatttttatgagaaacatctcttggtattttgcttgcaaaataattagaccaaatatgttggcttctaaaagaattttttttatttaattactattatctatcttaatctagttgcttgttttccatggattcattaagacatgcttaaaaataaatttctaagcgagattttaagtgacacaaatttctaaagatgtttatattaaaattaaacaatacccaaaaaaaaaatgaagttctaaacaaatttccatttataatttgagttgagttgaaatatcaattacactcatattactaataacaaagtatattaataataaaaactaacaataaaacaacatatattctaatcatcaagatcaacaacgtaaggccctaaaaaaaaaaacaaagaaaaatattaataataaaaattaataatttagttgataaattacaaaaactaagctagttaccattattggatcaacatcaacatcttcatcatttattgaaactgtaaaaaaaacaaaatcaatactaattatgaaacatatacacaaatatatatataaatatttatttaatgatatttactttttttgtcagttatcaaccaattctatgtgcacactaatgcttctaatgtagaaggatcgagtctcgatcaatgaggactcacgtgtctaccaccagtgctgaatgtagattctgaagcaacagtgctattaggcacagcaaacacatccttggcaatcatactcaataaagggtatttgaggcccatcactttccaataattgcatatatcaaatgactcttcagtcctaggtaccaagttctcctccaaatataaatctagttcaga

SEQ ID NO: 247586 - DNA, 4549 bp, Cannabis indica
acatgttataactgagaaagcaaaataaatacatttcacagtaattcaaaattcaaaaactcaatgcaacttgtttttttctagtttcaaagctttacaatagcaccaacaaactatacagtaagaaaattctttacagttcaaaactcagtttcccatcctgatggaagaataatgaaaataaattaactattcaggaatatctgtatattgtgatgatttgctaaatacttacagccacagagagcagaggagggaatctttcatggaataatttcgaaccctctgatcaattccacctcaaaagccaccaacttcattaatccctttgtacaagttgacacttagttcaaacgcttaaagtcatattccaaaaaatataataatctgagacctacactctttcagacaaccggcaccaaatggtttaatcacattaattgtggattaactatcactttccatcttttgaaagtgctctaaaatgctatttgcctttctcttggccctttcagtgccattctccgacaattcctttaatgcctcttctgcaccaagctctttggcaactttcaactgctgcaaatcacctgtgcataatgaccacaatacagcagctgcattctctcgattacgtggggaacctgttcttgtaacctcaaccagaacagggataggcccagcttgaccaattgccgtcttcccttcttgatggctggcaagaatagccagaattgctagagcctcatcaaccattccgccccccgcatccttcagcaagctcatcagtggggacacaataccagcccttacagcccgagccttgtttccctgatagatcgaaagattaaaaatagcagtggcagcatccttttttcctctaggagtgccctcacacagcaattttataagtgctgggattgcaccagctgctcctatagcaaccttattctcatctataacagataaactgaagagggtcgcagctgcattttctctagcctccatgctcccatttttcaacacatctactatatcaggtatagctcctgcatttacaatggttcctttgtttgcatcatttattgagaggttaagaagtgctgtaacagcatgctcctgtgttcgagggtcagaggaggagagcagttcaacaaggagcggaatggctcccgcctcagcaatgcatattctattatctgcatttctttttgccaacagacggagttcaccagctgctgctctttgttgttctggatccccaattgctagtttttgtaataaaccttcaatagcggcccgatcaaagtctgaaatggagcttcctgatttcttgcttctacaagtttctcgtgttttcggcaactcaacaccattgctctcacaccacaaagatatcaaacttttcaggacgtaattaggtgttaacgctgtgtgcataagcgtcagctgtgtcttgggacatgttttatgccctgcatttatccacttttgaatacaggatctttcatatgtctgcaaaaagattagataattaaagcaaaattattgtcaatacacatgctataatctgtgaaggcaatggcctgatattattacctgtccagtggagacaataacagggtctttcatcaattcaagcgatatagggcacctaaaatcatctggaataacaggagatctgtgcttaaccaagtccgtatcactttcagggggatcatttgctgggttctctgatagtacatactccattaatttgttaagcaatgatgacatcttttgaaatgagtcccctggattttcatcacttgtgataaacatttcatggaaagcaaccgactctcttttaaggtcattgatcgtcatcagatgcagcttgtcagtaagccttttcagaattacagggtcagggtcgtcttctttctctgctatgattaaatccttatccaactgtgagtcgagtgattcagttctctctttagctcttgtgaattgagaatgtacaagttcaatctgaaacaaattaaattacaattacacattccttagttacttgaaaatagtaaaaggtgattcaatgtacattatgaaatgacaatacttgaaagtataaactctatttggttgcagaattacctgttcttgaacttcatccgatatagctaatttcttgtaaggaatctcacacaatgctgcttcaatttgttccgtcacattgcggaacttgtttgcaacctcatctcgtttgaaagccttttagcataatttttcataaaataaaaaagtgcttataagatagagtaacataaaagaatatgtcaaaataacaagtataaataatggttaaatgttgtattcaagctctgtctacattcaattatatttgccaagcaatttagtgttacaagttacaacaatatactactccacctcatgatcaaaatcaaatgtttacaccataatagaggagaaaaatattctaaatatacagataataaaagataattttttctcatgtcacaaaaactttatttctgttcattggatgataattcattgaaagccattgcattctaatctgtaaataaataatctaaagccgtagcaattctacagcacaagtcacaaatatcccacaaaaaagctcaggcctttggctatgattgtttgctcagaacgaaaaacaaaaaatctataaaagagacaatattaatacctgataaatcttgctgccatggttagttgagttgagaagctccttagtagaaaccaaagcgattctcagagtttccaatgatttcaattcttcttcggccagggctttatcgctgtccctcaattcctcaaacagaggactcagaagcttcactctccgtaccaaatccccggttgtctttttgaacacgttccggcaatcggacaactccgatatcgccttcaccgagtccacgagttgattcagtaccgagttcctcaactcttcttcccgcaaacccatctgggtggcctccagtttagctcgaaactgggaaaaatcaatcctttagaatcagaaaattggggttcagaatttgacgaatcgaaccaaataaaatggaaacggagaattgggattttgccggtaagactagatatgagaagggtataattggaaaatgaaatataccatgtaaatgcaggcggaaaagcttggtttttcgttggaaaggagaagagaaaggttgtaagttttgggtttggggtcaagaagaattagctatggttttatcaaacaaaattttaaaattaataaaataaaacactacttcattttggttatttataatataataatttatttatttattttatattttattattaaattttcatcagcatattttacattttaaatatcaataattgggttggaacttggaagtccgtaataaaagaatagttaccaaataaataccaagtcattggtttggtttaaagttgaccttttatatgggagaatttggaggaggaataaaatgatatcattactgacctatatatatatatatttgtgacaattcagtcctcacaacaaataaagttattattgttattttttggtgtagcagtgaaaagtttccatgagtttttaatacatggaaatattaagttatctaagtcaaaattatatctaaggaaagatgagtaacaatataaattggacatcactgttagtggtttgatgtgacattaattaagttacttagatgagtttgaaattttgttgtatactatgtctaactttactctctgatcattttaaataaatattatatctttttaatgggatcgaggccaatttattttattttaattgattttttcatatagaccaaatcaatagattaaagaaaataagtaaagagtaagtataatattataatttaataatagatataatttaaatgatacgctagtgtattatttgtagagtataaacatatcataattgtattttatccaaacccaaagctttatcctagacattacgaaaggacaaagataggtgttagtagctgttctattcataatcttctgcagataattatgcttgttttttgctttttgtttaatttataactttaactatacatctatatagaagtcagtctctcatttctttttatttatacatatattgatttatagatagagaagaaaaaaaaattagaagttctcctctcaaacaattagaataattatcactgtttgataattcatttaattttcctattttttgataaaacagtaaatatatacgtttttttaaggaaaaatacaaaaatctactcatataaaaacaaacaacgtatatattatttatttatttggaaaaggatattttggaccttaccgcgtcctcaccagaacagcggggtaccttcccgcgcacaatcatgattttcgatttcttaacggttttgatctctaaaccaatcagctcagctcagctcaatctcagaagccgagtcacgcttcactccacctatatatacctgtcgtcgactac

SEQ ID NO: 247587 - DNA, 627 bp, Cannabis indica
aaaataatttccaacatgagcttccaaaaggacttagactcagaaatctatgggatctttgcctgatacggagcaatcacctattaggaaaacaagctatgagcgagctctgaaaggacttaaactcgagattgtaggcctacaggtccaatacacgcagctgatggacccaaccacaattatgtttgtagtaatttgaacaatgcaagaaaccaatctcctccatgggattcttttcacaagtctcatgactctagaccacctcgtgaccctacagagggaaagggacctgtagtcagacttaggggaagatcccgaaagctctaccacgaaaataaagagtatgagatttagagggtgaaggtcaatgaactaatccacactcgaaaatacttccatgatgaataaggtgcttgacataggtacttagcctgaggtgcatggagacatgttgaacttgagcaatcggtctaactccctccacacatctcattctgaggaagactattttgaagggaatagtaagtataatactgcgagcagctgctcatgaagaaaacactaaggagataactctatcgtcatacaagagaaatccttgcatttaccagcaaggccacacgacca

SEQ ID NO: 247588 - DNA, 775 bp, Cannabis indica
ctgcacccaatgtaaggttcactaaactttatatgtgtttatttcattgttttagaattcatattaggttgttaataaaacatacttggtagtaaatctagatcctggtaaaataatttccaaaactctcagggtatggccagctagcccctttctctttagaatctgcagcctccccaaggagggccagtcggtcaagttcccacaacaatagatctttctatgcgagtatagttggaaaaactaagggacatgatccagggaagacctcgaacttgatcggtcgaggggatcaccattctcggtatataaatgccttacctttgccaaagttcaaaatactggtatggaagatgtatgccggacgggaggacctgcttgctcatattaaatacttcgagatgcagctcgacctctagaagtttactggtgatgtgctctgttgcatattcccagccacactttcgacgatggccaaacagtggtactttaaactcaccccggggagattcaactcctgggctgagttctcacgagaattctacacacaattctcgtccttgagacttgtaacgtcacagctggaagaccttgtcgaagttaaacaacgacaaggggaacttctgaaagattatattcatagatttatgatcaaggctaccaaagtcaaaggccttactaaagaaggctgatatacgactataccggggggcatactcccactaagcaacttctgaaaagatatcaggaggatatctgtaaagaccgcttagtt

SEQ ID NO: 247589 - DNA, 556 bp, Cannabis indica
aaaaattctcataaataccaaaacacataaaagatctaccgaaataatttaaaggttgtaattagacacgcaaaattatttatagtagttgtggatgggtagtacttgtgtgtggtggaaaaatagacggacccaagagtgttgagggtgaaaaacatgttactaattctacaattcattatctattggtggaggatgattaccacagtttattggtggctacctcgaagcagaggattgcagcctcagtcacttctttttctattattttctttctttctttctttgtctggattgggacaactttctgagttcgaatagctgacaatgttaaaacaatcaaaagatccaccaaacgccaccgttttgaaagctacatattacttaacttacccatcttccctccaatccctatcttcaacaacagctcgagtttgagctcactctcactggaactggatcttgtgcactaaagatttcatcttttcttgctttctaacattgattcttagaatctcagttctttcagatgacaacatacttggagtttgaggta

SEQ ID NO: 247590 - DNA, 542 bp, Cannabis indica
aattggcaatgagtggagtaacccatattcttatatatggctcaattctctaccatttattccatgtgggacatgttgagaatcatggaggtccatctcaaaaccaattggcaatgagtggagtagcccatgttcttatatatgactcaattctctaccatttattccatgtgggatattgtccacaataatcttaaaatcttattgttagttttggctagagtactttttgttattatctttaaattttatgaattttggtgtacttccaaatattgtttttatttataatttaaatgtgcaagacaataaaaatatatatttttttaaaataataaagcgtgtttgatcttgttttttgaaaatagttagaaaacaaagtttaaaaaaataagaattttgagaactattcggtaaaattaatacgcaagtatacacaatcgaatcaagtaatataataatagatagagtatcattctcatgagaatttattatcaattaccaatcaattattctttggttctatttgattaataaaaatt

SEQ ID NO: 247591 - DNA, 811 bp, Cannabis indica
aataagatgcaccttgttgatataggtagtaccaatcaatccatttaagctctcaaaagctgtgcagtcccatacctacacagtctccgaatcatcccacttgaccttccccaggcgatgtgggattgcacagcttacccggtatttccccttaccgatcacgggactactgactatcacaggtccccctaaatctgaattttggttcagtgcaggaaacacacaaaaccttctatacacctcaattaaaacccaaatcttacaataacttctagaatacctaattacaacataataaacataatccatgcaacaaaaccagccaaaacatccagaatcacaatccactattagagaccaaagtttgagttcataaactcaaatcttgctcaaacaccacaacaaccatcaaaaaacaacttagaacagcttaaataacctcaacatatcatcagaatacaaaatcaaacaactcctaaaaccacagaaccctaaatctaaagtcatgcaagaaaactaactttgagctagagaaatgacaaagagtagagctagggattttaccttgaattggatacactaacaacttgcaaaaacactcaaaatcaagcaaaaactccacaaacctttgttggtttcttgaaggctcgagagaaagggagtgagttgaagaaagaggttaattgtgtttatctccaattttgaataaaagaataaacctaagtatatgcctactaataacactcaaaataatcaaattttactaacttactaatattccataaaaagacaaaactaacttagggaaaaa

SEQ ID NO: 247592 - DNA, 989 bp, Cannabis indica
actcatcaatatttctaactaaagctgttgtgacctttttggcctccaatcgggtctccagggtcgccgaacttgaaaatatttttatttcacaaataactcatatattatatccacgtatttcaaataaatctccgtaattaacaaattacgcttatttatccactaatcaggtcttcagggtcaccgagcctaaaaatagttttattacacatatagctcatattacattcacacattctatataaatctccgtaatttataaattactcttatttaatcacttataggaaaatttaaattttatgctgaaataaattagtagaatcataatccaacttattgcctgattaacacataatataaatataaaccctaatatttactattagacttatagggatattacaaaagaccaggggagcctctgcgagcctacatcagcaaattcatgacagaggcgactcaggttgcacgggtaatcgaagacagaaagttgttcgcgatactggggggcattgaagtccttggcgaactttggaaggacacaaggaagaacggaccagtagactcaatgagtgactgtcttgaccatgcagaaggttttattcagcttgaagaggccattcagtgagcagagggtgaacaaaaacctagttagtcaaaagctccttctattgggacattcgtctagctcccccattacccaagcaattcaaactcgaatggtaaacggtccaacaacaataataggcaagggaatgggaaaaaggaaaagttcactggcaagacggaacaagctccccgacagaatcctaccaagtatactgcatttacagtcttgacaaaagatatagaaagtgtgtatatggctactctgtcattagccccttacaagaagcctgcacccatcaaaaaatatgtcagcaagagagatatgaccattttttttccattttcatgggaattacgaccatgacaccaatgaa

SEQ ID NO: 247593 - DNA, 545 bp, Cannabis indica
ttccattgcctcttagattttttagctcttcttctctgtagtggtgcaacaacggaggtgtcttacaaggtaggtaagtctggtacaaaatagtaagaaatttaagtccaaacatgtttcttcaacttgacacactaacatgttttatgtttgttgtaggttcagtcactcacaccattattgattgtgcaagaataattgaggaagctcctattgaagaaactaaggttttgattttgattccaataattgaggagtagaaattagaaaaacatgattaggttaggctcataatttacacgcaacaatatgtttatctagatattaagagagattaacaatgactgatctaaatatgtaatgaaacctttcctttccttgtacgttttggatatataaagtaaaaactatgtgactaagttaccttgtttgagaaaaatattctatcgtacttgtaacggtgtgcagggtaaacccaggaattacagacaaaatgtactgaaccatgccccagaacatctctcagagtgattgtttttaggaag

SEQ ID NO: 247594 - DNA, 957 bp, Cannabis indica
caattccctatggttctagtgagtttgggttttggtttggatcctgttactgtcccaggtctggtccgatttagattttgggtccgggtcaaagattcaaacactgactacaggtcaagtccaagcctcaggtccagattcagatatcggtcttggatctcgttcttgttgcagttcgggtcccgggtcttgggccgcgtactaagtttgggtttaggtccgagtttggggttgtgtcccaatagtcaagtcctgggttctaggtatagggtagggtctcaagtctcgagactgtggtcgagttttgggtcttgatcccagtttcggggctcagtttcgggtccaagtccctggatccttagtacaagtctgggtccaggttcaggtctggggcccaggtcccccatctaggttcggatgcttggtctcggtctagatccaaattcagattcgggtttggatctcgagtttttgtgcgagtctaggtcctagtacgagtttgggtttgagtctgggtccgggtgttggtcgaagtccagatccctgttcgagtccgggtcggggtcccgatctgggtcctagtcaaggtctaggtccaagaccaggttctggtctgggtttgggtccgggttcaggtcctgagtttgggtctaggtttgggtctccattcgggtctgggtctggcttctaggttcttatctcggtatgggtatgggtctaggcccgtgtccaggttagggtttagggatttgggtttagtgtttatggatttagggcttagggttcgcttcaagttccgattccaatttcgggtcccagggtacgatttaaggttcaggtgtgggtctaggtttgagtccttgtcagggtctaggtctgtattcgggttcagggtctaggtctgtattcgggtgcaggtcccggtccgtgtttcgtactggtccttgtctcgggtct

SEQ ID NO: 247595 - DNA, 870 bp, Cannabis indica
catgactgatatagattgatcagatgatcatatatgtatgtatcctaattattaatgattacatatgttacaaacttacaaattagacttttatgaggagacgtataactatccataagtgtactctacgagttggttggattagaggtccaagtgagaagaaaaaagtaaaaaaaaaaaccattttttgggtcctaatacttatctcaaagcacactataaatattagagaaatcttaaagggcacaagtggtggcctaacactctcttatgtgtcaatatcattattggtcaaactaagtatctggtctcatataatttaatataataacttttaaggagtatcgctaaccaattacaacgcaacatgtcgagaaagtgctagacacatggtgcctactagcaatgctcaaatcatcattaggaaagaaaaaaagaaatcttggagttaggtaaggggtaaaattgttcctcacacaaaaaataaaaaaaacaaaaaaaagagggttaatgcggtttggttggcttatctttaatttcaacgcgtccgggcatcaccaccgtagctatcattttccaaagtggacaacacattttttttcttcttactcgtgatgatggccacgacatgcattatatattgttcatgtatctatatttcgtaccacactaataggcaataataagcacagcatatataccacatacatacatacatacacataatatatacatatgttttagtatatatattcacattttcagcgagggttttagcagcttaaaccttgtaaagagagaaagaaaagaattaataaaaatgaaggttgaagtaacctctaaagatattatcaaaccttcttctccaac

SEQ ID NO: 247596 - DNA, 820 bp, Cannabis indica
aaaaaaaaaagaaattagtatttctaaaaataaaaccaaaagcttcatctaattctgccgccaccacctgacactaccgaaaacactgaagccaatgccgacactaggactaaacaagttctatatgttaggctctctctctctctcgctatttttttcatactcaaagattattttaattttcgttgaacttatcatatttgaattatttatagtatgaaagttgtagcaattggataacatattgaaaactttacaaatgttgagaacatcctacgatgagttgaaagaaagtgtccgtacaatacgatctaaaatgcttaccctatttgaggatcgggtaaaaggcgagatgaggatcgaaaacaatttcaatcaaaaattttaaaattttatcttgggagtttggatgagggttcaaatgagctaaataagaagaagagcatagaatttagaattaaaaatgaatctggtatactcattaatgaaaatgtaaagaaacaagatcatttcaatcaacagtatgttggtgagaagtcaactattgaggttgttgaatcgaatttaccaacaccttcacctgcagttgtttttcttaaaaatgtcaatggtaagacttccacaagtgtacggggtactacgtacattgaagagtggttgtaagcgtagaaaacgattaacctttgacgatgcagtgtttcaaaagaccactcagtttggtcaaacttttcttgaacgtgagatcggaaatagagtaagtgaagaagttaatggtttaatcagaaaaatttgtatatatgtgtaggtattcaatttatat

SEQ ID NO: 247597 - DNA, 770 bp, Cannabis indica
aatcatcagaaatctaataagattgactcgtggactatgcaaaattttaactgtaaaaccacgtaaaaaattctttgtgttcaaaccttttcctttactgtttttatttttctatgtgagattatcactcttaggctcatatttagttaacgaaaatctacgttaacagtttggtgctttcattgagagccttcgtgaaaaagctcagaaaaaaccctccttttgtaaaaaagaaataccatctccttcatggctgaaaacctagaaaacgttaatacaccacctgaagaaactcctcattgttctgggaaagagcccatgggctccagaaggtcttccaacccacagtctaaacagaccacccgctccaagaggacccaacctgagggtggccccagcactcggaccacttgttcccggaggacccaacctgacgttggtcccagtacacgaatgacgcgtttgaggagaactcaacatgggaatggccgaaatcctggaatgagggatgaaggacccaatcgtgaaggcactcagcctatgggagagagcacttacaaaacgaaaaactgccaccttagacactacctggagcaggcacaacggtggaacgctgaattggagcgtgatgcagcagcagctaggatggtacaggggaccaacactcaaaatcgacctgaacctggagtgagaagaccaagggacaaacctcgtggttcacgaaccacgagacaggaaaatgcccaggaagaacatgttgggttttatgc

SEQ ID NO: 247598 - DNA, 1138 bp, Cannabis indica
agaaagttacgaccttacttccaagcacatagcattgaggttttaacaaactaccttttgaggcaagttttagcaaaaccagaggcctcaggcaaattgttgaaatggacagtggagttaagccagttcgacatcaggtataaacccaagtttgtaatcaaaggacaagcccttgcagatttcatactcgaattcccaagcgacgaagtggacattatcgcaaaagagtgaattgatcctgaagtaccaaataatgaagggtggactttgtatgttgacaggcatccaatagtgaaggatcagggggtggtataatcctcataagtccaagtaaattcaaggtacatgctgccctcaaatctgaatttctcgcatctaacaatgaagctgaatatgaggctctaatcgcaggattaagacttgctcttgagatgaaaatcaagtatttacaagccttcagcgattcccaaattgtcgtttctcaggtgaatgtggaatatcttgccagaggaggtcgtttggctaaatatctcaccctcacttgtgagttactacaaaaattttaaaaaataattgtctatagaatacctcgtgctcacaattctcatgcagatgctttggcccgattggcctcgacaagagaagcagaattattcgatgtaatttctattgacgtattaacacatccgacgatcagtcgggatgaggtaatggaggttgatatagtcaaagaggtcacctggatgaccccaataatagactacttgaaaacaggagttcttcctaaaaataaagtagaggctagaaaattgcgatatcgagccgctcgatatgtcatttacgacgataagctctatcacaaaagtttcagccaaccactgctcaaatgtatcgatgggactgaatgcgaatatatactccgcaaagtgcatggtggcatctacgacaaccatacagggggtagttcccttgctttaaaaataatgaggcaagggtactactggccaacattgtgagcagatgcatcaagttttgccaaaaaatgtgacaaatgtcaacgaatagctacatatgtaaacaaaccaccaagctaactaaattctatcacaagtccctggcctttcgcagtctggggcat

SEQ ID NO: 247599 - DNA, 690 bp, Cannabis indica
acattccaatatttttgaaaaaaaccatgcgtcataccatcaggtcccggagatttacccggatgcatatggaacagagcacgccttacttcctcctcagtgacccgatcaagaagctgttgattatgatccaaagtaatagcactaggagtaacatcaacgaccgaggaaaactctgatgcagaagttgtaacaagattcttgaaatagtcgaacataaaaacaggaagcctatcatcccacaacaccgacctatccgaatcatcctgaagacgagaaatcgtattgtgctttttcctagctgtagctttagcgtggaagaacttactattgctatcaccttcacgaagccacaattgtttagatctttggcgccaaaagatctcttgccgattcagagtctcacacagttttagttcagcatcacgaaaacgttgaatagaagtagcatctctaatatcccgaaaaataaataatatttaaataggcatattttattaaatatgtaattatgttggtaattaagtaagattatgatcttacttagggtaattattgagaatttactcaatgaaataaatagcgtaatttattaattacggagattattttgggatatgtgagtaccgaggatatcaatttttcaataaaatattttttatcgggcccgacgattttggttagaaatgt

SEQ ID NO: 247600 - DNA, 662 bp, Cannabis indica
cgctcatacacctatttacaaggcttaacagatgagtaagaacattcttaactaagatacgaccatctaccactgtactacatgcacttagtaccaccatcgtactagtgtaggtatggtatgaatcgtgttgcgagtactgttaagtgttgtaccacatacaccatgtaccttcccatactagtgctggtaacaccgtgatgtactcttcagacatcgtacactttatcaatgcactccgtaccgaattgtaaagacatgttgaattatcaaatagttaaagtttaattatgaaattgaattattaattatagtattacatattggtgaagatttatttaatttcaatatatgttaattatgctatatgtgaatttctcgtttaccggtgattgtgttcggaagcggtggaaagcgatgttgggcctttagagagtcgtattttgtatattatagaattttattaatagcggagcattgttgctaggtatttaaaatactggtatttaacggggtttgggaattgactaatttgccttttgttggcatgcttgcattttcttttagtcaatgggcatattagtcttttccttggacttttgtcttctgtgggaataaagagctgattttaggttataattggtaatatttaatttatattg

SEQ ID NO: 247601 - DNA, 1513 bp, Cannabis indica
gtgtaaatgaatgtttgaagatgaaatcatataatccttagccacgtggaatgcattagatacatattaaagaggaatgagaaaacagtataattaggttagtggtacacaagggcagtccctcacagtacgacaaagtaattgtcttttcataataataataataataataataataatatgtagggctcccctacctagttaaccaatattttcagattttaaacttatacctaataaaagagcaaaggtaccatttattcaccaaaatattatataaattacattagtacatatacgacattccatccaattttaacatttttctgattaaagttctagttacaactttttattataaattttttttattaatttttacgtttgaaatcacatattaaaatattattttcaaattttattttatagagatattcgttatagtacaatatcttctgtaaattttttaaaaaaattgaataatttacaatactgaaaatagagttttttatattctaatctaccacgcgtgttcaaaaaatttcaaacatattttacgtactctaaattattcaaaatttttaaaaatttacaaaaaatagtattataattataatgaacaccgtcaagaaaaaaaaattaaaaaaaaataattctgacatttatttttgagcacgaagattgattaaaagattgttataggtagttaacggtagcactcttaattgattgaacatagaaaattatgatctaatttaatccaagtaggttataaaattcaatcaaatctaatacaaactagagttggattagtttttaattacatttctattcggcacattttttaaaatttaattaaaatatatatatatatataaaaaaataaaacagaataatcaagcacctcgtcaagaagtacctcaaagatcccaggaatttacgaatcaagagaataaaaataatgatgtatcagagtcttcttgtagaaacaagaacataaggcaacccagaactaggaaacggaaaatccttcgtaataacgagagaaatcttgggactcaacctaggacaagtgggttaccaccgagacacccctagcgtccttctcgaactgacaaggaggaggcatacacgtacttaaatagagggcgtgtatctaacctttttcgaaggagaaggcctatccaagatgaggcaagttctagctaagggcattcaagatcctaagggcacagtcgatcagaaaggcatatgcgaggaggagataaacttcgttgttatgcttatcaagagagtatgagcaatatgaggagctatcaatttgagagttacttacgaggtttgtgagcaactatgaacgaagacatccagatcttcgtgaacatttgaatcgtagacaactcgatttatgcgagcgcttaaatcagaatgcaccttatttacgacaacaactcaatgctaacggacagtaagagaatccaatccaattacaaatcattgagttggaagataa

SEQ ID NO: 247602 - DNA, 552 bp, Cannabis indica
tccaactccaacttcattcagtccatcatctgcattaccatcacaactgcaataacaataaaaaccacaacatcatcaacaacaacaacaacaacacactccacaacaacaacaacaacaatagcaacaacaatagcaaactccacaatagtaacaacaacaacaacaacaaactccacgaaaacaacaataacaaactccacaactcacaacctaatagttatgtctctacccaatccaccatagacacggcctttacccccttagaaccaaacacagcaacaattttccaggccaacatccttcagccatccacccagacttggaacttctttgtgcaggatcccaccgttatacttttctttccccatgaaactagtcgttatcagccacaaagttcttaccaagatgggtgaaactactatcaccttgaaaaggcatcatgaaagggagcaggtagtccttcaaataaggtctactaggctatcttccatgaagacaactaagattatgaaaggggtctgtatgacttttccattaggcccggtgatg

SEQ ID NO: 247603 - DNA, 1102 bp, Cannabis indica
caagacattataaaaacaacaaataaataactaaatagttctacttccccactggtgataaggttacagctttttttgatgatcaaataaaaaaatacaactaaacagctaaaaaacaaaaatattcctgaaaaacactaaaatgacccaatacactaataaataaaatcgatatacaattactttagaactataataacaaaaaattacaacacctaaactatatttctatcaacatctccaacaattccctaagaatttgaaaaaacgaaaataataaaaaaaaaactatcaaatacaaaaacaccaaaacaaacaacaaacatacacatctattaaatatttttgatttaccttttcaattatactactctcaacaccacaaactccatcacccaactaattctcaacatgtgaatccaaattttcactctaaaatatagaaaaaataaataaaacatgttaataatataaacagacttgtaaaaaaaatagaaaaaaataaaaaatctcacaattgtaatatatatatatataccttctcaattacactactatcaccaccaaaacctccaccactttcatcaacattaacaacagaatccatatttccaccataaaaaatgaaaaacaaaatggaagcatagaacttaaaatgcaaaaaacaagcaaatcaaaaacataaacaaaaacaaataataaacactaatataccttctctaaaatattattttcaccaccaacaacttcactcgctacgtcactatttgcatccacattttcactctgaacaacaatattttcagtcactgctgtgtattgctctttaacctacaaaacaaggtttcagagtaaataaaaaaaatagataatttttgttaaacataaaacatataacaaagaatcaaataataaccttctcatcatctttggtctcaggatcaaagtcttcatcagtatcatctccactaaaatcatcataagccacactctcacttctaccagcaataagattcttcaaaacctcaaatctcatatccaaatgaactttcaatccatcttcaatcttacagtcaatgtaagactttatagatttctcaaa

SEQ ID NO: 247604 - DNA, 460 bp, Cannabis indica
aagcagttttaatcaatgactctatccactaatcagaccaaataaattaacacttaaaaattaatctatacaatcaattaagctttgtataacaaccaaaatcactttctaactcccactttttaacaatccagtactcctcaagtgtttgcaaggaggtgagttgtgtaaggccgtttttatccagtcctctaagttttgcaaaatcatggatttcaagagatgtaatagaggtaggcagtagcccttccttcagaaatgattccatatttccttcatttccaaatccatcaataataagagtggtaagatggggtaatgcttcccaattccatttcatcttcaaaaacacatcataggatatagcaagaccagacaaactaacagacagaccaccttcaggcaaactctttatcaacagacaacctttgatatagcacttgtaatcatggtattcctc

SEQ ID NO: 247605 - DNA, 960 bp, Cannabis indica
actctgaggcaggatgaagatactcatccaaaagttccggagaccaagaagaacaaagtgaataagctgaactctccccgcaaacaaaagatgtttactggcccaagtatgaagtctaatcttgattttctttatgataaggccacaatcttctttcctccattttgtaggcctcatgggaaccctacggtacttaaggggaaaagatccttcttccaaacatagagtttgaagcaacacattttttttcctctcccaaaacacctccaaagaacatagtgatttttcaagatttgctttcagacctgaaaaagcactaaaataatcaaaaatagatttgataaattgggtagactgagcatctcctttacaaaagataataagatcatctgcaaaataaagagagattatcttaaggcttctacacatcaagtgatagctaaacttgttgtccaatgccccatggtgaagtcttctggtgagatactccataaccagaacaaacaggagaggtgatattggatcaccttggcaaagacctttctttcctaaaaactttccttgaatcctgcctttaagcatcaaaagatagcttgtgattctcacagagttcatgatccagccaatgaactgagttgaaaaacaaagagctaccagaatatcctccaagaactcccaatcaactatatcataagctttactcaagtcaactttgatagcacaatgaggggtgatagatttccttctataatttttgataagatcctggggaatcattatattatgagcaatggaacgacctttaatgaaatccccttgattttggtcaacaagccacgacaacacagtagctaactgcatacatagaagcttagaagtacccttataaatggtggtacaacaagtaattggacgatagtctattgctcgagaagggcagtctatttttggcactaaaga

SEQ ID NO: 247606 - DNA, 876 bp, Cannabis indica
tggaacttgttaattcgttgcaatagataagattaaataattattatttgatccctataaatagtcggaacagaaatgtaaaaggaaccaacaaatttcataacaattctaggaataccattagctcatggagtatgtcgaatcaactacaaaatcatgttaaaaatcctctatcttttctttattgttttagtatttaaattcactacattcatttaagtttatatattcaaagtattaattatttagcctcaattaatgttaataaatttctgagttaacaataggatatacacaaaattgtcaacaataagtaaaagattaaaaagttaagagtaattaactgcagtgtaaatacctaagtttaactctcgattatagataaatacttgagtttaaaatttacggtaataatatctaagttatatttttggagcttccgtaggtatctgaccgttaagtgtgaagtcattatctacgcgtcattttcttattattatatataaattaatttttaaataaaaaataaaaaatttaatgacttggatcattcagggacttctacgtggctattgacttgacacttaacgaccaagtacctgcagaagtttcgaaaatataacttaggcattattactataaaaatttaaatttaagtatttatctaaaactgagagttaaaattaaatatttatgtcgcaaatgactcaaaaattaattgatactaaaaattaaatatttgttgttttcttaaggtatttatatataaatatatatggttattatacttatctttcgagcaataaatatggtcatgacacgtgtaaaacggtagaaaaatgaatcggctcaaacactgaaataattcgccttgga

SEQ ID NO: 247607 - DNA, 1148 bp, Cannabis indica
ttgtatttctcaagtttttgaaagcatttcatgagctaactctcaagttcagtggttcactgtattccactagcaacctttatttcttagaaatttgtgaggtgaaacaagaattgaatgttttatctaaagactcaaataatttgctagaaaatatggcagctagcatgcgaaggaagtttgacaagtattggggtgatctagaaaagatgaatgttgtcttatttcttggtgtagtacttgacccacgatacaaattggagtatgttgctatttgttttagtatgatatatgaggaaatagttgccaaaaacttgttggaatctattgagaataaattgcgtaggatgtttggtgaatataatgatatcccgcctccaccaccctctacaagatcaatagatgaaatttctcaacctatggagatagaagcttctacattaggcgcttaaagacaaaattcttttaactttcatgagacaaaaggcagtaaagagaggtgggagtgaaaagaatgaaattgatcgatacttgaatgaagataatgatgatcttggtgatgactttgatatactagcatcgtggaaacataatgctagtaggtacaaagttttgtcaagaattgctagggatgtgcttgcgtctcccatttcttcagttgcctcagagtctgctttttccactggaggtcgaattctcgatccatttatgagttcattatcttctaagatggttgaggcattgatttgttcaaagaattggttaagttctgacggcaaaccaattgttattcaagaatatatggatggagttgaaggttacaaagattgtgttgaagttcttccaggtaatagtctttccactttcaaatattattttattttattttgctttatttatatttacttatgttaattatatgataacttggtttctttatttattttgtttattagatgaggcctcctgttttacacaagatttggaagtggttgatgagtaagaatgtaagataaattttgattacaaatattttttttgttgcagctgccaactgatcaattatatatatataaacttactcataataatgttattatattttaattttagattgaaggactaatggctagagggtatcgtcttca

SEQ ID NO: 247608 - DNA, 741 bp, Cannabis indica
agctagcatgcgaaggaagtttgacaagtattggggtgatccagaaaagatgaatgttgtcttatttcttggtgtagtacttgacccacgatacaaattggagtatgttgttatttgttttagtatgatatatgaggaaacagttgccaaaaatttgttgaaatctattgagaataaattgcgtaggatgtttgatgaatataatgatatcgcgcctccaccaccctctacaagatcaatagatgaaatttctcaacctatggagatagaagcttctacattaggtgctaaaagacaaattctttcaactttcatgagacaaaaggcagtaaagagaggtgggagtgaaaataataaaattgatcgatacttgaatgaagaaaatgatgatcttggtgatgactttgatatactagcatggtggaaacataatgctagtaggtacaaagttttgtcaagaattgctagggatgtgcttgcgtctcccatttctacagttgcctcagagtctgctttttcaactggaggtcgaattctcgatccatttaggagttcattatctcctaagatggttgaggcattgatttgttcaaagaattggttaagttctgacggtaaaccaattgttattcaagaatatatggatgattgaaggttacaaagattgtgttgaatttcttccaggtaatagtctttccactttcaaatattattttattttattttgctttatttatattt

SEQ ID NO: 247609 - DNA, 726 bp, Cannabis indica
aatatccaaaggcaacaaaaaaacactcatcgcatagcttggaagagattgagccaccgttttgatcaaaatttctttaccagctcgtgatagaaatttcatctcccatccttcaattcttttccgaactcgctctttaagataacccaacactgctgacttgtttctactcaaagtacttggcaaacccaggtacaagcttccttcatccgcaatagccatgcctaaagtcctacatatgctatcacagattccttgggtcgtgttggtactgtagaagatggaggatttcgaaaaattcaccttttggcctgacgctgcttcaaacttgtggaggatatcttttattctattagcttcttgaatggtagccttgcaatacaaataactatcgtccgcaaagagcatatgagagatacgaggtgctccattagccactttacacccatgaataagaccagccctttcatacttggtcagcaaagccgagagaccttcagcacaaaggatgaacaagtaaggagataacggatctccttgtcggattccccgagaaggaataatcggccccatctccctgttctcatgaaccaccagatattcagctgaggttacacacttcattagcaaagagatccaccattgatcaaaccccaatttccgtagcattgcttctaaaaaaggccattcgatcctatcgtaagctttactcatgtctaactttaa

SEQ ID NO: 247610 - DNA, 1076 bp, Cannabis indica
aagaaacacttggtggttagattccggtgctaccactaacatcagtgtttctatgcagggttgcctgagttaccgaaagccaaatgatgctgaaagaagcatttatgtgggagatggcaagtcggtaaatgtggaagcaatagggcattttaggttgttgttaagtactggttactatttggacttaatagatacttttgttgtaccgtcttttagacggaatttggtttctgtttcttgtttggacaaattgggttattgttgttcatttggaaacaattgctttagtttatctattaattcaaatactgttggaactggttcacttatggtttatgacaacttatatttgcttgacactgttgcttcttataatgaaaccttgaatgtggaatcacgtggtactaagcgtaaaatggataatgaaaaatcaagttccttatggcacaaacggttaggtcacatctctagaaatagagttgagcgacttgtgtctggaattttagattcaattgatttttcagactttgatgtttgcattgaatgcatcaaaggcaaacagaccaaaacaaagaaattgggtgcgaaaagagctatagatgtcttagagttgatacatacggatatttgtgggccatttcctacaccttcttggaatggtcaacgatattttgtatcattcatagatgattactcaagatatgcgtacctatttctacttcatgaaaagtctcaagtgttggacgtgttcaaatcttttaaggctgaagttgagaatcaacttagcaaaagaataaagcaagtcaggtctgaccgtggtggtgagtactatggcagatatgacggatcaggtgaacaacgtccaggaccttttgccagatatctagaggagtgtggaattgtcccacagtacactatgccgggatctcctagcatgaatggtgttgctgaaagacgaaaccgtactcttaaagatatggtaaggagtatgatcagtcattcaaccttaccagaatcactctggggagaggcacttaagacagaaaccaacactttaaatagggtaccaactaaag

SEQ ID NO: 247611 - DNA, 654 bp, Cannabis indica
aaaaagttaaaaaaacagtatacgaggtaattttcctataaataatataatatttgacataaagctattatttgttatgtttttaataaaaatatttaattaaacattaagttttatattacttatttacatcttccttagagatactatagttataacaatattttacatttttttactagttataacgaatatgttatattctttgagaaattttaatattttttactataacaaatattttacattctttgagaaattttaatattttttcaacaaaaacatttatacaactgttgtatgtatttccgttttatttttagaaaaatttacataataaactaaaaatttgaaaaataaaattacaaaacatttcattttttacgctttgaaattttttatttataaaaatacctttttagtaaaaacaacaaattattttttttagttattttacagtttatttatagttattattatagttgacatgatggtgttttttttttttttatttgttgccaagagaatttcagcaaaggattgtaaaattctagctgagaaaatgacagccaaagttaagacttggagctcacgaaacttgtcttttgctagaagagcagtgctagttaactctgtgctgatggccatccactc

SEQ ID NO: 247612 - DNA, 1167 bp, Cannabis indica
ataattaatttttagttattaaagaactgggattggcatttaagtggttacattggaaaatttgcgtttttcaaaaaatgggattgaaaaatgacaaaatggcaaaattgcaaagtgagtcccattatccatatcatggtcggccactatgcaagggatttgacatttatttttccattattttaatgccaaataattctttcctaaacctaggtggttacctatgatgcatctcattccttcagaaaaactttctagccgccactttccctcttcttttcttcttaatcatagtgtggaagattgtgaagaatccaatcaacaagaaggagaatcagcattaaggaaggagaggaagagatccaggttcagatcttggtgatgctctgctatagaaatgaatcaagggttagagatctgaacggaaggagtcatcatattccgctgcacccaatgtaaggtttcctaaactttatatgtgtttatttcattgtttttgaattcatattaggatgttaatgtaacatacatggtagtaaatctagatcctggtaaaatatattcaacaattatatgatctctcgctgagtcctgataaaggtaaaccccatcttcctcatagataataggaaataattcatcaagagaaggtggagcgtcatcacattcagatgaaactacactctctacagttgaagaaactgtctttcttttatggcccatagtatggagttccattcaatctgcagaaacacatatacaaaagaaactctttttatccacagccatatatttgtatatgaaattatgcatactacagtacaggagaagcaacacaagtttccttaaaaaaaaaaaaagagagtatacaaaagaaggaaaggccaagagcatgagcaagagcatgagaggatagatgcagaaccctcaaaaagttaaaaaaaaaaaaaaaacggggggggggggggagacaaacaaacatcatggcaggccatcaaatcatcataaggtattattcaatctccatatacatatttgtctactcataacattgtatcattttttttttacaataaatcaaatttgtatgtatacacttaagtacaaagtaacaaaaaaaaaaaaacagtaaatctaggcagcctagatccacaaatcataaattat

SEQ ID NO: 247613 - DNA, 466 bp, Cannabis indica
taaaataatttccaacagtggtgactagcatccaacgtcgaagcgggggtgtctgacgactaaccactatcaaaaattgtaggtgaggggggaaccaaagggaaagagagagggagaggggatccgttctggtgggaatcgaaggagaagaagagagagggagagggagaatcagatctgtttgtcttcgaatgttagattttagggttttcaattgttagtatttatctaatatatgcatattgaatatagtttactttatattcctttaaattagatcacgtgtagggttaggttctaatgcgttcaagcttctaatctttctactccttttcagatcacggttgggattagagatattagattctagttttaaaaattcagtcataaaatctgaacctgtcttccccacctaaaaaatccaccacaagtgattaaatgacctaaagtataaattgtaagtcat

SEQ ID NO: 247614 - DNA, 931 bp, Cannabis indica
tggtgagggagggatggaaaaaatggagaagtcataggttcgaacccaatacttttaagtcattaagctaatatatgattgtaaaataccattacgctacactcaaataaaaaaatataacttcaagaaacatcactgcccattgcccaatatagaatttgtaaagaacttttacgtggtaagatattcaaaggcacagagaaattacagcaagtaatgtaggtcgaaatatctcttatctcttggtttaacggacaaataagctattatgatttaagctaacgtagattttagtgaatgacgccaagtcattatgcgactaaaacaattcgttaatagagaatgggaaagtcttttgtactaagaatggcttgtagttgatccatttgatctttttttctttccatttataatcttattgatacaaagtttcgaaaataaatccagaaaggaaaacgataactccatccaatccacaaaatcaaattgaacctaaaacctaaattcaaatttaacctaaaattataaaatcaaatttaaaatcttaccttgctcgttgtaggctatggaggtgacggtggaggctgaggaacatcttcgcgtggtggcgtagaatagagaaagctcggagcttcggtagtcgatgtagtttggggctttaagaataggagaaaggagaaataattggcattatgagttcaaatattaatgggatttgttttatttttattttattatatataaataatattttattattttatcaaatataaatgaaaagtcacacttgaatttctcataaaccaagaatttagttatataggcacactttatataaaatagatgtatacatatatatactagttagaagttacgtgccttgacacgtaaatattagttttatttagagtttaattctttgttgttttat

SEQ ID NO: 247615 - DNA, 590 bp, Cannabis indica
catttgaaacatacactctcaatcgtctatatctacatatatataaatatatgtatcatatttagtgagtactagctactagctataattatatattattaatttcataataagtatcctaagaataatcacaccaccggacccataagaagcctgcctccatagacttctttatttccttttaataatttctattaaaaaatttgatatattcactccaatatttatttgggtaattataccatgtaggtcacactttttatttttttttattattattttatgtgattttataggctgcgaattgagttaggttgcaatttagattattgtaacttgagttgccattttgcaattttaattaagttgtggtttgaaattgtgattaggatatttactatatttataatttataccaatttattacagtattaatgaaaaaaaaaaaaagaaatgtttaagtacatgaacaaatcctatttttctatacaaaattaatcgaattattattattatttttaaaaattaatggagccatatataatcatggagacgtgtgaatgtgatgtgttatatccatattaacatcg

SEQ ID NO: 247616 - DNA, 996 bp, Cannabis indica
caatatcaaaagcaagcataacaagttaagcacacaattcaaaagtttttcacgcatactaaataatatcaaagagtttagcataagttaatcatcgaatttccataggtcataagttaacgttgatacagtcatccaaaaataaaaataaaccttaattatacccataaaaccaaaataataaaaaattaaaaaattaaaaacatgaaaattgttttcccatcctcaaacttaaaacaaacaatgtccccattgtgcaataaaattaaaggagagaaaacaaaccagagcagctaggactatgggtccatagttgtatcatcgccatcagtagcaggtggaacgtcatcatgacccccaggtggttggtatagtcgtcggagctcgtcaagaaactaaggataatcaatgtatgacttcaatttacgcttgtgtacctttagaatctcacatttctcactttttatacttacaaggccacaaggaagtaactctttgactttaaaaggatttttccatcttgagataacgttacttgtcaaagatttggactttgaatgaatcaccaacacttgttgccctattaaaaactcctcctttggtttctttttatctcgaggcttctttgtcttttctttatgattagtctctcgattatcttcattggagttacaggattcaaccatattgcatgtattctcaatatcaacttgattagaagacttatacatatgaaacttgatttcttcatcattagcactcaaggttaaatggcctctttgaacatctataagcgcaccaccagttgctaagaaagggcgcccaaggatcattagcatatccttatcttcttccatgtctagtaccacaaaattagttgtaaatactagcttacccacttatattggaacatcttctattattccccttgataagttaatgatcgatctggcaatcgtaacaaaattgttgtgggttttacttcaccaaactttt

SEQ ID NO: 247617 - DNA, 818 bp, Cannabis indica
atgttattttcttattacttttaattttcatgtgatttttttatttttgttatttttatagaatactgtaaaaatataataaaaaaatataaaaaaaatagtattttaatttttctatattatttctaaaccctttctgcaactattgggctttcattttttttaaatcgaaaggtcacatttttatgtcatattctatatagtagccgaaaatttgaacctatttgaacatgcactttcgaataaaataggtactccatacaataggcatcttgggccacatttgacatcactctcagcatcatgccaatacgtggtccaacaactacaactccaatgtattttctttgtgcacacatttccaatttcatagcacatcatctaatccattcgtttgtcttttctactcatttttctattttactacattgtaagagggtagttgaacccagttcataagctaaatcaaaggctcatgataaaatcacacttggaaaattgcataatggacaagtttgatctatgcaccaataaaaatataaattgatgattgggagagaatcagcacaaattttccaaatgacaaatttggtatgtactaaagtagttagttgtacccctctagtgaagcttttttcaagtgatttagggatcttatgatgcagccataaaataattaagttgatggtattagtaatgattagatgattaccaagtaaaaagtactaacttgatgttctttcaaaaaaaaaaaaaagtgaaaagtactatgaattctccattttcaattcaaaattcaaatcctatgttttgtctac

SEQ ID NO: 247618 - DNA, 691 bp, Cannabis indica
tccaagcatgtaaaagtttccaaattctttctttaatatcaccaaaaaaatgctttttaacttcctcagaatatgctgggaggcctagtatttttcatgacattcgcttactagcatcgccagtatttgactaaaagagttcttcatggtggctggtgtattcggagaaaatgacattaccaatttatcttcattaaataatctagaagcccgatgataaatatcgaatgctcttttaattgcaccacaagatcgatcattggctcgacaaaagagcaagctatcatcaacgaaaaataggtgagtaatggaaggagcgctttgagaaatagacaggccttgtagccgtccaatagcctcctcatattgcaaaagccatgagagaccttcagagcatattaaaaataagtaaggtgataaaggatcgccttgacagagtccacgttctggtataaccgaatctttaactttaccattgatgaggaatgaaaatgaagtggtgtgtagacaagtcataataagagaaatccatcgaatgttgaatcccatttctcccatcacagcagctatgtacgaccattccacacgatcgaaagctttacttatgtcaaagcgtaacctttagttcctctctttctatgcttcaagctatgaaccatatcaaaagaaactaagacattgcccgtaatca

SEQ ID NO: 247619 - DNA, 654 bp, Cannabis indica
actaaaaaatttagaaaaaattacaagaaaacactaacatggaatttttaaaatttttacgatgtgaaccttttatttacaaaaatacttcttcagtaaaaatagtaaatttctttttttgttatttgatagtttatttatagttgtattatagttttcataagattatttttctatttgttttatagtttatttatagttgtcacgaggttgatttctcgccatatttagttattttcttactttttgctgagaaaagtgtatttatataattttaaaaactttacaaatgtatttttttaaatacaaaattttaggttgtaaaattataaataaaatattttaaaaaaaaatagtactttgaaaattctctaaatttatttgcacatattctttttcttttaagaaagataccaaactattaagttgaaaaatacatctttttgtatccattaataaaaaatactctcatattatattttatatacccgattttttgagtgggttacccaatataccctcactctttacttaagtctagcatataatttatattaacctaaggggtctaatgggaatattatctataaaagtgggtatatattaaagaatatgaaaatagaggtaaaaattaaaacaagtaaagaaaagtgg

SEQ ID NO: 247620 - DNA, 768 bp, Cannabis indica
aggacttgattagacattatggaaggaaaagttcaaaagttgggtgtatgatcaaattggaccttcaaaaagcttatgatactcttgattgggactacttggaagaaattcttcaagcttttcaattccctagaaaatttatcaagctaataatgatctgtgtgcgcacacctaggtactccctcatgttcaatggatcacttcatggataatttgaagggacaagagatttaaggcagggagatccaatgtcactactactttttgttcttggtatggagtatctatcaagaataatgctgaagattgaatccaaaccagaattcaaatatcatgacaggtgtgcagaattgaagttgaatcatttgatgttcgctgatgatgttatacttttttgtcatggtgatttcaagaatatatactatgttttacaaggccttaagcttttctctagttcttctggacttcaaacgaaccctcacaagtctactttctattgttgtggtatggatgatcatgatgttcaacgtatcattgacagctctgggtttagcaaaaaagaggtacctttcaaatacttaggtatccatatttgtgctaaaaggatttcgggtaaagaatgtattgtgctagcagataagatgactgctaggatcaaaacatggagttcaaggaatttatctttagcaggaagggatgttcttgttaactcagtccttatgtcaattcattcattttggagccaaattatggtactacctaagaaga

SEQ ID NO: 247621 - DNA, 1582 bp, Cannabis indica
ttgatcttgtctatagcttcattggtcctctagattaactcacgacccagatatttcctttctctggtctcgtctgaatgaattgggtaatgatattttctaccatacaacatctcatagggagacatccctattgtactctgttggctgttgtcgtaggagaattctatcataggcaattatttactccatgaatcctcaaagtccatgacacaggctcgcaataaatcttctagtatctgtattgtcctctcggactatccatcagtctgaggatggaaagttgtactgaacttcaactttttaccaatagctctctgaagacttacccaaaactttattgtaaattttggatccctattcgaaacaatggattttagagttccgtggagacaaactatctcttttacgtacacctctacatactgatcctctgtataggttgttttcaccaacaagaagtgtgctgacttcgtgaaacggtccactatgacccacacctaatcaaacattcctgtagttctaggcaacccaaccacgaagtccgttgtcagatcctcccatttccactcgagaagtgttaatggttgcaatagccctactagtttctgatgttttgtcttcatttgctgaagtgttaaacccttggacacgtattccactacatctctcttcattatgcaccaccaataacaaggtttcagatcttgataaattttggtggtacctgggtacaatgaataaggtgtagtatgagcctcacccattatttctttcctaagctcaccattgctcgaaatacaaactcgagccttataaagtaaaattctattgtttgagattgaggagtctttagcctgaccagctaatacttcctctcgaatctcaactaactcagagtcttccaattatgctcctctaattctttcaaacaagtctggttgaagagttaggttatgtagttttccaaccacgaattcaataccagccttaaccatatttgaagctaactatagagagatctttgtactagtaaaaacctaactaggaccttttctgctcaaagtgtctgccaccacattggctttcctgagatgatacaaaatttcacaatcattatctttgaccaattctaatcaccacatttgtcttaaatctttttgagtaaagaagtacttgagactcttgtggtctatgtagatctcacacttctcgccatacatgtaatgtcgccatatctttagggcaaacacaacagtggcaacttttaattcatgagtttggtaacgctgctcatattcattcaactatagagaagcatagacaatgaccctgtcagcttggatcaaaacgcaccccagaccttgtctggatgcatcacagtataccatgaacttatcttgatcggatggcaaagctatcactggtgctataatcatctgttataactcttgaaagcttgttttacacttgtccaaccacacaaactgttgattctttttggtcaattttattaacgacatagaaattttagaaaaatccttacacgaaacatcgataatatctcgccaatccaagaaaa

SEQ ID NO: 247622 - DNA, 630 bp, Cannabis indica
tggaagacatatctgcaaaaagaaagtaatgaagtcatattgcaatcatcagcattcaatgcaagacaagaataaggtgttataaactataaaataccatcatcttcaaaagaggaactgtcaaaatcctctataatggccttgcccttgcctctagatgtaggcaaggggcgagcaggtccctcaaaagtcgggcctctaggcccgatctagagagaagcaacaagaccgctgctggccaagcaccggtggaaggccctctctttcctctctagattttatgcaatgcaagacaaaggcacatcatcatccaattaaggaacctatccatctctaggataggctccctctgcagttgagactcccgcaactccaaaagtaggaggatacagaccatacttttggaagttggccacactgctcaactggagtatgttcctctgctccactaagagagacatgacgtggttctccctatccctcatttacaatatgaggatagagcttttgaagaatggcacccactagaactcgtagtgtccaatcctctgaaggccataagcaataaagtacttcttagcgtacccaccaacttagagcatggctacactattagtgtcacccaaccat

SEQ ID NO: 247623 - DNA, 1026 bp, Cannabis indica
tattcagagatactgttgtaagtgctctaagaaaaagaatctttctccttgttcttaagtcaatacaaataacaaggattaggctattaccgaactgctccaggctgaacctctataaaatttctgtgtctttaaatttctttactatatttcaattctgtttaactacttgtcgcttataaaattagactcactttcgttggctaaaagtgaagtcaacattactaatattatattatattattattatatatgtataaatgaaaccttttcagtttcgtttaagtttgattatatatatatattaagttttatatataatataacagtaaaagaacgaaggaacgaacgaatgaaccctcattctccctcctttgacaaaaccttctctcgtatatctactttctttgattttcaacccaaaacttagcgatctaagctctggtagtagaaggatagcaaatccttgaagagtgaaagcttaagggccgagattatcggggatagttttccacttgggttggccggcatgtattaacctggattaaaggtaagaaatgtatattgtactacatagtatgttgtatgtaatacaattagtattgcaatgaattgattaatattgagatatagttaataccgttatataatgaaaatgttgatttgatgagtattggtaatgtgataatattatgcatttgatatacgggctcacctgattaggtgatgcaattttcctggcgacatactgggcgtaagtacggacgtgagtgatatatgttgagtactgagtgtaggtacgggctcacctgattaggtgatgccatttttctggcgacgtattgggcgtaagtacaggcgttagtgattactaagttgcagtgtatatatataaaattatataagtgctaattgatggtacgtgtaagtcctaatatttttattttttaattttttaattacataatgaaagtaaaatttttgtttttgcaaaacaaaatgtgttcagtaatcacttttattttt

SEQ ID NO: 247624 - DNA, 655 bp, Cannabis indica
tcaatctagttcctcacgcaccgctattagcttcagcgaatgcttgtatctcgtctagacatcttccagtcagcaacttcagatttactgtcagaattgtcagaggatttgtggttgaagttgccgaagtcgtggaaggagcagtcatatttgttctcctactccaaactaacataggagaaaaggttcttttttttttcaaaaaaaagaactaggagagaaaaaagaaaaaagatattccttaatgtttacaatatcctaccttatcatttttttttgattgtttattattattatagctgttgttgtttgttattactatgaacgcggtttggaaaattaacttggtcatgagtatgactgtggtttatctttggtgttccctaattatttgattttacaggttttgcttttattttttatggaggatgagaaagatgttgattatttttattacttttttttctaggttcaaaaatggtttttacacttgtattttgtttctagtgtaattaaagaacaagcaactaaggatgccgtcacgacatcgaatcctagtgtgggtggtagtataagtaaggggaccaacaatagcaacctggatcacaaacgtaagtttgaagctctcggaacaccaggaagtaatagaaagttt

SEQ ID NO: 247625 - DNA, 970 bp, Cannabis indica
gcttctgacatctttccatgacaattgcatttctcaccaagaacgaggttaagttcatcaatggctaactgatgatgactgcaatgcttggtgtcgctataataatatgttaatttcttggatcattcacattttcttctaaaatatcagagataatttatctttattatgcttccatgatatagaatgatctttataaacacgtttcattaaaacaatgggccttttgttttaggctaaacgattgatgcaattattctgtaaagaatctaccaatgttacgacctatttcactcgtcttaaagaaatttggattatggttaaagaatatcgtcctatttctatcgatccttaagtataaagaacaagacagggttcttgaaatttttatgtctgaatgatttatacaatactgctcattctcatctttagatgcaagatccatttcttagtcttatcaaggtgaattatgaattatacaagaggaatgacaacaaagaattcatcttatctcctcttcttccagtgagagttcttattcttctttctcgggataatttgtcacttttactagcacagtttgctactgttttaccagtgcatttcgcaaactgcgttggcaaagaggtcaaagttttaccagcatacatttgcagtggcaaaaatctaacttttaccagtgcatttacgcgctgggaaaagtcatttttgctagcactttttattttatgcttgtaaaagttctaataccaacgttgatttgtcaacccccttttgccaacacatcacaagtaaattctattttaccagcgcaatactaactttttgccagcacattttagtgacatttcttatagtattggtgcatcacattttgggagatctaagataacctatcatcactgtcgaatcactggccatactatttctaaaaattgtaaacttcttggctatccactaggccatacat

SEQ ID NO: 247626 - DNA, 1071 bp, Cannabis indica
tagtggatgtggacaaggatacaactgaagctagttttttatctcacttaaggctccaattgatgggtgatgagttcagtttcatacctgaaaccataactctccaacacgataacatggatttcgaactaaaactcttcaagcttaatgatttaagctacagatttcatggatggtttaatacatgttggtatcaggactttgatcatgagaaggtgtatggcgatcgggatggagctgaaggggaaaagaaaaaaagatggagaagaagaacagatagatggagagaacttgtgagagtcaaacttggaattatgtgggttgtcgacctgcgagagagaacacaagggtcggatagccggagatgtagccggtgatggtgataaagacgatgtggaactggtggagatcgagatggaggctgccgacagtggagagggagggtcgaaggaagtggaaaattcagaacagatgcaggttgagagcattaatgaggtcacaagtgccgatgataggagctggctttcgataatcgaatcgcatgagattgcgattccaaaagacgacagaagagaagatgttgggtcgattaatattctgctggtcttctctcgattaatgcgtgacctaaataggccttccttcaatattcctcgtacatgtccctttattataattagggacacgtgtacactcttgggagataaagatcaaattgaattgggccctaaaattaatttgggccgaaagtggagggatgtcaatgataagtttgactctaacttggcctggtttagagaaaaaaagggagaggaggccattgatttattaccataatgggtcattcagtattttttggcccaaaacaggattggaataaggcctgagattaagacttcttttaatcccaagcttcagagatgggatacgtggggtagaaagaaaagaagaaatggccatatgtgttaagaaaaatccagagtagattataaatgatttttttgaaggaagattaatatcaattactgttgggttttgtgccctaaataaaacccatttcaatataattag

SEQ ID NO: 247627 - DNA, 703 bp, Cannabis indica
gctcacccttatcaaataaccatgtacagaccaaggtaagtgaaagtctaaaatgccggtggcgagtggaactttagatgcttgtgtgtgtgaacgctcgctgtgggccatataactgcgggcgatctagggcgctttgcttatttattaacgctattaaatttatgtcgtaattatttttagttattatttattatgtcttttgtacaaaaattggccagttatgaattttcaagtattaaataaaaatacgacattatgattttttgcgtttaacgcttgtaaataaaatgaatttttttataaaagtacgggcgttacaattatacacttacattatcttgtccaacatttatgatgtgctaggaaagtgggaggagaagatgaaagtaaggaagagactaaggagaatcgaagcgaaaaagggtcccggttgtagttggattgagttaaacagcagagtttatgttttctctgttgaagataaaactcatccttattgtaatcttatgtatgatacattggagcatcttacagtaaatacaaattttttgatgcaatttctattttgtttctatgccaacattggtttctagctcaataaatgcattttaaccttattaaccaaattctgtattagcttatttgctgaaaaaaccatcacattatcaaaactatgcaagcgatggcggtgaccgatcaa

SEQ ID NO: 247628 - DNA, 582 bp, Cannabis indica
ccacggtgaggtcgaaacgatttagtaagacctccatttatcagaacttggaaactaactgtggtgatgcattccatgattaaatcacagaatttggtacagaagccagaggcccttaggacatttctcacaaaactccattcaagcctatcacaagctttagacatgtcgcattttatccccacaaacgcatgtctcccacttttccttcccatatcatgaactatctcctaggcaataacaaaatttttagcaatccatctaccattgacaaaagccaattggaaaggggaaatgatcttctccacaaccgatctgagtctagatgtcaagatagtggctacaatcttatagcacacattacataggctaattggtcggtagtcatcaaacttcctcgcattactccggttggggatcagaacaatgaatgttcaattaacttccctcgtgaatttacccgagctaaagaactcctggacgaagtccacagtttgtttctccacaatatcctagtgagttttgtaaaatttagccgggaatccattcggaccaggcgacttcagcagaggcatagcccaa

SEQ ID NO: 247629 - DNA, 506 bp, Cannabis indica
gcttaatagaatcaaaacaaaaaataagttgcagtataaagaatttgagaattctaaatgctttctatgcaacattgaagatgagacggtagctcacttattttttgagtgttctttctctttggaatgcttggaatagctgctactacgtaccttagaaagaattgtaaggtggataaggagggcaaaattaagcaaggtgaagaaatcaatttttattgctgttattcctcgtctatgaaatatggcgcacaagaaataatgttttatagcagaattctaatacaaatatagagattgtaattgctaaaatgaaaaacatagtaaaaagaaaaattacatgtatatggttaaaaaaatataactagaagtgagaaagaattgtttgataccttgtaaaattttataaatatttagatcctctttacttaaaaaatgctattaggttgtatataaaattttgagcaatacacatacatgattcatatgaaaaaaaaaaaaaaaaa

SEQ ID NO: 247630 - DNA, 774 bp, Cannabis indica
cgcagtagaaaatgaggcttctacatcaaggctagggtcccaagtattgagaagtaataggcaccctttaacattccacgggctgttgcccaaagctttaagtctatcatcctcattttcaaaaactaactcaaaacagttaaactttttggtggtcgtctggacaagtgatactgaaatatgacatttccactccttaagagcatagcttttaatgaagttctcatccacacactgaggagcaattagttttccaaaaaggcaaagggacaacaaatttttgatagtagaagcatatgcatttaatgaaatcgtgtcatcaaacaaagaaagatttctacccccacccaccacctcagtaatcttaactaactccatgacactatactaacctccaccaactacactcaacaacacgtgggcaacacaaaaactacaactgaccccacaccacaaggtagaaaatagaaacatgcaacaaacaccagacacaagaaacgatagacaaagaaacaagtcaagggagacaaaagggaaaagcatgagtgacaaaggaacaaagcacacaggcagaaagaagaggaatgcaagaaagcttaaaagagcaataagtagaaaagcaacaaggaaagaagtcaagggagagagaaggaaacaccaacagatctacaagataaaacacacaactggattaaaaaatgaatgaacacaaaggaatcaaaaaggttcgttgacctatagtggaaccagaaaacactcgaagaagacatggta

SEQ ID NO: 247631 - DNA, 746 bp, Cannabis indica
ttcgaaagggttgaattttgggtaagggtccatgtttagtaggtaatactaatacggggtttcaataaataccttgttgtaaaatccaaacatttacttatatagtggttgggtgggttgatgtacacgtaatgaggttcatgtacacgcaataattattttttcttaatttaaccatttttatagttaaacaatgtgtatattggaaataaatcccattagtaatatctcattagtaaaagaaatatgatgtgacatatataattaaaacaactcgaagtacgttattttaataaatgatattttgcatattaaaaataaaaataaaagcatttaaatttatgatgtgaaggaggagatacaatgggaaaagtaaaaattatgataggacgtcacttaataagtcacctaattaattaaaaattgtgaaaatattcgatgtggtgagaagataacctttttgtggtacataaaatatgtattttttagcatttacaatttcttaactaaacgttcacataggttgttaaataaatgtgtccacatagtttggttaattctttttcatcatgtataatttaaaaataaaatcacacaatatctgcaggtcatcatttagtgaaattgatttgacctaagactgtaaaaaccctgacgtactttattgaaaattaacttatttaataaattgtattcaattattccaaattttacaagaaaaatgtcaattaataatggatacgtgt

SEQ ID NO: 247632 - DNA, 558 bp, Cannabis indica
aggaactaacatctttatctattcgttgtgtagttttgtatctttcccaaatgatgaacttattgctcccaagctgagttcattgcggattgctaattgccgtaaattgaaatggttgccagagaagacgactatcctctcagctttgaatgaattggaaatcatagattgtccgttgctagaaccttttcctgaagatgcacgtgaacgtagtctacctgttactttgtctagtcttgttatatcgtatgatgaacttttaaggatgaaatcgaattgggaaacattaccccatcctacctatctttctatttctggtaatgaagaagatatggagtcatttccggaggaagggctactgcctaccactattacctctcttagtatctcttttttttcaaaacttagagggctggacaaaaatgggcctacacaactcacctccttgcaaacacttggagtcttgttttgccctgagttggagacattgtcagaagaagggtttccaacctccctcacctctttgagcatacaccgttgtcctctggtgaagaaaaa

SEQ ID NO: 247633 - DNA, 500 bp, Cannabis indica
agctaatattaattttcaatttttcttatgattaattcaggtaacttgtattattatttttcgaatccattatccaatctaaattttcttaagattttgtgttaattaaatttaaatttttatacttaattttttatctaattaaaagatcttttataataaaaaaaaaaaaaaagcaagaaaaagataaaaaatgttgagttaatttgtcttgaatattttttttatatatatatttttgatacagtgtaaaataagatattttttttgacatttttaaattaagtagttaaatttaatattgaaatttaaatttctttttcattatttgttgttagatgaaaatttaataatttaatattttaaaattaatatttatacttaaatttattaagtaattgagtaatactatatgttccttggtgactatatgtctatagagtaaaaatcatatatatttctagtaaaaagctaaaaagcttagaatgctctttaagggg

SEQ ID NO: 247634 - DNA, 946 bp, Cannabis indica
cagtgatttggagaagggaagaaacatttaatattccccaagtagccgtccttctccaaattcttcatcttggcatgggttactatagatagaggagaaacccaccgagctcctaaggcaccttgccttctttgaggaacaacctcggtgtattcctcggtaacatagtcttcaccctctaccaagacttcaccagcctcggacacgggttccccttcctcattgtaacccctaaaggggaatctcagagcaactccctccttctcaagtttagatggagaatcaggacgaacctcacgctgatcctccacctcctagacttcgacgtccccctcataatcttcctcctcagtagtaggccgggcttgctcagcactggacatcgtggtaagccgagccacttgaggatcaattaaagtggatctctgcactgtttgtttgctacaggccatcattctattcctggacagagattgattagtgtgactagcaaccgtcacagcgaaagtggctataggcgtacctacagaaacagacttgggtggcctacgggtatagtgtcaactatattcggtcggatgatgtatgtccaactggacgacaaatatgtctgccaccccttcttgagttcccagatgaaacgtccgtagccttcaccggcgatctagtcgggataaaaatggtgttgcacctcaggttctgaagaaggtgtatgtttcctgcttatcttccagtcctcaaagcttgagttggaaagaccatcacttgatgaggatggactggcacaaagacgaggatgatcgtcgtatagaagttgaagaaggtggtggtggatatgatgttctcctcccaaaaaatcaccagggttcatctacaaaaggtaggacacaagatgagtatttggttgggatatcgaataaaagcaaataaaatatactgaccaggt

SEQ ID NO: 247635 - DNA, 896 bp, Cannabis indica
attgccatcctgaccgtacgacggtggttcatcacagctgtctcacacctattctggcctataaaaaccagccttattacttcatttggttactttcagcactttatcaaattttcttagagttttctcagagagaaaagaagcttcaaacaccatagattacttgcttttattccttcaacgttgccagtctttgttctaccggcgatcaacaccaacccccagccttcaaacttcatgtaagttctttgtatactgtatacttgtttactgttcgtttatatagcatggtttatgatttctgggttggatgtcgaacttctagggatgggtttgcctgagtttctgtatgatgcattaaattcctcttttttgcgtttacatttctccttttcaccacgtttctgttgaggaatcatcttcatcttacgtcataacatctttagggcttagagtagatcttgccttttccgctttgcctttttttccttttatttttttttcttttttgcaatgtcactgcctttgggattcttgcacccgattcttgccaaggaaaacctcttggggttttcttatttggcaagtttccggaggggacctctttccagcggttaggggacccccattccctttttcgaacattagagtttggtttggggcctaactgctggattttctcaattttttcagaaccaacatgtctgcttccgcgtctggttctaagtcttccaagaagggagaggttcaactagccaccctggaggaggtcatgcagggtcccgtggcccaggagaactataagtcccgtgctaacggatgggaggcggctgagctccactccacactcacttgtgcccaccaacttgaaaagattgtggtggtggcaggcatca

SEQ ID NO: 247636 - DNA, 918 bp, Cannabis indica
ccttaataatagtcgtgtcgtgtcgtgttgtggtggtatttatctaattaaatctacattcttttgctcatagtgtattgatccacactaagtgtattaggaaacttacaaaaatattcgaatttgagttaatttttacaaaatactcacacggaaaagttttcaaaaatattgtgcttttataaaacactagtaaaacacaaaacagaacaactcaaaacaacagtagaacaacaaaaaaaacaccagtgaaaacttaacacagtatactgcagtatgaaacttataaaaaaacacagtaaaaaagtaaaaaaatttgcctgacagtatttttgtaaaaaatgacaaaagttagtataccatgtaaatttcccttttatattttgaatctaatccaatcagtacataatagctcaaatccaatccaatctaatttacaaaagtatagattagatcgattattttaaattagttacttttcaatattaaattatttaacatatctattaaaaatatatttttttttcacataactaatagcaaaacaaaataaatttgttgttatttcatgtctccaaacaataaattaaaataaataaaataacaaatttaaaataaaaaaatatatataatacatacaagaataggaataaatatttaatctattaagttttgaaatttatttgtattatatatatattaaatttttaagttactttttattttaatattaaaatattaattgtatgtataattttttaaaaattttatataaatatatgtgggattaggttggatcggttatttttactatgtcaatcaatattcaaattttgcactaagttgtagtatttttaaaattttctaatctaataccaatccgtacaagtataaatatccgtcactttttacggattt

SEQ ID NO: 247637 - DNA, 957 bp, Cannabis indica
gatcttttaatcgacgaattttgatcttgtgaaccatcttctcaaatgttgatgttggtaatgactttgtgactaagtctgcaagattgccacttgattggatttgttggacaccaatatagccattcaccttaccttaagatcatgagttaaaaagaatttagtgaaaaagcatttagctctatattcttgattatagctttagttgagcaatacattttgcgttatcttcatagagaattgctaatgttgatacttctttattgagtgtaatccttatatttctcgaatatgctatgtcaatgatctcactccaacatattctctacttgcttcgtaaaatgcaagtatgctaacatgatttaaagttgtcttgttaaaaaccttgtcaggaaaacccagtgagacaaaacctgagctaaggaaaaaagagtgctatatatatttcatattcataactatttgtaagttgcctcgttaaaaaccttactaggaaaatccaatgggacgaaacccgagctaagggaaaaagagtgcaacatgaatatgtctccccctcatgcacatatgatccataattcttttggtgataatatatctcataagattattgttatcacttttaaaatatcaccatatataatctttgatcatatatttttataactcttccagagtatgtgttgacttctaattatagacgaggggttcctgcaacatcagtatttatcctactaattgtatcattcatgtgtgtatacaactttattcatactaaaatttaaaattttaagtagatatgaacataacacataaatgataatataaattttcatttgtgacaattatggtactctaagaccatatatttgtttcattcttgctgtatgatcttaatttccatatcaaacgatcatatatctataactcttgatgcatatgaagtacttcatgact

SEQ ID NO: 247638 - DNA, 1550 bp, Cannabis indica
tataagagctctcgtaaactattgttgacttgtagttaatatatatggtatagtagatatatgtctctcaactgccaccatggaccatatagttaacatgttaattatattacaattaacctaataattaggctaatatataaaaaatgagagtgagaaaatacataattacatatatatatatatatagagatttattttgttttttaatttttgacactagagaaattgtatcccattttataatatatatatatatatatatatgatatggtatattatgattataatataaaagctctacatttggattgaaatttttggcacagtacgaaattgacacgagtaaaaaatatgaatttgactctaatatgacacgaataatatgaattcttaaacacggcacaataaaaaaagtacgaaagtacaataagaaaacatgaattttttaacacgaatattttagacataaaaaatcaagcaaaactattaatagggggttgaggaagctctgaccaccctaaaaaaatatttccaatatatatacacataataaattgtacgaaaaaaatatatgcatttatatataaaaatttaattagtactctttttttcttacatattatagtttaaacaaaaatattacaccttataacaatatatttgttatcatatagagtattgctattttgtattagtggtgctttgctagtactactatggtgacactttgtaaacaactagcaatgttctatactagttattacataaattaatcaagtgagattcaatatttaatttataaataataatataactttttaagtagtagtagatactactgatgccttttaatattgcaattatatataatatatctccacataaaaaaagaaccactactaaaaaaaaaaatagatttcctgaccattttaaacagtcgactaatgtattgttgtcggtctctataatcgtcccctatttgactgtcgcaaaattggatagaataagcgacgatttaaaacagtcgacaaaaaattttatcgacggtttcaaaccattggcaatagtgaaaactatagccgataattttgtaccgtcacattaaaaaaaaaatagattgcctctcaaaacattcaccatatgtgcaaaccagatgcaaaactagaatccctacacatctcaaatcaaagaacaacacaatagataaatacaaatgaaagacaatagagatagcctgaaaataatattgacgaacggtggttgcgctagtggttggaggtggcacctgagatgatggtgcgtcgattggtgatggtgccgccgacgtggtgtgactggtaggcgttgttgactgtcaatcgaggtggtgcgattggaaaggatattaccgagatggaccagctggtgcgagtgtacgtggcttcgtctgactggcggttgctgctgtacgctccatcaatggagagggacgagatagagcagagggagattgagagagcaaatgagagagagataattgaaatgaaaaattaatgagatagatatct

SEQ ID NO: 247639 - DNA, 1622 bp, Cannabis indica
tatgatacaacaaatccattatagttaggtggaaggttgttgagagtgaattgaacccattgctcttttgatagatcaattccagcagatttgctttttggattttaagttcaacatgagaaagtgtgaattgatgctctgaccaagagacattttcacactatagagtttatttgcaaaggcatgtaacctattaggatcggggtgtaggttgttcattttgacactacaaatatcaataaatagaaataaattacttggttcaattaaattcatacacaagttcagaaaataacaagtatggaaacatgtttgaaaaaataccaaaataaaaaatatttaattattttccaaggtttctaacaaactgatacagtgtcccgtattaggggagagtcaaagatatcatccattgaatagagtagtcaactcatctagaatagaaaccattctagcaaccatttattcgatcaaaaagagaatccgatgttgtcccgttttaggcgagagtcaaggtcattcctatttcatgagcttctaccattgtttcatactttgtaagccctactcttaatagtcactattaggatggacgttactaagaataaaagacttacaataatacttatctttcaggattctatgacattaaattcctaatgaacaaacatctgttagggataaatctcactaaaacaagaactatgtagaaccaacaatggagatcgaatatctctttgattaaagctcattatttgaaataatatatttttgattaatcacttattttaaactatatattttaatgatgaaaattacttaatttaagttgatttaaaattaattaaaaaaaataattttcaacttcaatttaatttcaaaaatctaaatatatatagaagtatatatataattttgaaatataataaaataaatcctaaaatatctaattcaagctattctaaaataactaaattttcaacttaaatcatttttcagaatttaattaaataataaattaagtatcttgaactaatcaccttcatttgaaaaaatatccctatttaagttgatctaaaattaattaattttcaacttaaaaatatttttaaagaatatatgtgttatacccgaaattcagctatacttcaaaagatgacacatgtcaattagtggaatatgagccacctgatataataataatatatcattttatgcaaaaaggaataaactcattaaatatataattaatagagtatattcataactcgctggctgtatagtcttaggcgaggcaaggatacaaaactattaatatctgtattgatgagacaccatcctgactcaaaagacatagatccaaggacaagattcgttttaaaagaataagtgaagttactcgaagtatccacaaagagtatatagcgagacatccaccttgctattcataagaaatattgacgaggtaaatcagttattaaatacttagcgtattttatacattacaataactaagtgtaataacttagaaatatgcaggacatgattgtccagtctgggaggccttatggtcaaagagcagttcttaagtttgcttaatacactagtgctcatgccattgc

SEQ ID NO: 247640 - DNA, 874 bp, Cannabis indica
aaccagcccttctctttccttcttcattttttcataccttaagtgatagagtgagtgcccacacacatcaagtggtatctcaatcatagtgtgtaaggctgcgaagaatccaaaatcaagagaaggacattcaggctcagatcttggtgatactctgctatagacaggatacaagggttagagatctgagtggaaggagccattaatattccgttgcacccactgtaaggtttcttaaactttatatgtgtttatttacagtgttttagaaattcatatttaggatgttaaataacatacatggtagtaaatttagatcctggtaaaacatattccaacagaatcgacttcacatatttgctcgaaagagatgtgccgaacagagcatcgcatatatttgcacggataaaggccttcctaaccagatagtcgatggtccgaacagcatgccaacacttagcagctttaacacgtgcatcgatagttacagagtaatccctataattctgggatcatatcacagagatatggcaagctgtccagatcccttaataagtgtattctgtatttaatgtgtaattttgccaattatagacattgtaaacagaagggaaccttttccgttaaagcttatagccctaaatagtgatatattctcactgggcaaaaggtcgaaaaactgatctaagagtatatacttagagatttcattgtaaaagctcttacaaaggaatcactgcattctttgttcttaagtcaatacaaatcaaggggagtaggctattaccgaactgctcggggccgaacctcttaaaaactctgtgtctttatttatttcactatattacatctatattatactacttgtcgctta

SEQ ID NO: 247641 - DNA, 1390 bp, Cannabis indica
ttcagtcttggctacaatgttttgaaaaggagaaggagtaaagccttggtgaaaatgtccgctaagttttgttagagattgaacgtgaagtaacttgagtgtcccttgctgaatttttttccgaatgaagtggtaatcgatttcaacatgctttgtgcgttcatggtaaacggtgttgtcacagtatagaatcgtaggcttgttgagggagatgccaaaatccttcagtagagctatgaaccaagttacttcagacgttgcattggccattgcacggtattcggcttcggcagaagatcgagaaacaactagttgttttttcgacttccaagataaaagggcccggctaagaaacacacaatagccggatatggatcgacgtgtgtcttggcatgtgccccaatctgtaaaaaaagaaagttgtacatttgaaggagataaactagtttcagcaaaggctaaaacatgtggggtggtgttggatggaaaaaagaggccttctccaagagtgcgtttaagatattgtaggattcgatgagtagcttggagatgaggcactcttggacatgttaagaattgactgagatgattgacgacataagaaatatctggccgtgtaatcgtgagatatacccaattaagcttctataggtagtaggatcgggaagaacctttcctttgtccttgttgagtttaaggttaggttccattggagtggaagctggtttagctccaaggtaacctgttttcgcaaggagttgtaaagtgaatggtctttgagagatggatattccattctttgttcttcctacttctaatccgaggaagaaccttaaagatcttatatctttaagtgtaaatttttgtccaggaattgtttgaagtgggtgatagctagttggttattgctagcaactatgatatcatcaatgtaaatgaggacaacaagtaagagtgtggcggtgttcttgataaaaagagaattatcagatagaaattggtgaaatccaatagatttaagggtggtacttagtttttctaaccattgtctagatgcttgtttaagaccatagatactcttattgagtttgcaaatagagtttggcggggccttataacccggagggatcttcatgtagacctcttcatggagatcagcatgaaaaaaagcattgttgatgtcgatttggtgaacatcccaattgtacatggcagctactgcaagggagatcttgagggtgttaaattttgccacaggggcatatgtttggtcataatcgatgccttgtttttgattgaatcccttggctaccaagcgagctttgaatcgaacaacttcgccttgtttattgtatttgactttgtagacccatttgcatccaatggcttt

SEQ ID NO: 247642 - DNA, 834 bp, Cannabis indica
gactctaaggtcattccaaatggcagcagcagactcatcatagagaatgctagaagagatttccttagatacagaatttaaaatccatgaaataaccatgttattgtttcttatccatgaattgtaaaaaatttgatcagaaggtaagggtttagaaattgaaccatacaagaagccgatcttgttcttgacagagatggcgagttgcatagccctgctccaagctacataattgtcctaccccgtgagtggttgagaaataagagtatgtcctcgattgtctccatggtggagaaagtatggatttgcaggatcttcgagaggatttcttgaagctgaaacctgcagagaagagttctgggtttctcccatggtggtctggatcgtggcttcatcttgagtgccttgattcgattgattattggtagacatgtcaaacaatcaaacgaggagaaaatcgattgaaatcttgacagaaaggaagaagagtgcaacggaagaagacacagcttcgtcggagaaggtgaagaacacgacgcagctagaagggaaggatcggacaggaaagactatctttcctgctctgataccatattacaaaaaagaaaagaaaagattttattgatctgaatgaattgataaaagaacagatggagtacaggactttatataggacattgctacaactaacttaacattaaatcagaaagttagttaaagaaactaacggatacaaccgaaacagaacaagaaaggaaagaaaatatagatacagtaataacagaattaactgtaactaattaactaccaaagacaaataaacaaatcctaata

SEQ ID NO: 247643 - DNA, 966 bp, Cannabis indica
agcagttgcttggagcacaattttctttagtaaatcttcaggaggtttgggctttcgaagcatttcaaatttaaatatggctgctatgttcaagtatgtttggactattgctaaaaaggaggacaatttatggatgaaatgggtgcacaatgtgtatataaaaggaggggaattggagatcttataagaccgctccaacagccagctggtattggtgcaagatggtagctataaaggacagtgaaaaagagttgtttaacttgaatcaagcttcaaatgacagctacaaagtgtttgttggctttcatgctctttggccttccactagcaaagtggatttgagttctatagtttggagtcgaccaaacttgcctaaacatagttttattttttggcttaccatgctgttatacccaaaattcggctggaggacacgtgttaagataaagggaatgtgaatcggtagtacaagatctttttatggaataactcatgaattgcgtaagtactagagtttatttgcaacccgctgactgtaaggtcttaggcgaggaatcaatgtacgaattggtacttagtgtattaacaagaaaccgtatatcgctaaaggagaatagcgaggcactggagaagagtgacacataccttagcttactatgagcaaattaagtgtcaaagtcggacggttcggagtacatgaatgcgagatgaccatctcgctacgaggaaacttcgtatagtttcatccaactaacggaagagagactcataaccctggaaactctgaagatttccatacacccgcaatcgacgtaaaacatatcatgtcgacctcggaaagaataatggttttagctcgccattgggatcaacacaatcaagtttctatcgagacatctccagattcaacaattaaagacgtgtttaatacacgatatttttgacccagtaaaagcgggagaatca

SEQ ID NO: 247644 - DNA, 1056 bp, Cannabis indica
tttgcatcattcatgttaaacttcattattactttcttcaagtatccttgctgagttaacatgataaaaccaggcctctttcttctgatctcaattccaagaattttgttggcttctcccatgtccttcatctcgaattcacccttgagttggcacttcaactgactgattttgtgcttatccttgcctactattagtatgtcatcaacatacagtagtaggtaaatctctttgtcaaaataaacacaaggatcatatctactctttgtaaactttatcctagacatgaacttgtcaaatctaatagtccattgtctaggtgcttgctttagtccatagagtgatttgtctatcaagcatacctggtttggattaccattgtcaaatccctcaggttgtccatgtagattttctcatccaaggtgccatgtagaaaggttgtccttacatccatttgatctatttcaatatcttgatcaacagccttggccataatagctctaatggaagcttgttttaccactggtgcaaatatattattaaaatatacaccttctctctgagtgaacccttttgccaccagcctagccttgaaccttactgagtcttcattaactccttcctttcgccttaacagccatttgctatcaatgaacctctgccctggtggactgttgacaagtgaccatgttttgttcctaatcagtgacactttttcttcattgattgctctcaacaaatgttccttgttgctgcatttcagtgcctccttgtatgttgtgggttcaaagttttcgagctcactagcagcagcaagagcaaatgctaagaaatctgcataaccaagctttgctggtggtcttatttctcttcttaccctatctctggccaggagatagtaacttagttcttcttgtgattcttgaggttaattttcatgttcatgatcagtgttcttactccatctgaaccttcaactggggagtgtgacttatccacctcaagattaattctggtgtgagattcttctgtgtgtagtgttgggtttggtagggg

SEQ ID NO: 247645 - DNA, 680 bp, Cannabis indica
ttcgaagactaaagcattactgcttattcgtttgggaacattttccaagtagtaattattttttaaaaaataattttaaaaataacttttagtgatgctccagacatgttgggatacatttacccagtcgcaactagcgtgtcactgtaggtcaacaattttttttaaaaaaaaattatataaattatgaaattaccctttagtgacactttatatttttagtgacacacattgtatgatactaataccaaacatttagagtctaattgtgcatgtcactaaaaattatttctaaatctttagtgacccacacttttctgcgtgtcactaaataatgtcactaaaggtctaaattgtaatagtgatgtgactctcttatgtcaggatattttaggtacaatacatataaatagaggtatgtttcaattaaaaaaattagagataaatttggttaattaaataataaaagacacatttttcaacttaccccaacctaatcagtagttaattaccatattaattctaaaattatgaggaattagcttccaggttgtaattttatagtaaattgagttgtttaaattattcgccaaaaatattaattaaaatttaacaaaagacaataaatgaaagctgacaatatatataaataataaatatatatatttaataagattata

SEQ ID NO: 247646 - DNA, 702 bp, Cannabis indica
tagggaaaagaccgctaataattgaagagtaacaacctacaatgagttttccttaacattcttgaatcacatctccataaccatgtttacaaccttgttctttaatagaagcatccagacttacttaaacatccccgaagaaggaaacaaggtataagaacttgaaggaacattggaccattcttcttaatagatgtttaaggtgagtaggggtatgcataaattatccaatctaatttttagaaaagttctcattacaagagagaataggaggattacaatcaaaatactcaaaatacaaataaaagtatttcatcaagattacaagaaagctagagaagaagaagaataataacacaaaaagcttgaccaagactcaagaatatttgccctaaaagtcatttcctccctcatatggacacttagggaaactctagaactgctcttaaggatttatcaagcctcatatactcagcttagtgtctaaagatgagcatatcctcacaaggttctaaccacaacaaatgatttcaactacttcacgcacaagtgaacaatatattgtcctatttatagatttttcactcccatatgaacatggatgaccaacataaagcccttggatgttaccaatcataaattaggcatttatggtattaataaggtgattttgaggagctttgggctgttagaaagactccc

SEQ ID NO: 247647 - DNA, 1346 bp, Cannabis indica
tgtaaagaccgcctatgaataatactttgacttattaattatttaaagattatgtattaataattgtggaatgcatattttagaaatatattttatattatttatgtttttatgctattttatatttatatttatttacctaatttctgtgattgtgtccggaagctgtggaaagcgacgttgggcctagagagttgcattttataatttagtttattatcgggacattatcgttatatggtagaggcgttagaattttcggggattaatattggaccattttgcccttaagggtttataattaatttattagggtcaaggggcatttaagtcttttccctctttattttggcttgtagttgactcttaatgcagccatatattatattgaattagaggaaaaacttgaggaaagtttatggtgaagaaattaggaaaaagctaaaggaaaattctcaattctatctctctctctctctttcgaaccattatcccagcaaggagaggattatttctctgcttaagtcttctaatctcagcaagttattgatcactttgaatcaaggtaaccctcttagctttctcttgaagttttagttgaattttgagttaagctaggtggttttaggttgaattgaggggctgtgtatatttattcagtttgaatttgattgttgaagttgattaatagttattcctactgttttaagttagaattaagccctaggttatgaattattcaagttagtgtttagaaagcttaaagttaggtcatcaatggtgtttttggaattggtttgatttgttgaattttgttgattggaactggtatattttagtatatacaggtgttctggaagtttttgtgaaatttggggatgaattgaggttttggggttgatgttttggttcccagaccagaaccggaattccggttcctgggagcctgtgtcaaccggtcgaccggttggtcccaggaaccggacttccggttgggaaccggcctgccggttgaggctttttcccgagccctagcttttcccgtttttggctaatttagggtattggcatccttttcatcgatagggttaagcttagtttgtattttatattcccgataggtgttttagcgagtctctcatcggttttcgaatatgttggtttagggccctgttgtacgtcgagctgcacttccactcaggctgaccggcacacttgagcacggaacgaggtaagatagtgtaagaatatttatatatatgagtgtttatgcttgtttggatgttattataagtacggtgttaccaacacgagtaccctgggtacgttgtgttcgtggtacaaca

SEQ ID NO: 247648 - DNA, 365 bp, Cannabis indica
tggacaatgcatgcatatagaaatgacaggagtgatatatgagatagctgactcaagagtcacattctgcgggatgcacttttagagggcatggtgtgcatgaagagttgggcagtcagacattcccatgtgggcatattgttgaggacgctaataaatgaagtgggggaaagaccctcacgattcactcagcagactaggtattcattacaagcatcaagatatttatcatggagatggattgttgttaaggatgtaatgtcaagaagacttgggacacaagcagtgccaattatctaaggtgaaagtcaacaggactcgagtactaagataacaccatggaaatgttggcctaatgtcaaggg

SEQ ID NO: 247649 - DNA, 748 bp, Cannabis indica
ctcgcttagcaactatatcatcattttatttgctacatgtgataaaaacttgacagaaaaattttacaacattgtgaatagttcagggacaatttttaacggaataaaaaatttaagaagcacaataatacataaatttataattcggagacaaaaatcgtaagtaatctatatattacttattaatgaatagtttcatacaagaaattgtgaaaggttaaattagaataaacattattaaaaatcttagatttcgtaaaaagttttgactaataatccatatattttgttagtgattataatcattctcctaaagagttatgaacgatgaacgacaaccctctgattagctaaacatgtgttgagcgttaattttagaacgcgcaacaagtacaagtttcctgagtagtaatttaatattatgtaatggtgtaatttaatattttaagataaaatatacgttaaatatttgtagtcattttcatcattaatttattactctttattttaatataattatatattaatttatatttaattatgtttaaaggtataataatttaatcaaaattttggaattgaactttgaaggcctaagaaacacaataactaattaattaaggtatagaccctcgagaaaagcaattaagcgtgtatacacacacatatgatatataattgtacttgtacacaaaatacatatctatattacactaataattaagtatatactagatttattagattt

SEQ ID NO: 247650 - DNA, 515 bp, Cannabis indica
tgcaagaaactcgagaaactcctatggtgggaccactactctccctatatctcgcacttgaaaggagagtggtgattccactattgaggaaaagaagagaactttcacatcttcaggaggtttagggaaaaataagatgtttcgtggaaacgaaagtaaatggggacgtcagacctactcatatgtaagaaacatcaccctgggacttataatcggagggctttttcagtgtggattagtggggcacctcaagaaagattgtcctcagttgaagaaagaggagcctaagcctgaagctaaaccaacaccagcgcgtgtgtttgccattacttaggcagatgctaccgccagcccttcaatagtcacaggtcagcttcctattaacgacattatttatactgtactattttattctggagctacacgctcgtatattgcaacaaaagttcttagtcagcttggtaggcctagtgatgtatttgagatgggatttggtgttaggttttgtgccctaa

SEQ ID NO: 247651 - DNA, 1632 bp, Cannabis indica
atgatacaaaactattaatatctatatcaatgagacaccatcctacctcagaatacacagatccaaggacaagattcatttattttaaaggagtaagtgaagttactcaaaacaacctcagacaatatatagcgaggcatccacctcgctattcataagaaacttgatgaggcgaatcatttatcaacacttagcgtattttccaaattacaatagctaaggataacaacttggaaatatgcaagatatgattgtctagtctgcaaggccttatggtcaaagatcagttcttaagtttgctcagtacactggtgctcttgccattgctagaaggcatatgatagtccaaattggtattaactatctacaagttaagtgagatgctattgttcaaattagcattgaccatctttgaggataatgatgagaagcggttaagcagttatcaagtattatctagtaaataattcaattgaaacgttggaattaaccacgtttcattaaaacgattatgcattttgaatttaaatgtaaataactaccaacctatattcttataaataggggacagatcccaaaaaaaaagggatagagaatctgtgagagaaatacataaatacgatcaattgtatattgtattaaatactcgaaaatatcttaaataagatagactcgtggagtatgaaaatttaactgtaaaaccaagtaaaaatatctagtcttcttattatactttatatactttatttatttcatataatttctttgttaaatttattacgaaaaaggcttattattggttcacgaaaatttgcgttaacactccccttcttgctgtcgattttgcctggcctatgcatccagttgaggtcccaattgaggtccaaaaataagtggcgaaggctgaggcttggatctagaagcatgcgacctggagatgattgcttcccaatgttccgattgaagtcctaaaaataagtaattaatggatattacattatagaatatatgaaatataattataagataaataaatacattaattgtagaagtataattaataaatatcttaaaatttcttattcatatagagaaggtataatcttgtaaggatgtacaagaaaataaagactatatgatatgaataaaactagtcggtagtatattaaagtaaaataatctttaatatagaactactaagtataatttattatacactatactctagtgtatgtgattttgattcagatcacatatgtggatagacatgtagtaaaggtactgtgtataattcgattatgcatgattggaccgatatttaataaatatctttcattaacatttcgtttaccatgaaagaattattcatatcacaacgatgatcattagtagatcagcctgaatcttgagtatacatgaactcatgtttatgttcattgagttctttcatttactcgttaaaatttctcagagaagataattcttacaacttctattttcagagctcaataacatgtgcgactggaaacatgttgtacaataatagaatccaagctttcttaatggatcgaatattagttcccttacattgataattctgggtgtgctaacagttggatccaaatctataat

SEQ ID NO: 247652 - DNA, 614 bp, Cannabis indica
tttggcagcaactatatttttttagtttttcttctcaattctttcaccacttgtcctcaattcttgtaaatactttctttaaacacccggggacctgacacaaaagaatcaagcgtaaaatagtcctaaaactagaaacaaagagtgaaaactaaccgaaaatacgtcccgaaacttagactaattttagcctaacagatatcgaaatttatttctatctcattattgcataattgacactcacttctcaaatttcacatcaaaatcataaatatttaattggtgatcatgtaattaaaagtaattaagtacgaataaatataatacatataaattgggagaaattaaatcatattaaattcatgaaccaatgtcaaacaatatccatctaaatcctaatgaattatttagcaactcatgttcatcgtagcaatttcacacatattaattcagactagaataagaaaatagagaagaaaagaatgttgaaaaccctattgaaaaaagcctttcgctattgattttgctctctaaatttcgtcctcctcaattgcttgctgaaaaatatcgaagccctactctttttatagctagaaaaagataaaaaagataaa

SEQ ID NO: 247653 - DNA, 1134 bp, Cannabis indica
aaatatatagattaaaataaatggttaaaataaaaatacatttaatttttaaataatgagttttaaatataaggacattcgatctctattgttggttctacaaagttcttattttaatgagactcatccctaatagatgttcattcattagcaatctaacaccgtagaatctcgaaagataagtattaccgtaagtcttttatttttagtaacgatcaccccaatagcgaatgttaagagtagggcttactaagcatgaaacaatagtaaaaagctcatgcaataggaatgaccttgactctcgcctaaatgggacaacgtcagattctcttttcgatcgaataaaatgttactagaatggtgtccattttagatgagatgactactctattcaatgaatgatatctttgactctcgcctaacaagacactgcatcagttatttagaaaccttggaaaataattgaatatgttttatttttgatatttttgcaaacatattttctatacttgttattttataaatatgtgtataaatttatttgaactaagtaatttatttctatttattgatatatgtagtgtcaaaatgaactttaacaatcctcacccatattctcaactagtatatgcccttgcaaatgaactccaaagtgtgaagatgactcctagttagagtattacttcacacttgcttttgatgaacttgaaattctaaaaagcaactatgctgggaattgtcttatcaagagaacaatgggttcaatttattctcaacagcctatcacctgagtataacaaatttgttgtatcttatatgatcaacaattgaaactcgtccgacatagacaagttggacgctgaattgtgtgcttatgaaaggacattgtcacttgcaagtaggtcccactctagtactgcagacaagggcaaaaggaaagatgaagatattgagaatgattcctccgacaatgctgcaactacttgctcaataatgaaggctagaattaaaattgaaccagtaatagaggatcattgattatttggattatagcaatggagagttcatagcatatctatattgtggaacatatagatagttctatataattaagagtgcagttccgaatctata

SEQ ID NO: 247654 - DNA, 649 bp, Cannabis indica
taccagaacttacttcaacaacaccaatatcctcaaagccaagcactacttgaacagcaccaatatcatcaactaccagaagacttacttcaacaacaccaatatcatcaaataccagaacacttacttcaacaacaccaatgtcatcaactaccattcaattacaggcatcaaagaccagaaccaccaggatttgcggtactacctcaacaccaccaatctcattatcaaagtcctgaacagatactacaacaagtacaacaacaactccaactccggcatcaacaagaccaaattgtacaacaacaattacaccaacatcaaagaccaccacaaggtccaccacaaggtccacaacaattaccaccagatgatagtaatatcaaacacatagactagtatctttaaatctttaagacatacagtacattgcatatactaagaattttaccattgcaaattatagaatcaatatggggcaaagaaaatgttattactggtaattcaacatcaaacatattctaatttgttggaactttttacaaagtgaatggaattttgatattgtcattagactagtaagcagtgcttttatattcttttcataagtgatcaattagacgtcttagtagttttgttaacagttttt

SEQ ID NO: 247655 - DNA, 662 bp, Cannabis indica
gttgttagcagatcgtttaacaaaacaaacattaacatgaggcaaagactttaaaagattcagacaatatgtaatagtagagccaaacacagaatgcatgaccacattactttgaagagcttgaacaaccacaagagaatcagtttccaaagtaacatgttcccatcctttatttttaatccaacttaaagcttctttcacaccaatggcctccaccaaactgggttgaaaacaccctgctttgtgcatgcagaacgcttcaatcagctggccgttagagtcacgggctaggcctcccacaccaaaagaaccggatgcagaaaagacagcaccgtccacgttcaccttcaaaaaaaccagcagctggtgctgtccagttattgccgttggtgctggtgttgtttacgacagcaggtaggggggaaacctgttagcagcagcagttttccattgattcaaaactgttgttgcagaggtaattacctcagccgctctagtagcatttttattccatagcagttcgttccttgctttccaaattgcccatgccaccataagagcttcttcaaacaccaccggctgacatttaattaaaatctgctctatccaatcaccaaattcagtccccataatagcaccagtaggcacacttgacaagttcc

SEQ ID NO: 247656 - DNA, 736 bp, Cannabis indica
ctgctcctagtttactaaatcctcataaataatatttttaataaatagaaataattattattataaaattttcgttcttttcaaaactaatgtttacagtgaataataacaaaaaagtgtagagagaaacatagattaagagaaagagaataccaaggtgagatctctcggggacaatgatgatttgagtaatgttatatccatctcttagtcttactcggtgagggcgtggcccaaagaaataattgggagagattgagcgagtggctgaccttcaagggcaatatagagaatagtttcaacatcaattaagtagcttcagatttaaagataatagcttgtaggaaggatttgatggcctgtaattaagaggccatggacgtagccatggctctgtttcctctctacagcagaacccagtcaagaattagtggagctttcgatcgtgttggactttgaaaatgttttatggtttatttcattattgttaagaggtttcatcactaaatcgctttaccaaaaaattgcaaaattcaacagattaatttggattttgaaactaacaaacaaacgaggagcaaggagagatgcttagcgtcgaagcgttaatgtttcgtctattttatttagaaaaagctccattaaaaataatcgttaaaccaaaaattatcgttacatagccacttttaatatataaagatatgatatttttaagagataaataatattttaataa

SEQ ID NO: 247657 - DNA, 557 bp, Cannabis indica
ttttcttaaacatcttcgtagaaaaatgtctaagtgtatagttatagtgcatctcgcatccttcctttaagtgaagtataggcgagatggttacttcaacgcgttaagagcgagatgaagaatgttgaagttgttgtccttattcttcgaacatactcatgagtatattggtcaatgagctgcaaactcattatctacccgttccaaacagtactattacgtactctgtttatcccgagatggacttattcatctcgctggtctcatcagtcgatagttattactcatatctcgctattgtctatgtgacagcgagtttgagtatttctactaattatatttcctaaggcgagtcatttaagtgcatttattaatatgtaatttgagatgattcttggatgttcgttatgttccttccattgaccaaactacatatatacttacaaaggccttgtaccaaactacatatatacttacaaaggccttctccaaggatcaattcaagtatttcaaattcatctgtgtgtgtaacataccctttcgtttgagggggataa

SEQ ID NO: 247658 - DNA, 680 bp, Cannabis indica
gaaaaccacacgtctggctaacgttctgaccaagtggctcggcacgccactctacccagtgccgaacagaatccagccgtccagatgttggaggatcatgaaggtgacgctgaggtccaagagattgaggagctggacgatgtacgtcctggcagtccctccgaggcagaggaagaggcaaaggttgaaccctcaaattatgggtagtacaatgaggttggggagccagtcgatgctgacggagacgccctggtagagggcgtggactacgttagtaaggagctcactgcggttgttcctcatagaaggctgggtgccttgcatgctagatgggtaagtcatgcgtccaagattacggaggcgcacctttgaactcttaacaagggtcgatacctgggtgagctagactgctacattcccgcccacaacaatcatgccacaaaccctgaaagggggatgtgcgcctggtcgggtgcccatggtcagcaaggagcgttgatgcccttgcatcaatacttcaaggatttggcggacttctttggcctctgcccggcccagttcactcctaagggcatcaagtctctatctaccctctgaatcctctatgcctcccagaattggggtatgccctctccccacgaggttgcttggtacttcgatttgaagtccacccctaagca

SEQ ID NO: 247659 - DNA, 839 bp, Cannabis indica
aagcgctggcaaaaatgatttttttcaacacgtaaatgcgctggtaaaagttagattttagccactgcaaatgtacataggtaaagttagattttagcgcagtgtgtacgtgtgtgagtttggggctcacataagagtccatgtgggaactcgcatgtgagccatagtgcatgcatgcgggtgtgtgtcgtgttgcatcaagtgagttgtgtaatgtacgtgtgttgtgaatgtaaggtaagatgtgaatgcacattgaggagaatgtcattggaggaggaatcaaaggacaagacgtgcaagagaaaagcatacaaccacacctcatgcaaactttgaaagtaaggaggtacgagtagtgaagacaatgcacctgcaaggtctaaggacccaacaaagagtacactgcagccaccacctatgtgacctgggaccacttctgcgtctggggaccacctaacaccagacaaaggtacgaggcgcaataccaccttttacacttgcggtttgtagcccgaaagtgacatcttgtctatttgggaccacaatataacttaggtcattagagtctataaatagtccatcctcaagtgtgagagggggttcgaaaatcatttttgtaaaccatcatattaagagcaaatgaaaagttttttattttctctctacttgagatagacacttgatttttatgtttttatctttttttcttgatcttagttctgagttttgaagtgagttttgatctagtattttttttttttcaaaaaacgaaataattacaaagtcaaagtaacaattaaaggtctctacctcacgaatgggaatgagaaatatgg

SEQ ID NO: 247660 - DNA, 606 bp, Cannabis indica
  modified_base (584)..(584): a, c, t, g, unknown or other
gccacacaacccccacccaaaacctcgccttcatgctcaaataaggcgccatcaacattaaccttgatctttcttgaaaatggtgcactccaatgcttaaccaaacggcctccgtcgaacaacaaagacaaagaaagatcctttcttttttgagtgtctttgaaccgattaagtagcattcttgctgatgtaaccacatttttgcagtaatccaacttttttgctggcaaacaaagtcattcctggcacggcagatggcccagcttaccatagccgcttcctccaactcgccttttcttcctcggtattgcagcacctgcagccaattgctgaaatcatcattcatattgctgtcaacatccacacttgtcctgttccagcaagcgtgagcatgaacacacccaactaacgcatgaaaaatagtttcagctatagtgggaaacaaggggcatattgggttaactggaacgtgtcttttttccaaatggacacaagttggtaatgagagcttgaagccgccctccataaaaagttgctgactttagggggaacttttaaactccataaatccttccaaaaaaaanaaaaaaaaaaacaaaaagaata

SEQ ID NO: 247661 - DNA, 1096 bp, Cannabis indica
aaataaaaaaatctcttaacaaacaatgagagaaatgaaatttttgacatggcaattttgtcgtgcttaatatacttgaccaataaaataataataattttgaaattaaaaatttctactagaaacaaaatcagaatctcaaaggttgagaagaaacatggaacaaaattttctaaaaaaaaaattaaaaagtgtagataattttagaaaactaataagaaatctcaaaagcaatcctacacagatttggagctttatcttatttatatgcataataataatgtggctccttcaaaatgcaacctctgtgcgctacctactgttgtgtagtagtgtatttaattatagggattcctgaaactttttaatagctcaggaatgtcatagccaagcatgtcatcaacggcttgtatcattttcggtttcagcttctcaaatttgtcaatgttgtaaccctttaatgtctccttgaactgctctacatttgggaaatctcctggtggtaaatgaaactctctttggacctataataagtaatagattaaggagttcagttcagcaaacaaaatgtaatgagtttcaaattagacaagatagagtgatttttcaaaccttggcaaatgcatcacccaaattatcaattagtttctgttgagcttttgcttttcccatcatagcaggcatctctttctttagatggctaataatataagcgtgtatcttagcagctctggcgcgtttcacaaattcattgatctataaagaaaggaaaataggtgataatagtccaaatcagcaactaataagtttactaggccagaaaacagtgccatgttgaaattcaacttatacgacgatcacaagaaattcaacttacacgacgatcacaagccttctttggaatatcttttagatcagcaagaagatcctcctgctccctttcaaaaagctctttcccaagtggaccagttgcagcttcatttactggtttgtcattgaatgagctgttacagtatccaaattattagcactaaaattattgtacagagggaaaattaacttgctaaagacacatacaaatatgctcccaaaagaa

SEQ ID NO: 247662 - DNA, 810 bp, Cannabis indica
ttggtcagaccttgtgatcttaattattctccgagtaatacaataaaaaggggaataagctattaccataatcacgaagtcaaacctctataaattttttgtgttcttattgcttattattattattttgttagtaattaatcattaaattttatcgccttaaaagactccgtgtcattagctaaaagcgatgtcaacataaggttatgtgtgtaataattttaaattataaagagtgtggttacaaatatttcaataattaagtgcaaaaaaattaattgctgaaagatttttatttagtaataaattaaaaaaaactaattaataattattagtaattttattttaattaaaattttataaggaaataaaatatcaagttactatcaagttataagttaattatcatttatttatttttaaattttaaattaatcacaactattcaataataatttaatggctaaatataaatataatcatggtagttatatatttgaagtacccactaaagcttcctccatatataaagctaatatttgtatgttactaccgtctaccaataaactattttgtttgaaaaaataaaaagaatgtaactaaagaaaatatttgtaataaaatttatagttcggaaaaaaatttacaacaaaagaaaataggataaaactacaaaggctatagtttagcagaaaaatatcttaagaaaattttttctgtttcgacatcttaagacattttatatattgaaaaatcataaaatatttaaggtctcatttggtacgtcgtattgtattatattgtattagt

SEQ ID NO: 247663 - DNA, 812 bp, Cannabis indica
ttgctcacagttactgacttctttaggcttatttgtaaaccttacaagaaattatgaatgtggaataacaatctaaaataatccactatgtgttaataatcacattaactatattagaatgaattcatacaaaataaattaaaaaattattggtgttaatgaagtgtggtatatttttcttaattatacagtaaaaaactgtacattctagatgaagttatgaaaataaattttggaaatttctattagtattgcaaaaatttatgaatagtggtgtaataaaattacataattattaatgtatagtttagagatttaaataaatcatgtttttgccaatgtataaacatgcttaaatatgaaatcttattaaacaaaaattacctgtgggctaaatttttaatttaataagattaaatttagatgtagattatgataaatttacacaattgatgaaaaactcaaagtttaacatttctatctcaatgaaaagtgtgaaacattattttataaatatttcaaaattttatactttatgataaaactatgaaattaaatctaatttatttcatatggagtaaattaagagaattgattaatttaacatattaccctaatcaattatatataaaaaaataaaattcctgtagggtaagattattgtatccatatagttaattataattcatgtctattatgttatcatgatccacttaatatatattttaaataattaaggatgttggctactctctaattataaaaaattatagtggatcactagacaccaaaatataaactgaagattaaaa

SEQ ID NO: 247664 - DNA, 651 bp, Cannabis indica
taaatttctaatggtaaatttgttcatattaaatcatgaagagacatgtagatagagttatgtacgtggaaacactgttttgattattaatgtttcataacagttgcataaatattttgctaacagttatttcgtctgattgaaaccttcgtctgatgcaacctttgaccgaccacccagcaacctttgtctggttgaaaccttcgtctgatgcaaccttgagccaaccacctagcaaccttcgtctgattaaaaccttcgtctgatgcaaccttcggctaatcacccaacaacaaccctacaactatcgtctgattgtgtaagtaatattgtaagagttattttggtaattaaaagtacataaaaagaataaatagtgagtatgcaaataaaaataccgtaaaatgcaaaagagagaaaattatagtatttcagtcagagcttggtctacttagtctacttttgcaagagtgtgtgattcgatttaattcagattggattactcctttatatagaaagtaagtgatcctttagattacataatcagtcagacatgaccgttacattattaattacattcaactatgataaaaaatatttatagaataaatgaaagaacagtagttttaccgtttttaattaatactcgaa

SEQ ID NO: 247665 - DNA, 797 bp, Cannabis indica
ttctcaattaaaaaattgaaaaatgaaaatagttttatagacatttttttgaaaaatattttcacttttctgattttaaaaataaaaaattaattaaaaaagtattatcattagtgacagaccgagaatttttattttgtggggacttatttatcattaaaaagtatttatacctgtattataataacttttactagatttatttaattttgtggggctttttctattattttgatctataattatcaaattaaaaaaattgcatttaattttttttaaaagatagtatttttgttagtagaggctatagcccccacattaatacaagtgcgtccgtccctgattaccatacgccaccttaatttctaattttttatgagttgagctcgtgcgtgtaaagatgataatttttattttaataactttctattatacaaaaaattgggtctgttttggttttttttttttttttttgaaaaggattgcttttgggattttagtttaaataaatattgtttgattgtgatgcgtagacgatttatgttttagctttatttaattttatgtgtgtaaatgacaaattagtctactctacatgattaaatggtttgatttgtttggacaagtattacatataaagagagaggtcgatttcacgaaaattgtagttaagtacattaaatttaacttttacttctattttactgaataaaatttaagagaaaatttaaactagggtttcgatttcaattttatctgttaattacatttttggcatatttaattgacaaaaatat

SEQ ID NO: 247666 - DNA, 890 bp, Cannabis indica
ctgtaatgaaatttagccatgcatgtatgtgcatctttattcatcaatgtattcctgtaatgagatgttttgatgttttgtacttaaagtttgtatagtgtttataacactgttacatttacagaagcgaagatgaacgcgtaagtttttcaccaatattgacacgttgttgccacgagtcaaatggtgggatagttcacgctcgtcgttctaggagtttgtcaatatgattatatgaatcatcaaaacacgttgatccattttagcaaaaaaaaaaaaacacgttgatccaattcatttataaaattatggtggatgttaatccaatcacatttttagcaacaaaataaaataaattattattattattttatatatgtcttcaataacaaattataaaataaataaaataataaataataaattcagaaaaaaaaaattgtatttataaaaaatgtttaattttattttacattgtatttagaaaaaatatatatatataaatggagtatacatgtaatatattaagttttgaaatataattatattatgtgtattaaatttttaaattattattttctttacattaaaatattatttgtatatataattttaatttttttttattaaatatatgtgaattagattggatcggttacttttacgtattaattaacattcaatccgcacaagtgcagattttgaatttttcaatccgcacaggtgtaaatatctactttgtgaattatattagattggaacgtagatattgaattagatcaactattttatgtaacacccctaaaagtcctgatgatgctattatatatggtttaatatattttacatttaataagacaatattatctaataagtaaagattgaaataa

SEQ ID NO: 247667 - DNA, 565 bp, Cannabis indica
aatacatatgtacacatacacacatatatacgtatatacacatacacatacatatacactcacataccatatccattcacctacactcacatatactgtaacgtccacgtttcaagcctccattgggtccttacacccacagaataatggctctcaagactatctgagaaaaattgggatctcacaatctccccatcttataaaaatttcgtcatcgaaatttaattacttacctgaagaactctagatatctaattctcattttctcttctcgctcccatgtagcttcttccactgtaaagtttctccacaaaacctttactagtgaaatctttttgtttctaagctcttttgctcttttatcaagaatttgtatcggcctttcttcataagtcaagtcttgttccaactctaatggttcataactgagcacatgggaagagtctgaaacatattttcttaacatagaaatgtgaaatacggtgtgtacctttgacaatgttggtggtaatgccagtttatatgctacctttcccaccttttcatttgtaacgtccccgcttca

SEQ ID NO: 247668 - DNA, 1309 bp, Cannabis indica
cctcagaagggtactgtatagggcttggttccctggtcttgggcttctgagtgcttggtgaagtattcttcttttggttttctctggtcccgttgggatgtccttggggtgtatatgtattctcgttgtttccatgggtcttgcatggcgaccattatctcttgcatcctctaattctggttctttttgggcagcaagttcaacttcatgatcagctgccttttgcctcaagaccaatagttcagtatagctaccttcgtcgtaggcgtcgtaccctagggttgtacgtcggtcggtttgggcggtttatcctatatatttctaacccaatctaaagttcggatttctaaaatttaagtgtaacccgacccaaatttaaaaaaaaaacctccaaactggcctaaacgtttttttttttttctagtttcaaagtcaaagtcaataaaaattaatatgtaatattataacctgtaatattagaaagttcaaatctttaattataacttgtaatatttttatacgtatagccctactaatgcttatatcttattgaataagattaatactggagacgtagctagcagttgtagtactggaggaactacttgcctctccagggtgaacacaagattaattaatatttctggtaattacatatgtatatatgctaataatttattaatacattaccattgcgtctgcttcttagttcattaatttgaattgagtaataaatatttctagtaattacatatgtatgtatgctaataatttcttgtggttttcttacttgcttttatttctttttcctgcattatttatctgtctctcctcttctttgttttttaagcaatcatattcatataaaaaaaataatttttgttggcactgtcaaaaataaaaacccatcattatcaatgtcatcatgttcttcataaatacaaaatctggacattcctctctaaatatttaatttctgaattctcaaaccccactatagtactcaactcacatatctattcaaactattgattaaaacttttttttgacaaattcataacactttacatatgattcagtctcttgcattatcatttaattattcccttcaacaaattgggtttattctattgttctcttttcctatttaataattgtttcaagtctttttacaagcggggatatgttattgttctaactagtatcatatataattattgtagacattgtcctacatgaaataaatcgtagagaatttgaaaaatcgtgtttttacaaatgtcagttgtatataagaaaatataaaaac

SEQ ID NO: 247669 - DNA, 1232 bp, Cannabis indica
aacattgctatttggcaccagtagtgcccaatactttttatatgtggcgccccacaattagttagtgatattcatgaaaaattattttcttaagttatatgagactcgatacttaattacattaatagcagtatgacaccgaggagggtgctaggtaccaattatatcttttagcaattatcatatatatataagtagtataagatggtgtgtgttgaaggtcttgggttcgagtattaaacgcttaaacacttaaataaaagaaatacaattatttaaaatatttggtaaattttttgatgagaaattaaaaataatttacaatgagaaaatagggttcaaattctagtctcatttaaagaatataaacaaagtatgtgaaggtggagatacacgggtggaagtaactaaaatatcaatggtctttgtgactccagacgattttgaatattccttgtgactctgattatgatcaattttttactgctttgtggattaatggccacggtaatggatgctaattttgttgatgagattgtgcaattgacggataggttgggaatggaacaagaggaggaatgggaagtgaatgaagaacaagctactgagtttggagaaaagtcgttgatagggagaatcgtctcgaaacaaagtattagtcttggtttattcaaaataattttcactaggatgtggaaatatgttggggaatggaaaagttaagaatatggaagaagatgcagaaaacatgtactttggtctctcatttcagagtaaaaatgatgctaagaagatacttgagaagcaaccctggctcttcaatggaggtttttggtccttgatgattggccaaaaagtggactgtggagggatgctcggttaagtagagttccactttgggttaagttgagaggactcccactcaagactttaacgattaacaatgtcaagaggattgggaacatggtgggagaggttcaggatgttattgggaataatccacaacaagtgtttttaaatggctatgtccgggttaagattgcattcccaattgatagtgcggtttttgttggcaggtacattcctgtagatggtggtaaatgttgggtccaatttaagtttgacaaactacctttattatgctttaattgtggtatttgggggcatgatcaagcaaactgtgtgaaggagttggtgatggaatctaatgtgtctggaggtcaagttccaaa

SEQ ID NO: 247670 - DNA, 1272 bp, Cannabis indica
aaaattcaggggaaaaaattactaattagccataaattaatttattaagttttttatatatatatatattgtagttactcataatatataataataaatatattattattttattaatattaaaattaaaaaaataagataattagtttttaaacgaataatttgtatagttatagttatagaatgtataataatgtgcttatagaataaattgaattatatttaaaaaaaatgagtttgggcggtttaaatcgaccaaaccggggttcaaaacagtcggttttaagatagattgtggattggtcgaacagtattctgattgcaccaatccagaccgaaaaccgaattcttaattttttttatagaaaaaaattgaccaaaccgaccgatactcactcctagttaggcattacatggtgttcaatactatactgatgtgacgcgttgtaattggttagttgtattattaacgacaaaaattaaatttatatttatttgtaactgaaaattaaacttaagtatttatgccacaaattactctattatttactatatatatcctaattttagcaacaataactttttagctttaaatttttattaaaaaaataaataaatagcatcctattgtatagcatcatgcaaattttagaatgacacccatctctctccaatggtataatattttactattttgccatgtaatatgtccacttcatcaagcatcctctaaatttttactattggaaatgctctaagagcattttcaatggagcaacacctatagtttccaaaatacacacatcctcctaaaatattttttttattattttttctcatccacataaaatttgtcttctcttaaaaaaaatactccaatccaatggtcgacaactatacaagttgctctctatggtcccacataacattgaattaataactttttaggtaaaaaataatttttttctaataaaaaattttaaaaaaaaatgctcgcccattgtctatattaagcaccacttcacataaaattaattttgaaaattagaccacattgcatatgtaccaaaaccactctaatgggcaagtgccattggagatgctctaaaggtgtccgttagttagcatttctcttaatttaagcttttcatttatttattggtgcaactacaataaaaatgactctctatttaaacattttagctaaaacaaagtgaaaaaccgtgtttttgcaaaatgtcagttatatataagaaattataaaactgtaag

SEQ ID NO: 247671 - DNA, 518 bp, Cannabis indica
tgtataataaatatatagtctttcaagtttatacaaaaaatttttaagttgaattttaaattgtataatttatgtgtaatagtgattaatacactattttaatgtgtattaagtatattaaaatgattgagtttacaaatgtaatgtttaaaatatgtcgaaagagaaatatttgtaataaaagaagttttttgacattttttattgattatgtgatcatgatactcatctttagcattaaaaaaattaatcaaacaataataattcatctccaaaagaattgttaaaaataaaaaagatattctcaaaagtgaaaaaataatgataatatagagatgtgagatgatattttatttttctaacatcttattttctataatttataataatgggtaaatactattttggaccctgtattttgctaaagttaccaattggaccttatgttttgttaaatgacaaaatggaccttgtatttaatttccaaaatagtaaaaataggaccctaagcttaattt

SEQ ID NO: 247672 - DNA, 1423 bp, Cannabis indica
caagggactcgatcctgggtacgctgagaagacccaatccagcagctgggcaccattcatgacttggagattgttccatttcctgtttcggttctcccaaatggcccacatgattttaatagcatcttcaaactcactcatgtttagctttgcctttaaagttaccaatatatcaaacatagacccttgattaatatgttcacattttttgtaccaagggacaagtttccaaattggtttgattttagcacaagaccaaagagcatgagtaagagtttcagcttggttaccacacaaatcacaactaggatgaaacagtcatacctctatgggacaaatttgtttttgctggcagccaattatgacaaactcgccacccaaaaagcttcatccgaggaggaagttgcatgctccacatcatcttccaccatttgtggatgtcttccatattagagcatctagtgggatgtatattgatttctctactgattcgataaccactcttgacaatgtaatttccatttggggtaaatggccatatcagcgtatcctccatgaataagtctataggaatcccttgaatccaagagatgtcctcctcatgaaagtgttttttaacttcctccatttcccataagccgtccgtattgatgaagtggtgaagtttagtgtgcggtgcaatcccaggcctttgtaaaagcatggcccccgagggtcttggtatccatttatcttcccaaacccgaatctctctaccatttcccactctccaccgagccccctcgtgcaaaatttcccgaccccaacatattcctttccaaacacacgaggccccaggaggacaaccagctttcataaatgaaatattcgggtagtagctgttttttaacacccgagctagtaaagattgaggattatggataagtctccacccttgttttgccaacagagcttggttgaattcattgaggctacggaatccaaggcctccttcctctttgggtttacagagtttgtcccaagaaccccaatgaagctttttattatcttttgtgtctccccaccaaaaattggcagcaaggctgtggagattctttatgagtttcttgggtagacggaagcaactcattgcatagatcgggattgcctgaaccaccgccttaattagaacctcacggccagcttgggagaacatagaagccttccaacctttaagtttattccacactttgtcctttatatcaaacacctcttttttcctccttcccacaaaactaggcagccccaaatacttggcatgatgagagacgaggcgtacccccaatctagtagcaagattgtgaccttgagaggaggagattcttttccccatacaaacttctgacttttcgaggtttatttgttgacccgagagtttggaata

SEQ ID NO: 247673 - DNA, 729 bp, Cannabis indica
atgtccgctgaattttcatccatattagacttttttactaaaattagaaaaaaatccttaaatccaacaatctctgaaggctattttaacgactttaaagttcaggggcgtacatgtcgaagttcacgggataaaaatcccaattagccttataataatattaaaccacggtaccgtcattttcagggaatctatttttttcatttatttatttatttttttttttaaaaaaaaaagcagggaatcttttttatgattaaaagaaaaagagtttggcgttgagacaattggttggtatttgctctgttcactcacacaattgttgtgggcgcctctttagccttttccctttgactgcatataaatcagtcatccttcgtttaacaccgaacctagttttacttttcgtcatagggagatcgagcatatggatatggaaggcaccccgacttcccatggattttacatgcccggagaatttgaacctcactcacaaacctggcttggttggcctgtaagccttctctttcatgtttttcatcaattttctcacttggctactatctttatttatttatttattcttctatgagaaataacatcagtggctacaaggattgtaccatcagatataaaaataggataaggccttcactttatgctctcttttagctttacataagctttatatctctgttgatgatactagagaataggaatgtaatgatg

SEQ ID NO: 247674 - DNA, 638 bp, Cannabis indica
tgaggtttcctcatgattgaacagctataattacatgcatttcgtttagaagatcaagattcaagctttttagttgattgtggtattttagtaacaagatgatgtttgggagatgaaatcatagggttctttatgtaattgttgataacttgaaatgtgggcaacatttatttgcctgacctactaataggttatgtcattataaattacataataatttgaatgttgtgggtcaagtaatttatagtggcaatcattcagtcttccatttattttctttttaaatattaatgaatgctctttctgcagatataccgccgaggaaaacaacaacttcctacaaatttttgttatccttttattaaaattgaggatacttattatgcattagacacataaatcttttgtactatatttgttatccacttttttcgttgaatatttaactttaaatttgtgttcaatgttcgaataattttaattgttttttggactgccaggtctttgttggtgcagttacgaagcggatggtgcctgactggaaacttgcagggataatggggtggcctatcgtcttgctgctcgtgtatttgatgttcgggaggttgcacccctgttgcaaccgtgaaccttgttct

SEQ ID NO: 247675 - DNA, 524 bp, Cannabis indica
tttagagagacattaaactactcctaatgttcttaaaaaaatacaactacatatgtatattatttatattattgaaagtaatactttcttcaatctttaaatctcttttagatgatggtgataattttttttttgtaataatttttatattgcagaataaattacttttattctgtgacttataacaacattgttcattattttttttaagaattaccattttgaaaatcaaaacaagtatcctatatttgtgatttgttaaagaattaagttattgaagttatgtttattaagattggtcatgagtttagtttttctttatttcataatgaactaaaataaagaaaatctttaaaacatgattgtacttatcaatctatgtcttgataagttaatatggacttgtagatttctttatttaataacataattattttatatatatttctaaatatgtaattaattttagtaatttttaatattttttaattgtaaaatatcatcttggggagttgaagttaata

SEQ ID NO: 247676 - DNA, 1088 bp, Cannabis indica
tattgaaagttttaagtctagtacataactattaaaacaaaatgtccatactacaaaatataatttatttttaattaatggatcattaattattttattattttttaagtttttaacaaaattattctaacattgaacttgccctacaaacgacattataagatagttttcttttagcatatttatcttattacagtaattggtttttacgtataataaggcagccaatctttaatttttatcctttatttattttacattttttttttttaaaaaaaaaaaagaagattttatctttttttttttaggatttagtagcactaatattttattttaacagaaaagaatatatgtaacaatatagggggcaggtgtttcattttataacttaaaaattgtttcatctcttgttaaaataaaaataaataaataaaaaagaaaaactattttcatctcttaaaaataataaaaaaaaaattctttttaaaaacaacaatgggtgtttggctatattttttaaaaatgatttataaaaattgagttaaataagaaattaaagaatatcttactgttgttttctatttcaaaaataattattacatgtctttttcttaattcacatgagttttaccttcttttgtttctaattaagagtgctaatttataaattataatgatttttttaaaaaagtaattaataaaaagtttaatttaaaattcatatctcaacagcccaaaaactattttttgactcaaaaagtgactttcaaaagtatatcaaaaaacaacaccttagcatttttttttaacaatttttagcttctttttttcctttttaaatcaaggctgtatgagttcaatattaatggaaaattcaaaaatatttatatatagaaaatttaagaaaagttataggaaaaaagttaaacagaaggaaacttgtatgaaaaaaaaatcccatttatttaaatatatggttattctatttcttaacaaatataaccaaaaaatatctcaaaatattatatgggattaagaatatcatatattgatttttttaaaaaaaaaattacataaaaataaagcaa

SEQ ID NO: 247677 - DNA, 721 bp, Cannabis indica
tacaatgatatctctgaatatgtgttcttagataagtttttcgaccctttgccaagtaagaatagatcactatttatagggctataagctttgagagaaaagtttcccttctgtttacaaaagatataattggcaagattacacattaaatatagactacactaatcaagagatttggacagcttgccatatctctgttatatgatcccgaaattgtacggattgtctctgtgattcacgatgcgagtgttgaaactgttaagtgttggcttgctgttcggactgtccactgcctggttaagaaggcttcgtccgtgcaaatatatgtggtgctctgttcggcatatccctcgcgaacaaatatgcgaagctgattccacgtgttaccattgtgcgattccacgtcagagtgcgaaaattgggataacaatatgacagtataatatttcaatatactacattaatagtgaggtaaattatttttatgtcaggtgatatatgaagaacgaaagacaacttatattttttttgatgaataagaaatttttttgctcaaaccaaactttacatcacagcaatttacatctcaacaagctattttctgtctctaactttaatcatatacactttatattttcataatccaatccatgtcttcatcctttgctttttcgaggggggaaaggctttaatccttagcagactgagttgtttgcttttc

SEQ ID NO: 247678 - DNA, 1437 bp, Cannabis indica
acagattttggctttgtctcctccaaatctgaccacaatctcttcatacaacacacttctaaatctattacactcatacttgtgtatgttgatgatataatcatcacagagagtgattctgagctcattgcgaccttgataaacgatttggattctaaattctctctgaaaaatcttggtcaacttcactacttccttggtattgaagttcaaaacacagaggaaggtcttcatttgtcataaggaaaatatgtaagagacttactatacaaagcaaaaatgatgcatgccaaaccaacaccaactcccatgacaagtggtttaaaactttctgcttatggtggtgatccagtggatgatcctcaattatacaggtctatagtgggagctcttcagtatctaaccattacaagacctgagatttcatatagtgtgaataagttctgccaattcatggcaaatccactgcatactcactggaatgcagtgaaaagaatccttagataccttaaaggtaccatctatcatggcttgaacttcaaaagatcacaagagtatgatgttactgtattttgtgatgcagattgggccaatgatccagacgacaggaggtccacgtctggattcactatcttctttggccacaatcttgttgcctggcaatgcaagaaacaacacactgtttctcgatctagcacagaagctgaatatcgaagtctggctcaagttgtttttgaaattacttggatgcactctttattctctgaacttcacatacaactacctaggcctcctatcatatggtgtgataatatgtgcacaattctcctaacagctaatcctgtattgcatgctcgtaccaaacatattgagcttgatttgtactttgttagagagaaattgtcccaacaagtggtgtgcatttaacatgttccagctgttactcaaatagctgatggccttactaaatccatcacaagctcacggttcaatcagtttcaagacaaacttgaaattaaagaatgtaccaattccaagtttgagggggtgtgtcaagatagttaaagcttctaactgtctctgagttagttgctcttgtctgttagctaccagttggttttcggttaggagtttgttagtattgttgggctttattgtcgtaatcttgagttgtatataatgtgctttccagttgatcaatgtaagagattctttttctattaattatctctatctttcactgtatttgccctctttccttcttcttcttcttcttcctctatttttggttctctgcttttctttatgcaacaatggcatggaacaagagttctaataatactgagcaaaataatctcaccctacagtggtctgtagcaaaaatataggaatatgaatgggaatgagaattggagtaggaatggaatggaataaaat

SEQ ID NO: 247679 - DNA, 995 bp, Cannabis indica
aaattaataaatgtctactttttttaaaaaaaaataaaaaaatagttaaatataataaattagctaatacaaattataaaaatatatttactacatattattttttaaaaaatatatataataattaaattaagttatataatatttttagtattgtaaattattatgttgtaacaaaaacgaataaatatattagatcaatacatatatataataatatctaacatattatatcactgaaaattaataccgtagtaaataattaatactacaaaataaattataacaatattatattaatactcaaaaatatatacatcatgctaataaaattctatatgccatattaaaatatgtatacatactaaaaaattatgtataaaaaaatagaaactaaatattatcttaaataaatcatatactatatacaacaaatactatatatcatacaacaaaatatatatacttacaataaaaataaaacaaaatattattatttaaaaaaaaaatcaatatataccatattaacaaaattatatcccactattatacctggcaaaataaaaaataaatatcaactagggataataataatcatatataatacaacaaaacagaaatataatgtacaataaaatctatataccaccaaccaacaataaagtataaaaattaaaaaaaaaaatcgacataactttcaaataaatttttttttaacaaaaccaatatagatacaccataatctttaagtaatttgcttctaattctaaaaaaaatatgaaaaaaaattattgatttttttatatgacaaaagataatatgaataataaatagtctacaagagttatttctctacaagttttgaaatgaggacatttattaacacagtcttataatttgggaccatttgctataatttccccaaaaaaattagataatagaccaaaaatttataaaaaaattacaaatatacattaacatggaatttttttttt

SEQ ID NO: 247680 - DNA, 715 bp, Cannabis indica
ggttggtttgtaatgatgaatgaactacctattaatttttacagagcttgaaatgtcatcatctgaagaaaaaaaaatgattcttttactgatgaagatattagtgaggaagttggaagtacattaaatttgaataagatagtagaaacacttaagataggaatgcattttgattcatttgaagatatgtttatatactacaaaaatatggaagacaagaaggttttggtgttaaaaagaaaacaagtcgcaattcattatttagtaaagtgaagtttgtttgcatttcatgttctcgagctagaaaaccacaacccacgaaacaaaattttcttgctcctaatccacagacaaaaacggattgcaaggcaagaattaatgctactttgtatgaagatggaaaatgcaagataaattctgtcatgctcgaacataatcatggtttaagtccccataaatcacgattctatacatgaaacagagaaataagtataggagctcaaagaaagttagagttaaatgatcgtgctggggttagtgtggcaaaaaaattttaaacatttatagttgaagctggaggtcatgataaagtttcattcttagaaaaagattgtagaaatttgttgataaagctagacgtttacgattaggggtaggagatgctaaagcaatccatgattattttatgagtatgcaggctaagaattctggcttc

SEQ ID NO: 247681 - DNA, 1749 bp, Cannabis indica
atagtatccagtatgtaagatgatacaggcgtagatggttcccccgaatagcagattggcttgaactcatcatgccctgggatccaaggatcaattccacattttacattgaaaccattgccaatcttataacgtaggcctttaatgaggagttcgcgaccccagtgaattccttgccacgttaaagatggagagtgacccttgtgagcttccaaaaaagagtttctggggaagtatctgtgcttcaaaagtcgagctaaaagtgaggatggattttcaaataatctccaagcttgcttggctagcattgcttgattaaaatcaacgaacgatctgaatcccattccaccttcaaacttggatttacagagtaatttccaccctttccaatgtatcttagacacgtccttgttagtaccccaccaaaagtttgccatcatagattcaatttgattgcagaatcccaaaggcaagcgaaaacagctcattgcgtatgtaggaattgattgcaccacagctttcaacagaacctccttccctccaatagagaacagtttgtcattccaagcatgtaggagtttccagattttttctttaacattactaaataactccttcttgttatgacttgagtatgcaggaagaccgagataagtctcatgacattcacatatcggcattcccagagtgctactgaaaaaattctttgcatcatcagaattgttgggtgagaaagacatgattgacttgttggtgttaaggtactgtcctgaagcttgatggtagatttccaaaatctttttgatagctaaagctgaactgtgatttgcatggaaaaataggagactatcatcagcgaataataagtgagatactgacggagcttgccttgtgagttttaaagcccaataaattccctacttgctcctcgtggtgcagcaaccttgaaagtccttccgaactgaaagtccttccgaacagattaaaaaaaaaataaggtgataatgggtcaccttgccgaagccctctagttggccaaacattgccaacaatctctccattcaactggaatgagaaactattggacgataaacatcgcattataagagagatccattggtgagcaaaccccattttctccatgaccgcagacagataatcccattcaactctatcaaaagctttgctcatgtcaagcttaagggccgaaaaacctttattaccttgagtcttatgtttgaggtgatggactaattcaaaagcaaccagaacattgtcagtgatcagacggttgggcaggaaagcactctgattttctgatatcaccaatggtaggacatctttgaaccgaagcactaacactttagagatcaacttgtaaatcacattgcaaaggctaatcggtctataatcacccattactttcggctgcttaacttttgggattagtgtgatgattgatttatttaatctactcatatcttggccttcattcaacacaccgaggacaacagccgtaacatcagagcctatatgatcccaataattttgataaaacatggcagacataccatcgcttccggggctcttatcgggactcattgagtggaaggcagccgagacttcagtggcagtaaaagggctgagcagtgagcagttcattgcttcagtaacagtagtcggtatagcattcaatacttgatgtagagcctcttcactggtgcctgaagcagtgaataaatcaccaaa

SEQ ID NO: 247682 - DNA, 616 bp, Cannabis indica
tcttcagttgtcatgacttgcgtcgatttgtagaggcattaggttcatcccctacatgcgtagaaaatgatgcaatatttttggagttaaatcaattagtatctccactaatttgctactctgatatgagattacgtaatatagtcatgttcttagaaaattagtttttttttttgagttaagaaaagtagtatttataaaaacaaacactttcttgtcttgttgaccatagaatagttaaccctagtcactttagaatagccagcaaacatgaaaatctcagttagcaatttagcttttctcaaagacatgatcagggcatcaccaaatttagtaaaggtgtaaactaagtatacaaccattgtagtgtttcgaggttttgttaggaccagacttagatgggatgacatttaaaatgtcttttgttgtctttaaggcatatctctagaaggactctgacagctgctaataactaatgatagaccttaccatttccatcaatatgcaattccaatattctgtaggaggtaagttgggatacattaaaacattaactaatgactacatatccaaatatttttccactcctagttagtaggatttttaacgacttacc

SEQ ID NO: 247683 - DNA, 1245 bp, Cannabis indica
atcagaaatcattttatgttgcatggttcacatgattattttcatgattatatgttttttatataaattctattaaatccaaaatatatagttattcacaattacagtgatgtcatcacagtagaaagtaattgtgatgatatgcttcaaagtatttagtcccatgatttatcagtgcactagatttacactgacgtgataatcaacgataaagtttacttacatagtgttatgtggaatgtcttttttagggtattagcaaagtatactagtatcggatgtattggttatacattaaacttgatcgatattgacaacagaaaagatatcataaacttacatttatatatttttaagtcaatatcacttagttgatcttaggtcaattgatcttaatcctgagatggttaggttctggcttaactgtattatttgtgttctttaacttgttcgttaaagctgaccaaatggatcgacccaatacttacatcttgggaacatggtagtgtaattaagtgggagcgctaatcatagatatggaatctataacttctataactattagaagtgaaacgttaatttctttcgagcttggcttaatgcgataaatgatagagcactcatttcagtaattatattagtttactgaaatatcatttacaagtagctaagtgttttgaggataaaatacattgaagggtagaatggtaattttgtccctactcgatgtagataatctatagaggatctttgattatttaaattgaaacaacaaataatttatagtgtatctatatttggtttgtagagtattctattagggctgaacatttagacctacaaacctaaaaacccggccacccgccccgacccgctgctaaaaaaaaactgaaactttgaaaacccgtgtgttcgggtcgggtccagcccgaaaatactccacacgggtgtcgggttcgggttttaaagttagacaaatattaattcaggtgttaacccgaaacccaaaaattaggtacacattttcgtgctacaaagtcagaaggtacagagttttatttattataaaataaaaaagtgtaagaatctctcatgcacctgtctttacctctgtcacctacaaaagtaggctatatctctcatccacgtaagtattttttattagatatgtttattcaaatgggaaacaaacttcagtttgttgtatttttatttttttttattttaatttttatcaaaataaaa

SEQ ID NO: 247684 - DNA, 678 bp, Cannabis indica
aaaattgatggtatgataagagatttcttgtggggttgtgagcaaggaaactgaggtatctacttgaaggcttgggatcaattatgccttccaaagtccaggagaggccttagattctaaaagacttttaaaatgaatcaagctttgctcgtaaagtagggatgggccctccttctagatgagaactcattgtgttacaaagtattaagagctaagtttcttaaaggaaaattgtttttaaagtgttcgtataagaactgggactcttggttcttgaagaatgttgtgaaatctaaaaaaatcataaggaaaggtgtgtgtaaaatgatttctaatgggaaagagaccaatatctaaactgatccttagattttgcatggcaaagagttctaccctaagcccattactccgagtactggcggtaactaaggttaaggagttacttttaaataatggggactgcaaaactctatatcctttttgactcagaaaaaatgagtaacatcattaatggggggaaacttaaggtagagataggtgggtctggatgaaagagccaaatggtttatttactactaagtatgcttatctggtccaagagccccaaaatgtgttgttgccccaaccttgtatgtgacagtcagtagtcccgtgcccgtaaggggaaataccaggtaa

SEQ ID NO: 247685 - DNA, 869 bp, Cannabis indica
aaaataatacggatgtgaaggatcttcaagatggcttcttggttgaacagcttgttgaatttgatgatgttgcaccgttgggttgaggggatctccagcaatcgtagacatgccatcattatcgacaccatgagtggagctttgatcatcagtcgccattgcagaatcaaatcaagatatatcgagaaagaaaatctgggatgaaaagaaagaaacagacgaaacagagcaagcccagcttcagtcgtaggacgtcgccggagaaggagcacggcgagaacgaagaggaaagaacggatcaagggaaagcattcctttcccgctctgataccatattgcggaatagaaagaagagagaagacttcattaattgtgatacaaattgttacagagcaatgcttgaagcagagtttatatatgaaccagactaactaacccaaacccacttaactaaacccaacttagactaggatataagtaccacactaactgtggtaaagaaaccgttaaaacagttagagaaaagaggatagactctaactgtaacctgtaagggtacaacaaccaattaacctttaacagaacacttaggaaaaataaggaaataacaatactcttaatattaacgatcttgaatttaataatttgcagttcaaatttttaagtaaagtattactcacatatataataagttaattagaatttttacctcccgaactttgacacgtaccaaatcatgccccctgagcttttaaggtcgttataaatgcttcatgaactattgagattgttgaatttaaagacttttatctaattttagtaaaaaaagtctaacatgtataaaaattcaggggcattatttagtacat

SEQ ID NO: 247686 - DNA, 1103 bp, Cannabis indica
gatgtggggctcgtgagatctgagatcccgaactccaagacattcttggggacgacctctccgtccaattcgccaaactcagagcttccttgtgtcagtcgcctgctgcttccatctctggcattggtggcgttcgtcccaatacaaaattggagagcctttgtgatgaagatgaagaggaggatgaagatgatgaggttgagaagttgatatggactgagagagaaagagagaggagatcgagagagagaatcgtttcagaggaaaacgaaagagaaagaaaagaaaaaaaaaagaaagaaaaagaaaaagaatgaaaaagaaaaaaagaaagaaaaaaaaaagaaaattatttaattttttatttataattttttaaaaattttaaagtaattttttaatttttttaaataatttttttacgtggaccaataaaattgtgccacgtgtacaatgtgtccagcccaacatggcacttaacacctaaaatggacagaaatggtaaattgctaacaaaatacgagtattgggagttttaccgcccaaatttgggttttgggggttaagtgaaaccaaaatgaaagttttgggggttttgccgccatttaccctaaattttatatttttctctgtagagatagtatcgccaaatcttcaaagcaaagaccattgtagcaaagttctaggtcatgagttaggtatctctactcatactccttcaactgacaagaagcataagcaataatccaattagcttgcatcagaacgcacccttgactatgtctgaatgcatcataataaaccacaaacttttcttgatctaacagtagagctaacataatagttgtgataaattgttacttcaactcttggaaacttgcttcacactgatttttccatataaaccggttgactcttcttggttaactctattaagggcattgaaatcttggaaaacccttctacaaattagcggtaatacccagctaaacctagaaaaattttgacttcagtgactatcttcgaccttggccaatctctaacgaattaaatcttctaagatcaaccatgatcccatctttactaacaatgttccctaggaa

SEQ ID NO: 247687 - DNA, 1671 bp, Cannabis indica
caataatagggaaagggaaagtcgtggtagtgaaagacgatagggactcttctaatgaggatgcctcgtccattcttattagggagggtgctcccccaaagtccattgtagccattgctttacgtagctttaagtttttttttacttatttaaatatttaagaagtattttcttcagtgcaaccatgtttaagaagaagaagcgcgcactcaaaaggaaggtcgataatgcatccagctagatatcacctgtcaagcaacaaagagtggaagttgttctcgctacgaccattagcccaagctccaaaacaccaaatataactgttgagaagtgctcagtgactacctcaatagagattcgagacttctcctgcagctaagaagtcttcaaaggatgaggcccagtccactcaggccaaaacttcaaaatcttctaagagctcatctagttctgagggcgccaatgctgactagcccaattttccaagactaagtgacactccttccattgtgcgagaaaaaaaaacaaggccaaggagatgcttaggttttaccaagaccgcttgatgttgagatcaataagcaactctatggtgccaaagatatgactgcggaactcttggtcggaaacattgtaaaggagattaccagtgtgagttgttttttcagagttctttgtatagattctgctgcccagatgattctaacttgctttattattcattatactttttttgtagtctaacttgaagctggcttatacttattcttgagccaaattagaaactctaaattctagcacagccaccaatgacttgtagaaggctttgaaggaggccaaaagagatgctaagttgaagggaaatgatttgggtgaagcaaacaagcaacttgttactgcggataagtctattaatgacttaaaatagcaaatagaagatatgacatcgtctaccaagcttgaagcagattttaagcaggaacccaagagggtgaagaaactcactgatgagagggaaggaatccacaaactccttcaaaataaagagataaagatcaaggagttgaccaagactcttcaaaaaaaaaaaaggaagtccttgctgaaggagaaaaatgcatttgaggagtctttggctactaagcaggaggcgcatcaaaaagtaggtcaaagggtacaaaacaactgccttggaggtcttctatgagttctagatgacaaacctcgaagataacttcaattatctgaaggaagatctctatgctaacttcttgggattttgtgaaatgaagaaagctgaagaggaagcaaagaagtctaatgagagctcttcggccgtcaagaatcaagaccaagttcctgggactcccatggagtgaactttgtcttcttttagccgatgggcctttatcaggtacaatatggctgaccaagcgggttccaaacctggatttatttttttattatgcttaagagaaatagttgatcgggaagcttttaagcctagacttactctacttctttatcttaatataaatatttcaatttattatatttttttctttgtattttctaccaatgcttgtgcaggcataagtgccccccaagtgactgagcagacttttgacacttggtcacttgcaatttacaagtattttatttatctgttca

SEQ ID NO: 247688 - DNA, 870 bp, Cannabis indica
ttgagcatttaactattatgcaaaagtatgtaactacactactaataactccttcagtcacaaagaacttgttattccccaaccactaacagtgataacaaaaaagaactaactaatgaaacaaaatcattatcacatagacaaaactaatcagccattcaaaactatgtcatacagacaagactaaaatactcaaaaccatgttacacagacaagatttaaacactcaaaaccatgtcacagagataagactaaaacattcaaaaatatgcacaaatacaagactaatcatagtagcaaaaattgaatcacattagaaaaacacaaccacgacgggcctgaccgaagaataaggcaacatcatgtagatataaatttaggaacgaagaactctaatttttttaaattagtacacaactctatacaaatcagttacttgttggaattttttttttttttggcatattaaataagtatttattttttagaaatgttaaaaaagcacctatgaaacttatcacatttataaagtataatatcaatattggtataatttaatattaaattctccatacttatttaactttaataaaaattataaaaaaatgctaactaattatatggagccactttatagtggtggcacttgaaattagttagtaatattctaaaagttaatatattaaattatacgggacattgtatgacgcccaaatacatttttatattaatagctattataaatggtgttaaaccagttaaagctagcttaagtgggcatagagtatgagggggagcgtgtgtgtactgtgtagagtcctgagatcgaatactaagttatacatttcttttttacccaaaaaaaaaaaa

SEQ ID NO: 247689 - DNA, 573 bp, Cannabis indica
tgattgaatgtagctaaggtgtttgctaaaatgactaggttaataggaacaagatattatgctattttgacaatggataaaatcactttgttagaaattgtcactttttaaataagatgccaagattcttttctgactttcaaaaatggcatctgaagaattgtactgtctcgattttgtgccacctccatacatttgagcctaaagcttcttaggaatgagatgagataatctttgaagatcacaaattggtttgctgtaatttgggattgcttcctttccttaaaaattgatgaaagtaactccatctttagattttgtttcacaaactcacctgtatgtgttctcataggctgtttcattcattttggttaggaaactttcattaagcaagtaacattaatactgtttagatagcaaactctgtttagccttgtttttatttattttttattgaactgttggatcatattagtcaatcctatgcttcttcaaattgtaccaaatttcaaaattgtgatcagggtcacaaatacttaacaccttttggctaatattttgcaggattcagtc

SEQ ID NO: 247690 - DNA, 1010 bp, Cannabis indica
caagaagttggttacaatctctgtagccaggttctataactacatgggataaaatggccagaaagttcatggtgaaattctttcctccatcaaagtctgcacagttgagaagtgagattgagcaattcagacaacttgattcaaagcaactttatgaagcatgggagcgattcaaagacttattacgttgttgcccacaacatgactatgagagctagatgcaagtttcaattttctacagcgggttgaatggtcccactaggactattattgatgctactactagaggagtgtcattgtctgaacctgcaactgaagccattaatttactggaggagatagccactaattgctataattggcctaatgaaagaaatactcacaaaaaggtggcgtggttaaatgaagtagatcctatgacaaatatagcagctcaaatttttactttatataatcaagtggcagccttagtttattagaagaatacatcaactgtaaaaaatgttgctgctgcatctacaccacaagggcctgagatgagtatagaacaagtacagtatatggccaataaaccttataataataactactggggaaatctaatgcctaactactaccatccaggattgagaaatcatgagaatctttcttatggtaacactaaaaatgtcttgcaaccgcctcctgggtttaatgcacaacaacaagaagagaagaagtccttagaataaattctgggtactttcatgatagagaccaacaagagatttaacaagaatgaaacatggttagataacatggagactcacttgtctaatactattgattccatgaagaacatagaggtgcaagtgggacgactggccaatgttgtgagtgctttgcagaaaaataatagttttccttgtgatatagttatcaatccgaaagaacaatgtaatgccatctcactgaggattggtaaaagtacgtgatggggtgtaagagacaaagtcaaactgacacagtag

SEQ ID NO: 247691 - DNA, 795 bp, Cannabis indica
tttattttattttagtggtgatataatgtgagaggctgaactgaaggccatgccatcaccatgcaatgggtattttgcaaactctattgttttctctcatttgatgtttgatgacaaatgtggaggctttctttgaaaaagtaatagtatgatacattttgcaaattaaattctaatacttcgaacaaacaaagaaatgtaatgaagattattttatttccattatattctattttattatctctaatcaaatgctacctgaatgttgcaatctatgaagtgggaatgttaggattttacagtttcacaagctaatatgtttccgaaagtcttattgaactttaaacaagagaaaagattaatttggatattacaagagatccattaataattattagtgttactgatgaaatttatccttaataaaaaatagttttcttctagaggtctagctgggttccttttacaatgagagagaaagagagagatgtgagttagattgaatagggtgttttgagatggaagagagaggtatttttttttataaaaaattctatctgaactatttacaatgctgacttttctacattttatactatgtacctaacacaatatgtgttattgtcataacactaccacatgttgcaattttaaatttttttttaatataacaataattgataagaaaatagatttgttaaattttaaattaattttcatttaaactatatatttgacacatacttgataatgacacacaaaagccaaaacacacacatgggacaacaaaactta

SEQ ID NO: 247692 - DNA, 1121 bp, Cannabis indica
taatacgcctaaattagttagggtgttacagccggagtccttacattcgggcagatgaccttggaaagattgaagtcatccaccaactgattctcggatatcagcttggccttccgacagttctccgtcgtcaccaagtccctgacgtttagggccttcttgtcataggtggagaaagtcttggcccgctgaaggaatactcgggtaggtgcagtctgcatgaaaggagggaccctaacccactccgtgagaagctcggggcgatccatggcctagaaaccggaggaaaataagaagcggtggcgatactccttcacgtgtttttgatggttgaaagggactagaccctcgttcaaagggtgggcccgaaggccataaaatccgtctttaaatttgtcccccttcttggggacagatacaagttcataaaagtacaaaatttcagctggacttggcgaacaccagctctaggcggcatacaaaataaacaagcctgaaagcaggcggtaagcttgaggcattagttggtaggcgcaaggccaacaaaaactaagaagtttacaaaatagtcctgaagagggagcatagccccggacatcaaatgggtctggctccaagcttcgaagcccccatagttgtgattgggtgtctcctcgtcctgaggcaaccggtggaaggtctcggaggctgagggtttgatgcctgccaccaccacgatcttttcaagctggtgagcacaagtcagtgtggagtggagctcgtccgcctcccatccgtgagcacgggacttaaagttctcctgggccacgggaccctgcatgacctcctccacggtggccagttgaacctctcccttctcgaaagacttagaaccagacgcggaagcagacattttggttttgaaaaaatcgagaaaatccagcagttaggccccaaaccaaaccctaatgttcaaaaaagggaatgggggtcccctaaccgctggaaagaggccccctcctgacacttgccaaataagaaaaccccaagagattttccttggcaagaatcgggtgcaaaaatcccaaaggcagtgacattgcaaaagaaaaaagggaaaaaagggcaaagccgagaaagca

SEQ ID NO: 247693 - DNA, 507 bp, Cannabis indica
acaaattgctactacatgacaaagatcaagtttgaagattgtaaaaattagatggctaaccttttgacaatcgtatttggtcataacctcataaaggtttatagttccaatcaaattattatctaaatatgcaacactctcgcatagcatcaaatgttctgttagcccagatcacaaagttagaatccaaaacaatgttctctagtatttggaacactaaaacacaagatgcaagtaaaaattgaaaatataaagattaattatcatattatacacacctcatttgagaaaacaacttctttagaccatccgtattccttagatcaccctgaatacaaagcccaatctcagtaatccatacataatctaatctaaagctcatttgtagtgagtataatgactattaagaagaatcaatttgaaacaaaatttcaaatttttgaaaacccacttcttttaaaaaattaatcataaacttaccaataaacatttgaagaagttattttt

SEQ ID NO: 247694 - DNA, 585 bp, Cannabis indica
caaactacggggaatataatgaggctggggagccagtcgatgctaacggtgatgtcctgatcgagggcgtagactatatcattgaggagcttaatgctgcggttcctcataggaggcaaagtgccttgggcgccaggtgggtgagtcctccgtccagggttactgagatggcctgcggtctgttaaccaggatgactacctgggcgagttggactgctacattccgcctacaacaatcgagccacaaaccctgaaagggggatgtaagcttggttgggtgctcatgcccagcaaggggcggtgatgccgttgcatcaatattttaaggatgtggcggacttcttcggcctctgcccggcccagttcactcctgagggaattaaatatctatctgccctctttgtcctctacgcttgccttaagtggggtatgccttctccccacgaggtcagctggttctttgatttgaagtccaccccaaacaagggaggtcgggatacttctatttctctcaactagacttcaagtggttgacgggcaccgatgacttggccatcaacaaaatagggcgttttgttgatgagt

SEQ ID NO: 247695 - DNA, 942 bp, Cannabis indica
cctaaatatggtgggacactgtatacaaactcaaaattgatattaattttgttgtgcggttgaagtaatttttgtgaaaaatcacattattaatgagtttttgcaggtccattagagttggcctaagaaaagggacattgaatgtttaaagtcactattatcaaatctagaacatctacaaaatgttggaatggattaaaatgttctaagaaattgtaaaagaagctaataacaccttataaaattaaaaaaaaaaatagaatcacttaaactaagattaaatagttccaaagttatttagaacatagtataaggcatttaattagttagttaattagagaattctagaaatatttaaagacatctttgtaacctataaatagaagtgaggtgtgtgcttagggtgcaagttggagcaagagaagtaagagatttagaagtgtgtaaaagttttagagtgtctaagagttatttgtacaaagtgttctaagtttgtactagtactcttcgataaaaataaagtatcataatttttttactcaacaagtgatattagagctaggttcgataaatttgtggtggtagaagagcttcttgttgtcattgtaaagcttacaagatgggttaagcttatttggtgatttatttttcataccacaatgggtaacgctcaagtaattgacggtattacaatcagaattacaacacttgttcaacgaggatagagtcatacctacaaggccaagacctgggaggtcgtcagtgcaactttgaagaaatggaagatcaaagttgggaaggcgatgcttgcaatcaagaccacgatcgaagaggaaatattatggcacatcaggaaagctgaatcaccaaaggaggcatgtgacaattttgccatcaaagaagaaacgcaagacttcaatttttagagaatgagctcttatc

SEQ ID NO: 247696 - DNA, 588 bp, Cannabis indica
gaggttatatatgagtgcatgggtaaagtgtaacttagggtcccatgcactcatatataaccactaacaagtttgaggacataacaaccaatcataggaatatgagccatgctgttgagaagactgtctatgtacttttagtatataatgctgagagttcaaaatcaaaatcaagttgcttagatacaaaggaacaactcaatattccaacaagtgcagaagaagaagcagtttcagaatcaatattccaagatattcagtgtttaagcagtttcagaatcaatattccagaaatctgaaatggcgttttaattattgaagtcacctaaagtggaaatgagtgatgaagtgaaactcataagagctaaagtgaaagagaccacctgacccaagaacaagaggtacacggtttttctagtttcatggttacaccaccagcttctattaaacacagagaagttcataaccaaactctggtaaatatcactctctctaatctaatgatgaaaaagtgtaatttgtgaatggatttgtagttgtataaggaagacatgagaagagggtgttcttcattttgtgctctgaaat

SEQ ID NO: 247697 - DNA, 1178 bp, Cannabis indica
cagtaatacaaagcaaggcaccaacctcgctacgtataaaatggtgatgacaagacatgttgactgttagaacacttagcgtataatatacattggactataactaagtatcacagctagaagaacctaagtgacggatagcgagggatccatctcgctataggaaggcatactcatggtaccttcactaatcagctccagacatctttcaataagatccactaccccgtcgagtcagctctctcaaatagaatctgacatccaaatgatgttgactactgaagttcaccttgtcacaaagaactgcgattctcaaatgaaccgttatgtcttcaatcatagaaatgacgggattcccattattaacctcggaaagacatggaaaaagctccagcttgctgccaggattattgtttctattcaagttcccagcaagctgcactttgcagtgcatctaaattcacgtcagcattgacccattaaaagcgaataaatcacaactgtatgattttcaattaataatcgtatttatttacgtggtgcgtaattaaagcccaccatttcggggaaatattattatgggattcgtatctgattgtaattaactcccaccctatgttacaatatataggggcagaatgtactgaaaaagagacgaaaaatctttgagaaaaagaaccctagtttttatgagaataatctgaataagattgacttgtggactatgcagaattttaactgcaaaaccacgaaaaaagtttgtgttatattttcttcttttattttctataatttctgtgcaaacttatcacgaaaataggcttattatcgttaacaaaaatctatgtcaacagtttggtgctttcattgagagcctacgtaaaaaaagctcagaaaaaaccctcctaaccaaaaaaaaaacctttcaccatggttgataacagagaaaatgttgatactcatcttgtagagactactcaccatcctggaaaagagccaatgggctcacggaggcctcccaaatcacggacaacatggtccacacgttcaagaaggacccaacataaaggtggccaaaacccagaatctacactgtccacacgttcaaggaggacccaacgtggccaaaacccaaaaatagggagtgaagaacctaacataagtgttggtggtgctca

SEQ ID NO: 247698 - DNA, 886 bp, Cannabis indica
aagtaacgaggataaggctattatcgaactgctcagggctgaacctctataaaaaaactgtgtctttttattgttttatcatatatttgttattataaatcatttattgcttataaaatagactcattgtcgttggctaaaagggaagtcaacatttttgtgctttcattgagagaaggatcacgaatcgctctttattcaacatccaatgccaatacgatggtgcaaactcgtagaggcctgactgatccggcaaattcacagacgctggatcctgcatcacagaacccagggaacacgagggttccgcctgctgttaatcctggatagccagcgagcgtggggaatggtgaaacagttcctatagatgaaattgcgcctggtgtgcaagagactggaaataacagttccgcacccaaccagggcattcataatacgactgtttcgcctggaaccaacgcccagacgactatcggagatgccactgaattacaaaatcttcgtgacgcactcagactcatgcatggtcataaaaataccctacatcataatcaagacgaactacgcgccgcagtaaatctcgcattcaacgaacaaaggcgtatgttcaccgaatggagggataaagagatggaggcattaagggctcaccatgcagagatcgaagatcaaagtcggcaagctaccgtgctgatacgaagagcctaccaaactgtaggtcagcaatcgtcgaacgtcattcccttgggagaaacggacgaggatccaacgatgaacacttccgagactgcaaatggtcaactgcccaatccgcaatcacgagttccactcgtgggtccaccggtaggcgagcagaccttgtgtggtaattcatcaggaggagtca

SEQ ID NO: 247699 - DNA, 632 bp, Cannabis indica
ttattattcttataaaaaaaatttaaaaaaaagtttctcactctcagtcatagtctcaatcgtttcattctcacgccaatcgatctcttcactcttcccctccattctcagtctcactcccaatcgcagatcgtcgaaaccaacagcccgacgtaccaaagcttcctttcaccgactcctccatttcactctcccaaactcaatcggcttatgatccagttcgagtgagaaggcgagcccaatcgttcagcacccaggtaagccactccttccatttttcccttatctaaaatttcagttaaaaatttgattttcctttttagaaaaaatctcgttcagtgattgggtgtgattacatatatatattttatataacccatttaaatcggcttacaatcccgtttgagcgagaaggcgagcccaatcgttcagcacccaggtaagccactccttccattcttctttcatctgaaatttcagttgaaagtttgattttctttttttagaaaaaatctcgttctgtgattgggtgtgattacatatatatatatttatatatctgtgtgtgtggcaccttcgatcaaaaagtatagaattttgatttgcaattttcgaatgattctcttattaac

SEQ ID NO: 247700 - DNA, 805 bp, Cannabis indica
taagaaaatttagaaaaactaaaaattagagaaactggaatattagaaggagagaatgtcacatcagctcttgaaagttctcctttatatatatatctatagatatcgataaatatatatagatatagatgttacctatctcttccacatgaatctttaaaaccaaacactttgaggctttttctatcctagacttatgcagggattggagtgatttgttgtaaaacttgggttttctctcctatttgtttgattggttaatcattgtgctaattcattgtattgtatcttttaacaatctatgtactatggttttccttcgccacaagtgaggatttaataatattgggggaggcctgctatgtggtctcctttttttttcaaaataataataataataataataataataataataataatattttattatgaattagaattgtttttcctcccattttgggaaggaatagccattgaactaaactataaggccattttatttggaatatggaatagttccaacttaaggtggcgtttggttggaaggaataaaaacataggaatgagaatgagaatgggaataggaataggaatgaaatagaatcaaatttaaaatgcataaaaaaaattgataaaaaaattattaattttttctcatcatgcattgaatggtctttcttttcattttaaaatggaataatcattctaccaaaatggtggaaaggccattccattggaatgacattccagcactttaatatgtaaccaaacaaatgaatagaatgaagattgtttcctttcc

SEQ ID NO: 247701 - DNA, 599 bp, Cannabis indica
tgccccaaaccccaatcccaaccccattgacgacggagaactctcctctgcttgttcctcccactctcgttctcgatctccttcattctggccttctctcgctctcttctcctttcttgattttcctctgttgctctgccgagctgcaagctcctatgatgaatatattaagaagatttatatatgtatatatatatatatttattttttgtttgtatttttaatttttcttatatgggttttgcatagatctttgtggtgtaacatgtttagtactttttaattttcttaaatcaacataaatttgcctactttaaaattttacttatcagcaaaacattctcctcaattccaacagaattggttcctgacttgcaaaaggatgctttcatcaaatgagtcctcaaggccatcaatttgcaatggattaatttgataggcaaaaggtcaatcttatatataatggggtcattctaaagtatcaatatactactaagcctgcttatatttaaattatgattgatgctttctgctccttttgttttaataaaattgattctaattcgcattcctttcccaaggcaggtaaatattagaag

SEQ ID NO: 247702 - DNA, 695 bp, Cannabis indica
aatccttccctcgtcgggtaatatccgccccgcccccgttttaatttaaacgggtattggggcgggtatggggtgggggagcaatccccgcacccgtcccgccccgtttacatccctaatggataccaaatatgttctccataaccgatgggtattcccttactctattattagaagtggagcgagaacgaggacataaattagtaggggagatagggagtgaattctctaaataattgatttgattcattgcgcactgttagaaagaaaaaaatattagcaaaattgttgaagtactaatcatttattttttaggaaaaaataatattgtttttaaagaaagttttaaaaggtcaaaatgggaattaagctcacaagtaaaggaaaaccatcacccactactagtgtcgtgggattcccacgtaattatagtaggaaggaaattaaaggcaattacaacgcacaataataccaaaatataccttgttaagaaataatggtgacaaaatactctgagagagcgaagtattaacaaaaaacgacgtcgtttgtaggaagctgaattcacgcgctgctagaagagcagttgctgaggtgtgtgactctccctctctcctctaccttgtccctccaagttcactatttattagttgtgtagcagtttagaatttgtagttcgtaaacttaataccctt

SEQ ID NO: 247703 - DNA, 925 bp, Cannabis indica
gacctcgcacatggggcttcatccaggtgggcgtaaccttgtatcccatgcaacatacctatagttttgatcttgcatacccccttttactcgcttctcatgattaaagggtacctccagacctaagagggtacgagaggggacctcgcacatggggattcatccaggtgggggtgaccttgcatcccatgcaacatacctatagttttgatctatcatacccccttgtacccacttctcatgagtaaaggtacctccttgtatgtctacgtatatttaatttgactaaattggggtcttagccatattaatgtggcccatctcttagtgattaagagtactaattttctatatcaatagaggtcatgggcataaaagatgtgttgagttgaattaaagataatgatgttcacaatttgttggttgaatctgatagcttagttactattcaagctattagaagttttgttagtttcaattctatttttggcttttatattattgaatgtcaaaacttactttcttgtttacataatgtttctgtatactttgtaaaacggtttgtgaaaaataaaactaacataattagggggtttcaagatgaatggaaggtccagtttaggtcccaaagtcattcgggaatgacttgtgcaattatgggtagtgttgaccattgatgttctcggtcaaaccagtgtaacttctgtacatcattgagaatcatgtatcgagagggaaggtggacacccattaacataattagggggttttttaagatgaatggaagattcagttgtggtcctagggtcattcaagaataccttgtggattatgggtagtgttgaccagtgatgttctcatccaaagtagtgtcacttaggggtgttcgcggtgcaggtggtgcggtttttgactattttttcaa

SEQ ID NO: 247704 - DNA, 532 bp, Cannabis indica
gctacataattaattatatgtgtatatatatgaacaaaactatatataatggagattcaaaagtttttttcaatatatttagctttatccatagctaaatagcattcaaacaaactcatgcataaaaaactcatgaacaaatctatatcttatgcatcctgaaggatatatatattgtacacatatataatatgaacaatactatataacataataatacacaatagtaagtaatagtgatagtgatagcagtttctcagggcaaataaagaaaagaacaaaaaaaggggtgcttatatatgaaacaaacaaaagaactctacttaatttataatattatatatagctaggcaaagtcctgaaataaagagtcatcaaggaggtgatcaggccaaacagaatgggtcacttcatgatctccatagcttgaattaataatgcaaccataggtactctgattattctctagtactgtagtattgggggtggtagtgatcccagcagccgccgccccggaaggtggagagggagt

SEQ ID NO: 247705 - DNA, 1210 bp, Cannabis indica
tgttcatctgctttttttgggtttgatgtttgagtttctgggaatttctgttttgagtttttgtgtagcgcgttagattcctctcttcttttgtgtttgaactgcttcttttcatcgtatttttttgtcgaggacccattttttcttcacaaaatgacattcaagggttgagagtagacttcgccttctcgattctttccttttttccttttctttgcttattcgtaatgtcactatctgtgggattcttgcacccgattcttgtcgagaaaaaccttctaaggctttctttttgacaagcgtccggagggggcctctttccagcggttaggggacccccattcccttttttgacttagggtttggtttagggcctgactgctggatttttcaatctttttcagaactaagatgtctgcatccggttctaaatcttcaaagaaaggggagaagtgcctggccaccctggaggaagtcatgaagggtccggtggcctaagaagggcagaggtcccgtgccaacggctgggaagcggctgagcttcactctaccctgacttgccctcaccagctggaacacatcgtggtggtggcaggtatcaagcctgcgaccttcgggacataccatcggctgcctcgggatgcggagacgcccaaccataattatgggggcttcggagcctagagaaagacgcacttgatggccgaggccatgcttccccttcaagattactttattaattttcttgtgtatgtcggccttgcgccatacaaactcattcctcaagcttaccgcctgctttcaggcttatttattttttattctgcccggagctggggctttccagtccggtagagattttgtacttttacgaactcatttctatccctaaaaagggagataagtttaaggacagtttttacggtctccgagcccatcctttgaatgagggtccggtcccttttaattatcagaagcatgtgaaggaataccgtcaccgcttcttcttctccttcgggttccaggctgtggagcatcaggagcttctcacggagtgagttaggatccctccttatgcgcggactgaacctactcagcttttcctccaacgggccaagacctttgccacatatgacaagaaggcccttgacgtcggggagttggttacgacggagcactgtcggaaagccaagctgatcctggggcatca

SEQ ID NO: 247706 - DNA, 869 bp, Cannabis indica
aaagattgagaaatctaacggctgggaatcgtgcagaatatgaataggcaattcataatgatcttcgaaacgtacaaccgccagaatcaagggaggcgtcctttccaagaacggattttggcaaaaatgccttccgtaattattaaaaagctctttttactaaagcgaactttttaagtggcaattgttatacccgaaatttggcttgtggacatgtgtcaaggtaaagggagtgtgaatcagtgcaatatctttttatggaataactcattaattgcataagtatcagagtatatttgtaacccgctgactgtaaggtcttaggcgaggaatcaatgtacaactggcacgtagtgtattaacaagaaaccatatgtcgctgaaggtgaataacaagacatcggagaaaagtaacacatactttagcttgcaatatgcaaactaagtgtaaaagtcagatcgacatgaagaataagaatgcgagatgaccatctcgatacgaggaaacttcctatagcttcatccaagtaacaggagtgaggctcataaccctggcaagtcagaagatttctatatacccgtgatcaacgtaagacaaatcttgtcaacctcggaaagaaaaatggttccagctcgccattgggatcactacaatcaagtttctgtcgagacatctccagattcaacaattaaagatgtgtttattacacgatatttttgacccactaaaagcggggaaattacagctatatgattttcaaaataatacactgcatttacattttgtgatatgtaatcaaatcccacgattttagggataatgactgtaatcatattttagtcagctatgtaattaactgccactatgc

SEQ ID NO: 247707 - DNA, 988 bp, Cannabis indica
cttttcaattccacaatgtctttacagttcccccttgaaaagcccaaccaaagcattctaaggctcctcctttcctctcttttctctccattattggtaataattaccagactattctttaatcaattcccttgaataattttgtgaaactaatgtatagagttcaaatatttatgtattgatgatgtgatgttaattgaatgtgtgtgtatatatatatatatatacatcttgacacagagaaaagtggcttcaaagctcatagaatcttatctgctaaggaaacttcccttggagaagtatggactaaaaccagaacacccttttgtggaagactatgcatcttgccagatggttgttataccagaaaaattcatcccagaagctgataagggaaacattgtctttaagaaagcatcaaattggtggttctgggaaaaaggaatcgagtttgaagataagtcgaaaattgaagctgatgttgtaatccttgcaactggctatgatggaaataaaaagcttaaagcgatcatgccagagtcattccacagcttagtggactatccatctggtctcataccactctacaggttaaacaaataaaaaggaagaaaacaatgaacattgagtttcatattttgttacaagtttatttatctttgaatttcttttctctgttttttacaggggtactatccatcctttgatcccaaacatgggatttataggctatgtcgaaactgttgcgaacctgcattcatcagaaatgcgttccatgtggctgtctcgattggtggacaagaagtttaagctcccgggagtgccaacaatgcttgacaaaacacttaaggagatggaagttatgaagagaaccaccaggttttacaagaggaactgcatttcaatttacaatgtcaatcacaatgatgaaatatgtgaggaaatgggatggaccgcttggaagaaaaagacctgggtatctgaagca

SEQ ID NO: 247708 - DNA, 1030 bp, Cannabis indica
acacattgtcagcaaagatggaattaaagtggatccaggaaagatagaatctatcagggattggtcgagaccaaaaacgattattgaggttagaagtttcttgggtctggttggttattatcgtcggtttgtagaagggttctctaaaatttcaacacccttaaccaagatcactaaaaagagttagcgctttgtgtggacggataggtgtgaagcaagtttttaggagctgaaatagagattaagcacagctccagtgctagccctacctactgattaggaaaagttcgtggtttattgtgatgcatccagacagggtgtgaggtgtgtactgatgcaggccaatcgggttattgcctatgcctctcgtcagttcaaagaatatgaacagtggtacccgactcatgacctagaactttttgcagtagtgtttgctttaaagatttggcggcattatctctatggagagagttatgaaatttatactgactataagagcctcaaatatttctttactcagaaagacatgaatatgacacagaggcgttggttagagttgattaaatattatgacggtgagatcctataccatcctgggaaggccaatgtagtggctaatgccctgagtaggaagggtctcgggcaggtaactagtatgatttggatttcacctcacttagttgaggacatggtcagatcaagcattgagtttgttgtaggcaaattttatagcttgatgctgtagtctgatctattagaacgaatcaaagcttctcagttaactgatctagaattagtggagattagggaagaggtttcagctggttaagccatagattttatagtgtcagatagtgggatgttgttatttaagaccagggtttatgttccaagtagtatggaacttagaaatgaaattcttgaagaggttcataccactccatactccttgcatcttggcaccaccaagatgtatcaagatcttaaaccctatttccagtggaactagatgaagaagaatgtggtagaa

SEQ ID NO: 247709 - DNA, 872 bp, Cannabis indica
aaagtagatagaaaagctacgcttagggatatcgagttccaagtgggagatttttatttctccgagtatcgcctatgaaagggatcgtgatttggaaagaaaggaaagctaacccctagatttattggccattttgagatactagagcgagtaggtcaggtagcctatcagttagctttacctcctgcgttgtcgggaatgcataatgtgtttcatatttcattgttgagaaagtatgtatcaaactctacacatattttgaattatgatgatattgagtttagacatacttatcgtatgaggaacaacctatccaagttttggatcagaaggaaaaattacttcagagtaagaccattccgctggttaaagttttgtggagaaacaataaggttgaagaagcgacttgggagttagagtcaaagatgcgggagtagtatcccgagttgctaaagtaaattttgaggacaaaatttctataaggaagagatagttgtaatatcccggttctctttccattcaagtcgaccaacacgcttaaattgaaactcaaggtaagaaaagtacatctgtaccacataacatgttaacatacaattattatcattatgactcggttatgatcgaggtaatagaatggtgattaccgttaagtgggttaaagtcatgacgtcaagtgaaactgttgttagattttttacttgtcgattatcttattagacagtaacagagatatatggatgccaagttaggacattggcgttgccttattaggcaatgagagatatggatgccaaggtaaggcatcagcgttgccttattaagcaatgagataaatggatgtcggagtagagcatcagtgttgtcttatt

SEQ ID NO: 247710 - DNA, 800 bp, Cannabis indica
ccatttcttatactcactttgaccgctatcctggtcaccctagaacctttcgttctatcccataattggtggttcatttagtttccacctactgatctgctcgtaagttgggttcatatatttcaccacatctaatggtacaactgaaagtgccagtagtacaagaatagacacaagacaagcttgttgttttctcaattctcggatttgcttcctcttgttgtctaatcacatcctgcatagcagaattcacatgtttccagtattacgacaataagggattcttttccttaccgtttgctccgagcccaaataactcgctaatcaagaatgtcatacatttaatccacatctttcaaacacttaaaactcaaatggatatcaatatcaatatgcgtataccatacacatattcttagtatagataatctatacactataattgtctaagcaagtaagataatagcaaataacataaacatgcttactataccatgagtcgacctgtcctcgtagaaaatgtacatattcaacaagtctttaggacctttaaaaccatggctgctctgataccaagttgtaataccctattaattttataaactagattaatactactttattaattaattattaaaatttttgagaatattaaaaactcgactaaaataaaagactaaaaacggacaatataagggcaataaaaaggtatttcggggatccctgttataaatagttttacaaaaacactatatacaacgcctcaaaaatataaaatcaaaatacacaatagatacaac

SEQ ID NO: 247711 - DNA, 1341 bp, Cannabis indica
ttttcaacattcttttcttctctattctcttcccttttctaaaattaatatatgtgaatttgctacaatgaatatgagtagctatacagttaattagggtctagatagagattgtttgacattgatttatggtttctaatatgatttaattttccctcaatttctatgtattttatttcattcgtacttaattacttttaattgcatgatcaccaattaactgtttatgattttgatgtaagatctgagaagtgagtatcaattatgctatagtgaaatagaactaaatttcgatataggatgagagtacttatatgatttagatagcttatagggtttatgtgtttaatgcctgttacatatttaatttatcacgagagtagaaaatttgcatgtgattgagatttatatatttgagaagactataaattacctttgtaaaattgttattgcattgaaattggtaataggaagataatcatattaggccctaatcagtaaatacaattgaaaccgaaagtcctaacttttactcattggtaatttgcctattaatttacttgctttgtgatttttattgttcttattattttttagtttaattttatctcaaattttattcaaccaaatagaagtaagagtttaattttaatgtacttaactacaatcctcgtgggatcgacgtcactttttgtgagtaatacttgttaaaacgatatgtatacttgcgtgttgcaaaatatcacaacaggtttttggcgatgttgtcgggaattgttagttaatattaataaaaattaaattatgttctaatttgattttttttattaattttactaatgttttactgatgagtttgacctgcaaggtaaatccagatgatataccttgaggattttgtccaacgacacaattagccattctattctgcttggaggagatttaaagagcttggagagagatgttatcctactttctcaagtgggtgttttacttggctcttttataacggacttgatgatgaaacaagaagctgggttgattatggagcaaaggtaactggagcgcctctattaaggagaggctatgatgtaataaatctgtttaataatatgatggattttgattacgactggcattgggatccatcactttagggttggagtcaccaatacccaccttattgcccaaactcaccctaaccaactgaagaagaggagaatctattatcacttctacaatcatttccaggagagattaatcacttgacggacatggtaagatccttatgtgataatttaatggctcatgattcagaatgtaataactgttggaaattat

SEQ ID NO: 247712 - DNA, 1006 bp, Cannabis indica
attgaaatgagttttacttagggcatataacccaacaaaaaggtccccatccctcatcaagagagtcttcatggacatcaataaattccccaatgatgttccctaaggctgtagcaagcatttttgacttgctaaggaagggcaaatggtagatttgaacccaaaaaggagtacttgataagttgttcactgtgacattttgcagagtatctagggagtaaaagactacttaatggttttgaaaatgccaaggttccttgttcaaaacccaaaacttatcccctacacaaccgaaagaaatttttaacataccatctccatattcagatattgtaacaggaaatctacccttccaatggctagacatttgatcattgaaggtaggtttatggacatagttctcagtgagaactcgtgctataaggatgtggctcaaggtgttagtcgaagcaggggtgacttcagcaggaaaaatggcaacagaactttcttcttcagtaagagttaatgtttaatcgagggagtgcagaagaggatccatcacggcaggcagaaaaaatcagatcaacaacaacaattaacacattaacacaggtttagaatgaagaacaactgaaagcagaaagaagagggaaaataaaacttttgaaaaaatagttaaaatcccaaaagagtagttaaaaatacacaactgcaacagacccaacatggcacttaatcaaatagtatcttaagttttaaagagtaattggcggcaaaaccccctcaactcttaattcacttgcaaataaccatccaatcttatattttagtggtaaaaccctccaaagtactaaatcgttagcaaatttaaggtgccatccatttatctcagttaacttttgacatggactgcctacatgtacatcatgtacacatggcatatttatattggtccacttaatataattatttaaaaattataaaaaataattcaaaaattaaaagaataatctaaatttataaa

SEQ ID NO: 247713 - DNA, 518 bp, Cannabis indica
ttttttttttttttttgtgtttatttcaagttttacatgcatcattacattaatataaaattggagatggttttaagcatgaaagttccataaattttggaaagtttcataaaattggagatcgtattacatttttttttttttttggaaagtttcgtttggacccatgaactttctttcaaattaaagttttattttaatgtatttttgatgtataaaatctaaatgaatgctataatttttgtatatacattcatttagaattgatttgggcagatttggtcgtcagaatcgagagttccgaccaggtttggggtcgagtccaaatgacctgcatgtagaaaacgagtcaaattgacccggttgaaggaaggagacagccccaaacgatatgttattttcttgtttaatacagcaacttttcctttaacaaaaccacgttccgattttttatatatatacaattttaaatatttaaaatattaattaattttttatttgtgttaatttagtcaata

SEQ ID NO: 247714 - DNA, 503 bp, Cannabis indica
aataggacccgagaatacaacatctgaactatgagcaatgcgccattgattaaggtaatttttagccgagaacactatactatccacactaccactttattttgccaaaccttatcattcatcgcattccaaatagcccaacaaagagctaccaatagtttttacttgtccgaatcaagcaccagaaacttggccacgcaccagtccataaaggatgaatttgactgcactaaggtgccaattccaactctgtcccaacagagtttagcagcagggcaagcaacaagagcatggattatcgattcatcttcaacgttgcaaattggacagttagcaggcacctccatgcgtttagtacgaagttgaaccatggttggaagacaaccttatccaactctccaaaccagatttttcatttttggagggagttttaacccccaaaacttcttccaaaaattgtcaatcactgcctcttcttgtatattctcaccatgcatatcttg

SEQ ID NO: 247715 - DNA, 607 bp, Cannabis indica
atgattttccaacccttctctcacctgggaatggggtatttataggttttaatggcctgagatacacttgtggtcctcaaggcacaagtgggtcttagtgttgctgcgagtaacaggtgcatgaggtggtcttgcgccttgtaccattgtcgcgtgtcaagtagtcccgagttgaaggagtagtggttgtagagtacttgttgtagggacgtcatgggctacttgttccatctcaccagtaggccacgatgaggatgtggccgtactcagtctcgtacctctctacgtgcaagccttgtcctttgattccttccttaataatttcctcttcaacacgtattcaaattctcacttctcttcacatttctcaaactcattcacgggtctcgcacaacacggctttcgtacaacacagctcgcacgtgagcctcgcacacaccgctcgcatgcgagcccttcacacaccacacacagctcacattcgagcctctcacacctcgcatgccacggctcgcatgcgggtctcccacagacattttgcatcacgacttgcatggacgtctcgcatgcatcacgacgtgcgtgaatgctccaccacttgcacaaa

SEQ ID NO: 247716 - DNA, 792 bp, Cannabis indica
attttattttattttaagtgagttatattgagcctaaaccatttctttcatgtgttctttgggactttttcttttctttttttgaaaataagcgtattcgtgcattaactaaggaaattgttattattaggcttgtaattggtctttggtgagcttcaacttttttctactaccactattattattaggcttgtaaacgtcgtcgtttcgtgggttgtggtcctcaaagaaatcatctttttcttttggaaaaaggttaaagcaagttaaaagcttttactccatcttcttctatgtggcactgtatactaatccaatgcccaattgaagctctgtgttacatacttcatcttcttcaacaaatttcgttggtaaaaacccttattttcgttagtattcctcatcaatgaggacatttcgttggtaaaaagtcgttgggaatagttcgtcggtaaaaataattatcaacaacgacttttaaagtcgttgggaataaaaattatcaacaacgacattgtcgttgggaataatatttttttttaaaacctgagtacatcagcaacgacattgtcgttattgatactattatcaatgaggacaaatttcgttattgaagactttttttttaaaaaaactaaataattatattacaattatttctcattaattattaatatataatattatattaaaattattaaattaaataattattttaaatttatatttttttaatttatataaaattatttaattaattaattaatatataaaattatttaattaattaag

SEQ ID NO: 247717 - DNA, 533 bp, Cannabis indica
aaggcatgcaagcaattatcacagatgttttggactgggggctctgatgtcacttggccttacaatctagaggaattttttaaattttaatggatttgaatactatcattgtgtgtatgaaactatagtcataaattgagaataaatgattgttaattaagtccatgaagttattcggaggttttctttttactggctgttgagaaaaaattaaggaacgtaaatgaaattatagcaacatcgtaatcacacatatatgattttaatttttacaaaaggaagtcttataaattcaaatctttcttctcaataaaatatataacatacaacattaggacccttaatttaacaaaaaaaatattagtgttgggaacagatttggcatgactgatcaatttaaaattgagtgctatctattatttaaaaatcaaaaatattcagaacgggagacatgccgatgatccgcctgggatgatttaggccaatcataatgtattttaacttctggaattgtcttttggtttttttttttt

SEQ ID NO: 247718 - DNA, 2045 bp, Cannabis indica
ataatgtatgagataccaaatgacccctaagaaaattatcatgcctaccccaatgaaaaactctggttcaataccaggagaaaagaaacataaatttctgtttttgttattattcgggtttgagtaaaaggattgttgcggatgcagttaatgaataaagcttaccgatagcatcataaacaacatcaaacttctctggaagatcttcgaagttttcttttgtgtaatcaatggccaaatcaacacctaagcttttcaagaactccagttttcctgtgcttgcagtggctgcaactcttgaagcaccaaatacgtgctttgccagctgtgaagaaccaagacacagaaattgacagctttactattaattaagagaatgaaaacaatatgcaacggcttatacattaaatttcaaatgcatttcattcccaatacttccatattggaatgatttgtggtcagtaactcactcactctcttgtaataattgatgtatattagagtaattagtaattactgaattgaataacaaaaggattatgtgctcaggagaccaattatgtaatgacttaataacagctaatatgtgcatttcaaagtatgtggtttgctcacgcaaatgattatgctttggagtgaattgtagctcagaatttaaactaggcctacatgcctcaaatttcaatgagtgttaacgagttaaggtaagatttatagtgctcattatgaaaattacgttctatgttaattttaatgcttaagaagttactgtagttttattacacatgattggaatttggaacacaatttgtaatcattgtcgttttacattgtaactattctgtttttagcaatgtaggtaaaactaaaaagatacctgaatgaccaagcttccaactccaccagcaccattcaaaacaagaatagattttccagctgaaaatccagtcctttcaaggccctcataagcagtttcaatggcaagaggaagtgcagcagcttgagcaaagtcaatattcttaggtttcaaggccaaaagtttctcttcaacagcagtgtactcagcaagagacccaaattgcttaggaccatccaaggctttctcatgtatgtctccatatacttcatcccctacttttaactccttcacttcactcccaacctttactaccacaccagctacatcataccctggaacagtcttcaaaaccaataggaaaaaatcagaacttgtgaccttacaagtttcatactcaaaaatatatttataaccattaacaacatgaaaatgttaaatttccaacaaaacacgattattttgttaataaaatttttgataatgactatctttgctatctaatgaatgagaaaatcataagagtacccagttttgagtctggcattttctcatcaaccaaacagactaagaaaacagaaaattttctaaagcagctaatgaatgggaaaatctaataatacccaatacgagtcaggcattttctcatcaacccatcagactaaaaactataaaagctcgaaagaaaatgaagaacttaccggaagtggtgaatcagtggccttgaacttgccgagtcttctcttgaaatcaactgggttaagagcagcggcagctactttaatcaagacctggtcatctttcacttctgggaccgaaacattactctccaacttcaaaacatctacagctccatattctccgtacacccaagccttcatctgggatgggacagaagagagcttcgaggtctcggttgaagcaggggaagagggttgggaactagcggagactctgagaacacgagaaggaacatgggaaaggcagagtttgtggggtgaggagaagatagtagaagagaaagttttagagattcccgggaaagtgatggaaaatgggtgtggattaaggcgcaattggggagttgggaaggtgagagtggcaatggcatacattgcttccaactgtcccttaaggcttaacggcttatcttctctactcttctctacattttaactttttttttttt

SEQ ID NO: 247719 - DNA, 872 bp, Cannabis indica
agacaataccatgtgattgcacaagaactatatgcctctcactagaccccatagcttacaatccacctaagtttgaccattcatttcaatgcaatccataactgtgctacatatcttatcaaaggtattattgattataaatacacacaagcctaggatcactaccatcccaactcctcaaattcccaagtaacaagcttatttccttcaagttttctaaaaacatcttgttcattttcacttcttcattgttcctttagacactcttattattacaatcatgggtttccggtttgccaccttagttcatgccaagcaactcattcagaggcctttctcaagcaccaaaggtgtaccaaaaggatttttagcagtttatgttggtggtgaaagcaacttgaatagatttgtgattccagtggcatacttgaaccaaccttcattccaagactttctaagtcaagctgaagagaagttcggatttgatcatccaatgggagctcttacaattccgtgctctgaagattccttcatcgatcttatttctcgcttaagctcctaatcatatgaatttagacaccaatagatgataacaacagctaaccaaatttaatgttaacaattttttaggcaaacaatgcctatatttctcgtaaatattttttttcttgggatttaacaaataatgttgtccccaagaatgatacaaatgaatattaagaaattttcttacatgaattttatgtgattggaacctttttttcttaagattctaatatagaatccttgtacacccttggtcttcattcttttttggcatttttaaaaccaaaatattgtagtgcaaattaaattcttgacatggaatatgt

SEQ ID NO: 247720 - DNA, 684 bp, Cannabis indica
taaatgtgtcgtccagagcaaacagcgtgtgcgaacagcttgtcaacatatcactgtctggagaataaggttatcacaccatacaagatgtgcggaatattttgaccaacatcaacaattcagcctcgcatctagggtaaacacgaggatcataatacttaagtattctattttgttatcacttaaaatagaaaatgtcctagctaaaagtttcaattatatatataagagtaaattttggtacaaatacttaagtttaactttcgattgcaaataaatacttaaatttaattttttatggtaataatatttaagttatatttttagaacttccgtaggtacctgaacgttaaatgtcaagtgatcattattcacgttttatttttttattggtaaatttaaattaatttttaaataaaaaataaaaatttaatgacatggaccaattagggactctcacgtgacaatttacttgatacttatcggcttataacttaagtattattaccgtaaaaaattaaaatatttatttgcaaccgaaaattaaacttaagtatttatgtcataaattattctatatttatatatttttgtgacaaggttgttattaaaaagtttgtagctaataattttagtcacaataaaaataatattgccactataatttattttaatcacaataat

SEQ ID NO: 247721 - DNA, 730 bp, Cannabis indica
tcagaaactgaaatgatacaaagtgtttaacaacttatataccaactgagattacaagagaaacaaacacacaaaccaactaactaaccaacatccaaccacctaactaactttctaactaactaaccaattcactaatcaagtttaataaattcaaaacgataccatatttaatatatagacacttctggcatcaacattacagaacttaatatttcccttaattgtcaagagcttcaaagttgatttccttaaaatttaattttttatataaataattctctcttttttttttgaacaacaattcttttattcatttggaaataattatttgttatgagcactgaagagtacctatccttgtaactattcaattgttgtagatattcttttttttatttatttaagcatatatattacaatacataacttgggacttgaattcaagactttcaacacacgcactctcctataaccacttgagctagcctcaagtggttgtggatattcaattaatattcactacactttgcaatttcaaaataagaaaaaccaaatactatggaaaacagatgtcttccaccttcaggtgtggtttctcttccactaattttcttggtcgtgggcaaccaacaccagatcaacagtcttacctttgtccttgaccgaccctgcaatccttcaactggttcacatctctctactcagcttcaagagtaaaactaacaag

SEQ ID NO: 247722 - DNA, 842 bp, Cannabis indica
tatttttataatattaaatatgggttaaagtaaaaaaaaaaaaaataacaacataaatgttgacttcattgaagtactaaatacaaattttattgatagaagttttaagaaaattaaaatactaaaaataaatagaagaaattacactttataccttttttatattgttctcttttatttttaccttcttttttaaaatctatcatttttacctcttttttaaacattgtaccaattttgctcctatcacttcaagatactctccatatgactctcttatgttaggatattttgggtacaatacatataaaaagaggtatgtttcaaataaatataaaattagagtgtaatttcctcttaccccattattaatctatgaatactatttatttttaccttctttttaaaaatactatttatataatttttcttattatttattgaaaaatataactattttctaaaaaattacatactttatttttaaataccatatttaatattctttaagaaaagaattctcaattatattttaaaatactatattttaaagtttaaccattatatatacgaaaaaaataaaaaaatacaattatatttgtttgccttaaagcccctaattaacttgagacagacctgagtaacaatcatacttagtgatcctttagagcatattcaaatgaacaaaaaatcaaattgaaatttgtttgtcctaaagccccctaatttgtttgcttattgataccatctgccctgtgtgcaaagtaactggtgaaactatctaccattgcttggtggattgctcttttgccaaagcgtgttggcaacagttggctgctggt

SEQ ID NO: 247723 - DNA, 671 bp, Cannabis indica
atatttagtgtaattaagtttttatgccatatatatcaaaacatatctttattttcccatatttttgtaaatagcccattttgttattataagtgggggggatcatagctttggaattaaattttggggttttttatactactgaaatttaatttttattttttattttttttactgtaaataagttttatattgtgtactgtgttaagttttcactgttattctacagttattttttagttgttccattgttgtttttattgttctattttgttattttacagttattttataaaaatacaatatttttgtaaaataattcgtgtgacaataaaattataaatatttgctcaaaatttagtatttttttttttggtaaaaaatccttaaattttcttttgaagctaggaattacttaaaggtatatatagttaataaagagaaaaagaaaaagtagtacggtaaagtatacgaataaaaacaaattccaaaaaaaagaaaagaatagagaaaactgttacttcaagttaggaataaaatctttcaaaaaaaaaaaaagttaggaataaaagaaaaagcaagtgaaatatattgtataggctatgattcctttcgtttccttgtaatatgagagcatctctaaataaatgataaaaaactaaatatagttt

SEQ ID NO: 247724 - DNA, 592 bp, Cannabis indica
tttttttattttttttttactgtaagtaagttttatactgtgtactgtgttaagttttcactattattctacatttgttttttagttgttccattgttgtttttattgttctattttgttattttacagttattttataaaaatacagtatttttgtaaaataattcgtgtgacaataaaattataaatatttgcccaaaatctagtattttttttttttggtaaaaaaatccttcaattttcttttgaagctaggaattacttaaaggtatatatagttaataaagagaaaaagaaaaagtagtacggtaaagtagacgaataaaaacaaattccaaaaaaagaaaagaatagagaaaactgttacttcaagttaggaataaaatctttcaaaacaaaaaaaaagagttaggaataaaagaaaaagtaagtgaaatatattgtgtaggctatgattcctttcgtttccttgtaatatgacagcatctctaaataagtgataaaaaactaaatatagtttaggaaaattctagaatgcacactcttaaaatggatatattgatgcaccccctatctgttttagcatccgaaa

SEQ ID NO: 247725 - DNA, 632 bp, Cannabis indica
atttcctaggtctagaacaattccattcttcaattggtttcagtaagcttctttcacctaaaatctgaggatcaagatctttgcccttcttctcgctttcttctatcaagaccgccatcggctggcgaccgactattctgtactatagctctatacgatagtatttgcgagccagcatctgattacatcgcactactcccacacccactagtttctgaaacttcaggggtaagtgcttgatcgaactaattgcccctagttcgattaatgctggaggaccactgggtcaacgtgatagtatctcacgttctcttcatcttccttcggcaatataatcggaggctctttattttcttcacgtatctcttttgggcgttattattcctctcctgcaatatgtggtattcttgagataaccagggtatcctctccttcaacaggaggaggttgtaatccttcgttacttgggttttgcagttaaaattctccatagtccacaagtcaatcctattagatttatgatagttctttagggctccccttttttttcatataacttgcctctatttataatcacatagtaggaagttaattgcaaggttgactgacatttttacaacgattatcccctg

SEQ ID NO: 247726 - DNA, 1148 bp, Cannabis indica
aaaattaacattaaaattttactcttttttcttggattggatggatccagtctgatccaatacatactggatctaaaatattggatggatccaatccgatccaaaaaatattaggtttaaaatattggataaacccaaattaaataaataaatatatatgaaatacatccaatggatagaaccgatccaatccaacatccaatggatgttggatcgattggatgatgaaattaattggatcggatcggatggtaaaatctaacatccaatatatgattggatcggatctggataggcctaaaaacattggatgtgatccaatgaacacccctaattagtagtgtctagcacacttctatgtgttagtatcgcttggtccaactaagtatcgggtcccacatagtttaatataataacttttaggaagtatcgttaatcaatcacaacgtgacatatcgagaaggtactaggcatcattgatgcctaatagtaatgctcttttctttatcctagttataaatggaattaaaacaaagagaaatgtgcctctctcatttctagagcggatttttttgggattagatgacttgatcgtgaccatcatggtaatgtgttatttcatttttttcaaagtagatgtctgtaggctgcgttcagccggttgtggctgaggcaacatggcttgaaggaagcgctaagttggatgaaataataaaaattctcacgcgttgtgattaagtcagactgcaagagtgttattaatgatcttcatagttcaactcatatggtctcgaatttgggtttaattatttttttattgtcgtttcctagtttttatgatcaacaatattttttgtgtttttattaaatgatttgcgaataaagtcgttaattgtttagcgactgctgcttgttcttttgcttgttgtagttatagtggggggcttgtcctagttgctttttagacaattaattcggacaatttgtctatttaatgaaattgtaattttcttgtaaaaaaaaaaagaaaaagaaatgcttcctggaactctcctaagtattatgtatttttaagtaatatcgctaactaataattataagacgtaaactttaaaagatattaagtaccaataatgcttaataacaat

SEQ ID NO: 247727 - DNA, 1342 bp, Cannabis indica
cgaacttgtgacattgaagaattgaaaggaggaatcgtaataatcttatgcaagttggagaagatatttcccccttcatttttcactataatggttcatctctgtgtccacctgccaaatcaagtgttattaggtggtcccattgcttccagatggatgtttggaaccgaacgccatatgggtttgtataagcgatatgtgaggaatatggcacgacctgatggttcaattgctgaagcctttgttgtagatgaagctgtaactttcttgtcaagatatgtatcaaacatagagacaagacttacaaggccagagcgtaattgggatttaccttctacaaatcatactttggatgttttcaattccaatgttcgcccattaggtgcatcatccgtcgagttattacaaaattggagaaaagttattcaatggtatatattgaataattctatcaatgatattcaagattatcttgagtgagttataactctattaattcttatccttcttaaattttacaatataaacttcactccttgataattattaattttatatttagtgaacatcgaaaattgttggaacaaagaggtctttcagaattagaagttgcaaatcaccaaaaagaagaattcttgtcttggtttaagacaaaggtgagagactgtcattgatgatttcttacttatttcttgttatttttgtttctttactacttttctttcctcatgtagatttctcaaatgcgactacgaaaatcgccacttgtcaatgatgatttatactctatatctcaaggtccacttgaacgatacaatagttatcaaagttgtattgtaaatggtgttcgatttcgatgtaaaaagcgtgatgacactcttcaaacacaatgttctggggtttgcactgaaggtgatcatgacgatgagtatatcacatattatggaattttgattgagatttacaattgtcatttcttttcgatcgaaaagtgtacttatttcgctgcaagtggtataactccaatccaaaggggagattccttcaggttgaacataatttaacatccataaatacatcaagtgattggtatcctgatgacccatttattttggcttctcaagcacaacaagttttttatttgcttgatatgagtcgtcattcaaactggagaatcgttcaaaaagttaatcatcgatcaatttatgacattcctgaaatgtgtaatattgaaaatgaatcattaaataatgatgtcttccaagaggaagaatcatttcagctgcctccttttcgacctactgaggatttggttgaaagttcttctttagttcgacaagat

SEQ ID NO: 247728 - DNA, 607 bp, Cannabis indica
ttatctaagacacaacacactaaacaatgtcactgatgatgcgtgtaatacaattgtttgttgatttaaatgtacagaattattataaaaaatagaaatgattcctaatgattgcttattgatgagtagtccaaacatgtcgacatttcaagtacacttcaacttggctggctcgtactatatgttttaagtatactagctagtgctgaaaaatggtctacgaattgactaactaaaacaacactcaattttgaacattcctattagggcagatagatgtgtgtatatatttatattaaaatccttttgaataataaacggtatgtatatatatgagcacatatgaaattggatataataaatatatatatctaactaataatagtagttgtattacaatattaggagattgatgtggccaagcacttaggccgagaaaaggcaccccacagtgtccatatataaatatcaaccccttggaagggtatagaggcaccccaaataatacaaactctctatatctctctctcctcctctcttgatctcaattatctagttttccttatatttttttcccaataatttcatagtgtcgacatgtctctcc

SEQ ID NO: 247729 - DNA, 543 bp, Cannabis indica
tccatatggagttgttgaactgaaaggcgagagcccataaactttcaaagttaatggacagcggttaaatctttacgtgggaggtcacattgaccaagtcaagtcctccatcatattttcgcgtctttgaagaagaaattcagcatctgactatatgacgataaagacagtgctcttgggaggcaacccaagtgatttcatttactttaattacttttgagacacttgtattttcatttgttagcattttaatttttgttctttaaaattttcagacgtttgttgttattttaaaaccgtgcaaagcgtgaaaaatcaaaaaaaaaaaaaagaaaaaaaagaaattttttttggccaatccctagtagttgccactatcctttcgaaagtcgcgaccttttctaaagaaaatttcatggtcgcgactatggtcgtgactggggaaggttggcaaaagtcttgtttttgaccatgtacaatggtcgcaaccatgcattctcatagtcgcgaccaattttcatggtcgcgactatggtcgcaact

SEQ ID NO: 247730 - DNA, 707 bp, Cannabis indica
ttaactcttaattttcaaattaaactaagcggtctttacactctctaaatgttacaatgtaggaatcagagttggaaaatctcaagtatgacaagagcagttggtgtgtgtgagagagagattacatatcatacttagagatagggtttttaactagcactctatgacttagagcttacggtactaaggtttgattaaggctctttatatagtagagcttagacccttcaaatcccttagaaataggtaaaataaatgttatttacaaattaaattagtaaaacacacaactaaaatgtcccttgaaaatagatattttccctctgttttcgtggactgttaaggcccaattggcagtctggcttgttgttcacgtgtgaagttgtgcaccaaagtcttgtcaggccaatgtctggctggccatgcatctgtaggatgtatgctggccagccttatgatgtacagaacctggctagcctatgttggccataggactggccatgagtggctagccaaccgcctcgtggtagttggttggccattcatcgccccatttgaatgtttagactccttattggttgaagcgttaagtagatgagttaactttcttgttagcgagttgtattgccatgtggcactgttgttgacacgtagacatgccacatcaggtcagcaaaaattggaataacacataacttatggcttaa

SEQ ID NO: 247731 - DNA, 706 bp, Cannabis indica
gtttgtagttggagtgaacttgtaatgagattattgtgtctggtttaatatgagaatgtaatagaattagatgtgtatggaccaaaataatcgtttttattttataattgtaaaatgtttaaaagaaatggtaatatagatgtttgacttttttactatatttttattatgagttttttgtagctaaacactctcagctatcattatacttgcacttaactttctgttatgctcatattacgagcattaaatatggacatgacacatgttatatcagtcaaacaggcatcatagaaaaattgttaatacatgaaattgcctcgaggaggcagtgaataacgagctatatttgtcttgcgttgtacattggctgaagaaccatgagaataacaatgtatgacgagatgataaaagataggagtcttattggatgtaacagtttaaagttgtatcgctggaaaagagtagataatgagttctttaaaagtttatagctcattgtcttatatactcgtgagtatgttgtaagactacgttcgaaagttgccatgaaaagtaatgacgaggacaaacatcttaactagcatcttgaagaatgcaaccaacaataggggtgggcattagtcggtttggtcggtttttttctatataaaaatctagaattcggtttttggtatggatttgtgtaatccgaaaaccgaccgac

SEQ ID NO: 247732 - DNA, 1086 bp, Cannabis indica
gcttggcaactcagagcatttgcttctcctcatccgcgagaaccggggtcaacacaatgtcgtgcggcacggtgtactcctctgcttcgggaggaatccgggagtcattgctcaccgccggagtgtcccccctccggatccgcttagaaggcttagtctcaaccatcttgcccttctgcttgcgctcaagggcggccgcaacctctacctcatcttcctcgacttccccctcctcgtctatcaagacgatcgtgcctaaaggggcactagatgaggacctcccaggggtaaccgactgggacggagctggaggcagagaggcgtcagggctatatgcctcgacaagagtggccagaagacttttcataggcctggctgctgcagcaaagaaataaacgaagtgttagaataatcatgagaaaggcgtgcgcccaacaagaaaacaataaaactagtcctactctgactctctaattcagccctagcaaagtcttggactacaaggctagcttcatcatccccaagaaagctgtccgagaggagaaaccagctggaggataaatgggctgaatggtccaggggaataggcgccggaggtccagagcccatccgggaccgacccaaaaaatggcccaagtgggaaaaataatattccttggcgtgacttccccaccaggtggaaggcattctaaacctacagaggtgctcatcgaaccctataggtctaagttgggtatactctcggacagaagggacataatgaattactaaaggagacttatcagaacctgaagtactagcgtcaggagcaccagtgttgggaatcggggccacaagcttgggcctagagggcctccactccggaggagcttgcagatgaagaatcctcacggctaccgcctgggccttgatgtaggccagctcctgttccctcttaaagaggtatttctggtgccggtcctcggccgaggcgattatgtccacccggagcgccctttccacaactggagtccttacattcgggcagatgaccttggaaagattgaagtcatccaccgactgattctcagatatcagcttggcctt

SEQ ID NO: 247733 - DNA, 1834 bp, Cannabis indica
aggtcacaacatacaccaggtagagaactcctatctttaagctcacgaatttggcccaggtacgtctcgaaggctacggtttggctcaccgtacataccagttagccgccactggttgccattttctccagcaagagaaacatcaataaaattcaccccataacccagcaactgaacatcgctactctgcctccataacatagcaacacctccacttttcccccttgcatcaaccgagaacacaccttcaaaacccaatgaaacccgaactctttccaatgtatcggctcttgacaaagtctcacaaagaaacactactttaggctgcttttggataactaaatccttaatgaattgaagagcccatgggttcccaagcccatggcaattccaagacaatatgctcataatgactggtgggcctgaacaccaaggcccacctgtaatccattttttgaattagcatctatcttatctccaaagcccacgttgtcatcctccacgttatcatcatccatgtcactaggctcaaccaaagtttcctttcccatacgacgtcttttattatctacaatcagcattgagtcatccttttgaccttccaaatatatcctatcatcagagttctttccattattatcgcccatatcatccccacgattctctccaaaaaatagcaccctgattgtctcccaatcgtatccctgaattgactccatctgatcgcaccatcgttggagaagtaacgttcatggcctcagcctgtttccactgccgtccaccaccattagccactccttcatcatcatcacggttggaacgaagccattgagccccgatgagatagtttttcttcttagtaatggctttcatccattctccataaggtttaatgttcggatcgaaatgagaatcaaacctcctgggacaaaatcgatctccatgaccaatgaacccacatatgaaacagaaagtaggtacatattcatacttaaaggtggtccaaatccatgttccatcttgtttgatcaatttcatacgacgcttcaaaggcttgttaatgtcaattgtcacccgaacacgaaggtaatcacgccatatgccaatgaagttcttcgggtctgacttgatgaatgttcccacatagtttccagcgtgtttgacgacccattccgacatgaaaccatactttaaatcatgtaactgaacccacatatctaattcatgcaacggaaccactctaggatcctcccctcttttcaatcgatagaacacaagcagcattctattaaacgtccatggacttccatcaataaccgtttgaatatcaatttcatggtaaaactgaaaaagatacctattagtatctaattccttaacatagactcccttccccggctgccaaagcgaggccaatgtatgccgcatagcatcgaaatcaaaagtcctatttgtgagaaatttacccaccaggcaccatcgatcgtcaaacgcttgagcctccccttcctgatcatcagtaatcaggactccttcttcttctccctcaatatccaagtgtgcatactgatccatccagccaccatcttgagaactactcgaagccatagcaccaaaacaaagaacaaaagactttcaaaacatgtcactagacaagacaccttctcacattcttaattcatcatatatgactaaatattaattgggtcgactccttacaatattatgtcgagatggtgttagacactactggtacttaataacaatgctcattaaaagaaattctaaaggacaccagtggtacctagcacttcctatgtgtcaatatcgttgt

SEQ ID NO: 247734 - DNA, 817 bp, Cannabis indica
gctcttggtcaaggacatgcatttttatctggttatatccagagtatgcgtccatgaacgacataagctcgtgcccagcagttgcatccactaactggtgaatccttggtagtggaaagcaatcttttggacatgccttattcaagtataaaaagtcaatacaagtcctccaagtaccatttggttttgggactataacaggattggatatccacgagggataaaatgcctctcgtataaagtcgttactcaacaatttctccacttcctgcttgagtgccccttttctctaagaatccaagggtcgtctcttctgtctcttggctgggtaatgtggatcaacattcaaatggtggcagataatcttagggtcaatccctaccatgtctgcttggctctaggggaactgatcctggttcgccttcaaaaaacttattagttgctattttaattgttcatccatgttattcgcaatgaatacacactttgtgggatttcctgtgtctagaacaacctcttccgattcgtcaattggtttcaatagattgctcgtcttgaatccgaggatcaagatcctcatccttcttctcgccctcttcagtcatgtctgtcatttgctggtggccaacttttctatcctacagcgctatgcggtagcattcgcgagctagaatttggccacgtcacaccactcccacacctgacctgtcattgtctgaaacttcagagataagtgcttaatttaactaattgcccttagtccaattaatactagtcgacccagcagtatattgtaagctgatggcaggtcgacaac

SEQ ID NO: 247735 - DNA, 729 bp, Cannabis indica
ttattactaggtgcttcaccactggattttgtatcttattagtcaactatctcatttcatggcgcacgaagataaaaccacaaaagctttgctgaagcagaatactgcgttttggctgccactagtagtaaagtgacatggttacaatatttgctcaagaatttccatatctctcaatacaccttagccttcatatgttgtgataaccaattcatcattcatattgccaaaaatattatcttttatgaatgcaccaaatacactgagctaaactctcaatttcataaagcaataacacttattatttttttctcaaactttccttcttcctcaatacatatatatcataatatcgtatatagactgaaaaaagttgtaattataatttggttatggtgtgcagaatacttcttctcatgtcatctatgtttgtttggagttaaagacaaaatcgatttttatgcttgctgatgtagcagccacttgatggtagtctattaagcattatttactgtgaaattagttacaaatcatattttacaatattcttttagaacaaaccatatattttacagtgttgaacacgattaatcatacaaagatcttcatacgttttccattaatcatgctcttgtaagttgttcctaatatatatacatatatatttgacttttttaatagttctatgaacatagcttagtgttgcttgctcatatatatatatatata

SEQ ID NO: 247736 - DNA, 1265 bp, Cannabis indica
cacctccgattatctcctgctctttcgtgttgctgtcaaatgatatacttaccaccgaacatcgtcaacctcttccttacaacctttgtgtaagtttttgttcagacgattcttttatttttttccttttgcttgttagggcaaaataaaatgatgatattttcatttgattgtgcttggtttttgtggcacggtggctatggtgaaggtcgttatgatgccccccacaaatggggcgttcgacgaccactgctatttgttgttgttatttttatgctttttactgctttctctgtacgtgcactgccatctttcttgagagtagaaagtggtggttttttgtttgcttgcttctgggtgttcaaagcgacttccataccctttttcttttttcttttttgctaggatgttttgcactcgatgcttgccttagagaatctttggattcccttttttggtaggcattcggaggggacctatttccagagaataggggacccccattcccctttttgatcctagggtttgatatgggggctaactgctggattttcttttccaaatgagtaaagttctccgcgaccttcacactcacggtttctttgggttagaccaagaatcctagatctttatcaaatccataccatgtcaacccccgcctctgctggagcaaaatcttcgaagaaggggccaaaggaattggccactttggctgaagtaatgaagggcccaatagtctacaaaaagttcacatgacgctcaatggttgggaagtaggtgagctgcattcgacactaacctacgcccaccagttggaaaagatcattactgtttttggaatcaaaccttccagttcaggggtttaccatcatggctcgatagatggtatggaggcgtacaacgttacatcgatcttgggttttggcctctttcccttcaagtgtcaccttggaagctttaatttcccctttaagcttctcgcattcgtcggttttggcctttgtctccttctcagcagctttgagattcttctttatattctcagcttctttgttaaggtgagtaatctccagttgggcatcactccatttcttggccataactttgcattggcctattaagttctggacctcgctctccaagtattttgccttttccaagcctcgctgctgggcggcaaaagagaggaaaaaaagccttgaaatccacaaacaaagatgcatgagtaaaaaaaaaataaaggaataaaagaagtgaacaaataa

SEQ ID NO: 247737 - DNA, 614 bp, Cannabis indica
ggggaacattaattacgaggatacacaaagattgttggactcgccgaccattggatgaagacttgtgattctggaagtaggatcgtggaccatccgtctctttttcacgtggatgaatttttgggtataaatacccttgaaacttccagttaccacttttccccacttttcaaatatacaacccttcaaagcttttaactctactctaccctttccaaaaccaagaactaaactcaaaataaagttctcttcttcaatctagaaaatattatggattttttccttcatctgctgcaaaggattaggacacagaagttcccacatcatccaccccccgtgatttagaattttacagtaggagaaattgtgagcctaaatttcaatacagaaattgattcgttgatcgcttcagcatctcgtctttgcaaagggtgcgataaacttccccaaacagacctagcaacgataagcttaacatcttctctatcaatatcaggtatgttgtttcttcatctatgattgtgttttctgatttcgtcgatacgaattttattttcatgttcagttctgagatgcaattagggctttttatttgtgcgattgccatcttaagt

SEQ ID NO: 247738 - DNA, 785 bp, Cannabis indica
ttgcgtgaggttgacttaatgacattaactaagcctgtttctctcaaaactaccagttgggcatcaattttgacaatcttggacaattgtttctattcgtcaagcattcccactgagagtaggatttcaaattcccattccttgttaaatagtggaattcaaaatggtaagtataaaaggagaagaggaaagatgatcatcttttcttatcacctatcctttcctttcaacttaaaatttagatgactccttaagtgattttctttgatttgggatacttctgaaatgtgtcaacatctgaatgtcaacacttactctgatcttttggttgttgtcttcccattgactctctggtcacactgtgcgtttatgtggttatagatgtagtctttgtcttctcttaggttgtagccttgaagttctttagcattcccttagttatgctattagtgaaggtggtcttgttcatctcctcagtttggtaatggatgaggcctttgtcaactttttaaatttacagtataagaggcatttaacatcccctcaactttgcagcggaggaggccttcaacatccccacaactttgcagcggccttcattatctcctcaactttacagcgaaggaggtctttgtcatctcctcaacttcatagtggaggaggtcttcatcatctcctcaactttacagcagaggaggtcttcttgacgactatcaatgatgtgctatagcagttgttggctattctttggtcaattgagtgtgtgaccaactcccaaattaata

SEQ ID NO: 247739 - DNA, 1206 bp, Cannabis indica
tttagttagacctatcttatgaacagaaatacgttgaaattctcaataagaaatgtaaagttatttgaagcagaactatagtattggtcaagatagttgaacaaacattagggcttataatcagaaataagtcttaagaaaatattttctcaatttaggagatatatttgaacactaggcgcattatatatgttatatgtgaattttcattaattgcatgttgtatgctcgataatagtggaatacgacgtatggcctatagagtcacttagatatggtttagaacttttaatttagcaagattatgtagttagacatttagaatgtcggggttactcggggttgtagttttggaccattttacccctaagttttaggttgttttgtggtgaaggaagggcaaagttgtcatttcctttcaagttaattaaattgttgtttttatgggaattttattaatgccttagtcatttaggctaatattattgggaaataagagaaaaaatattaattcttatcttttgttttcttttagccaaataaaaaaattaattagaaatgcatgtccctctctcaaagtctctctctctttctcggtctctctagaaaaactagcagaactcaaccctctcattcttgttcttgaggatttcagcaagctttgaaggattttgcttgagtgaattcaaaggtaagagccccagttcctccatgtctttgttttcttggttttgagtttaattttgaagtgaaattgtgattatggtactatttaagtttaagtttcttaagattcatattctaagttgattttaagttagtaggagttgtttatgcttaattttattggctatgattgtgttgaaccaaggtttgagtttttaaactcaaacttggacctttaatcgtgaaattgaattcagggagttatagctattatttttggttgaaataggtttgttatgacttaattaggtgatctggaaggtttaatatatttagggtagaattaagttgtgtgtgaagtttttgaggattccaacactgaaccagtcgacgggttcatttttgctttgcaaaaccggtctaccggttcccccagatagcacctgtaatacccggtaaaaatatacatatattttaaattttatttgttatacaatttgtgtgagaataagtattttatttatttctactaatagtgaa

SEQ ID NO: 247740 - DNA, 913 bp, Cannabis indica
ggaggtggtggtggtccaacggatacgacagagaggagagggaaaccgatgtgaggagggtgggtggagatcaatagacgagaagaaaggaagatcgaaagagggagaaagacgacgagacaggagggcgatggtgcggaggcgtgggtggggttttggagagttaagattttcaatttagggtgtggaaaatggagaaaaaataggtgggcatgtgggaaatagaaaagaagtaggtgggcacgtgggaaatgtggcgagaagtaggtacgatttttattgggcccttatacccgacagtttaaaaccgtcgcctataggtataagggcccaataaatttacgaatttcaattaaaaccgtctcctatttctgtaattactgttataaaccattaggaatactaatttttcctgacggttttaaacagttacttaattcttttagcgacggtccctcaaaaagtatttttaagaccgtcgtgaattctaatttttgtagtagtgcaatcacactcaaaatttctcattatatgcctgcctaatatcctaaagggtaaaatggatatgtttttagttcataatactaatagttgtggactataatttaatgggtcaatccgtagtcattagggtgctaccgtgtatcttaaatgtcattaatatatctgaccgtcccattatggtcttaattatataataagcaccataccatgtatataaatgtacaattatttttatggatttttgtgtgagcaacgcttaattatataagtccatataaaatattctaacatgaatatgatggaatggatttataatgcatacaaaaattaagaaatatgtatatatatatatatactagcaaaaaacttaacgtgcgaggcacgtatactaaatttatgttagtttttt

SEQ ID NO: 247741 - DNA, 747 bp, Cannabis indica
tgttaatgaaacatacttggtagtaaatctagatcctggtaaaatatttccaacatcgttatggtatccactcttgaatgctattgtttaatcattttgtaatagtaaaatggataattagttatttcatgtattcttctttgttacttttcttgctgagtctttatgactcacgggtgctctatggtgcaggtaaagacaaggaaaagttagagcagccatgagatgacagtcttctcaagtaatgtacatattgaccccttctgcctgtgtaccgagttgccaggagttgttttgggttgtatctactgtgtatcttgatttcgtattttgaattgtcgttgtatatagtccttttataaaacttttataacagggatccccggaacacgtttttagtgtcgttatgatgtatgttttgagtgttttattttagtcaattttttaatattattacagttttgttaataattagttaatctattagtattaaactagtttataaaattacacacgtgacatctctatagattaaggcattacaataacagtttacaagaaaattgtcgacatcctttcgacattatctcaataaaaaaaaataacagagcacaagaaaattatcgacattatcttaaataaaaaaaagaatagaatacaataaaattgtcgacatcccgttgacaaattatcaacataataaatcacaaaatacaatcaaattgtcgataaaatgtcgacattcta

SEQ ID NO: 247742 - DNA, 2275 bp, Cannabis indica
tccttcaagatcctctccctaatattaacaaagcctatgcctcggctatccaagaagaaagacaaagaggtatcactaatcaccaatatgagatttctaaatctactaatgataatgcaggctagtttcctggaaatgttcaagcaaatcgtgggggaagtagtcagaccaatggaaaaccaagaggctctcattgtggaatttctggacatacaacaccaaagtgctacagacttcatgggtaccctccttggcatcgtttacatggaaggtgcctagacatcttcctaataagccaagtaaccagcagaatcatcaacatgatcaaccctcagccaatttttcaggacatgttgacaatcatgctagacctcctagagaccatgatttctcttctaaatgtcagaaacttatagctatgctggcacagaaagtccaagaaaccagtaccctagctcagcctaatgatcaacctattgtttcaaacatttctggtaataatttttgtgttcctaaatctacttggaaaattgacatcggtgccacacaccatgtttgttgtgatccctccttgtttcatactgttcaaaataatcctaaaatcactaatgttggattacctgatggcagtaatgcagcagtttcttttgttggaaccatacacttgtctaattttattctcactaatgttctttatgctcctaaattctattgtaacttgctatgtgttacatctttttccaactcctctaactgttcttttcttttccttccaaaaaaatgtgtgatttatgatatttgcaagaatcaagtgattaggatgggtgaacgtgttgggcaactctacgtcttgaaacataatgcattagctattgttttttcaattttagattccaaaattaatgatgatactatatggcattatagacttggacatgcctcttgtgtaaaaactcattcattgaataaagaacttcaattttaatattctggctcttttgaatttcattgttcaattgccattttgctaaacaaaaaaaattgtcttttgtgtctaattataacattgctaaggcttgttttgatttgattcatatagacatttggggtccttatcatgtgtctaccgttgagggttttatatatttatcacctttgtggatgattgctctaggtatacttagattcatcttattaaaaataagtctcacgcacaacatgtcataccagcctttattcaacttgtcaaaacccaatacaatgccaatattaaaggaattatatttgactatgccaaggaactccaatttcctgatttgtttacttcccttggcattatacatcaccattcatgtgttcaaacacattaataaaattttgttgttgagaggaaacatcaacatttgttgaatgtggttagagcattgctttttcaatctcatattcatttaccttattggggagagtgtgttaacacatccacctacctcattaacagaacacctacccccaatctcaagcacaagtctccctttgttgaagttgttgtcacacagtcgaccaatgctgatgaggttggcttttgagccttttacatgcatgacatctgttaactaggccactctattcaggtttacatcacctttgccaacaatctcccttttgttcccatcaccaaatgtcacgaccccctccttttcctctttgtaattaaccagtagttttttatttccagtcatgtgtcgagaacatccactgtcaaaataccactgcccctcaacaaaggctgacagagacaggttagccaccaatccaacatttgaacttatgttatattttacttttccattctcgacgaggttcacgccctcgatgtttgtttggttgaggaaactatttggtcgattaatcattgctttcaagtagttctacaatttatagcacttggggcgaatgtgacctttcctattgcagaaatgacatgttggaatgaatttgtcattttgagccagatttcctataccaatccttttccctttcaaacttcagtttagtgggtccagatggaacttgtctcttctcagagggatctgattcgttaacagtggtaaggatgtctggtacctcatcttcctttttttggttcagatctacagttgaggtgagtggattctcaacatacagatcattgcgttgtttaaacaaaaatcttataacctaaggaggttcgaccaccatacggtttctgaagttgtagggtctgattgatggaaac

SEQ ID NO: 247743 - DNA, 669 bp, Cannabis indica
ttttaaaatattatttattaattacttatttttagggtataaatcccaacaaatattctaacaatgttattgtaacatgcactgaactatgattgcagatacatttttcaagaaaaaaaaaaagaaaaataaaataaaagaaatagggtgaatactattttggaccctgtgttttgcaaaagttacagattggaccctgtattttgttaaatgacaaaatggaccctatattttctaaaatggtaaaaataggaccctgagtttaattttagacaactttttttttaatacaaccaacttgaagataattcttaatacgaacagatacaaaaaatgtaaacatttttgtcatagcacttttagatcgaattataattaaactttaaaaatcaattcggggtcctatttatactattttagacaatacagagtccattttgtaatttaacaaaacacagggtctaattggtaacttttgcaaaacacagggtctaaaatggtatttacccaaagaaataagaaaaagtcaatattttagtgtattgcaccatatgaaactaacatttgcctagccaatattaacccttaaattttcatctgagggcaactaatgtggccactataagaatatttttatttaaggaaatatatttctatttaaagaaataa

SEQ ID NO: 247744 - DNA, 1648 bp, Cannabis indica
ctcaatcccaccaacagcaagtccgaccatttaaatcacattttaggttcgagaaattgtggctgaaggaagaagattgtttacaactcattgacaagtactgaatagtacggcaacaagtgatcctactgctcaaactctggaaaacatctctacttgtgccatccatttacaatcatggcatcgaagtaaatttggagatttacctaagaagattaagctatctcatgaaaaagttgaagcacttcaaaactcgaataatacagaccaagatcatttttcccagctccttgaaagtgagaaaatcttggacgaactcttagcacaagaagaggattattggcaccaacactctcgttcttcatggctaaaatctggtgattcaaacaccaagtattttcatcaaaaaacgagttcaagaaaagttgttaacaagataactaagctgaccgattcaaatggaattgtgcattcttctcaaccaggcattgctaatattattcaggagtatttctgcaacatttattccagtgaaggaattaatacagctgcaacataatctgttcttgcaacagttccctgccttaattctgatgaaattaatgaagctctctccgtgccttacactgctgaagaagtctttctcgctctgaaatctatgagcgaagatggcagcccgggtttggatggcatgtcagtcatgttctatactaattattggcacatcgtcggtgaaagtgttaccaaaacagtgctaaaagttctcaatgacggtggtgatccttcctctttcaacactacactcatcaccttaatccccaaagtaaagaagccgctgaacatgtctcatcttcggcctattagcttgtgcaatgtgttataaaagcttgtgtctaaaaccattgttctaagaatgaagcctcacctcaactcagtcatatctgaatctcaaagtgcttttttgccatctcggttaattacggatattatacttgttgcttttgaactcattcactctctcaaacaccttaagagaggcaagcaaggatttgctgcaattaagcttgatatgagtaaagcttttgatagaatggaatggcactttattcaaagtatgatgctcactatggggttttctcctctgctggtcaatcttataatcaggtgcatctccacaatttcatactcatttcaacttaatggatctgtccaaggaaatattgtaccacaacgaggactacgacaaggagatccattatctccatatctcttcattatttgtgttgaaggattctcaagattactacaaaatgaagagcacaatggttctttacatggcttccagctttcacgcaatggtccatcagtctcacacttgttttttgtagatgatagcctcattctctgtcggcctaatagcacctcagcaagagcaattcaaaatttgattaacacatactgccaagcttcgggacagcgattaaacacagagaaatcagtcctctctttctctcctaacacaagggaatcgactaaagatttattccagcaacaactgaatatgcaacagccatgtcatgaaaggtacttaggcttaccatcttattcgggtcaagacaaaagcttactctttggtgaaattaaagat

SEQ ID NO: 247745 - DNA, 1964 bp, Cannabis indica
ttcttggctgatccactctattttcctgtttctcaagaattatatccaagtaagccatcaattctttccgaaactagcacacttcataccagaactccctcacttcatcctaaattgtgctaatcatggcatcaagagtctcttctattttttcggcaaatccttcgacctttcttggtcggttttcctgctttctttggtttcttttctgtcctctcattgtctggtctgataccatttgatacactaatgttctagttcagttcttgtaagaattagaacataggcaatggcattttattgatatcaaaaagaaattacaaagttccaaactttcgagatagttggtatctccctgagtaatctcttactcactttgttacaaaatcattcctccgtgatcagccctatatttatagttatactaagtctttcgtaactgttttaacaccttaaggactgtaggatagctcacctaaagccaataagaatttgacaattcagcgtctaaaattatactcaattatactgatgaaacttatattaaggtgtaacaaaaatacatatattgaactggttgtttagtttgtatatgggaattttacttgtaaaaatgaaactgtatttatactgtgtgctcaaagactggaactttgcttgaagtcttataatatttttctatgccatcacagctattgcccgtactgttggtcatctgtctaagagctctgaagtcatgaaacttgttaataacctgatgaaagctccagagatggctgtcacaatgcaagagtttagcaaagaaatgaccaaggttggtagtattatctcttggcaatttcattttaagtttctcttaggtcctgtttggctgttgcaacatatcagcttcttactgattgggttcttatctgatatctggcttttatcttcttgaatcttttagattaacacttttattgttttccataggcaggggtgattgaagaatttgtaaatgatgctcttgatacagcattagattcagaagatatagaagaggaaactgaggaagaggttgataaggttttgagcgaattggctggtgagacggctgcgcagcttccagaagctaacaggaaagagaggatacagttacctgctcaaacagctagtgcatcgaaacaagtgtgtaaaactcttcgaaaccttctttacattatttctttggaagcaagagctaaaccaaattttcttggtgccttctcttttacagggagaagccattgctgaaggcgtagatgatgaagaagaaatggaagagttacgggcaaggcttgctaaagtgagatcgtaaattagtaacttctcgtcgacattatcatcacttgctccttccatgtggagggaagggaaggaagtatgtgtatatctgtgctattaagcaagtggagttaaaagttttcatgaatctggcaagctgtcactgagttatgtttgtaacataaaattagcatttaaattaactaaatgcttacatttacatattatttattaacaatctcttactaagactaagatatccagaatcccagatgcatgttttctatttcttcagactatcagaagaactctaaaactaacctgagaattctgtacaaccatccatagtttacgaaaaagggtatatggtgttttgccagatttggccattcaggttcagctgaggtatatgagacaacacagctacttagggcttgggttgagaggatatgacgctcatagtaatgatcttagcttgatccataagtaatactcaaaagtttggaaacttcctgggcagagtgattgctgaattgaactagaatttcacaatacctaatcacatatggtactaggataaatagtttaacactaaaattaatcttatttgtgtaagattatttattccaacaaaaagtgactatttatcccacacaatagaa

SEQ ID NO: 247746 - DNA, 1322 bp, Cannabis indica
aactttacttactttatctttgcacaaaagattctgctcactcattatttgtaacctctttcacttatgtgtccaagccttcttccacattgttgccttagaatctttaagaatttttgttgttgtgttgtagcaattttaaattgattctccctttaggtagtatagactccctccttgtagcctttcattatggtcataaaacattttcttagtttcatagcacttgtttcaatcttactcacaataccaaggtcatctagcacacttatagaaattaaatttctggataaattaggcacaagtctacccctgtaagtaaggatgatcttccttcctttggattccctaaaattagtaagtaaggatttattgttagtcatgtaaaatgtacatcctgaatctaaaatccattcatctttaaacttagttccagtaatataaacttctccattttcatagccatcatttagattagcttcttgcttattttctttttgctttgagaaataattttctccatggtttgagtcactatattggtcatctgatgttcctttgttatttctttaccataaataataatctcttctgaaatgccctagtttcccacagtgatagcagccattacggtctttgtgtcctctagaatgagacctcccctttccatgtcttccacctttggaagaacctttgttgtgaacagacacttgctttgcactatacaaagctctatttcattaaatgcctcacaatgatatgttcacctcctgaatggaaactcaaatgatgccactagcaagtccctactctaaagaatgcaagcatagacttgggggtaaatgttatcccaaaaaatcagactacacacgtgacactcaaagaattagctaggtggaaaatgagacttgacttaaatacataatgacaatattttcacggggaaagagggtaggcagctctatgagcaaggtatcatcccagaggtccacgtcaactcaaagaattaattcaagaaagatttaaatgaagaaacatctgggagggttgaagcctctcagatcccttctattgcatttggtcctaacttttgtaacgcataactaggaaaagcactatagcttttcccttacgtacgagcagcaaaatgagtttcctataaagaaaacatacttggggatttctccactactttttatgacatgcatatttctcatgcatgcataaacagctcgtgccttcaattgtcacactagtcgataacaagccctcctcaccaaaggaaataacctctaaagatgtaacctttaagggacttttga

SEQ ID NO: 247747 - DNA, 596 bp, Cannabis indica
accaaatgccataaatggcacccgctaggagcataaaaaatctctatcaacaaccctcttggcttttttacattcagccaacaaggaagattttcaaatgaacttgaccattgacattcccccaaccactacttgatattctgtaaaactctccaagagtaaaggcttttaaaaaacaaatgttcatgggattctaaatctcattcacacacgcattgataatgggtacatgtttcttgacaagattgtctccacttgccacataataaatcgatgctttggtgtcgaaagcctacaccaaattacttgtatattttcaaacctagtcccatccaaaatgagttgatcataagcttttgcaatcaaaaatctaccactaattacatctttgataatatcttcttgagcgaaagtctctctaaatcacaagagttttctccaataccaattaatgtccatctttaactcaagagaccaaatcactgacattatttatgtacaaattgttcatccatttttccctaaccacaatttgttttgtagaaatagtccaaagatatttagctaaagtcgccttgttccatttgggaccttct

SEQ ID NO: 247748 - DNA, 505 bp, Cannabis indica
cttcttctttcttctttcttcttgtttttctgctgaaaccctcccagccctctttctctctctcgtctcaccaaatctccaagcggtttacagtttcttggggtccctaaatccacacgcatccactcatcaccctcaactctcaagtttcactctccaccaccaccaagccacgaacccagtccatcctttaccccgacggcaccacacgaggcaccagccagcaatccttcgttcacgtaggtggcaacgccaccaagtcttcctccaaccacgacagtgacgacaaagggtatttgttactattgtatgtttgttattttatttgagtgttctagactaagcttcaaatgttaatgctatttttattattgaaatcatattcaaaacaatgattggaattgtcaaaggaaaatagttgttattttgcttgattgggaattcgggagtttaggccaccaggtcagcatattcatgcttgatgcagtgttacttggttttacca

SEQ ID NO: 247749 - DNA, 535 bp, Cannabis indica
ttttatcatgttgttgtgaagtttctttttatattatttttgtaacattttgtaacattttatgtgcaattttagaaaaatattgttgtaaaatttgtcacaagttgtaaatattacattgtctgttcaacttgtaaaaaacatgtaatttatacattttaaaagaaaaacttcattcattttttaattttaggaaatagaaatatacttatcttagtataaaattacatgaaataggacgacaacaataactatattttttaataaaatggaaatttgattggaaaagattgcgaatatgaagaaaatttacatattaatacaataactacattataatttgcaacaatacacgtacaaccatgtttgacgaatgcaaattttttattaagtacataataatgaaataaaaaaatagttgtgttaaccacgaggaagaaaaaaaattgtatcatcaacaacatctttgactcattccatttaaaaaatcattaaagtatttctttaatagcattatcaatctttctataatttt

SEQ ID NO: 247750 - DNA, 709 bp, Cannabis indica
tacttctattggaattagaactcgtgacgtttactatatgcatgaaatagctttaccatcatgtcaaagcttgcattatgttcataaatataactttaatatataaatctatgttgtaactagctaaaatgcatatacatatacctcccgatttaatttttttaaggggggcgactgccccacctcgcctctacgtgatagttaacaattgaactcattagagaagaaatcttatttataataggatattttttgtaatattgaaaaaaatataaaaaaaaaattacaaaaatataattgtacagcataattttacgatttaaaagtttttttgggccaaaaatacggactattaatattttcatgttattttttgttataatttttttttattttcttattatttgtatgttattttttaattattttcatattatcaaacaaacttatgaaaaaaattataactttgaaaaaaaaaattatttgacggtagaaatattaaaaaaaaattcaaaataatatatttttatatatatttccctcgagaagctactaaaactatgtccaatttatgggctaaaaaaatatgttaaatttggcataaaaatttagtttatgctatattcactattcaacactttttttataattgtgctctaatacataattacaaatgaagtaattattcaaaaaatatggaaaaaaatta

SEQ ID NO: 247751 - DNA, 1353 bp, Cannabis indica
aacacgacagccattcacattagtgaaaatccagtctatcatgaacgcaccaaacacgttgagatcgactgtcatttcattcgggaaaaaatccaacaaggctctctcaagttacttcatgtctcctcccaacaaaatatcgctaacatcttcacaagagctttactcccatcacattttaattctattgtatccaagatgggtgtttctgctattaggattaggaggttagattaaggttgttaagtggttattttggctgttttagttataactaattcttgattagttatgctgaccattttaccctttttgttgggtatttaactttgttgtatcatttttcatctgtaatgaaatattcaatattcaataaacagagcatttcttctctttttcactgcaaaccgattcaggttgcttgttcttcatatagaaccgtaaaaaaatgattaaatatttaggtattatttatccataaaaacaaaaaataaaataaatattatataactataactcacgtcataggtattgccattttgaagaataaaatcccatgtaattgatacgttaccatagggatccagaggatcatacccatctgtaatattcatattttacaaataaattaaaatattaatatactgatcaaatataaacaaatgtatagttcatcatgatagtaagaaacaattatatatacttacaagaaggtgagctgatgagagagaacaagatgaaaatcaagattactgccacgcccattgaatttttataaataattataataaataatatatctcacttgttacatatacccaactttctacgattttctttcaccttgtttggaagaaaagaaaagaaaaaatatgcactattggtttctgtttaagtaaatgtgacaaagaaccagaagaaagatcaaggtttgggaatgagactgagaaaagttagattttcacttggagtagttatatagtgttaatataagagaaaatcagattagaataattatatacagttaattaaggtatgtggtatatacgatgctaaacatattaattaaacattttttaattgtaataattttattcatgaattagtgtacagtgagatccgtctcatttggctttcattatgggaattagttggttttgtttttgtattttttttagacagaatttgtttttatatcttaattttatttacttttatatattatttgaaatattcttcagctaattaatgtattattgtgtcatatatttattatagtttcatagtgtccaggtggtgtaagtcctttgatttttcaatgaagctcttattaacaaaaacaaaaaaaaaaaa

SEQ ID NO: 247752 - DNA, 736 bp, Cannabis indica
ggagtggcaagatttgcggcggtataatcgtagtaggatctctgacacgatgatgaagtctagcctgaaattcatacgaccacacaagtagtttgtcaatctttaattgaatattcagtagcctcgatggatttagacggttcattgtcaagtctattagtaatgctcctggtttttctctcgctcgaactcaaagagaagactaaggcaatcgtcgaaaggattggacattcactaggggaaaagtttgggattttctctcttgaaaaatttaaactcaaactacaaaataagcctatttataagtggtgaatttttttttcttcaccctatttataagtgagagattttcatccgtttactttcacgatcaacggctcaaatggtgtctcaaaaaacacaaaagtgatctaacggctggagagcgaaagggtcatcatttaatgcatataattggtactaattcgtttctaatcataacgttcaccttgatgccagtgctaacataaattaattgtcagcacattaccccaagcgccacacacttttccaatgctcatgaagttcacggaccaagaagtcaatgtcgcgtgtactacgtcagctataacccaaaagtccctagtcatccacaaccaagaactatagaagacgaaaaggtcattccttttttgaattatccatgtgtccatgacaatttggagagaagatttcaagcctctgccactctcaagtc

SEQ ID NO: 247753 - DNA, 1473 bp, Cannabis indica
tggtatccaatatattcaatcaattgtcaatcatgcatatttattcacaaagttattactaacatcaacatttgagaaaaaagacatataagatcgaaattcgtcgattagaagatctccacgaataactaaattagggggagttaatttacaatgcactctttttcttttgaccgagtttttttagcaagatttttaatgagacatttttatggacatccaaaggatggtgttatattattatggatgtccaaatcaatgcattaattaccatcataaatgcttgattatatttccttttatttcattaatttagtttcacattattctagtcagagaaaaatttcattcacactcattttcttctcctcttggtcttctctcttctcctatttctttttctattctatattgttttataacaaccaaaaaagataattattattatcattaggtaaaaaattatatgaacttctaagttagtcttcatttaggtggtgtttggttggaggtaattaaatagaatggaaatgaaatatttttttattccattcttttatttaattgcattttaaagtattggaatagcattctaatggaatgacttttttcatcactttggtggaatgactatttcattttgtaatggatagaaaaatcattccaatataatgagaaaaaaatttaatgatttttttatcaatttttttttatgcatgttaaatttttttccattccattcttattcatatatttttttttttttattcctcccaaccaacatttagtaggaggtaataaaatagaatggaaaggaaataatcttgattccattcatttgtttcgttgcatattaaaaattggaatgtcatatcaatagaatgaccttttcactattttagtggagtgaatattctattttgaaatggaaggaacaacaattccaatgcatgataagaaaaactttaataatttttttattaatttttttattacattttaattttattccatttctattcctattcttatttccattattacatttttattcctcccaactaaacggcaccttaattcttttgtataacatgaggcatcaagaaaaattaccaggtggctttaaataaatacatagcagctaagttaaacttctgaaactgggcttatagtaccaatgttcactcccacggctttcttttgattcataaaccagcatccttaaatccaaaaagtcagatttctgaaatggacattcattgaatcgaatgccgagtataacaaaaacaaaaaaaaaaaaaaacaaaaaaacaagttatcatgcaaggtactattcactcttaattttagtttaaagatatcaattattatccgaaaaggggaaaaaacaaatctgagcgacattaattatcctaattatgacatgaatatagaaattgtaatactactttagtgatgtataattggtggtgc

SEQ ID NO: 247754 - DNA, 821 bp, Cannabis indica
catcatccccgagatagctctccgagggcggaaccaactagaagaaagataggccgaagggtctaagggaacgggctccggaggtccagaacccatccgggaccgacctagataatctcctaagttggagaaataataatccttggcatgatccccccaccgggtcgagggcatcctaaacctaaggagacgttcatcgaaccctacaggcctaaggctagcatattcgctaacaggagggacataatgtattgctaaaggggacttaccagagccggaagtgctggcatcaggggcccctgtattcggcacctggacgataggccttggcctgggagccctcttctcaaccagactcccaatacgaagggatctcccggcagccatctggctccttctctccactgggctcccaacgcgaagaggcctcccggaagccgcctgggccttagtataagccttctcctgggccttccggtagaggtaatcttggaacttctttttcgcggtggcaataatctcatcccggaaggtcttcttcgcggccggaaccctcacgttcgggcagatgaccttagaaaggttggagtcctccaccgacttatgcgccaggatcagcttggcttttcggcagttctccgtcgtgactaatcccccgacgttgagatctgccttgtcataagtcgcgaaggtctaggcccgctgaagaaagatctgagtaggtgcggtccgctcgtacggagggatcctaacccactccgtaaggagctccgggtgctccacagctcggaacccggaggagaagaaaaagcaatggcggt

SEQ ID NO: 247755 - DNA, 875 bp, Cannabis indica
acattttgagtaaacgacaggaaaaggttgaaggcttctcttattacaattaccaagcaagcacctcagaagtagcagacgagagagagagagagagtggagtgtcgaggtagaagatgttgttccaggtaggaggacaagggagtcgtcccacctttttcgagatggcgctggctaaacagcttccggtcagtcttcgcagtgctcttacctattccatcggtgtaagcaaaacctctgtccctacacccaccgccaattctcttttacctaatgctagtaatctttcttatacatgtctatactcatactatagctatgcttcttatcccaaacccaacttttcatttttcaacacactttgttttctctatagaatttttatttctgaatttctgactaagaacggaaactgaaagaaagaaagaaagattattgcctattgcagtgcatttctggttcaatttcaatattcttgctttgcccaattgcccagtttgtattagctttctaattatgtatgtattgcttttgattgttagcaattgaagcactgcgattaacttagctccattgttaagggttgtgtgtcattgtactttgtacagatattggctttgagaagaccctttcttctaaaggttttagactatgaagatgaattctttgctttgttgatgcttgttcttgagactcatagcttacggactacaggttaatctttctagatttctctcattcataagctttccttctgcaaaacataaaataaaaagctatatggcaagtgtgttattctgtcttgagtaatccaagtgtgttatgatcctacgaatattttttacacaagaaacttgaacctcttcagatgactc

SEQ ID NO: 247756 - DNA, 749 bp, Cannabis indica
gaattgaaagaccacttaagttgtattgtgacaataagtcagttgtattgtattttaacaacaacaggagctcgacgaagttaaaacatattgacatcaagttccttgttgtaaaagaaagagtacaaagtggacaaatttgtagaaaacacttaggtacaacctccatggttgcagacacccttactgagggtttgccacccaaggtctttcatgagcacactgctcgtataggtgtcttagactatgaggatatctagattcagtgggagtttgtctttattatccttagtgtattttatttatgaaacatgtgtatctggatatttttctgataagaaattatgttgttcagtttattttactttgtacatttaagctaaagtttcgatctccataaagtaaagtaggaccaactgaaaattgatatgaatagatcaccatgcatgtaatttttaaccacattatcttgattgatctatgtcatttggctatgttgatatatgtgactattgacgggtttagttgtgattggtacaacgaaaatcactttgatcctatgttgatatagttattggatgagattgtacatgcctatagttatgatgacaaagttgtgagttcaataaggtaaacacatttatatgtatacatatgtagcccagtgggagatttttagaaattattggagtcacaattgtatatataaaaatatgtgttgggtcatcaaataaataagtcaaatttat

SEQ ID NO: 247757 - DNA, 902 bp, Cannabis indica
atcactattatgctttcaaatttcaatgattatcactacattgaatattattaattttaaaattatatgatattaaaaaaaactaaaatacaattaacatacgtgacttgcacgtagcatctatctagtatatatatattgactaagtttttatcaatagtactattttgtaagtgttcaacacatatatctcaagttgttttataataaaaatgtattatgatgaaaagaaataataatgtggttgtccttaatttctaaattacatgtagctagctttttgtctacatattttattgtttcaaaacaaactttttgttttcttcattcctaatagttcaatcttaagatccctttttattattatttatactatattaaatcattagcatatttcaaaggtcatatcatagctgaaaatatgtgtgtgaaatgttagctctacttgacccatattttttaggttttttaaaatacaggccgacgtgttagaatttgggataaaatgaataaaattctatctaaaaatgattaattggctatgggatgagtagcacattcctcttatgtattctattatctttccaaacactaacaatatggaactcgacgtgctataaaaaaatataaattctgttgtatcgtaccataaaaattaaaggtcatgccgtatcgtagaacaaatatttttctttctttttatattactaaatcagcaagtgtaatgatattaatccaaaaccaaacatctttacaggcctggcctaaagtgggctgggcccgtgcctagggcccattcaaattcagggcccaaatttttgtatactatatttttttgcattgaataaaatgatattttaaaaaaaaaaatgtaaaaaaaggtccaataatactcacatttt

SEQ ID NO: 247758 - DNA, 601 bp, Cannabis indica
attttattcctattttcaaggacctctttcacctataaaagaagagcttctttagatcatttttcatattcaaaaaagtacacgcaggtcaaagcatctctctctaaaaattagagcttaaatacttagccatatttctgtaatctcatctcgtgagaatgaaaattcgaattagacatagctctattaccatcgcgacatggggagtgaactactatgaattcaaggtcaacaagttgctttgcggaagcaatttctttgtctcagatttaaactagctggtaaatataaccattttttttcttatattatgatgtccaactctagcatctaactccgatgacgatgaaaattctgtacgatttttctggtcgatatttattcttcaaaatattatcaaacttatttgtgattttttgtttgattttctatatttaaaattttgtttattttttaattctatattttttttttacattatttctttatgttagtaaagtctaatatttttcccatatttaccaaaaataaaaccccttccaaattttcaaagggccaatatacaaaatggccatatgtaacaccctaactatcttaggcg

SEQ ID NO: 247759 - DNA, 1266 bp, Cannabis indica
ttcttctatccactcaaattttttgttgcctctaagaatgttgaagaatggtacacactcgtctgtagacttagacacaaatttgcttagtgcagtaatgcgtcctatcaagctttgtacttccttgatggttgtggatgacttcatgtccaaaagggcttggatcttgtctgggtttgcttctattctcttgacattgactatgaagccaaggaatttaccttagcctacttcgaaagaacatttgagggggttaagcttcatgttgtacttgcaaaggatcctgaagcattcatctaggtcttccacatgcccccaacctttttggacttgaccagcatgccatccacatacacctccatgttacggccaatgagatctttgaacattctgttcacaagcctctggtaggtggcccgcgtgtttttcagcttgaagggaatgactttgtagcattataggcctaagtttatcccgaagcttgtatactcttgatctggcagatgcatctttatctagttgtaacctgtatacacatccatgaaactcaaaatttcatggccagctgtggtgtccactagctggtcaattcttggaatcagaaagcagtcctttggacatgctttgtttaggttggtgaagttaatgcacacttttcacttttttgttgggtttgggcaccaacacagggttggatacccaaagtggatagaatgctttgattatgaagtcatgggcccgtagcctctcgacttcatctctgagcgttttggcgtgttctttgtccaataacctcctcttctcttggacaggtcaaaagtttggattgatgttgagggcatgggtcatcacggaggggtcgattctgaccattctgaccaggtttacccttggaaactttatcaacacttaatttatttcttgcgctaaacccttctcgatctttagtcttctagctggagaagcaggatcgacctccacttcctcaactccttctacaggtccaaagctgtctacaagatccctaaagcgaggatctatgtttgtgtccccgctttgggctggacttcattgccctttgctaggctcttcttcagagctcttgacatacatcttctctttcttggctttagacagggccaagatgtaacaatgacatgcagactgttggtctcccctcaaacatcctaccccatgccttgttgggaagatgtcaccgccttcaggtcgtatagggctggtcgacatatcatggcattgaaagct

SEQ ID NO: 247760 - DNA, 959 bp, Cannabis indica
tttatataaaatttaatgagaatgctaaagggcaccactggtgcctagcaccctcctacgtgttaatatcgctattggtgcaattaagtatcgagtcccatatagtttaatataataatttttataaagtatcgttagccaattgcaagtcgacacatttagaaggtgctaggcaccactggtgcccaatagcaatgctcaaatttaattagtcctcaaaattggattatatgtagcaacccaattctgttatgcataaacgcgtggcagtagtgcaacatgtggactgccaactagaaatggaaagaaatatgagctggcaaaaagtaatagtgagaagacaagtaaaaacaaaggacatttaattaatttccactctaaataggttcatcgtaatccagtaataaaaagtaatatattataggcagctaaatctcacgaaagttctaaatatcccaaaaaaaaaaaaaataataataaaaaaataaaccttcataaaaaaaaaaagtaaaaataaaataaaacaattaataattccgaaaccaaaaacccacccagccacctaacccagtcttgtccaagtcctactactacttaaacccctcaaaactctccttttcttctcattccataacttaattattaaacccttttcagtgtccgcatcatcaaacctcatctctctctcaagttcacaacaagaaaacattcaaccttcaaagtagtctcttttcaaaatgtgtggcggtgctataattgctgaattcatccatggaaaccgaggagtccgtcgagtttcctcgtctgatatatggcccaactcatcttttgataagcttaacaccacaactttttcaattctgattttagccagcgcggtcatgatgagcctgctcccgtcaagagatccgttccatctacaggttagcttaagtatacgtgtacattaccctttcttc

SEQ ID NO: 247761 - DNA, 510 bp, Cannabis indica
tcaagtgatgtgtgacctctttggtcgaagcatcacacttattaggtatattagattaccgctcactgttggagaaaatccaaccactagaactctgatggcgcagttggtcgtaatcgacattcccttagcttagtgcaccgtgataggctgaccaaccctatacaacttgaaggcgcaacatacatttaccaccctgcctgaaattcctagcaaggcaggggtaggatgttgaaagatgaccaatgatttgcctgtcattgttctaacttggccttgtccaaagccaagaaatagaagatgaatccatcagatcaggagcacacaagcttcatggtgttcaatgatcttatcaagcacaacatggaggtgtgcgtggacgatatgcttggtaagtccaaaagagctgggggcacatgaaagacctagacagaaaacttcaaaatcctctacagctataacatgaagaagctcaaacccggataaaatctaagccctttcgaacatgaa

SEQ ID NO: 247762 - DNA, 1361 bp, Cannabis indica
cataaacttaaattggattacaataaggcgcccatacaccctataataacctatcctacattccgtgcatactgagtttagaacgttcgtacgacagtactattgaccataatatcagcctatactcggtactctagtcgtaccgatgtcatagcattaatcagtacttagccaaacatatattgatgatattcaatgcgtctctatgtacattaatatcgctactataatatgttatctagcagacattcataaacatgcacgctaaacatgtaatcacatatgcatattattatactagtcttaccttgatcccaaatttaggtgtgtcagtcaacctgaagggaactgctactcgatgatttagagacccctaaatcacaatatacgcaaagctgataaatgatacgctaaattatcttttagggacctaaaatcataactaaaagttttcccatccatggataacatagcaataccctatgtatcgtaaaaacatgaaaatctagggttccaaaattgctacaaccaaaaaaactaaatttccaaaacaaaaaaattggttcttaggcttctgctaggggaacgagttgatcagttctacagggcaagcctaaaccagaagaccgattctgtgtaggaaccctaaaaaacctcacacaaaactcaattctaccacaaattgtctcaaaccttccagaatacctatacaagccataataaacataattcaagcaataaaaacaactttaaactacagaaacaaatttcaccatggaagagcaaagtttgagcttttaagctcaaactttgtccaaacacaacaacaagcatcaaatcaagcctaaactagctcaaacaacttcaattcaagctcaaaaaatagaatcaaacgcaactcaaacctatagtaacctaactacaaaatttgcatgaacacttaaacttaaaaccataaaaattaaagaaataagaggggaacttgcttaccacggatttgcagccctcaatccctaagaaatcctaagagaaactctgagaaaattgcaagaaaatccagctactaaagctctatgtgtgaccgacccccaagagagagaaaaagagacttttaatttcttttacctttctaactttgattttcttgaattatcaagtttcgttttcaacataatccatactcactagagacaaaaagaatggattaatactaaaaagtgtgttctgaaaagtttatttttattttcaatttttgattttacttacgtcgggtataggtccaggttcggattcgggctcaagtaagaggccgggttcagcgccgggccgtgagaggatttgggttcgggtctgatcgaagt

SEQ ID NO: 247763 - DNA, 614 bp, Cannabis indica
aaaaaatattaattaaaattaatagtaataaataaataatttagacattcacatcatcattattattatttataacaagtttaatttaaaaaaaatgtaggcaccacttccacattgaagacccgtatgatttagtatatttaagtttggataaaaatcctaattagtgaattaaatatcagaaagaaacgtggatttagccttgacggaaaagaagtgtgatttagctcagctcagctcagtccaactccacccgctgcttttcgaatcgtttcttcttcatttcatccctccaattcaatacacgccaccaatgcctttctagggtttccttcccccattttcattcttacgatcttctcttttctacctgcgatttcatacagagaaggacaactttgtgtcttttcacccaatttacaattgccttctttcttgttcaaacttcaaagtaattgtgcctcagcctgtcagttttgggtggaatgatttgtgttttccgcgagacgatgcttgtagagaagcttctataggaaggctaagcattccggcaactcctgttcttcgccgcacactaccgtctgaattttgaccgacggtcagtatcacatatc

SEQ ID NO: 247764 - DNA, 4410 bp, Cannabis indica
agtttaaaactacaaacgattacgtacacttacgtaattgttcataaattttgtaataacaatccacatagaaactaccgtaacaactcaagtcgtaaattaaaaacaaattaaaaaataacatgtaaaataatttttcaataaaatccaccaccaatgaaaaagaaaagtacaaaattgggttctttcgagccacgtcaccaagtttaaacttgaggatttcgtggtttaactttaaaacccctttttctcttcatctacttctctttctttcctctcttctctccagaaaatactctactctgcttctcactctgtttacttacctaagctctcattctctcaaccaatcactgctcgacacgtcattctcagcttcagtccagggtttctcttcttcttcttctttgaatttcgattctcgccggaaaatgccgccagccgcggtggatgtccggtcaccgattgcctctcctccaccgactatgcaaaaccctagctcttctttcccccaatccacacagactgaatcgcctttcaatttccggacagcttttggtgatggaggcggcgatcgtgaaatggaggtgccgccgcagccgtcggggaggtctcgaccgaggcttgtgaaggtgaggaggcaggttggagctcagcatgcgaggtcgaggattggttcgagtgaggttgggttgggttttaatccgttttgttcgtcgaatggggatagtgcttccagtaaggagaatggaagtgtagggtttgggtttgatagtattcggagtggtctaagcgagggtttgggttctgtggagggacatagacagttaaactctgatgagtctgggaagtcaaatattggcaatggaatgggttttgtgtttggggccaaggaaaatgataccacaagggattttctcggggaaaaggagcaagcttttagaaatgggagagaagttgtttctgatggtacggagataaagaaaacagagtctgaaccagtaagcggaaagtttgggggttttgaatttggcaataattggaatgggttaggtttgaattctaatatggaaaaaacagaatatggtgattttgctaagaatttgaactctgatgtaagtggaaagatgaaacctgagactggagcagagtgttcaaaggatagtaatgtgggttttgtgtttggagccaatcttaatgggttgagctcaaatttgaatttgaaagtaggagaggacagaaaatctagttcggagtttgtgtttggtgctagttggtgtacttctggatcgaattcgagttcggagaagagagattccggtgatatcgaaaaagaagttcccagcaaagttaatactaatgagagttcgaatttgtataaaaatttaggtgcttttgtatttgaaagtagcaatggaaaaagttctggcttgactgagaatttagggaatttccatggcaatgttgaaagtgataagtgtaaatgtcgacatgaaaatagtgataacattgctaatatttctgatgagatgaggaagttgaatattgatgcttctgtaaattttcctgggactatgaaagctgaagattcgaattcgaaaccatttttcaatgttgggacagcttccaagtcaagaagatttgtaaaggtttctagaccaagtagcaaaggtactttctgctctagtagacatgtagaaactaattattgtggtaagagttttgaaggtccttctgttgatgtggaaatcaccaatgggagtagctcaaagataaatgatgcaacatcaggtatatctaattctgagccatttacttttcaagctggatttgttgagaatgataatgttgggcagtttcataagagtgaatcagttgataatatagaagcaaatgtaggttcctcacagtcttcatttttgactaataatcccgagtcccaacatagtgtttttgaagcaccttctgttggagtagaaaaggactatgttaacagttctactactaccagtactcaagatggagtgggagtgggagtgggagtgggagtgggagtgggagtgggagtgggagtgggagtgggagtgggagggtcatctatggagttcaaaactccagcatgtgatccttcatcccttaaggatagcttatttcctaaagtagataagaaaccacaattcattgtaaagaataggacaatcaaggataaaagatttagggatacaaagcataagtcgaaaaagccttcggttaatcaacggcttggccaagatcatgcctctaagcaaagcagttcccaagaaattccaaactctcctgaatgttattcccccatggatttctctccctatcaagaaagtactatgcctgatgagcactcaagagaaacttctgcaacatcaaatgggtccttctaccaagacaataattgtaaaacctgttcatcagatgcacctgtacctgctgatcttggagttgatcaggaatctatacaagaaaaggaaaatgttgcgtgtcatgatggatcttctcttgagaagtgtccatcagtttctaaggctgaatttgcctgttccgatgcccgaacagagcaagctggctgccacagtggtgctggtttgtcttcgttggaatctatagcaaattatagatcagacccagagaatcaagaaaacagttctacaacacagttctattttacttcaggtctggaagataaggagagaagttttatgttttctgcaacaccctctgggcaggagagattatctgcaaaaagcatcgatttagaaggaagattaggagtggtgttggtcgtgattcttctgctgtttcttcaagctcaaatcaatcttcgtccaatgcagcaggcaaatttgaagcaagtaaacaggtcaaccaagggcatagtgcctcagctgaaattcaagaaacctgtgagaaatggcgactcaggtggactttccttaagattactctttcatttccaactatttaatctgttgtgttttcttgatgattgtctctctttagtgaccattattaagctatttgcattttgaatatttggtttttatcaggggaaatcaatcttacaaagatggggatcttgcaaaggccgaggagttttacacacaagggattatttctgtaccttcaagtgaaagatcaggttcctgtcctaagccacttttgctctgctacagcaatcgcgcggcagctcgcatgtgtcttctaagaataagggaagcaataggcgactgcatgatggctcttgcattagatcccaactttctcaaagctcaattaagagctgcaaagtatgttatctaatttttattacttttgtacagggaaaaaaataaataaataaacatcacataaatcaaattcggatgattttaaacatcaaattaatagtcatattcttcatctaacatgctagtatgattttgaacatgttaaattttgtatatatttttgcaagtgttgtttccatttccatcataagtcatgacatgtcttttaatattgttttttttttgagttacagctgtcatcttgtgcttggggagattgaaaatgcgttacaattcttcaatcggtgcttggatgtaggggcaggtgtgtgtttggaccggagaatcatattagatgcagctgatggtcagcagaaggctcaggtctgtctttacactattattatcttgttaaaatgttgatcttattatacttagaattcaaaccaattacctgcttgttacattctgtcgtataaattctttatttatataattgcagtttcaggatggtattgaatctattctgcatctctttgccttaatgtatctataaatttttgacattgtggttgggggagggggggattcaaacttgggtgggactgtgggattaacacaatttagaagtttaaacagttaattacagtgtttgatttacaaatgagctttacataaccagaatagataatttattacttctgttttacaacagagatctgaatctgaataatatattaaatgaaaaacaactacatagataatggatactatcaacttatctggtgaacaaatctaaagaacatagaaatcatattcatcatacctattctaaagtaaaaatctgatcaataatttgctttcagctagtgctatgtggctttaagttttgtatattaaatttgtgcagtttatttgggcgtgaagcagattaaatccttgttagttcagatatcacggctcttatttatctatatgtttatttatttatcttttttttttttgcagaaagtggccgattgtattggtcaatccactaaacttttggaacagaaaaatcccgatgcagctctcagtgctttggaaataatttctcaagccctatcaattg

SEQ ID NO: 247765 - DNA, 543 bp, Cannabis indica
aaatcttgaataatcatgaactcctgctcatgttattagcttctcagagaagatgattattacaacttttattttgggaatctaataatatggatggtaggaacatgatctacaattatggaatcctaactttcttaacgaatcgaatgttaagtgttaattatgaatctgaaaaattgtgcacaaatttagattggatctaaattatactttcactaatgacttaatgggactaaaggataaagaagtaattagaagggtaaaacagtaatttgaccaaaattaattttgaaccgacactagaagagctaatcactagaattaattatatcaatagacattgtagtaaaacttagtaaatataattctataattactaaaagtttaattccatatttgtagtggagtaatcatggaattaataaataaaattagtaattggttgatgagattcaataaataatttagtttattggagcttagaattataagtccatggttcctaactcgccaccttaaaacactgtcaatggaagggataaa

SEQ ID NO: 247766 - DNA, 660 bp, Cannabis indica
attttcaaactttatggtattttgacaaatagtttaattatttagtgatagtccaaaccgcataaaccacaaaaaccgcaccgcaccgcactattttttgcggtgcggtttttgcggatttttagtttcgcgtgcggtttgggaaattgaaaaaaccgcatgtgtgagttgatttgaaaaaatagtcaaaaaccgcaccacccgcaccgcgaacaaccctaatttctatcactataatttattaaaataaaataagtgagactgaatattaagttacaccaataaagatattatactttacaaaaatattaagtactataaatgctagtttagtatttctttttaagtttatatactaaagaagatgactccaaatatttaaatatttgatatcaactaatagagaaatactaaaagatacttgtagtatagtgtttagtatatttgtaaagtgtaatatatgtaatttaatattgagtttcacttattttattttaataaatattatataaaagttcactaactaattgtaaagtgacattttatcgtagtactagatataagtctggctctaaaatttaataagtcataaaaaaaaaaaatatttttaagctcttatttagagtaaaaaaatacgtaattttaaaaggagatttttta

SEQ ID NO: 247767 - DNA, 687 bp, Cannabis indica
acatattaattcaaaatagaagaaaaaaatagaaaagaaaagaatgttgaaaaccccgttgaaaaagtctttaagattgattttgctctctaatttcgtactcttgaattgcttactgaaaaatattgaagtcccactcttttaatagctaaaaaatagataaaaaaaaaaacatctttttgaaaattaaaggggcgggcctcgacatggaaatcctatgcctcagcccgtgtttccaaatcttcatgtcctccatagattactaaacacaggcctaggcataggatttctatgcctaagcataacctccatttattggggcagtgagctttctgctgcattaactgatagtattttagccataactctctcaatattgcttggaattggacgattcaagatgtttcagaaagataaaagagagatctagaacttttatatttcaattttctccaaaatctgatcaaaacatagtctaaattaggcttaaagttttaacattattttcttgcataattttctctattttatagatcatctttttgtgagatttaaccaatttatacatttcaagtgtcaaaacttaaaattgaagaaaacaaacataatgctccaaaaaaaaataataaaaaaaaaaaaattaaactctaaaaataacataaataataagctaaaaatatcctaaca

SEQ ID NO: 247768 - DNA, 559 bp, Cannabis indica
aaacgattatatcgtactgcagaccattcagaaatttgatttggcacaagactaagagagtgaaagattaaaaactcaaatatcctacagattcacaagcttggaaaaaagtaaactacataaatcaagaatttaaatataaaccaagacatcttcatcccggtcaatttgtggatggagtaaatcaacatagatctctaagtagttgtcatagttcatggtccgtctttcttgttatgtacaatcttcctccgtgattagtgatgaaaagaatatttaacatgctttctttaatgatatcagacccacaataatctggacataatgtcgatgtatatttcgaatcattaattgatgatatgataaaattgtatgcgaatgatgttcaacctatgatggttttaagtaagaattctttaatctaaaggcagtgttatatattgtggactgttagcgattttccaacttacaataatttatcaggcttaagcacaaaaggttaccaaagttgtctcatttgttgcacacatgggctcgtcacttgccaaatggacacaag

SEQ ID NO: 247769 - DNA, 515 bp, Cannabis indica
tcctaagcataaattcatcatatggctagttctgtggggtagattgaatactaatgacacaataagcaagtatgacatgcaggcaaatgaacctatggagaatttattttttaaatgtgaatatagcagcaaatgcctagcaaaattgaagaagaagctccagtggggaacaaaggcagtagaattgcagaaattgctgcaatatatcatcaaattcaagaaagtatcagcaacaaggagaagcatgatgattactatgctggttgccttggtgtatcagatctggggggcacgaaatgatgtactgtggaaccaaaaacaatggcaagtcaaggtaattgtaaacagagcacaacaggagagtaaaagaagaatagcaggggtattgccatgcaagacaaaggaagtggaaaagcaatgggtgatgaacttgtaatttttgtaaagttctagttttatagtgtaaagcagtcggttttgtacagaaaacaagggatgtaattgatggttttgag

SEQ ID NO: 247770 - DNA, 808 bp, Cannabis indica
atattataaatgacaattttatttgataattattttaataattaaataaatagttttgggtgtaatcttcctttaatggcgtgtgaggttcccctgcttctcccaaggcgaagaagaagcggatcactcgaaagcctggaatcactgccacgacaagctcgaattcagtcgacgatctccctttgatccaagaggtagaagctgatggttttactgctgaaggagaacaaacagatgagtttcacgatacttatgagaacttggttacagatgctggaatggaccttggaggtgaggagcagttgcgtgcttctccgagaactggcagctgggctgaggatgcagagaaagccgattaccagactgatgcgaaagagttatggagtaagttccattccaatcaggtacctaccccttcctctagactcaaatataccgaaccagtccatgtaggtgatcaagttttggccaaacttgacctagaggaaatagaagatgaagcttcattctggaaaaatgccattgtttgtattgtcctaggtgaaaaccccccctttcaaggtgtttaaaggatttgtgaagagaatttagggcaatcttggtatagagaagatcgttcgtatgcattcggggtgtactctggttaacttcagagatgaagctacccgtgatctgattcttgaggctggtgtggttcattttgacaagaaactagtagttttacgtcctggtccactgatcttgatacgacttgaatggtgaattcagttcccgtctggatccgcctaaatggattggggctgcaata

SEQ ID NO: 247771 - DNA, 1027 bp, Cannabis indica
gtccttatcaataatcctttggacttaaaaattacatcaatacaacatacatttctttgaggtgaatattttaatatataacaaatatatatttttgtattgtcgccaaaaaaatgacagaaatcaaaagttattttttagttctttttctattcgtatcaagagtgaattagttgttagtgtcctgaatttattagaaaggttgttagacagttatagagttagttagagtctgttatttgttagttggtttcgatttgattcagattgtatataaaagcacttatgtactctgtttcgaattcaatgaataatatacagagtttttctttcttctctttcattattctattaatatggtatcagagctagactctgtgtaatatccattctcgtttcctttcttttcgtcttcttcatggctcgaggtggaggagctcaaactcgaagttccactgaaaatttgaatcgatactctgctttggatcctggttgtcgatcattttccgatgatgctagaaatccatactttctgtcgaacagtgaccatcctggagctagtctggttcctaagatgcttactggatgtgagaattatagttcgtggcgtagagccatgactgttgctttaattgcgaggaacaagctgaagttcgttaatggcgaacttctagaactcgatgaggacgatgatgactttgagctatggcatcgatgtaatagtacagtgatatcttgaattcttcatgtcgcatcgaatgaaatagctgagagtattatgtatatggagaatgccacaacgatatggacgaatcttgaagagtgattcaatcaaaagaatgctcctcgtgtttttgaagcaatcaaaactaagcaatctctgactcaacgaaccagcagtgtcacaaattacttcactcgtctcaaaactctatgggatctcattcaagcatatcgacctcagccagcttgcacttgtggagctatgaagactattcaagattatcaagaggaggatcatgttctt

SEQ ID NO: 247772 - DNA, 545 bp, Cannabis indica
acattaaatcataataaaattttgaaaagatttaattaagaattttaagtaaaaatttaattcattttcaagactaaatcacacacaaatatagaattacacatcaaattaaagatgaagaaaaggaattccagattgatctactatagtctccttttctctaatattatttaaagtattttttgttcttaatctcaaaataattaaaacttaatttttcttaacttctgaacaaaatacccagcacttcatgacgtcaacccttacgggtaggagcagactcacatagaagcgaggcgggataattgattcttttagaaaaaaaaaaaagaaaaaaaatgtatatgaattttagttagttacgacatatatttataataaaagatgatatttataaaaataatactagctttggtgtaaatgtaatggttaatctagattgcatatatgatataggttaagggttcaaagcccatcagactttttttgtctttttaagtttatttttttatgtcttaaaaaaattatgcccccctcactttaaa

SEQ ID NO: 247773 - DNA, 1811 bp, Cannabis indica
cctacttgctatgtgctaataatttctgaatgagattttgcgttgaaccttacttgatttctatttattgttatttgtagtatccaacatgttaatgaccaaccccatggcgtcactgttgactgataattagctgaatggatcaaactttcccaaatagaaatagaacattaacattgctctcattggtgaaaatcccctgtttgtgttaactgaaccgtctcctaagtagtcgggtgagaatgaaaccaaagcagtaaaggagaagtacgagcgttggcagaatgccaacaacaaagctcgatacttcatgctttctaggatggttgacaccttaaaaactaggtttgctaacactctcacggctgcataaatcatgaaccagttgactgaactattctggatggcatcaattcaatctcgctttgaggcgagaaggaattttatcaatgcacggatgaaacctcatcagaacgtgcgtgatcaccttctccaaatgacgagttacttccaggaagctcaaaatcatggagctgtcatggatcagacaactcaagtgagtctgatcctgaaagtttgactccagcctttctaccttatacttcaaattatttcatgaacaagaaggaacaagactttcacgagttggtaaacgaccttcagacatttgaaaattttattggaggaccacagaaaggaggatctaaagctcataattctgggaatgctaatggggcggctagggatgaggcaaactttgcctttacttccaaacccaagaacaagaagaagtggaataatagcaagaagcctgttcaagctgtgaaaacagttaaaaagaaaaaggctgctactcctggtgataagccaaaaggaaaatgcttctattgcaatgaaaagggccactggaaaccccaatgccctaagtttctagcaaagagacaatctccagctgcttgaactcgggtgctatcctagcgagttgaatcggatggttggacagatgggtggagataatccaagatgaagatgaagctcagaatcttctgtttttagaattattatttttgaattaattgttttattttcagaacaaattggatttcaattattagttttgggattttattccctaatttttcatattattgcagacaattccctttattttgaggaattttataataaagttttttattttgaaaatgaatttcatttatgaattgagcttcatttatgttatcttgtgtatgccagtaccaattatatttatatgttttaatgtttgtatgtgtatgtgtttttattattgatacaaattctatagtatattcaactctgcaaagagttaatactacataaacacttaaatctcaattctatgttaatgaataactttaattctaaaataattattaagaatttgtttaataaaaagatcttttgatctgataagggtggaaaaagttaagaataatatgtagttcaatgatcttttatatctattgaactctggattatattcataactccacatgatctctatatcacttatggatggaccatgatctctatatcccttagggatggatcatgatctctatatacttaggggtggactatactattgaaatatgtagttctttctgaactctagactatactcaatacaccactgtactctatggcacacatatttttttttaaaacatggatgtaacataataaattagccaattgtgagagtatattcttgatatgaatttatgttctaattaatatttactgttgcaatagaagttgataccaat

SEQ ID NO: 247774 - DNA, 513 bp, Cannabis indica
actaataaatttatctcttctctcaggcaaaatctatttagaattttcatcagctaagtaggcttggttgataattttttttttttgtatttgtttatatctatgtgtgagccatattacataattaagtttttttaatgtatttaatatgatttgttagtgtttaagagtagttgtgtttttgaacttttatattgctaaaacttttgtattgaaggtgggtgtaggatttcttccttagtatttaatcaaacatgtgttaggctttgttatcacaatgataatttctgcataagctttttggatgtatttaacatatattaatttgttggtggttgggaatagttgcattttgaacttttataattgttaaaacttttttattgcagggtgatgtgggatttcttgctcagcacttaatcaaacatgtgttaagttttgctatcgcaatagtaatttcttcatatatagttttagctttttttttttgaatagatattgtttattgattgt

SEQ ID NO: 247775 - DNA, 1139 bp, Cannabis indica
tgtttatttcatgttggatcactcctttatatacaaaacaagtgtcctttgattacacaaagattgatttaattatcaattcgtttttacattcaatataaacatttaaatcaattaaacgtaaatataataaatgaagaacaatttcggcccaattcactaactacagcaacgtatgcgacctttgtggtgcgagttgtctgttcatattctcacattagcttgcaggctcaagatgtgtacaagactaattgagtctcacattcataagatatatgcgtcctattcgagtcgcatatatgaatatcttgtaaaaagttgataacttaggacatgcgagtcctcatcgggttatcaagtacgttgggtcattcggactagttcgctgagtaaagaatcgatctttactaactcacaggaagacttttatagttattgcatatatctcggtatatgcgagtcttaaacccagtcttcagtcctacatcgtgcgagacataataatgtgactagactctatcaagtcacatcatcccactgagtctaggtcaggcaaggtttacactcaagaggtcttcttctgacatctcagccctcctcgaggagagtgagtccacgtgtcatttttatgggagtctggtctcaagtttctaggtgaaaaattcacactataacacatgtccctagtttcgtgattgacagttgtgtcatgagggaaactataagcgagaggcaagcaaaaggttgtcacgggatggtaacttttggttgtccaatcgagggtttcaaaaagacgactgtaatcatcatttttaatccatttgaagtgccacgtcatcaaaactttttgaagtacgtgcaggcgtggttatggataaccgttggattgtgagaccttaggaattcccatgccacgtgtctccatctcaataaatgagggatattagtatttaaacttcttgatacgaattgatcctttactcatttctctcttattttccttttttctcttttttccctatgaatttcaaatcctcaaaaaatcagtttacattttgtctgagttttgatcatcagagaagaagtttggagttcttgatatcctcagaatcactcgaaaaggagttacttttcaaggt

SEQ ID NO: 247776 - DNA, 1186 bp, Cannabis indica
gtaaaaaaaaaaagtaaataaaaaaatagataaataaaatcatggaattcattttttccctaagatgagatcaaaacataaaaataacatgtaccattatgatttgtaaggggcaacgagagcatacaagcaaacgaggtgaaagaggaaatagcagaataggaactccggttgttttctttttaaatgggttgtgattctagaatatcagttcaaatatcaattcaaatattaatgagatttgttttattattattttattatatataaataatattttattattttattaaataaaaataaaaagtcacccatgaatttctcataaaccaagaatttcagttatataggcacactttatatagaatagatacatttttttttggtaaagtatatattgatatattaatgattgatgctagaaataaaattcaattatttaattacatgaatatatttttcataaataattatttaaactttatttttgtaacatacatcattcatattttctttttaaaatatatatgtggtctagaaaggcactacatacatgataaaaaaattaaatgaagtaaaatagaaagattttggtgtgttgaaacataaatttttttaaaattttacagaaaaggccttttacattgctgtgtaatataattttttactttatatataatattgggtgattctacaatgcacccccttaaaagggatgtactgatgcacccttgacttgtttcggtatctagaagaattttttaatctaattttttttttcatattcatgtacgttatagatatataagataacctacaaaattttgagaaattcagaataatttataatatagaaaacaatgttcaaacagtctattttacacgcgtataaaataaaatagtcacgcatgcaatacactgtttgaacgtatttttcggcgtgttaaacttttttaaatttctttaaattttccaagatgtcttaaataactataatgtacatgaccataagaaaaaatttgactaaataattatttcggacgctaaaaaagatgagggtgcattaatatattcattttaaagggatttcttataatatttaaaggtaatactaatactattcttttgaagttggaatagtaacttatgattaattagccatattttctaaaatttattataatat

SEQ ID NO: 247777 - DNA, 702 bp, Cannabis indica
ggaatgacattctaatggaatattctttcgactattttggtgaaatgactattccattttaaaaaaaaaggaatgaccattccgatgtaacaagaaaaaatttaataattttttatcaatttttttatgcattataaattttattccattcctaatcctattctcattcccattcctattcttatattttcattcctcccaaccaaacgcctccagtatttatcaaattacaaaaatcttattgtgtgagattaagaattggtagctatgagtgtaataaatcctacaaatcactcacgagcaattgaaacaaaccctataatattttgataattggataaatgatatatatatatatatattacaatctatgtaattaatctcaacccatataatacgaggccgggtcggggttcaagtttgggggttgggtttcgattcgaagtccaggtttgaggttaggtttggggtctgaggtctaagttcgggtctcaagtcggcgctgaggcttgggtctgggttcgagatcaaggaataggtctaggtccaggtctggggtcaaggttagagttcgggaccagtctcggggtccagatttggggtcgggtttgggttcgggttcgaggttcggggctgaggtctaagttcgatgatagggtctaggtccgagtttggggctggattcgggggtcaagtccgagt

SEQ ID NO: 247778 - DNA, 573 bp, Cannabis indica
tcagaagcgggatcactggcagtattggagtctctggcagactgcactattcgataaacttctgagataaaaatcccagtcgcggcttcgctcatccatttacccaaacaaaaacagaaacattacattttgaatcaaaacattaaaacgcacaaggaacagggttggaatccagaacaacaataaaagcaataaaacgcacaagataccttattgagatgagaggaagggaaccggcaaagtgggcaagccggaggaccccattggagcggccacagtagagaagtttaggggttttcctgtgaatgaactatgtttagccacatatagaaaggggacggagaagaagaagctgagactgaaaaaaaaacttgaaatgcaaaccctaaaatcagacgagagagacctgggtgttcgaggaatttggattttctcgggaaaatgaggagaagaaaatgggatttggtgaaattgggatttaatttagggtagattcaaatttcttttttcttttaaaaaaaatatattaaaaagtaattttcttctaaaaaaaatatatatttaaaacggatc

SEQ ID NO: 247779 - DNA, 1078 bp, Cannabis indica
acctcatgtacttcagttaatcagccttgtttttctgtgtaaaaacaatttatgtgttttatcttttgtcaaatagccaaagctgggaagattttcaaatattgtagcttataaatcctgcaaaaatgtggaagaaaaaaaaaagaaagcttgatttatttggactttcatgttatatcccattgagtgtgttatcagctttctctttaggtggtgtttgttttgatgtaatgcaatgtaatgagaataataattataatatgaatggtaatgtaatggaataaaaataaatggtattatgatgtttggtttaaccctgtaatgaatattgtaatcaaataaataagttgtatatttacaaaaatactcttagttttattatttttaatatttaaaattttaaaaaaaataataaaaaaaggcaaaagagatattttctaacaatgtaatcatcattacattgattttatgatgtaatgagaattacaatacatagtgtaatggccattacaatgtaaagccattacaaaagtttaaaaatgaaagcaaacaatgtaatggtaataatgattccattacaattctcattacactaaaccaaacatgcttataattttcattcaactttgttctgttatgggattttttttttttttgtaataaaagttgtacatttattgaatcatttcatcaagaatgtcactcgggatagaagtagtcgagtagctacaatcagcatgtaaccatgagtctctagctaagccatgaacaacacgatttgttcaaaccagacaaaagaaacttgcaatcttcaatacaactaccaaaaggggagatcatagacaccgagcttctaacagcttggatagtgatgagactaattgtttcaacaatgacattggagacatttgatatcatgatccaactaagaacctccttcacacctagagcctcgacaagacctggatcaacacaaccaacccaagagtcagactgagtctgtagaacatgaccccttgcatctcgaagcacccaaccatacccaaatttgtggtactctgcaaatgctgatgcatct

SEQ ID NO: 247780 - DNA, 1060 bp, Cannabis indica
ttactaaacgccacctgttttttgtttttttttttagaaacacttatgtgcccaaattatttttctgactgttaatatatctaaattattacatttataccacactaaaatatataagtaattctttatgtacttaagtatactcgtgtagtatcaaatctacttgtaatttagatacttttgctgtaaaaaataataatgtaaatatattttatttttgatagaataatgtaaatatttgagtgttacacatctaataaatttcagactttttcaaaaaaaaagtgatgccaatttaataattttaatatttttgtcacttaaaaataatttgagtaattgacataatttaacttgaataatgataaaatcctaatatcaaattggtggcccaagaagtaattactatgtcggagctagggccaccaaacatttatagctaattggcattatatgaactttctccactcggccaacatttgcatattgtcctatcaagtatcaacttgcatggactttgggaccggagttgtactagtattgtttggcgttttgccttacaaaaatactcacttttagacaaatatttacaattttattgtcacacggcaaaaattatttttatattgtcttaagcttcttttttttcttttatactgtagacactgaatattaagaataatgcttccatcttccatacacacgcacagaactaccacaacaacacgaacacacccagaaaacaactattaattccggcaagattgaacaaaaacagtaaaatcaacgtcaaataaataatcatggaaaaacaactataaaacaacactaaaataaattaaaaatatatattaaaaaaaaactaactatcttctgcacagccttaagaccatatgcaatagcggttatatttaagagctcaatcctaaaaatcaaaataaaaaatactaaaacaaacctaaatcaacacaaaataaatgtaaaactataaaatagaaataaccacttgaaaaaacgaaaaagaaccacacacctcagagctcatcaaatgtatttatag

SEQ ID NO: 247781 - DNA, 712 bp, Cannabis indica
gtaaattttaacattataacaaagttttcgatattttgagctataccatgggtatttaaaaaattaaactatatttgtgagatggtaagttattcaatcttcataaaattcacaaggataatgttataaagtataatgaacacgttaaaaaaattggaaagaaaaataaaatactcgacatgtgttattgggtgaagattatgtttcaaatttttatttttaggatttcaaaaaaaataaaaattaataaatcttaaaaataaaatataaaagtaattttaccaaatatgtcatctgaaatttccataaaaaatatgttatttgaaattaattttatttttctaattgaacagataaaacaaaaaaatagtttaaataattgggaatttttaaaattatatatattttttatgtttaatttatttttacggctcaaaattttttatctataaaaatacactttgtttaacgaaaagtaagaaaacaacaataagtcaacctcacagcaactataaacagggccggtcctgagttgaaattggctataggcaaaaattattttttggactcataatctataaaataacaaaaaataattagaaaaataagggtaaataccattttggaccctttgttttgcaaaagttaccaattggaccctgtgttttgttaaatgacaaaatggatcctgtattttctaaaatagtacaaa

SEQ ID NO: 247782 - DNA, 704 bp, Cannabis indica
cgatagtacaattgaataggagtgtcaatcatagatgcggacatctatagcttctatgtctattataagtgaaatgatagtttccttaaagcttggcttaacgcgataaatgatagaggcctcatttcgataattatattagtttcctgaaatatcatttacaaatagctaagtattttaagaataaaatatattaaagggtgaaacgataattttatccctaatgtaaaccatctataaaggatcaattattgttgtgattgaaataatagataattcataccgtatctatatttggtatatagagtgttctatgtaataaagagtgcaattctaaatctaaagtggagtcgagaggaattaataagttaggaaatttatttggtgaatttcagatctacttatgaggagtttggttacataggcacatggttctcgcactaactgaaataatattattttgtagtctcaattaattaatttaattaatcaattaagattctaaataatgactatgtcttatttatgaattctactaaggaatggcatatttgagaagaaaagagacatatgggtttatttgttaattagtatactttgtgggtctaattaatatatatatatttaaattgtattttatttgataattttttataattaataaaataaaattggtatttaaataattagaggatataagagca

SEQ ID NO: 247783 - DNA, 719 bp, Cannabis indica
aatttttaacatcataacatatacatgaattaagccattgggttgaattgtctctaaaaatttatataatgtacatgtacattacaataataataataataataatattatgttaacaatatgagaagaaagaataacttatatagatagttttttttaaatttaattgtatggcttgaacattgtaaataaatgggttttccatatatatatagggacatgattttgttccgtaattgtactttcacggaatgtgttccgtgatgtacgacagccgttaaatgagggagttatttgatctgaggactgagattgatctaggaataattagggttaaaaaatagtaacgtaccctgacacacatctaatgtaccttgagacccatttgatgtaccacataatacattctgtgaaagtacatcacgggataaaatcgtgtctctatatatataaagttatattgtaaaagtatgtatctttataatatataatgcgatgtggttagaatcgcgattattaaatttaaaatcgcaaactgcactgcacaatccagttaagtaaaatacaaactgttgaccgaaatttttggcaactaataaaatattataaaattattgagctgtaagaaagcgagagaatgatttttacgtggttggggcgttaatgagccttagtccacgagtctttgttatttatggatgtatttaatacagatatta

SEQ ID NO: 247784 - DNA, 758 bp, Cannabis indica
actgattgtgaagaatactattatttttttaaataaagactcaaaaaaatattttttttcctatggtccattaaatgaccactaaatttcagagttggctctgctctcgactaaaacctactaaatgaaactcttacaccgaacacccataaaagttaactatttatttcttctctaataatcccttttgtttgaaattttttcagggctgctgtttcccatggtgcagaaaatagtgtctgtaatatttttcctggctggttgttattataaggtgtcaatgacaccaatgtgtatatatatatattactatatatctttgaagagctcaatctcccagaggagtaacttctatgaagtctcattcagtttctcaaagtgtgttggttttgtattagtgaaatattcaattctgatttggatacacctcctcatctattcttcttcttcacatttagctggttttgctgtgattactattttgattaagtttttttcttttggttattatatttgagtgggaaagaccagagtaatagattcttttaattcattctaaatgtatggctactaatattggtctggtttagtgttattgatgctattatgtttatatatttaaaagagcctataacattgttgttttagtgttgtgtttcattaaattgagagagaccatatcggaccacttgagatttttttttttttttttttttcagtttgagagagacgaagagaggtaggggttgggtccgagt

SEQ ID NO: 247785 - DNA, 849 bp, Cannabis indica
aacaaccttttgttgatgggctaccaatttcaggattgctgcggttcgcctttcttggatttcatcaagtgattctgcgaggagtgcatgattaacttcttggtcatatgtcaatcttctgtgagatggagggtcaagttctacctgcagcatagcttcataatcatatgccatggcaaatggagtctgcccggtcgctgttttctcagttgtgcaatacgaccataatacttcaagaagttcttttagcatcttcatgtcgtttctttagagtgtctttgagtgtcttgttgacagcttcgacttgaccttttgcttggggatgtgccactgcagagaaacattttatgatcccatggtttgcatagaaatcagtgaagtattgactgtcaaattgtttgccattgtccgagactatcttgtatggtagtctgaaccaacaaattatatttttcacaatgaagtcttgcactttcttggatgtgatggttgtcaacggcttggcttctgtccatttagtgaaataatcatctccaaccaccgcgtactatactccacctttgcctttggacaattttccgattaggtcaattccccaaatggcaaacggcctaggactttgcatctgagttagttcattggttggtgctccaggtatctttgaaaatgtctggcacttatcacatttcttgaggtaggccttggaatcttcaatcacggtcggccaaaaataaccttgcctcagaattttcttggataaactctgcccagctgcgtggttggcgcaaaatccatcatgtacctaagacaaaagtcatgcggcttcttcttgtgtaacacacctgagta

SEQ ID NO: 247786 - DNA, 650 bp, Cannabis indica
tcaagtttgtgaaaaaaaaaaatgttttaaacatgtggaatgaggaactatgattatgacaatttggtccccttttcttctattattagttacctacctaattcccacccaagttactagtttattttttcagacagaagagtgcaaggaaagttgacaactttatgatctcgaatcttattattataattatgaaccttgaataatgaagtgtgacaattcatgtaattaacaacacatatagcaacgtttatggtctaactaattaactctgctactcatcgcgattcacgagtagttgtgagatatatacaacacgtaactacactaccataactagcacatctacgtgttttattgtattcttttcattcttttcattctttgtacatcataacaaacaatatttagtccaccacatttgtgttaagagtattgacgacaaaattacatggattataagatttgtgatatttaatttcataaatttattttttaaccttaaatatcaatgtatactgctctcagtaaaatctttcaaactctcattttttttttacacttttatttaaataattgtctgttaagtatatcacaaatacgtataattctatatagatttaccgtcctaatattttttttaatttaac

SEQ ID NO: 247787 - DNA, 840 bp, Cannabis indica
aatagaattaaccaacaacttttgtaacatgtaatacatataaaaatatattttataatatacacactcctaaaaaggctggtttggtacacattttagcatctagaagaatttttagtcaattttgttttcatgatcgtgcatgtttgtagttatttaagaccatcgattgaatttttttaaaaaaaagaaaaaaagtaaataccattttagaccatttattttgcaaaagttatcgattggaccatctgttttgttaaatgataaaatggatcctgtattttctaaaatggtaaaaataggaccctgaactgattttttgtcaaaataaaatttaataataatccaatctaaaagtgttatgacaaaatttacatattctatatttgttcgtatttttaagttggttgtattaaaaaaaaaattgtcaaaaattaagttaaggattttatttgtaccattttagaaaatacaggatctattttgtcatttaacaaaacagatggtccaattggtaacttttgtaaaacacagagtccaaaatacaatgccaaaaataaaatacaaatagtttgttgtagtcataattattttttattctatgtgtggtaaatagttgtttgaactttattttcgtcattgtaaactatttaaaaaatttaaaatttaccgataatattaactaagtacaacagacacaattataaaataaaaaaaattgtaattataataaagattacagaataaaattataatctccctaaaatttgaatatattatttaaatgatttatttttaattatatttagaaatatctattcatcataattatatttacac

SEQ ID NO: 247788 - DNA, 574 bp, Cannabis indica
tcttaacttcctttattcccaaaaaaaaaagtattcccgtatctaattgcttgcataggcagcaatcaaatcagagctttggaatgggtgagctaagagtttggttgatcaaatatgtgatcaaagttgtggacatgtctattctgttaacatctacaagaactcttggccatagcctagaaagccatgcaaaaaataaattagtttattagagaaacaaacacaacatagcacaacactttatgttattataatcaagaagctcatataaacaaggcctttgagtaaatcttacatgattctttgaaaagcctccctattctgtttaagtgtcgtcctctgctcctccattatagaaatcaaagtacatttttagcccaattagactcattatttgatcatttgattttctcagaaattaaactcttccagttatttcaatgtcttctgatctttactttttttgttctattttataaactaatgagaaacatgtgtagtcgatcaatggtagttttttattcaccattataaaacacataaacataaacaatgatatgatactactatattt

SEQ ID NO: 247789 - DNA, 568 bp, Cannabis indica
tttttgatataaaacttttttttaaaatgaaatattattatcattaggaaaatttgcctaaaaaatatctattttatttgttttattgctaacaagtattcaatttttaaaaattagagcattaatattcaaaaccttatttctctaaacttcgcttagtatccactaaattctgttagtttaatagtcacgtgaatagtctaaattattccaattttatgttatttattttcacctaataattatttaaaaataaatcttatttgttaaaatgaatcaaaacaaattaaaaatattaataataaagaaacctaaaacaagaaatccctcccagtagtacactgaaatccagacccaaaactaggaaatcaaaccccttgccgccgataaggttatttccatcaatcacggcaatcctagagctgtctctccagatctcacaggtcgggtcaatacgacaataggaagctctctgcattagttgagttctcaattgttccgagtcgattttacaatctgttgctgcaatccacctatctcaattgaaaaatctcagcttcctagccat

SEQ ID NO: 247790 - DNA, 598 bp, Cannabis indica
ttttcaactaaatgtgtgattgccttcgctaaccatatgcttggcttagttgcgagaaagtgactttcagacccgaatgtttcattcggctttgtttatggacagttaggttaatctacttggacccagtgaatgggtcatcattcttaatgagcttatttgaatatacatgtgacctacttagaaatatagataatttacccctgccttcaaggctcgggagtcacggaggctcgcaaccgccatccgaatttgttatcgcatccggggttgtgaacaacctagctctttagagatttcatgaatagattgagagtcacgaaagcttatttcattattatttattactacatgtgttattttattcaaataagtccattaagaataataggcacattcacttggtccaagtagatcgttcaatctgcccataagcaatgtcgaatgaaacgttcaggtcggatagtcacttccttgcgactaagccaaacatgtggttctgaaaagcaatcacacatttagttgaaaagtttagctaattaaataattttaaatttctccaatgcacaaaataaaaagataaaaaaaaaaacaaaaa

SEQ ID NO: 247791 - DNA, 800 bp, Cannabis indica
actgatattgatatttgttttcagttcccggttgacagcaccaaaaacttgttacgaaatttatactatgtaagtgcacacaatcacattttgtaataaaattggtaaaactaagtattattctctaggactgagttaccaattaccaaccaatcaatcttttagttctatttgatcaaataaaattcagaattttctaacaaagaaaataaactattaataaaataacaatgagaatgaatttaggacaaatatgatcctctaatttccaccgtttacttcctaatgcaagaactctatcttctgcaagaactctatcttcttctccctattcaaatcctaatttgcaaagtattttataatctgattaagaattataaattcaatctaaatgataactccctatagttctatggtaaagttgaattatgaagaaagcattaaacaattgcaactttaaagattgaccaaataatttagatactttcgttttaaattaaatttgcatccaaacaatcaaagcacatcaaattttactttttaaatttcaatttgattcataaataacaattataaatgaaataattacaataattaaatacagattgtaaggaattgaaatgaaagaagaagaagaaaaacaaattctgcgttaatctataaaaagtagggctgtacatcggtcagtttgggcggtttatcctatatattttctaacccaatctaaagttcgtgttgctaaaatttaagtgcaacccactcaatttaaaaaaaaaaaaatctataaaccgaccaacagt

SEQ ID NO: 247792 - DNA, 1044 bp, Cannabis indica
acaaaatatagcgtaaatttttcatcacgttactcgctcgcattatcgtgttaaagttattcaaatgtgagaccgggtctgtggttccatcataggacgagacatgcgggtttttgaatcccggaggaaaatgggtattcataatatttgggtgatacggctcaagttcctcgtcagagtcgtatccagatgaattccctaattcccccacttgatatctcctgaacttgtcctccagcttgtttatctacaattggattggatcctcttgctttggaccaagctgttggcgaaggtcaggtttcttccgattcaagtactcttgcagatctggttgggagtaattgctggcagatatcgtcttactcatagaccgcgtcctagtcatagactccatctttaagtggctcacagatttacttattcccatactttcccgatcatttgctcgttgagtactttctcctcttcgagttgatcggctatgtcttctagatcgcctcaaagtcacacttgcttcttcacgctctattctttccttctgagagcagtttgtcgtatttccccctcagggtacgtacgagtcctcgctctatgggtttgggaagaatgttggtgattcctaggaggtgatctttgttctcccagctgagttcaaagatcctcctcatttttcgtgagggatttctcgttcatcagtctctggttgtctcctttctggctgttcatcctgattctcaaggggtgtctcattttcccctggttgttcttcccgggccttttcctatctcctggttcgtgaaacacaaggtctgcctcgtggtcttctcactctagattcaggttgatttttgactgttcgtcctctggcgccgccctagctgaagctgcctctcattctaactcagtgtttttgatgatgcgcctcttccagatgacatctcagggggcggttttccatttcataagttctttctcccacagattgggcacctctacggttgagctcttcatccctcgtcccgagattctgaccattcccac

SEQ ID NO: 247793 - DNA, 615 bp, Cannabis indica
tttgtcttttttttttcttcttcaattaacattttataatttttttttaaagctattataactgttggaaaattatacaatacatttccttaaaaaaaatatatatatattgatacacttttatttatttcagtatttgagagatttctttcattcaatttttttaataatcataaacgttgtatttatttaaaacattttataattttttttctcaatctaaattcgcatagcaacccaaatagtaactatttgagcaacctaaaccgtaaaataatttaaaaaaaagttaaaaaatcatatatggggtgattttctaaaaataaactaaagatgaataattaatattaataataaggttaaataacattttgaaccatgtattttatgttttcttaaatgataatatgaaccatgtgttttgtaaaatagtaaaaataggaccctgagttcaatttttgaaattttttttaatataacaaacttgaagatatttcctaacacgaacaaatacataaaaatataaccagttttgtcataacattagatcagattattattaagttttattttgacaaaaactcagctcaaggtcttatttgtaacattttagaa

SEQ ID NO: 247794 - DNA, 647 bp, Cannabis indica
acccaaaaattacaataaaatatgaacacaagaaccattaacttaggatgattgctcgctcaatgtcgcccaaaaaaacacaaaaaaaaatgtgaacacggaaaccattaacttaggatggtcattgcacaaaattgcacatatatcgcctaatatcgcaaaaacacacaaaatccaaaaaaaaactatatcccgaaactcagtttctttcccaaacgcaaaaaattagaaatcaaaattttaatcatcaacaattttaatttaatcacacatatcgcatttaaaggataaattaaagaaatattaaaaaaaaatagcacctgagtttgagtgggtctcgtggacgttggacggtggtggggacggtgatcggagactagttcgagtgggtttcatgggtcgttggggttcgagtggctatcataggtctcgtgggtcactggggttgattgggtcgtagattgggttgttggggtcgtcgggtcgattaggtcgactggcttcgagtacgtcttggttcgaatggagtgggtgggtgagttcaaaggttcagggggactttggttctgggttcgaaaatggagagggtaggaggagaaagaagggagttagagagaatggggggagtttaaaagataggggtaatt

SEQ ID NO: 247795 - DNA, 989 bp, Cannabis indica
agatcctggtaaaataaattccaacagtacttgccagataaactacattgtataaggctaggtattagcgaggtttcatcttaagtatatttacttggaaaaatgctgagtcttaaattgtacatccgactataatagactcaccattatatctcatataggatttctaagggaaccacatataagattacaattgtatatgcctacaaggtcgtcaccaaacccttgtcgaggtcaaacgagaacaaaaacttagtcgctcgcttggaacattagccttggccgcctaggattcccaagcttagagagggccagccagggttccatgaccttacaaagggctggctagggacccttagcccaggcatcggccgaccagcttttggggtaccccctatggctagccagctcccatgagaaagactcatggttgaccaggtcttgaacaagacccctatggtcggcttgggtgtgtttcagatctaagcatgtgttttttaagaactcaaatacgttcttcatgttctttgtgttcttcgtgactcaaagagtcaagaatcacaacgaaggtcaaaattagatttttttttgttagaaaattacacattatacatcctaagactatcatgcggatcaaaataccaaaaagattacaatctaacgtgggaatcaaaaaatattcaaagcaaagaaaagcatcatacaaccatggcaaaatcaactaaaacaagtaaatagcaagattggaaatcttacccactactagaaacttttggtgaagaggatgggaagcttggatcgtcaaattggcatgaaaaacctaggagttgaagcacaatgggcatcgaactctagggagaaggaggagctttcaaaagttgctctttctaaagagagaatgaaatatggaaagtgaaaagtgtttttctctcataagcttatatagcttttgtgagacatctttttacttatcatgcagcatgtaactg

SEQ ID NO: 247796 - DNA, 1037 bp, Cannabis indica
gtgacaaaatatttaaggcaaaaggaaaaatatttatatttattttatttaaaaagagagacgctttgatcaaaggacaaagatagtcaagcacactttttttttcttctttcatatattaataaaaaataaattaaaagaataaaagatcgattccataatttcattcaatctgagatcttcactttttgtttctctcctttctcacgatcgatctgcgtttcccgcatttcaaacctcatctcattttctctgattcccaatcttaatctctcgttcaaaatgggtactttctcttcttctctatctgatctaatctgatttgtgtttttttcccccttcatttatagataatttgctggtatatttgaccactgacgttaatttttcatgtatttattacccggattggtatcaatttcatttcttcgtttcttaataatttcattatgcgtttcgcctgttggggtaactgtttttgttttgaattattttagagtttatttaaaatttgatcatttattcaaataaaccttaagtgagttggggttttagtttaacttattgacttgtattggattgatttttttcaatgtaatgcagattttaggcttctgaagtattctttctaataattctgaaagttttggtttgtttctgttttgatttatgtaattgtaattagaaattttgtgatatttatttatatttagagttggggtttggctaccgagaaaattttggatagaaaagaaacgagctgtagaatttgagatttattcgagtagttgaggaacactggaaatgcaaatatatggtgttttggggcttatgaaattagttggtattttaaacagattgagtttgttagatgtgagctgatgaatagttttacaaatctttattatgactccacttgcagctaacgaattacagatttgtagtatcttattgtaaaaaaacaatgagaccgggcatgaatcttgtgacttttattttttaacctcaattatcgaaaccaaaagatattcttacac

SEQ ID NO: 247797 - DNA, 817 bp, Cannabis indica
catcactatgaaacaaataaaacagttttgaaggatgataagaagatttaacataagatttacattggcttttggccaataaacaattttcacattgaagagacaaaggattcaactatttaaatagtgctggaaacaaatgttttaaataaggaaaactagaatggcctaatttataatgccaaaccattatttgatcataaacaaaaagagaactaatgctactaaatccttgagaaattttattttcagaagccttatcttcgaaataatagtccattaatcattctagcactaccaattgtcttccccgaactctggcactgaaaacaaagtgggattcaaagaaaactacagaacaattagaatctctagataatttgctgacagacaagagattgcgagtaagtttaggaacatggaggaaagatttaagatctatccccttagaaattttaattaaacttttccctacaatgaatgtgaaattaccatcgactattttaactttttgatctcctgaacgagtatgtaagattcaaaaaaaatttagaattctccgtatggtttgaagctccagaatctattatccatggagtaaatgattttataacaatttagagcatttatttctaatactttgttacctgcatatgcaatagaagcaataggaatactaaatgaggacgaggtagtgttcagcaatgcatgaagctgattcatctgctccttagtgaagaggctggactcagcttcatgtgcagaaggggttcggcctgcctttcctctctctaccttgcttttccaatttgctggt

SEQ ID NO: 247798 - DNA, 859 bp, Cannabis indica
atcagatcggatacttagtgaaacccctacttctaaggcctcttgttgtgtggtgtgacaacctaagcacaatgtttctaactgccaacccagtgctacatgcaagaacaaagcacatcgagctcgatttatactttgttcgagagaaaattctatcagcttgttgacatcagacatgtttcagccatcgactaaattgctgatggtcttacaaagtcaatctctagcaatcgattcaatgtgtttcgatacaaactcagaattgaagatgcttcaattctcagtttgagggggagtgttaagagtatcaactctgttgaagttggttgaaaccgttagagtgttagttaggtagttagatgttagattgttatcttgcttgtaactactctaactaactctctctctctctctctttctagtttggagtttctgatacttagtctattaatgtaattaccatctcgtgagaaataaaaacttgaagtagatgcagccccattactatcgcgatataggggtgaactactataaattttgtgtgtctctctaaattatttacttaaacttattaatcatctcgccaatatagttagctgatgttggctacttttcaacgtcaacagacttatattttaaagctccaataaacacttgattattatcgatctcatcaatagaataacctagtttattaattctattattactctactataaatatagaattgcactctttgacaatatagaattacatttatagaactcttacttatagtccattgatataataaatataagtattttaccctctaattattagttcataattagagttggtcaaaattattgttttacc

SEQ ID NO: 247799 - DNA, 1547 bp, Cannabis indica
aagtcgatagaggcattgagaaagtgaaacaaagaagaaataatagtctgaatctaatctgaaagagaggatctatctttccatttatgtttgattttgtttaccaagacttggcaatcagaaaagactctagttagaggaagttgccgcttgacaccaggtgagggctgaaagaagggtttgagcttcaacaataataggtgatactgaaccaggatgggaggagaacaaaccagccactattaattcgcctttgccattttataccactgtgtgcgtatgttgttatcacaaagggcaacatcagagtggaggctgtaaaaacctaggggagggagacaccaagaagctactgaggctggagcagatcaagcaatagaaggcaaagtgtaagcctgagagagggagcctttttcttgagctaagatgtactcttgaatatgggtggctggtcgagtctctgtttctgcaacaggaaggactttggagttaaaaataatatttcgatcattccatataacccgcagaacgccaaagaggagggataggtcatctttgctgaaagtatcgaaccttgttaaaataaaatctttaatatcacagggaaaatgtgcattgtaaaaaatagagaaagctctgccaaaaaggaacaactctagaacacacagaagggcatgggttaccgtatccaattggttatcaagaacctttcaattatgaaaattgtaggaagtaggtaaaacatgatgaaagactttctaaatgaaatgtttgaacttaggacgaatactaagattccaaactgacttccaccatttttggaaataagcaatgttagaagaagaaggggaagaagaaacagatttggcaagggaagtggtaagatgataggccgatttgacagtgaagcaaccagatggatgatagccccaaatgagggagtcttccttggaaggattaatgggcactttgaggatagcttttacagtttcaggagggaagaaaaaattaaagctttgaaaggtctcaatccccagagtctagaaatagaaaaaaatagactatagggtcagatggcgaattgttgttattataagtcaagtacttaagaattaggtatcaagttaggctaaagagaatatattgttttaacattccccactttccagatgagtccatgctttaagagtatctctaccccacagaaggttgttccaggtcaaagatgaacaatggcctttggatgcttggagaaaactattatgcttgaagtatttagcttagaggagtcagggccaggactgaggaaagattaaggaaaattttccaggcttgcttggcaagcatagcctggttatggttacatcagagacctaaaacccaaacccctaaaaaacttggaatgactgagatgcatccaattcttccaatgaattttattacaattactctgagagccctacaaaaactttaagctactaatttatcaaagtgttttagcaagtcaaaacaaggaaagacgaaaaactaagacaactcgcataagt

SEQ ID NO: 247800 - DNA, 1968 bp, Cannabis indica
atttgttgcaacgtgacttgatctattttagatatgtataaaacaggttgtttgaatattactttctattctgtaaattatttcaaatttttcaaaattttactaaaatatcttaataaatatggagtatatcagtacaaaagagagttgtctcaagctagtgagaggcgcagggcggcgaagaattttaaaatatatttacttttaaacatgagttggactgagacaacttcaatttaacctactacaaatcctaggagcaatgctcatttggcaatattatggcctatgaagtttaaatttctagctattttagaaaaatcacaatcaataatgttcatagagctagctaaacaaccatcaatatattttgaaatcactctcaattgttttgatattttgactacaaatacaattgtctctaaaatttagtattaccattcctttaagaggcaaattttactaccaaaatttgtgtgtatagtacaaataaaatctctttgatggtggttgatgataaataattagaagtaatatccagatatccaagaaaatcaccatagaaaatccaacaaagagtaataacaaccacaaacaagaatgtctatccacgtggcattatctaaaccaatcaagtaagccaacattcccatgccacgtgtcaaattcccatttaatctcacagatttcatcagatgagattcctctttcctttccaccattataataccttcactcactcactcaccttatccttagcttaatccgccataaccaaaaccctctctgaacctcaatctctccccctaacatggcggcagagatggctttggtaaaacccatctccaaattcaacaatgtaaccccaaaattcctcattccaaggagctttaccaaacccagattcacctctgttagaatgtctgcaactacttcttcttcttcttcatcttcttcgaagaagggttctaagaagaatatcaatgagacccttttgacgccgaggttttacactacagatttcgatgaaatggagacccttttcaacactgagattaacaaacagttaaaccaggatgaattgcgttgctctgcttcaggaattcaagactgattataatcagacccatttcgttaggaataaggagtttaaggaagctgctgataaaatggaaggtcctcttagacaaatctttgttgagttcttggaaaggtcttgtactgctgaattctctggttttcttctttacaaagaattgggaagaagattaaaggtacaaacttttttactctcactttgtgctaaacatttctttaatgatgagtcattttctgttattgctaagcagtaagtttgttagttagtatatttgattattgctaatcagtaacttgaatatttgaataacttctaattacaatctctgtgtctaaaatcatatgctggaatctgctgaaaaatttggaatagtttaaagtactaaagtcagaataatattttaaaaaagatttgacatttttaaaaaaatttacagaataatattgtaattataacaaacactgccatgaaaaaaaatatattccagcatgtgttttgaagagtatcggaaatgattgaggattgctagtttgattgattactgtttggggttttttctctgcagaaaaccaaccctgttgtggctgagattttctctcttatgtccagagatgaagcaagacatgctgggtatgtaatattgtatgcatatatattatatataaaaacacacaccattgcttcactatatgtttgtatataaatgtaaaactcttgttgttttgtactacttttaggtttctgaacaagggtttgtctgatttcaatttggctttggacttgggattcttgacaaaggcaagaaagtacacattctttaagccaaagttcatattctacgctacctatttgtctgagaagattggata

SEQ ID NO: 247801 - DNA, 1248 bp, Cannabis indica
tgtacaatcttcacctgctcgctatcacgaaaatttagccttagccttgcccttacctacacatggaaataacactgtgagtcaaaagactcagtaagaaaagcataacataaaacataataataacccggattataatcaggcgcccatacacccaaccataatcctaattgagtcaggaatgttctcgacaaagtatgactaactgcgaatctagccatactcagtactctagtcgtaccgatgtggtagcagataactcatactatctaatagcctagcatatatctgttggcatctcggtgcaactctatgtacacctcacagatgccctgatatgctaataagacggctatagatttgcctaacacatatttgttggtatctcggtgcaactctatgtacacctcactaataccctgatatgttattctgacggcaactaacatgtacgctaaacatgtatacatatatgcatatcattatgctaatcttaccttgattccaaatttaggtgtgccggctaacctgagtggaacaactgctggacgaattacaggcccctaaatcacattgataagtgacacactaaatcacaaccaggaacttaggttttaaaccaaaaacctatctactttaacttaacatggcaataccctaaactagcatggaattaaccaacccaagctctgaaactaacacgaatcgacaacacgaattttttcgtgaatcccagttgcaaaatccggttaaccggttttacaggtcctgtaaaactggttacccaatttacactagaaaatcccaaaaattccagaacctaaccaaatcgattctaatccttaccaaaccttccaaacctgcatattataccccaagtgacatattccaagtaataaaaaaactacagaaactaaaaatccactttcaccattaaagagccaactttagttctaaaactcaaagcttgctcaaacaatcctacaaccacccaaaccagccaaaaacaacataatacatcacaactaaactccaaaaaacaaaatcgaacaacaacagccactacagaaatcaaaaacccaattcatgcaaaactttacaatttaaagcttaagaaactaaagagggagttgctagaaactttaccttaacttggatactctataaactgctggaaaatcacaagaattgcaaagaaaagctagaaacctagctggttcctagaggttcgagagagagagagagaga

SEQ ID NO: 247802 - DNA, 766 bp, Cannabis indica
tggagccaaaagttgccgccatttaattgtgataaaagatattcccgctccattgaatagtattttagatttatttttatttatttttaatttaatattaatgacatgtctcccaacatagaaagaaaatgtcacatgtggatagaaatgaccatctcataccataatttattggccatgtgtacatttttgaattatgtgtcatcagattaaaaataatataaagataaacatgtataattatatacagcctctttcattctaacaaaatcaagaattctaatttaccctaaatcattttcttcttctttatagtctgccctctttttcaaactcaaaattcgtcgtcgtttctcaccgtgaatagctgtgtatcgataccctaaatttcttttttcttcttcacagcctgtccctatttgttcgaagtctgaaactcgtcgtagataagctgcatttctttcgaagtcgagacgtttctctcattgtaagtcatgtgtctgttagtttcattctttaaaaagtttttttttttttttttttttttttttttttttatatagtatttagggttttgagtatcaataaagaaggatatatcaatatgggagtagttgaaatagacatttccttctgctctattagttttgattgtgggtcatattaccgtatcttataaactagctgtagagaagattctaaagttttatttggcaaattaacattgaagttgtgaatgttctatctttaattccttatttttttg

SEQ ID NO: 247803 - DNA, 963 bp, Cannabis indica
ctcttgctatgcctaagcaaatgccaaaccttgttgaccaattcagattcaagctttggttacctgataatacaagccagagacatattattagctttgtttgatttatttttgattcctatgtactaaatatgtacaatactattcatttttctaccaaatagtgcttgatcaagactatgattctccatatactcataaacaagaagtcttttgtctccctcaatacaacatccatataatttgacgaggttacggtgttgcactgcagatattgtggcgatttcagccacaaattggctctttccttggttagaagtcaaagacaattgcttcactgcaataactcttccatcttcaagtgttccctattattagttgtatcaaatgtaaaaatgtatagtcaaaaggaattggattccttttgtatatattgattaattcatctgcattaataccttgtaaacaggtccgaatcctccttctcccaactttttagaataatcaaaatcatttgtcgccgtcctaagttcagcataaccaaaagtgaatggcttaacatccatccccaagaactctgcaaagcatgacctgagtcattgagctttcctatctatattatctctttaaagcaacaacaaattttcaacataacaagaaaaaatgcataccttcatcatcatcattcgttcgggacttctttcttctttgaacaacatagaaggcaacgaaaacaaacaagaggattaaaatgacagccccaacaatgatccccgcaatcatactagtatgattcttgttttgccttggaagaatgttactgacagtaggtttgaaatctgtattgaaacaacattaaaccaagtgttaagccacattgcatttgcttctagaatttgtcatattaaattatgcttaattttacctggagtagcactgattgctgaaatggaaggtccataa

SEQ ID NO: 247804 - DNA, 762 bp, Cannabis indica
tctttagttataattatgtgatacttaacattaaaattatcattttatagaaagacgtaaagtagtcttttgttaaaaattaattactattttttaataaaaaatttaaatgtggtaaaaagtaattaaaatattattttaagtatcatgtacacctgattctttttattattattattattattatatcttattgttctttttttttaaaaaagccaaaattttacacgttagagtcattatttttttatattattattattattatatattattttaaaaaaaagtaaaaaaacattaaggtatatatattgattgatattttatgtatgtatataaataaaatttactattaattatatttgatttaagttttaatatttttttttggaaattaatttttatttttctagcttttttttttaaaaaatattttatatttttatagaaaaattattaaaacaataataaaatatcaatttgtagatttatatttttttcataaaaaaattattaaaataatagtaaaatattaatttatagatttatactttaataaaatattaaaattgagagaattaaagagggaagagaaaaatagtttcggagtaattttagaatgttatgtcaccgcttcatacttctcttttatattggtatattgatatattgattaatagatatatagattgatatatatatatatatagactaagaaaaagactacgtgccaagcacatatatgccaaacacgtatactta

SEQ ID NO: 247805 - DNA, 2863 bp, Cannabis indica
aattctatcactaatatttttttttatataaaaccctcacttttgagttttagaaaatatataatattgtgacagcctattttacagttgtcatcctacattcaattttgtggaaaaattattttgctaacaccacaaaacaaaatattaaaactttcataaatagtatgttaagaaaaaaatctaaacaatattttaaaaataactacatcagttacaagtttagattattaaatttagagactgttatctttttttttattttattataaaaacacatgtaatttctttattaattccactatttaatatttgttacaaatttgtcatctttttgtgtattataaaaataataaattatattaataatttcaatagtattactttatttataatggacacatcaaaatgttatattttagattatgtcattaaataagtaaaaaagattttataaaatatttataaaagttgggcaacacccttatggcacgtttactatacagtactcagaatcagaataaattaatggagaaatgtaggggaataaatgaaaaataattggaatcaatatttgtaatgtgttgtttactaaatttttttagaaatagaatagttgtgatttatattgtttactttattaggaaacataatcggaatgcttaaattgactaaattgcccttttaagttaaactatatggtagttatttgtaagatatattttaaaggataaaattatcattatatatttaatattaaaaaataaatataaaaataaagttaattaattaataatatagtaacttataaaattaataatgttattttgtaataattaaattcaatagaaaaatggctaattagtaattttttccccccgaactttgacatgtaccaaatcatgccctctgaacttttttggccgttaaaaattcctcatgaactattgaaattgttagatttaagaacttttgtctaattttagtaaaaaaattctcatatggatgaaagttcagggggaatgatttagtacatgtcaaagtttaaggggcattatttggtagatatcaaagtctagggagcattacataaacaatcactgaaatagtttgaggggaattttcaacggcaaaaaaagttcagggggcacgatttggtacttgtcaaagtttagggggaaaaattactaattagcctagaaaaatttataggtaataattacttgacaaatacacatataaaataaattcaattaattattaatgtaatatttataaaaaaattataagtaataattaattggaagattaatataagaaataaatataattaattaataatataacaacttataaataattaaataattaatattaaatttaatattgtagtttttctaataataaaaaaacttatacgtaatatttacttgaaatataaatttataaaataaattcaattacatatttatataattaatttttaaaaattattactttaatattttattaataaaaatttatctaaaaattaacaaattaaattcaattaattattaatataataatttttaaaaaaattaatattaaagttaataataaaatatgtagtaataattaattgaaagataaatataaaaaaaatatatttaatttattaataattaaatagcataaaattttatcatttaatttttttgaaaattataaaatcttatatgcctttataaaattttagatgacaatcgacatgtcttggaccacattgcgaaatcttagatgtccacaatattggaatggcctaaatgtattttagtgatgacctcgaaatgtaaagattgtgatggtcaatttgggtcatcccaacaacaacttgtgtacggtcaatttgggtcaatgttccagcaacaacctgtgtatggtcaaatggaaggatctccacaatagcctatgtatggtcaaattatcagtgcgaagagtcagcaacaacagcaacctatactttggttcgtccgcagactcaacaatttgtggagatcttacctacgccgcagacttgacaaccttattaccctaccccgtcggctccttaatctcgtgataatcgtgaaggttcaagacttagctcgaatgcagatgattttatgaaatttactgatctgaacaatgataattaggtttctatatgtaaattttttatgtttttagagtttattttaagtacaattttataatattaattaagatattagtgtatattgttatggacaaatttatattaatgtttattttcttaaatttaaattttaattaattatatattttgaaaataattattacaatatataatattatatatattaataatatatataatattataattataattatttttattatataaatattaaaaacaataaaatcttttttatataaaaattattaataccgcggaacactaaatgtggtctcccggtattaatgtgtcagcgtgtaaaagcacagaaagttataccggcggaccccaccgatgttaatctatcagtattaatattattatcggcagaagtctattttggccgttaatacccaatatagcgaccaattaataccagcgagtaattactggcgaatttcgccggtaataattaataccggaggatgtctccttcagtaatgtggaaaattcttgtaatgattatatatgctaaatgaaagatataaaaaaatgaataaagaaggacagttagaagaagaagataagcaaaaattatgggtagaggtggttttcgtagattttgatgtggtttcgaagtaatgctgaaaggtagttggtaaatgaaaaactgagaaagaaaat

SEQ ID NO: 247806 - DNA, 1144 bp, Cannabis indica
agcgcggcttagtttcctagtatctatataaaaaaaattaccttaataaaattcccacaattatttacaatattttacacaaaataaataatatgttactttaaaaaaaataaaaatttaatatgtatttgctaaatatataattttcacgcaatattcataaaaaccacatccaaaaattattggcatttcttttttgctagaaaatatatatattctttaaactttaatcattgattatttttgaattgtagaaaatatttcaaaaatatattttatttttgaaaaaaaagcgattttatcataaattcaaatagagttagacctcattacaaaaaggagtttttggtacggaagagaccgggagacacccaaaggcaaacacctgatgagtaaaagcacatctagccacaatatattttaaattaaaccataatatctgtttttactttttttatataaattttatttgaatttaaatttcaaattattatgaatatatcagtaatcaaattgtttatgaatttaaatttaaattagatatttattaataactaattgttcaatagttaataataaattttttaataatacacatatacgatatttgtttaatatctttttaaataataactaataacatatttgaataattttttaatagttaataactaattttttaaaaatgtacatttgtttattatatatattgattattcttataataaaaattcataattatcctataaatatttgtaatttttatttttataaaacttacatttttataattacgtgactttttttgaaaagtaattgggagacttttgaattcttttttctttattggcaggaaatcaattattgataagcatatggtattattgataagcatatggtgcaaatagtttagtatttgtattttcttccttattctttatatctttttcttatattaaaacagacaacattttttaataattattattgaaaatttacatgaataaaaattattgaagagtgatttttttatactacaagtttgtacattatgtttaattggatgcacaagtgaaatacactgacgataacagttttgaatataattacaactatacgtgtagatacggtgatggaaaaatag

SEQ ID NO: 247807 - DNA, 514 bp, Cannabis indica
aggcttacattgtagtagtgaatttaggtcttatcaccagcggaacgttactaactagggactacaaaattatctatgtgtgcacgttcattgtgccacaacatgataaatatttttctgtagttgtttgttttcctcaaagagcattataacaaaacagctaagcatgactaggcgagttataacttaccgttttagagcatttattttgtttgactgagttaatattaattcttacctggaaatatatgtaatttgtatagaacacgtaccattcacgtgtggcatgttggtttctactggttgcattacaatgatattacacgaacgaatattacaccagtggatatccatgccatgttggtttctactggttgcattacaatgatattacacgaacgaatattacaccagtggatatccatgccatgttggtttcgtaccatccttgtcctctatataaacacaccccaaacgccaacacgtctcaattgtttttcctcaacaaaaccac

SEQ ID NO: 247808 - DNA, 742 bp, Cannabis indica
agtaagaaaaaataaaaataacgatgaattattttatggttgtccgttgtggaaggtaatttttgttgaattttgagaattcaagcacatatattatatgataaaatttattgattatttgctatcagaataaaattgaccgaggctgtagatttcaaggacttgttgaagatgaaaggtcaactgctttaaaattatttgataccaaagaaatagatcaattgttggcaacaataaattcaattgtgcggttgttgttggagataaacattgttttcgataaaatagttgatttgttgtcgaagatgaaaattatgtttgctaaaatattacaatgtataattatttattttgttatttatttgttatttaaatatttgtatatgtgaaagttcaataataataaatattttaatgtagtattatgtgttattgatcaatatataaatgtaatttaaattatcactacaagaaaggggaccttttagattgagacttgttatccgacttttagatttggcgcctcaaatatgtagtaaaaaaaaatttagacaagggctttgtttggtagaacgtcaaaaaaaatatcaaaggtataaaaaaaaataagttcaagattcgatttttatgggttagccaaacaaggattaatatttttaggaaaatcttttatcctgattattagttaaaaatcgggataaaagggtttagtgtaaaacccttttaaataaccaggataaaa

SEQ ID NO: 247809 - DNA, 893 bp, Cannabis indica
ttttcgctacctgtggactcagtggaggccacgagaagatttttaaaataataagagaatttctatttctgtatatagaatagtatagtgtttaattctttcgtgacaagagagagtcccatatgtctatatatgactagtatattgtgtattgaatcaataatattatattctatattgatagagagacattagagttaagtttagaactaaactgagctaaagaaaatgattcaaaatgcaaagtaaacccctttggccaaacctttaatggaggcccaagagtttgatttttaccacttttgtttcctaaagtagaacatctaatctttcatcaaaattgtcctttttctattctaattatttaaatgctaactttttgtatttaatatttataattaattattggacgaaattatcatttaaatatatttattaattagaccctccaagctctcttaattattaaacaaaccctaaattctcttttcttcccaaatatgtccttgcttagtaaaatttataaataagacatagtcttatttagaatcctaattaataatataaattaattaattgatactacaaaacaatattatctcatatattgtgggcacggttggcttatgtaatcaagctcccaataagtagctctagaatttatcgagtaaattttttatcttattaattctccctaattccactatagacccagaactgaaatcttgattacatagaatactctatacaccaagtattgatagttgttgacttcgcttttagccaacgacaatgagcatttttgataagcgataaacgatatgtcgtagcaagaatatgtagtaaagcaataataagacagaaattttgtagaggttcaggcccgagcagtt

SEQ ID NO: 247810 - DNA, 836 bp, Cannabis indica
aagggctagatatctgaacgaagtcattatattccgctgcacccaatgtaaggtttacgaaactttatatgtgtttatttcatcgttttagatagttcatatttagggtgttaatcaacatacttgtgagtagatctaagatcctagtaaaataatttccaacacaaccaactagtcacgtgggaacttgtgctcaaagaaaaacccttaatgcttggaataccactaccacacttggtagccgggcatgtactatacaaacaccaggtgtggagacctcttggagggaaagtaccttcaagcaagagtttgagaggactcaagcttgagggcaccaaccaatgggtcctccacctgatgttgaacgacctcaaaacaacgagagtcctccacaaagtccttctaaatgttctcatgaaacaagacatgagaacttatgaggggaaagggacctgctactcaaactaaaataggtagtaggagacactacttcgaaaccaaaggctacgagatcaggcaggtaaggaccgatgaaccgcttcatattcatactcaaaagtactttcgagatgaaatgggtaaattttgttgttactttgcacgtgaccccgatgaccaatagtacgagtacttcccttgagtacatagggaggaattgaatatgagctcataatctgtgtttgagattaataattggtatctagagccaaaattattgattttagagctccatttcttttaaaaaaacccccattttataaatctgaaatttattatttttttttgctttttcggattaatatgcttaatgttgtgtaaatatgagatttactttt

SEQ ID NO: 247811 - DNA, 780 bp, Cannabis indica
tttttttttcgagaagaattagcaaatttatttatttcttttttttttctttctagagatgataagacacttccacataacttttctcaatctcctacttccaaaataatacccactcaaaatacctcattcccccaaacttaattaaaagcatatggcataataaggtacattgagaatgaaagtaattaaaggaaacacattaggctcaattaagtggttaaaattttgaaacatgctaaggctcaactttgggtatactaaggacaaaattttacaggtaagcttgaaaggctcaatcggtccaaagaaaattacctaaatcatttttcaagcaacaatcatcaatgatttcgcttcaagagagtaagtcacacaagttatattccatgtcaagcaaagattccacaaacccaagtagaataaaagtgatactatccaagattaataattcacatctatatcaataatttacaaggcatccaattcaatccaaagaatttatgaattaagcacacagtttacatttcaatccattgcacaaataaacaacggcagttcaatcaatatttcggctcaattatcaactcatgaaaattaaacaaaaactaaactaaactaaacaaaaacattaacataaaaataaatagaaacctaagtactatggttctcttctttctatgtagattgggatcccaaccattgcgaggagctcactgattcatggtggatgctgacatgaaagtcaataaggccttatatggtgtaaagtcctttttt

SEQ ID NO: 247812 - DNA, 671 bp, Cannabis indica
ctatacctggaaggctactcgaatggcctatcacggacacagactgcttaaaagaagtcagacgtctaccaagaagtgagacccagatcgctctagtgatagttatacttttttgacacaggatcagatcttgtcccatgtgtcaatccatgggaatgtatatatgccccacccgtaaacacgcctttttgcctgagggtttgtttaggcatcttttttttaaggtgaacccttttggcgacatgtgtcttgtaccattagtggtcccctattgtccagctgcttctacacacaagcacaaaaccttcttaagggctcaacagttagatattgcatatattttaccctaatagtgggcttattttgtaaaaaccctaggcgggtcatgggcatgtccatacccgccctttagcctataaatacctgttatctcaaattttgtccacctgacgtggcatgtcaacgtaaaccaagacacagtacatttggaatacaacctttccaatagcaagacagtctcctcacaaggtatggaaaaactgccaactagcaagcgaaaggagttaagcaagccatcaaggagttgtaccaccatgtctggctagctacgaggagtctataggccagccatgatgatcttgtatggctggccaaggtttgagcacaagatg

SEQ ID NO: 247813 - DNA, 608 bp, Cannabis indica
tcttccaaacaaggtcactgatctggctgcccaaatggcctaacagagcatcactactctgcccaaatcttctctgtcaactctttttgcagtagcttccaaccacaccagcagggaagaaaataaatcccttccaacagcagccagtccagcatacccgaagcaagaccacgcaaaatgacaagaaaccaatacatgccattccgtttcagcataaacaccacaaaaaggacatgaactatcaaccagaacctttttgatgcataagtttctttttgaagcgagacaatttgatgctgctctccacacaagatccttggccttaggaggcactttgagagaccataaaatcttccaaaaactaatagcctcagaggagtccgaatggtgtttaagttgttggagagacacaaaataacaataatttattttattttgttgctagttatgtgattttttttcataaatattaaataatttaatattaaaaggtaactaatccaatatgcacttttctagattggatttgattatatttgagctattgtaaagattggattagatccaatatatttaatctgcacgtagtgcggatcgtatgcactatg

SEQ ID NO: 247814 - DNA, 817 bp, Cannabis indica
ctcaaaaatttcttaaggtagctaggttttgatttgttttttgcatttcaagctggtttaagcaaggggtttgagatctcaagttcttggtaagtgccttgtagctttcgttgatttcttgagttggaaagaaaaaaggaatttttgcatgtttttggatttttagttgctgtagctattagatattgtttacagaggttaaattatgcttgattgtgttggtttaagcttgtattggtggttgttagttagatttaatcaagtttgagttttgaactcaaaacttggagctttaatggtttgttttagtttctatgtatgggtggtttgttttattgctttacaaatgttcattggggtctaattagtaggtctggaaagttttgtttggattggggttgaattggtcgagttatgaaaattttggtgatttctgcactgaaccagaattccgattcagggaggcgtgtaggaattggaatttcggttggcttctaagaatttttcccagaaccggaattccgattggggaatcggtctaccagttggggtaaatttgggaaccctagtttttcccattttttgagttatttagagtatttcaatgttatttatcgatagggaaacctttagtttcaagtttaagttccccgagaagttatttagcgtatcgcttatcagtgttgtgactaatgtgatttaggagcctctaattcgccgagcagattgttccactcaggttgactggcacacctaaattcataaatcaaaggtaagattagtataatagtaatgcatatgataatttaaatgttca

SEQ ID NO: 247815 - DNA, 670 bp, Cannabis indica
aacaatcaaacagatgtgagtttgacattaggagaaaagtattacaatagtccacgccataggtttgagcataacccttggcaacaagaggggtcttcaggcaagcaattgttccatcttaattgaatttaaccattgttatcctatattttatactatgacgtgacatctagttggatgactcatgtcttgcatttttcaatttggacagatggttttacgctgagcagcccacaaggattgatatgaaagtccaagttgtacttatatagcaggatgtttggacagtcatcaacaaacatccgaccagctcaatcttgtgatcaactcgtgtgcaccaacttggagatgtgagttggcaatttcagcagtgatcgatgatatctctaaacttgcatgacacgaagtaattcatacttttgtgggattgattcataccatcagaaaataaaggaaattagtttagatttgcccaattccttcattgtaattatttatttcatatagattaaggaaaaccattctatgtaatcaaccccaataaaatagtgatctcatctcactattgaaagacacgaatttaattagagagaacactcaagagagaaatagtgatctaagagagaattactcagagatcttttgtaagagccaaagaatacttcattct

SEQ ID NO: 247816 - DNA, 585 bp, Cannabis indica
attctccttcaagccaaccaagtggaaggcctccaagttaagaaagatggcaagtgggtccttgtgaagcctctcccaaatgctttcattgtcaatgtaggagatatactagaggtaataataatctcttaatcaactattatgtttggtgtgatttaattaatttaagggtaaatactattttggatccagtattttgtaaaagttattaattggattaatagttttgttaaatgacaaaatgaaccctgtatttttcaaaattacaaataggactctgaatagattttttgttaaaaagcctttaataataatccgatctggagatgttatgacaaaccttattatatttttttgcatctgttcatattaaaaattgtcttaaagttagttatatcaaaaagtaaagttgttaaaaattaagtatagggtcctatttttactattttagaaatataaggtccattttttcatttaacaaaatagaggatctaactgataatttttgtaaaacacggcgtctaaaatagtatttgccttaattttaaaaaaaaatgtataaattttatgggtttttataacatc

SEQ ID NO: 247817 - DNA, 723 bp, Cannabis indica
tacttgtgagtagatctaagatcttggtaaaataatttccaacaattagaagagattcagaacaaactgaggcagatccactaaatcagctgctgcagcaggaggaaaaaattatagggaagattatgcagaagtccataaagccttcagctcctttcttcatgagaagactaaactcacttgggcaaaagcaggtgatgaaaatattgccttgtagcatgccagcattaaacaaaggagaagtcagaatagaatttattctattgttgatgcagctggagaaagaattgataatcctactgaggttactgctacattccttgattattatcaatttctgcttggctttaacttgcaaaataggaaacaggtgcaaatagagatcatgttgcaaggtcctcttgtatctaaacaacaagctgacttgctaattgctccccacactagagaagaggtcaaacaaattatgtttgacataccaggcatcaaggccccgggactgaacgtatttgaaagttttttcttccaagataattgggaaatagttggagaagatacaactgcagccatcatgtcattcttgaattttgggcaaatgctttaggagattaactctacggtattaactcttgtacctaaagttaaatgtcctaatgttgtggccaaatataggccaattgcttgttgcaatgtagtatacaaagcatcaaccaaattaataag

SEQ ID NO: 247818 - DNA, 568 bp, Cannabis indica
ctaggtctggatcctagttcccagtctaggtccaactttaggttcgggtttgaatcccgagtttcgtctgagtttaggttccagtatgggttcaagtttgagtcagggttcaagtcccagtcttagtccaggtccctattcgagtttaggtcgagatcctgatccgggtctgaattaaggtctaggtccaggacaaggttctgctctgggtttgggtctgggttcaggtcctgagtctgggtctaggtgcgggtctgggttttagtcctgggttccagtctttgtatgggtatgggtctgggcccgtggctaggttaaggtttagggtttagggtttagggttttgggttttgggcatagggtttagggggaagtgtatagagtttaggatttagggtttaaggtttaaggtttagggtttagggtccgcttagagttcaaatttcaatttcgggtcacatgatacgatttaaggtttgggtctgggtctgggtctgagtcctggtctgggtctaggtccgtgtttgggttcaggtccgagtcttagtccaatactgaacaccaacca

SEQ ID NO: 247819 - DNA, 1635 bp, Cannabis indica
agtcttatttaaggacatagagttatacactcgactagatattaaaaataggtcatgcgcttagtagtcctctctattttttaaaatacagtacttgtattttcaataaaatttatctaataaaccttggaatattagaaggaatgccttgcactttaatgactctaagggggtggtgaactagatccttagtctagagttcttgactgatagagcgaagagcgacaaggttaagttcactcaatttgctagcattttatgctccactttttggatggctcgtaataaagcctacaacgaaaggtaccaaatggacttgttattctatttctaacttgaagggtgtatgaatttaataatgcaaatgttgcattgttgcctaaaaaagttctgagaacatcgtgatacatttacatagctttaaatattccagctcattactagtaacaataagccacgtcagctttgataacgcacttttagtacaaacaatccaaaagatttaatacggacaagctatccagttacgtacaagcgcttttgcctagatgaataaccaagattgacagtaagctatctagaagtgcatctccagactaatgacaagatatccagagagacaattcatatgcagtacaagtttatctagaaataccttttagattctacaaagtcttccgcacaaaattttctagattcaccccaagcttcccgtatctactcttcgaattcataggctcccttccaaataacaaaacttgcaaccataatcaacatgctcattgactgttgaatatttttttttaagcttgatttgttactttttatttaattgttcatgacaattttaagtactggcttatgtgttgtttttataacaaaagtggagagtatatcaaaatggaaaggcactatacacaataatattgtaaaaattacagataagctagcagaggtcgcaaaacgatgtgccgtatcaagggcaaatgcaactatttttagatgaatctgtttcactgtcgatttagatggaaagttatgcacatgtataggagatttcagctgacagacatcccatatggacatgccttacttcaatctagctttgcaaccatgaatcttataattatgtgcacccttggtacaaaatagatactttcaagtgttatgagaaaattattttaccctgtgcaaggtcctgataagtggcccaaaataggtcaaaattcaatctttcctctaagtgcaaatatttttccaagcagactaaagaaaaagagaagaagaagtgttgatgagccaccccctccaaacttacactggtgcaattatacattgtggcaaatgcaagcaacttggacactaaaaaggaacttgcaagaatgatacaacacatgctcctgctccagcctatgtaatatacttttaactttcaaattcttaaatgcaaattttagtcaaatctggtatttatttgtaacttaggtactgtcaataaataacactcattgcttctatttaaggctcaaagaacaaaggaggcaggcaccaatccaaaattcaatcaaggaaacactcaagagaaggagaaaagagaaaagaaaataggtggaaaggcgtaagaaggaactgcag

SEQ ID NO: 247820 - DNA, 2636 bp, Cannabis indica
gagggtctaatggtttgagatctaatggagcctgagactctccaaatttgtggttttttaagtgatatgtttcattttttttttttattttggtgaaattttgctggtggcagtaataatggtagtacggtgatgataatggaggtggtaatggtagtgtagtggtgataatgggggtggttgtggtgtgatggtggtggtggttggtggttggcaatggtggttttggtgggggttgttggatttgttaaagaaatggattgaggtggtagtggtggtttcttgaaggtttcaaagaaaaaaaaaaagaaagaaatgggttataattttattacttatttattttttatattatatgaagtaattttatattattcaaataattaatattatgtgaaccattaaaaatttgctgccatgtgtacactctgtacacttgtgatgtccacctaggcacttaacatcattttaacagaagtataaaaactaatacagaagtgcaattcaagtagttttgccataaaaaaatcaatttacgtgattcagtgtaacaaatcgtataatttaaaaatttttccaccaataaatattctcatataaataacataattcattattatacgcaatcggttttttaatctttctccctatttgattctctagatcaacttaatcaaattcccttttcagcttagcaagcatgccattttctcattcaaatattgcattatttagagaaaaaaaaaataccattttgaattctgtattttgcaaaaattatcaattgatttggagcttctattttattaaatgacaaatcaaatcctaaattttccaaatcagtatagaaaatagtatcttaagctcaatttttattaaaataaaacttaataataacttgccctaaatatgtctataaccgaactgataacatttttttgcatttggtcatgttagaactgactttaggttgattatatgtataaaaaaaatgcaaattgagcttagggtatcactttacaccattttggaaaatacaatacaaaatccaatttataatctaacaaaacaaatcgttaacttttacaaaacaagaagtccaaattagtatttacccttatataaataatgttgataattgatcaatgcggtcatttcataactcttcaatctcattctttaaatcgtttatcctattcaaaatgagcatttatgacatggaaaaaaaagtctttcgtcatacttgaaccatccgtcaagagccacgtgactggacgaaactagctgagcgcctgcaaagacggctgctatcaaaagattctttttcttgaaaattcacactttttcaaacctagaacaatgatagaattctagcattcaaaattaaactaaatactttcatgtataattcttctaattatgcaaccacgtgactcgagatggtctgttcaagcgaaacaaagaacatagtgcctaacacccccttatgagatgtaatatagctattaatacagtttaatgtcaaatcccacttattttactttaataaagattatagagaatcgttaactaacttataagacaatacctaacttgtagtgttaggcaccttagtaccatacttcattgcccactttgtttccatcaaaaggtcttttttttcagaatcaaatattcattcactttaacttatagtttttagaaagaatcggccttgtacaattttagacctctaattgttccaatacattcatcattaatcaattattattgcacaattaacttctatgaaatatttaattgaaggattagaaggtaaaatactaacaacttaggatactgtattatttcatgttcattcagtaacttaataaccttagttacatacacccaccaataaatcagtaatggtaccctgagcaagggactaaccagaagaaacaagacattaattttaatggatgaagaccagggaaaactctaggggtcaagatcctaaacaccttcctataaggtaacttgaatcgaaacagatgcaaaatttgagaggactagcttattcttgtacaaaatcaggaacatggaatggaaccaaaatgtagtgttcttattcttagtgatatctatagcaaacacgagaccgaggcaactgaaaatccagacctagtctgcagcacccataccaaatgcatatgacagccaagatgagatgcctgttacaaaaggaggcattgcattatcaggaattctagaatcaaaactagttggaataacatggtatgaaaaattgtgtgccaaatatgcataaaactcgaggaaaatgatgcacataacacttggcatgacgaattattaagatccatagtaaaactagttcggaaaatttgacaagagtctaaatggttgacgatataggaagtaagcatgaggattgccttacttgaggcttgatcaggcttttgagaataagacttgaggatggattgggtagtaaaagcttaatgctaaggctttatcaagtgagacatatgcttaaagacataagtacaataattgagaccctaagcattgcagattatcaagatgtcaaaccgagccttgaggttcgaccatggcaagatggcataagccttgag

SEQ ID NO: 247821 - DNA, 727 bp, Cannabis indica
ataaatactaaagtcatatttttggcggtaaaaatacatttcgtcactagtgtggaacttccgcaggtgaatgaccgttatttgccaggtcagtgtccatgtgtcactatgtgattagtccagatcatttaatttttatttgttttgtaaatcaatttaaaatattaaaaataaaacaaaaaatagtttaaaatcaaaataaaataatagatatttaatattaatattttaattaaattaaaataaaataaatcattaattagaacccaaaaattaaaactaacaaataaaagctaaaaaaaaaattgaaatgtcatcctctttttcttcctgctcttcttcttcttgctgaaaaccattctaatgtatccttgcttttattcatacctttaaaaaattcatgaaacccttgttcatatacatttatcagagtaacactatttcatcatcatcaccttcctcattattcagttgcaacaaaagaaaaaggggcaaaaagacacaaacacatagaacaatcagagacccactcactcaaaatcactaccagtattgcgagcatctgagaacccccccaatgttggttctccctcgcgttcttcactctctctccatctctttctcaacttctctcttctcagagccaaatggagacgctctaactgtctgtgacataaacaaacttcaccacaaggttcgcaatccttgaaaaccccctagatctgga

SEQ ID NO: 247822 - DNA, 1192 bp, Cannabis indica
tgccctaggttgtcgacgctaacaaggtattcgtatacgcgattctattaggacgcagatacctaagcgcgagacccattggcctcgttttaacataatgcaccctaagcctgcgagcttatgcgagtatatgaacagacaatttacactatgaaaatcattttacgttgttgtatttagtaaaacagatttaaactgttcttcagttaattccattttatgtttttcttaatttaatgctaatattcaatgtaaaacggttcaataattaagttccgtgtattcaaaggaacacttcctttgtatataaaggagtgatccattacgaatagaggaggctataaatccttgcaacagtgaactaagcagaccaggatccgactaaaccactatacttccttgtgttcatagtttttcctatttgtctgtgtagcttcgtttgaatactcgccattctaggtctagtactcgctctttattattaaataattatatttttactttttattttggtgttgtcaaaattcctccaataatatttggtgccgtctgtgggaaccgtatttacttttgattttggagcaaaatcgaaatggctacaaattagacaaatggaaacaacaacacgagatccttcaacgttggaacgatgaatgtcccactcccaagtaatggaacaaacccgattgacataattaacgggggtgtgggatgaaccactctcactcccctcaatttatttatagaaaccactagtcatgccggagaaacatcgacactagtagccaccatagggcacttctcgcctattacaccagccgtggtgtctaaaggaatcattcaattaacaacgacccaatatacaaccatgtaggagcaaatgcgggtgttgcaggctgaagttgacgagagagcaaggacccaacgtccacctcgagtcttgaacatgcatttgggcaatcctcaagtagctactgcgaataggcaacaaaatgattgtcttaataataatcatattcgtagggagcatgaaaatgagtagaagggtctggacttgaaacaacccacacataattcaatgcaaaacagagagccagccattcataacactggtcgcactagggaggagggaccgcaagaggaagaccctgagcgacggaaccctcaaaaccgggctcaactgcgagttagg

SEQ ID NO: 247823 - DNA, 453 bp, Cannabis indica
caatactaacttttgccagcacaaaaatgtgctggcaaaagtgcatttcttgtagtatatatatacttcaaatttaatcttttccacaatgtgatttggaacctgtcgattctaaagagctgaattccttactttccatatgtgatgataacaaatagcttccaatagagctatatatatacacttctcttttaagcttatttcttgcagtacttctttttacccttctgatcattggaataagtacatactaaagtgccatcatcccaatccagtgcattatgttaacaccagaatttagcaagacaatattctgaagttacctcaagtgaaaccatcacttgactagtgtcacactacaagaataatagctttaatgacgacattatttgacggtccaaagtcctcactaaagtatcaatgactgacatttaaggatcgttgctaaaaaaa

SEQ ID NO: 247824 - DNA, 938 bp, Cannabis indica
agaagaagaagtccgtagagcgctttttcagatgcatccttcgaaaagtcctggccctgatggaatgactccgggattttaccagaaatgttggagtatagttaagaaagatgtggtgctagtagtgcaaaatttctttcaagatggacatttggctagtagtaccagcaaggcacatgtcgttctcattcccaagaaaagaatccagagctggttactgatctcaggcctatagcgttgtgtaatgtgctttacaagataatcactaaggtgatggcaaaccgaatgaagccttttatggataaagccgtatctgcaaatcagagtgctttcatcccgggtcgcttaatctctgataatatcctggtttcttttgaagtgctacattatttgaaaaggaagcgtcaaggcaaggagggttacatggcactcaagttggacatgagtaaggcttatgaccgtattgaatggggttttttggaggctgttttgctcaaactcggttttggtagaaaatgggtgaacctcactctttcctgtgtgacctcggctagttataccatcacccatggaggcaaggaaatgggacctatcattccaaccagaggtatcagacaaggatgtcctctttctccatacctgttcattttgtgtgcggaaggtctctctgccctaatcaagaaatatgaaggtcgaggctggctccacggttgcaaagtggctaatggggccccgagaatctctcatatgctttttgcggacgacagctacctctattgtaaagctacgctccaagaagctttgaaagtccgtgaattgttattcaaattcgaaaatgcttccggtcaacaggtcaatttaaccaagtcctccatcttctatagtacaaatacttcagacgccacccgaagccaactgaatcatacccttcagatgtc

SEQ ID NO: 247825 - DNA, 739 bp, Cannabis indica
gtccacacccgcccgcacaaactcgaattcatactcaaaaagtatgtatgggttgggtacaaaacaaaacccaaaaaatccgcccaaaagttggttatttttgcttaaaatttggaattttgctttttaagtttaaattttagtgtagtgagagagagtgaccaaatataaactctaaaaataatggtattgttacgtggcgccttgcaattaattacccattttattaaataaaattatatgacacctgatacttacccacatagaagcaggggcaatcgacccttaaaaaaaattgagaaaagatgtatctggaaaataataaattggtatgatggttaagctaataacaaataaagaaatgctaaccttaagagcacttttaacaatttttctattctatctctaaaatacataataaaatttctttatttcaccatattagttttatattacaccacatatctaatttctttaaaatatatctaccaaaatctcactttttcaaaattttattatattttgttcattttaaatatataattaataaaatatatgaataatattctataaatatagagtatgaacaataaataataaattttaaaataaaaatagagtttagagtatttgctataacttaattttggtataattctttaatttttttttaaatttatttattttagaaaaaaatatgatattgttataaaataatataaaataatataaagtagat

SEQ ID NO: 247826 - DNA, 641 bp, Cannabis indica
gcttctcagttagatgaaatttccatctaaaactgatgtgttcgttttgattttatatataactaggaaacaaaaatcgcgcgtttggaggttttaaaaaatcttaaattatatatatacattattaaaaaaaagtttacattaatgttaaattagtaaaacactaattaattattggtcaaaaaaaatttatttacaatttacaaataaaaaactataaaaatttttaaatgtgaaatttttacaaagttagatcacaagaaaaattgaagtttctaaaaaaataataaaaaagcattgaaatatatgatctatcttatcattcttagtcttaaatatataattttttttaattattaataattaattcatttaaaaatgtttttttgagtaaaagttgttgaggtgtattaatttttcttaaaaattaatagtcactatttttcaaaatgaaattaatagtcactaataatacacataatttttttctctatcaattaatataaatatatatatatatatatatatatatatcaagtaaaacatatttgaactcttaataataagttataattatattactatcaattattacttaattttttaacaatgaacatgcaactacttaattaattagtgtt

SEQ ID NO: 247827 - DNA, 1076 bp, Cannabis indica
tatattttataatatgtctttgtgttagtataaagataatacatatgtgcatatactatacatgttagattgtatgagttatatactaccaacactagtacggttgagatacaaagtgtatgtggtacagtaaactattaagaggtataacatattgttaccaacactagtacagttgaggtactgagtgtatgtgatataacagccaattgtacttgtaagtaaaaaactatccctactgacactagcacgttagaggtgttaagtgcatatggtaaagaggttggtagtacttcaggggtacaaactatttgtactctcttcaagaacgttcgagaatcattatacgcgttggacaagggtcaaactggtaactagctgtataggaacctgagttatgagacaaattatatcattatatgttttatatttttcttactgagtttgttgactcacagatatatttacatgtataggtaaggacaagacaaaggttgagcaacaatgagtctagagctaaataaagattgtacatatcgaggcggttagacctggagtgttaggatctttgagctcatattttgatagtggttgggcaacactattatgtgtaacattttcaatatagttgtaaaataaaaaaggagatcctagaacagtatacttttatgtatttattataaacttattttaatcatgaaaattttaattaatcacgtttttcaataaaatatttgattggcaaaagagtgtacattaattaagagaaaatattgtagcatacctaaacttaagggtattcattggaccacatctaatgtatttaggcattgagaaaccatgtctgtacataaccccgtctaggattagataccgggcagttttcctcctcattttttggcttcattcttgttttcgagcaagactctagtctgcaggtatgctgctatgggtgttatccaagttggactgtaatcgaacatgtatatttcttctagaattgtgatgcttagttcttttaagaactgtatgggcacaaagtttgccttgtctgttagggtgttgcttgctagacg

SEQ ID NO: 247828 - DNA, 1225 bp, Cannabis indica
aattattaaatagataaaattgaatttgtagagttagaattaaaatatggtatttgagaaaagaaagataaattttaaataaaatgaaaaaattaaaatccaataggcccactaagggattcggccataagggtttaaataaagcctattttatcctttattttattttatttaaaatctaaacctaaccttaaataatgattatcctataaatagaaagagatggctcttattttctaacctaattgactctttttagacaaaattagaaaataaagagagcctcttctattttttgaatcccttattcttcttcttctcaatcatttcgaagcctatagtgattgagaatgtgtcctcacatgtcaaagcaatacctagcatagtgaggaagattgtgtagaaaaattgttaactaaaggagatccaagttcagatcttgatcatactcttctacaaaaaggatcaagggttagagatctgaacggaatgagtcatattattctggtgtcatcaatgtaaagttttaataactttatatgagtttaattcattgttttagggaattcataattaggatgttagattatacttttataatcaacatgcatgttagtaaatctatatcttggtaaaataagttgcaacaactagtctcagagccatggtaattatttattttcatgaaatatgaatttaaaatgatgtttggatgatttggatgtgttcatgtagattacttgatgattgaatgtgaattatgattttgtttttgaaaaataatatatttttggtatgaaattattttatttggaaagttggtgaaagttaagaaaattagctttttacggaacgtaatttggattaaaattaaaaaagatataattttttgaagctttgaaaattttggttaaggttaaccctaagcatgagaagaaaaaaaggcaattttgccatttttttttaaattttctaattttaaatatttttaatgaataaatccaaattttagtagatttttgtggagaatctattttttaaatataaatttaattatctagattaaaataattttactattaattttattattaattaaaattaattttaagtatattagtaggtctttaaatttaaaaaattaatttttacttacaaattttgctattatgggttttttaaaaacttgtattatttatattagtttactgtaaatatcatttac

SEQ ID NO: 247829 - DNA, 739 bp, Cannabis indica
tatgcttataaagttagttttggtattagaaaaactaaaaggtataaagataagcatggtgtggtaataaatagaactttttgttgctcttgtgaagggtatcgtcaaattaataaccaggatgttattgtgagatgtcatcatgctgagacaatgtttggatgtttagcaagaatgaaagttgattgtagtcaaattggtaaatatcattttgttgagtctattcctaaacacactcatgtgatattaactcctacaaaaagtcatttacacatatcacaaagaaaactgatcactcctactctagttgcagaaatagacttagctgttagtttaggaattgctccaaaagaaaattaggaactaatcacaaagagagctggaggacatgaaagtcttagagttactcacgttgattataagaaatattacgaacaaaacgaccaattcaaatgaagttaggagatacatgtagtgttcttaagtactttcaggggaagcaattagaagaatcccaacttcttctatgctattcaggtcgataaagatgagttgataacaaatatcttttgggttgatgcaaaaataattttagcatattcttatttcggcgatattgtttcatttgatcctacctacaagaaaaataaagaaggttgaccttttgttatatttcttggggtgaatcatcataagcaaactactatttttggagctgcactactttatgatgaaactg

SEQ ID NO: 247830 - DNA, 680 bp, Cannabis indica
actgttggatgcttcattaactctacgttggcttttattcttagacaacttgatatatggatagcaccttcgctagccataaaagatatgtacctacccattaccactacagccttaaattaatcaaattagtgctttgacttttataaaagaacaaccacttatatacacttcaaaaaaaggaaatatttataagcatatattcatattgtgggcaaacggtttctaatgttagataaataaataaacccaaatacaagattgtatatatatataatttaaatcacaaaataatagtagataataattagggatatgttgaggaaaacttttttttttttatttattgataaaaatactctcatattaaatttcattaaaatgtatctacttttatgagtggattgcctaatatactctcaccttccacttaaatctatcacataatttacattaacttaaggggtataatgggaacattgtctataaaagtgtggtatattttaaagaatatgaaaataaaggtaaaaactaaaataagtaaagtaaagtaggtatacaatgtaattttctctaattaattaagtatatttgattgattcaaagtttttctctctagatctctcagttttatttattttattatcaaaagtatataattgtgatgagacaatatgtat

SEQ ID NO: 247831 - DNA, 835 bp, Cannabis indica
actcttgactatggactcaagctaaataaggtctcaaatttgcaacttgaagcatactgtgatgcagattgggcatttgaccctgatgatcgaagatcaactactggtttttgtgttttccttggtgaaaacttaatctcctggcagtccaagaagcaacctacaatctccagatcttccactgaggctgagtttagaagtttagcagctgttgtttctgaactcacttgggttcaatctctgttaacagagcttcatgttcctcctacaccttcaccattggtttagtgtgacaacatcagttcggttatgctagcagccaacccgatacttcatgctcgaacaaaacatatagagattgatctatattttgttcgagacaaggttctcaacaaacaacttcaagttcagcatgttccatctgaacatcagctagccgactgccttaccaagcccatctcaagcaataagttctctgtttttcgcaacaaactctatgtctcttgttcagaggacacttcgtttgaggggggctgtcaagagaagttcaattgattagttttttgttattagttacaacagtatttgttggttgtctgttattggttgtaactgttttagctattgtaacagcttcttatttgcctttctcattctgtatataaacacttgtaattcttctcttgagcaatgtacagaaacaattttttctttcctttattgtttcttcacagacacaataagatttattcatgaatcatgacagtatagttttgtgaacaaattgctttcttttcccttaacatctccaaaattgtatatttcaatttatttt

SEQ ID NO: 247832 - DNA, 628 bp, Cannabis indica
ttaattttgttatatgataaattttatgtgaaagttataaatttaattaaacagttctagttgtttttgacagatattttatctcttatttttaaattaatttatataagataggaatttgtttataaatgatatatcatttgatttatatgtatagatgcataaatatccatgtttctctattactcacactctttattttaatatcacgtatgggttctcttttaatttattgaggtttaatagctatggatttttcttgctcaaacaaaactttaacaataaaactaacaatggccgtacttctgtcaatgtttgatttttaagattttttgatgacttttcatattacacaaattgaggagggggatcatatttctcattgttggttttgttgttctgcttgataataatgtatagaattaaaatgtaaattaaattcaaacatttatggtggatttctctaggaaccttacaaatggcatcattgtgtggaattaaggttgttgtgaaaaggcttgtggatagagtcattatagattatgagaaagtgtgcattgttcatttcttgatttttttattgtttttcaattttgaatgttatgggtcttgaaacaaaccccgtttt

SEQ ID NO: 247833 - DNA, 1101 bp, Cannabis indica
ttaattagccaaaaactgaagagatgcctagtcagacacacatcgaatcacgaacagatgtattcgacacgtgtcacccattcaaatgtaaagacagcttggattaagtctccacgcaacttcggaagccccgtatagacttaaggggcaaatgttatcccaaattttgcactctgacgtggcatcacatgctggtggcacgtggacgtaattccccatatctgcctgaaggagatgttctgagccgagcaccgtgtatacctgtatggacgaggtcctcccagccgagcagtggacaatccgaacaacatatcaacgcttagcaattttagcatttgcatcgtgaagcacaagagcaatccttataaatctgggatcgtatcacagagatacgacaagctgtccaaatcccgcaatctgtgtactctatatatgtaatgtgtaatcttaccaattatagacattgtaagaaaaagggaaaccttccctcaagcacatagccctacaaataatgatccattcgcactggaaaaggggccgagagacttatctaagagagcatactcagagatgtcattgtaagagctttaagagaagaatcactttattctttgttcttaagtcaatacaaattaaggggagtaggctattaccgaactactcgcggctgaacctctttaaaaactctgtgttctttatttatttatttatcttttcatattatatctaaattatatcacttatcgcttacaattaggactcactgtcgttggctaaaagcgaggtcaacatcatttgtaggaagctaagtgttttaaggataaaatacattgaggggtgaaacggtaaatttgtccccactcggtgtaaatcatctatagaggatctttgattattgggattataacgatggttaaatttataacatatctatatcgtggaacatatagagcgttctatataactaagagtgcaattctaagttctatagtggtgcaatgagaaattaataagttagggaaattacttggtaaattctacctctgcttattggaagcttggttatataggcccatggttcccatactagttgagacaata

SEQ ID NO: 247834 - DNA, 681 bp, Cannabis indica
ggtgtgaaagccatcttttaagtaagctggagctttgtcattaagatttatgaagaggatgcactaccatagaaaagggctaccttcaatatgtgtgatagcatccagctgtgagatcaaattgaaaaagaagaaaaatgaaaaacatgtcaaggacaatgatcctatttccactacacacagtaatgtctgacaagtgtgtaccagtttgtaagtctcctctactaaaattaaacaaaagatccagtcacattttatgtatcttgtctattttctctcaacatttggtaagtatggttagtatttgagatactaaattcttattatcttaaaaacataacatttgtatttgtcccttttatgattcaagacaagatgcatgctctagaataacttgatttttttcttttgtataaatctttctagtttttttgtttattcgaaaattaataaaaaaatattatgtgacttgacttatgggctaaggaaatattgtcctttgtatttcttgttgtaagtatcaacatatgccctaattggttaattttgatgaatttccttttaaaatttgatttcttattaattgtattttgtttaatttttggtcttgattgatttttcagatttaattgattttttttattggaaaaatcttagtttatttttgttttcttttttatt

SEQ ID NO: 247835 - DNA, 838 bp, Cannabis indica
gagaagaagtggtctttaatgtattaaaggcaatgacatacccaaaggcaagtgataactgtctcttcgttgatttgattgatacaattgtgagtgagaaaaagctgatagatgatcctctcgaactgagtctaattgaagatgatttgacggagcaagagggacaagatgtaatgggttatgtgaaatggcttgattcctatgggccattgaacagaaggtattatgaggagctgggagtagtgccaaaagagcttgtgccatttactgagaaacctccagaacttgagttgaaggttcttcctagtcatctgtggtatgagttttttggagaagataaaaagctgccagttatagtgtcaacttcactttctgatgtggaaactgatagattgctgagagtacttcgggcgcacaacaaggccattgcttggacactggctgatgtcaagggaattagtccctcaactgtgatgcatcgaattctgatggaggaaaatgctaaaccaacaattaattctcaacgtagactcaatccacctttgaaggaagttgtcagaaaggacgtggtaaagtggttggatgctggagtggcttaccccatctcagatagtaaatgggttagtctggtacaagtagttccaaagaaaggggggatgacaataatcatgaatgaaaagaatgagttgattcccacaagaacagtcactggttggaggatttgtattgattatagaaaactcaacaaagcaacctgaaaagatcactttcccttgcccttcattgatcagatgctagacagactggcggggcaagaatattactgttttcttgatgg

SEQ ID NO: 247836 - DNA, 880 bp, Cannabis indica
taccaaacgacacctaaataattaaaaaattgtgtgagcaaacaaattaatagggacaatgttgctgccaaaaaaataggataatttcataaatacttaaaaataataaaaaaaaattacaaaatacagttgtatgaaattttaaatatgtttaaggttttaaaataatatttacaaaaaatacgagctttttatattttcatgttatttttatgttgtactcctattattgtgttgttgttttgtttttgtttttatgtaattttttagttagttttatgtgattttcttgttgttttcgaatgacttgtaaaaatattaaaaaaaattggcactgaaaatgtaaatttttttttaccaaaaacagtattagtaattggaataattacataaggcacaattttttgtaaaatatttacatttttacgttcaaagaatatttttttacattagtacggttttccaaaaaataacacgaaaataacataaaattaacaagaaaacaacataaaagtaacatgaaaataacatcaaaataacaacaaacaaataacaaaaaataacatacatataacaaaaaattaacaacaaatgaataaaattttaacataaaaagatcgtattttatgtaaataaaatcaaaaaaaatcgtaaaaatatttaaaatttcgtgaaactgtatttttgttgtttttgtgcatttgtgaaattaacccttagtaatttgtgtaattttttttttaaaaataaaccaattatataaaagcacatttagcccatgttaaaaattcaattggcctaactatggtatttttcataaactaattaaatagtgtatgtatcattatcacgtttcatcacacattatatatatatatat

SEQ ID NO: 247837 - DNA, 2821 bp, Cannabis indica
atattttttattgatggaataaaaaaaaaaatatttctcaatttatcccacgtaaatgttttacatatacaatagtataagcaatttaagttagcagtttgctaataagtctgtaatttaaagaattttactaccaaaatttagatgatttaagtaaaaaaaaactctaataataaataagccttgaaacgactagataacaaatttaagcggcaagaagggcgttatctcatccgttaggcttagaagctcatcgttgttcgccaattcaaccactcccactgctctctcttccttcattcttcttcgtcttcgttttaatatcatgcacacacatacacctccccatatacaatggctcccaccacctctcattcgttttgcttcacctcttctacctcccaaaatttccataaccagctttagaacaaactctttagctattagattacgcagtaaaagctttaagcttagagttagcaaaggcgtgattagtagctcagtctcggagcaggagcaggagcaggaccagaacctgaagcagcaattgaatttggggataaggagggcctacccttttcatgaaatagagcccaagtggcagcggttttgggaggacaattccacttttcaaatcccagatgaagttgatacgtccaagcccaaatattacgttcttgacatgttcccttatcccaggtctgtccatttctctcatcatgcttattttcttcgcaagcgagataaataaagaagaattttttaaatggtatggaagacaccagttattagaaaccaacggataaaaatgcacaaagcttgggttttaaattatgcttatatagtgaagcacttggtaaattgtgaatagtgcatgggggtatatgggctattctttgtgtgtttttgttaatcatttgggtcaatggttgcagtggagctggtttacatgttggtcatccactaggatacactgccacagacattcttgcaagattcaaacgcatgcaggggtacaatgtgttgcatcctatgggatgggacgcttttgggttgcctgcggagcaatatgcgattgaggtttatattctagtcccaaatccaatgatatatgttttccatgatttttagttattaaagtgcacatgtgcattatcagctggttgccatttgtgttttgtagacaggaactcacccaaagatcacaacccagaagaacattaatcgtttccgtacccaggtaatagatacataatattttaccaggccatcttatgcttcatgttttgaatcattttgttgaattcactccagttctcataatatttagtagtctttgaaaacatttgactttcaatgttaagtgatatttcgttttagtggctgaaaatcccagaaaatgataattgattacaattttttttatctcttaacgtatgagctcaacatcatggttaagtttcataataagttaaccaaaataagtaccgcggaccagttagattcaaaataaactctgttgctttgtacgagtatatgtatattatagtgttgatttacacaggttatgactatcctaattttattggagcatcaaaattggcaccatttgatactgaagtttcttcaaatttagcttttgtattgattggatagaaactgaatgtatttgaattcagctcttggtaggagtggtaagctaggatggacttgtatcacttttattatttgagcgattgcaatagtcactgagaaagattttatattgcatgttgatgttagttctgttcttctttatttgacattttctttgtagcttaaatcattaggtttctcatatgactggaatcgtgaaatttctacaactgaaccggattattataaatggacccaatggatctttcttcagctgttaaagagaggattggcatatcaggtttaagtaatttctggcctgcagatgcatccagccacatgccaatttgttatacacaaaaataaatgtagtctacttatgtttttaggctgaagtgccagtgaattggtgccctgctcttggcactgtgttagcaaacgaggaggtggtggatggtgtgagtgagcgcgggggtcatcctgttataagaaaggtatatatcgtcttctgcatgccatttatatatgcaatcaaagtcataagatttctatagcttaattcccaatttcggatggtttataattttacagtgtcattgtttattaccaagcagccaatgcggcaatggatgctcaggataactgaatatgctgaccgtcttcttgaagatttagatgaccttgactggcctgaaagtgtaaaggacatgcagagaaattggatagggaagtcagaaggggctgagatggaattttctgttcttgacagtgatgggcaggaaaaagacataaagatcaaaatctacactacaaggcctgacacaatatttggagcaacgtaatgaatcactcccttcctacgctgtctaaattgataaacttcatacttgcacacacaatcttttggaaggcatgccatgaactagaactgctctaattagtttttgcttgcagctacttagtcgtggcaccagaacatcctttgttgcaatcatttatgacagcagaccagagcaaaaatgtaggttcatgtatttgcttgacattgaattctcaagtatttctttctgtcagtaactagagggccttgctgtaaacaggtcgaggagtacatagatattgcctcaagaaagagtgaccttgagagaactgaacttcagaaggaaaagacaggggtatttagtgg

SEQ ID NO: 247838 - DNA, 833 bp, Cannabis indica
tttccagaatacaatgcagttacacttgtcactactacaaaaaccctcttttaaatccatcaaaattggactagataaagtttttgagtctattttatgttggacatgaaagcctaggacataaaaagggtatttttctagtctaacattattggattagaaaaatatgtttagtctaatattgttggacttaaaaagcggtcccacaacataaaacttaattgttggacgagaaaaatatttctagtccaacaatactagacttgaaaagcggtcccaacgagaatctttttctagtctagctgtaaaatttatttagttatatattaaattataaataatcataaaatattaaatatttttgaattatatattaagaaatattaattagaaattaaaattatttagagcataataatttgttaattatatgtgaaaataaaagataaaatacacttatccattaaaaaagattacattacagtagcaaaataagtttataaacactaagaacaacaaaaattcacaatattttttttttctaaagatctaaaagtattacaaaggatatccaagattacattttgagaagagtatttacataaaaagattacttttgatagaaaaaaaaaaagaagaaataatgctggtgaggaagggagaaatctccaatagtgactaagaacaaaaacaaaatggacttaaaagagagaagaaatagatcgtcgagaggggctgtaaatcggagagaagggaattacgatttagacctggcggccatttgagcgcagagagaaaatgagcccaaagaaagccaactctcactgtcgggt

SEQ ID NO: 247839 - DNA, 658 bp, Cannabis indica
attccagagagactcaaggttctatggtggtgtattctgtccaaggctcttcctgttagctcggtgttaggaaaaagatttcctatagaggacgaaagctaccccctgtgtggaatggaagtagaaactttggagcatctattcctatcttgtaatgttgcttctcacttatggcggtcatctccctggggaattttctccatctgtgacactggtataagaaatgtgggactgggttaaattcttatgtgacctcaaaaagaaaggcatcaatgaacatgaggtctttctttttgcatcgctcactattgacacgatctggcggactcggaatgataaggtacacaataattacccagttgatatttttaaatgcgttgacactattcgggtttcttttacagatcatcatgctttcttgctcccttgccccatctcgcgtccgacggtatcttggagtccccccctgcaagattggttgaagctcaactgcaacatcagagtggggttggatagcatatgcgctgctgtggttgcaagggatcacgttggcaaggtgatctgggtttctacttcgaagctggaattttctaatactctcgtttggccctagaggaggctaaagcttgtggtgttgagtctcttattttggagagtg

SEQ ID NO: 247840 - DNA, 1397 bp, Cannabis indica
ttatgacttgttcattaggattgtttgattggctttctttcttctcttcttgaagaaattgtaaaatggaattgtttttcgggtacttctctgcttcgctatcgccgccattgtcgccgtcgctactaccaccgacgataatggttacccgaattcgcctctgagatcaagaatattggaattatataggtttgtgtgaaatgagattggtttgatctgatgaaaaagaataagaaatggttgatgaaagaaaatgatgacaatgaaatggagatatcaagagatgaaggcagtcaatatagtctcaccggaattcttcctcctctcggcgccactgctcgcaacattcgacgaccaaagctttctcctttcattgtttcaccatttaattatcattacaggtttgatcatctctatgtttttctctgtttcattcttctttttattttattatgtaaattgagtaaaattttcacaccatttcaccctatagatacaccaaattttacatattaatggtgttaaattttgaatttttaccaacttggtgcataaccactttttgtttgttttttttactcaacttttttcttttaatttgttttaaaaaaatatatattattgaaaggttctaccctacatcaatcatctaaaagaaaaatttaataattttttttttattttgtaagttgtagttatttaaaatattttacaatatacacaaccataaaaacaaaagaagaattaaaaattctcttagatgttgaaatagttaggggagaataaaatttcagaattttttcatttacatttttatttatttattttttttttgcagaaattggcaattatttttggtacttttagtgttctacacagcatgggtaaccccatttgaatttgggtttttagacaaaccaaaagggactctggctatacttgacaacgtggtcaatggtttttttggtattgatattgttgttacattctttgttgcttatttggacaagagtacttatctcctaattgataatcctaagttaattgccaagaggtacatcaagacatggttgattcttgatgttgtttcaactattccttctgagttgggtaaaaaattattaccttctccttttaagacttatggatacttcactatgctccgattatggcgtcttcgtagagtcagctccatgtttgccaggtaaaaacaattcttcgatttgatgaataatagactgcctaacactatgcgagttgtcatatcggattctacatattttaatctagtcaagaaatgttattatgaatgtttcattttgagactctagttaacaagaaagtgacttattatattataattttcatactctcatatctactttttcttgtttcta

SEQ ID NO: 247841 - DNA, 876 bp, Cannabis indica
gtagctcaagaacttcaatttcaagggagaaaggtgatccgcgtgcctggtcgagtttgagatcagtgagttttgggccggtcaggcgtagtaccacattttgaagttgatttatttgtgcttgcacaagtggatgaacttgttcggcttgttgatcggcctgtgtcacattaggatctctttgaattggatcttaggtacggatacctagttggacattcgattttctttctaaaggatggtctagcaggatctgaaatcatcataagagataagctcaactgatggttcagtaagcttttacgcattttagtagttctagttttttatgcaagattagaaaaatatgataggaagcatgtttgtagattgatagctaaataggagtatactaagttcccatgtaagtggtaagtagattacaattttgatcgctatatggccaagctgactcattaatttaggtttgtcctatagaatggatacctaacgaaacataaggatttgggatgatgaggtcaagactggtggttgtttgagagattgggattcccctcatccctgtgtctgggacagaagtcgttgaaggacgcatgaacttggtcatgaaaatccactgtaggctctgccagctttagagaaaaagtttgttgaattggaagttagaattcaatggttagaggaggagattaagtggttgaggaaacatcaatctcctgttgtaacttcacctcaagtatcagacactttagcttctgagttgccaatagaatagattattgctagtaagcaaacaaaaccattgtatgggagattttggatgcaaggacctttggtttgttgggatttgataccctaataaaacccaattcattg

SEQ ID NO: 247842 - DNA, 811 bp, Cannabis indica
acattacacaatgatatcggtctgagatcactcatagtaataaagtttttctttttagggatcaaaacaagattggtatcattgagtccatcaggcaaagcttcggttgcaaaaaactctttcactaaattagtaacatccgaaccaacaatatcccaatggtgttgaaagaaaccaggtcccataccatcaggcccaagggctttatcaggatgcatagagaacacaaccacttttacttcttcatcaaggatcgattgcaagagggcttcattgtgagatattgtgacataatttctaacattgtcaataattagaggagaaaatgaatccgtggactgatagagttcctcaaaatactgatttatcacagttgcaatacctgtattccaacattgccaagtgccattaacatcttccaattgctggatttggttcgatcttcttcgagcactagccgtagcatggaagtatttattatttttgtcccccgaatgtaaccgatactgtttagagcgttgtttccaatagagttcttgctgcgctagaatcttgaaataattgttcttttccaccatgaaattttcagcatcaaagtcattagcgaaatttttgaactgagcaagaagcttcttgcttttcttcagccgagacttaaaaattcccagtcaggtttcgaccccaatcagctagttgcttaccacagataacaatttttcccatatatcttcagtcgggttggagtaccagacattagacacaatctgatggcataaaggctctctttgccatgcattttcataacgaaaag

SEQ ID NO: 247843 - DNA, 1183 bp, Cannabis indica
ccctaataaaacccaattcattgtaagattctttgctttcaataaagatcaaaaatcataccttgaccttgttatatgctttgttcacatattttatacatgaatatatgtttaatatataagttctattaaattccgaatatatagttattcacaattaaattgatgccatcatagtgtaaagtaattgtgaatatatgcttcaattatttagtcccacgatttattagtgcactggatttacactgacatgatgataaccgataaggtttacttacatttagctgagtagaatgtcttttccaaggaattagtaaagtaaaccaggatatatgtatgggctatacatcagactggaccaatattgacagtggaaatgatatcataaacttaccgttatattttctctaagtcaatatcacttagttgatcatagatcatttgatctcaatcctgagatggtcaagctctaacttaaatgcattacacgaattctttaacttgttcgttacaagcttatcgtggaaccaactcaatacttacatctcgggaactcggtagtgcaattgagtgggaatgttaatcatagatttggacatatataacttctatgtctattagaagtgaaatgatagtttccttagagcttggcttaatgcgataaatgatagatcgttcactttggtaataatattagtttcatttacagtagcttaagtattactaggaaaaaaaacattaaaaggtatatcacaataatttttgtccttattcaatgtagatcgactgtagaggatcaatgattgttgtgtttaaaataatcaataattttgtagcgtatctatatttggtatatagagcattctatgtaatcaatagtgcaattttgaatctatagtggagtcaggaggaattaataagctaggaaatttactcgataaatttcatgatctacttattaggatcttggttacgtaggcccatggtccccacattgtctggaagaatatcatcttgtagactcaaataatctattttataagtcaattaattcaaaaaatagattgtctaagttgagaattttcaccagtttgggcaattttgagaagaaaagagaaatagggatttatttgttaattagtacgcttcgtgggtctaactaatatatttatttgatacttat

SEQ ID NO: 247844 - DNA, 559 bp, Cannabis indica
ttagatttaaggtcgaaaatggttggatatgagttttgagtagaaaactaatttttttgccaggcccgatagtaatgcctttctgttgttaaaatgagtaaaagttgaagacgaaggtccgatgatggtttaatgatacctataaatgtaggatatgatctgatggtggtctgatgctttcgtgacaagcttaataaatggagcttaatatttataaaatgtagaatatagtctgataatagttcgataatggcctaatactactatttttttatgtacagaaacataaaaaaataataggtatcatcaggccattatcggaccaccatcagtatgaatgagaatggggagtgtggatggtgaaattagaagagcaaataagagaaacgaatattatgaatattaatataaagtatacatatttcttttaattttaataagctagtgtttcaattttttttttcaaatataatgtatgcatataaattaaaattttttaacaaaaactaattatgactatatttcattctccttttttagagatcagtctttggttttt

SEQ ID NO: 247845 - DNA, 594 bp, Cannabis indica
attttaattagtaatcccgattaggggattagggtttcataagtatttttgagtagcgtgcctaattatttaggtcgttacattagcagtcgccgcaacaccctccaagatagtattatagttaccgaacatctcaaacgacagcttcgtcatcagagaattgatcgaaaagcttggtaatatcggaaactctagcaagatctcaccgcattccaaggaatccctacattgccagaaatagaagttctaacacgtagtgttacaatatacctcaatgaaagataagccaaatttttatgctttgggagtagaagctttaatggccaaacgacccaattgggtttgaacaaaatgaaaaataaaacatgcatataactatacatatacataaaaaaaaaatataaatataatgcttactagatgattggcaaagagagtcaatcaccgatggttacgattcaggaatatacaaagatttttaaagctttatgcaattcaagccttgttcttgaattggaggcttgttataatattgttgaagaaagagaaggtgagagcagggtttttttgtatttggtttaaaagagtttaggg

SEQ ID NO: 247846 - DNA, 870 bp, Cannabis indica
taaaatcattttctcttaactctactttttccaaataaattttttattcctatagccaaactctttattgggctaaataatcttttcattagtaatgtaaatctattttccaattaaaattccattcccttaatgaaatcctctattctcttaaagtattcattttattcctaacttttatctttttcaaataaattttcattcttgtagccaataactttatttttttcaaaataatatttttattcctttaaaacattttctaccaactctattttttttaactaaaactgtcatcctttatccaaattctttattttctcaaaataatatttttattccttttgtaaaatcatttgtcctaactctaatacaagtagtagctagttttcttcatttataatcacatagtttctctatcctccttttgagagggataactatgcactgtaggggctttcattgtccgaatagacacggaaggttctctaagaatttgctggccctactggctagtggaagaaatctatccttaacgcacccactggttttggatataaaaattgttctggtgttgatagttgttcagcacaacataaggtgttcatgctcaccttaacaaagcatggaggattgatcagaatatgtgaaagtatgcactgtaggggctttcattgtccgaatggacacgaaagtatggaggattgatcagaatatgcaaaaatatgcactgtaggggctttcattgtccgaatggacatggaaggttctctaagaattcactggccctactagctagtggaagaaacctatccttaacacccacttgttttggatataaaaatcgtttaggtgttgatagttgttgag

SEQ ID NO: 247847 - DNA, 986 bp, Cannabis indica
tattcatgtgcttcaggagataagttgtccgtatttttgaaaaaaaaaacttttagatttcctatttttgtttaattttccttaccaagctaaaaatgtaaaatttgggcctaaaatgcctattatagaaaaaacctctagtatatatgagtgtattagaaggggtcggcggaagaatttggtttagttgtaactgttttgggagagaactagcctctcaaaatcctgggcattaatgaaaggcattctgccatttttatccaaagactactgtctctgtgtcttctgcaattgattaattttgataggacaattcttatcagatgcactacaccatatactctaaggtgttcattctagatatacgttatattttgcttacaatacataattcaatctccagaattgagtgtttatagtcagaaagggttcttctgggctgtttggaatgagttaatgttagcaagggaatgataatgtgaattgagaaatattatattgtttgtttttgagggttttaaggcatattattctattagtaatataactaccattgaggaggataatattgataccttaaaaaaagtctaagattgaattattaccttccattatattaatttgaataacatttttgaattaataaataaatttaaatactaataatattatcctttattataaataaaatattacgatatagatttagtctgtgagatcaattttttttaaactgaattatttttatattattagcaataatatatatatatattcattatacataaattttataaaaaatagtgtacataaatgacatagcgaacaaaactaaataacatagagataaaatatatagaaatgttcattttaattaataaaaaatacaataaaatttaatatatactaattaataaatatatttttttaattgaataattatttattttattatatagttaatattaaatagatataataaaaat

SEQ ID NO: 247848 - DNA, 624 bp, Cannabis indica
aactagggttttagtttttaggaccaattgtagtgcaaatgggtcaaactctgctttaggacataaactagacataccacatacatatttgaggcgtcaaaattagatatggagaacattcaatttttaacaccggatacctgatgcccgagcatcctagcacctaggttgacaatctgtcaacctgggccacttccaagtgtcagatcgaatatttggcttctgcatcttcttccttttaataaaaaatggagatatatgtacttttaggagagaaacaacacatcttgagtgccaaaataaggacccaacgcccaggttgacattttgtcaacctaggccatttttgaggatttttttttttgagaagtcttctaggaatattctctgttttcagcaaagattgagattcaactattttttgggacgaaacgtgtttacaccaaaagtagccctgatgacgtggacatcaatatttgacacgtgacaaagaaagataacatcttagagttgaatagtcccaagtcatagcaggtcgacctaggaggggtccctagccctatgcccaggttgacttcgtgaactttgggatgatagtttggacttcaataactttaatccaac

SEQ ID NO: 247849 - DNA, 1030 bp, Cannabis indica
ttttgagtgagactataaccaagaaatgtgcgaaggggtagatctatatgcctattttatttctattgtatggtctcaggtttggaaaacattgacagccgaaagtcttaagaactgagtaatcaggttttgtatgaaacaaggtttcatgtggggtaaagttgttgagaactttggttggcattctattgatgagatagacagatgttctacaggcctcatcccaatatttgagaggcatagatgcatgagctaacaaagttaaacccgattcaactatatgcctatgtttgcgttctaccacaccattttgttcatgggaatgaggacatgaaactctatggataatgccacaagactcaacaagtgtagtgaaggctctaaattcccctccccaatccgattgtaaggattttattggtaaattaagttgcagctcaatttgagttttaaacttgataaaggttggtaaagcctcatctttagttctaagcaaatagatccaggtgtacctagaataagcatccacaacaaagcttatgtaatatctatatccattggaagagaccatgggagcagggccccataggtctgtgtgtaacatttgtaatggtgctgtataaacagtttgggagttgggatatggtaatttgtgatgtttaccaagacagcaggcagtgcaaaaatcaaatgcatttttattaatggaagagatgttacaattggtcataacagattgaacaacattcttagaaggatgccctaacctattatgccaaagattgaaaagagaaaaaggtacattggaattagattgctgacattgtaatgcagcttttgaagatgaggcaccagaataaatgttggaattggaactgggagaagaggaagattggagaggctggtcaaacttgtaaagtcctttgtcaaccttcccaaccaataaaatcttcatagtagcctgatctttcacaacacaaaaggaagggtgaaactcaaaaaacacagcattatcttttgcaaattgaga

SEQ ID NO: 247850 - DNA, 572 bp, Cannabis indica
aaaactaattaaaaaaaggtgtttccaaacgccacctaaactattaaaaattaagtgatggttaaaaattgaaaagtgtttctaaaagtgttgtcagaacttaattaactcccacaaaaactttacccaatcccacatcctcccaccagaatcaatcaccggcattaagccccacagagaagatctccaaaggtgggcaacaaagttacaatagagaaatagatgttcagttgtttccactcctacctcacaaagagggcagcacgtgtcactaatctgtattttttttggccaaaattgcatggccgggagagcattaaaaaggatacaccaccacatatacttgtggcgctcaaggcctttggggttccacagcttattctagagaaaaggtgctacaacacgatcaggagcatgggaaaatgcttagaccgaataagcagacttagtagagaactctcccgaatggtctttggtccaaatccaactatttttttcacaaccagaagggatacccccttcaaaatatcacgaaccgtgtcctcatctaataaggatttcagcttatgaag

SEQ ID NO: 247851 - DNA, 403 bp, Cannabis indica
cctgaaggtgtccattatcttacggatgctatctatggataaagtgcttcgaatatttgagtacacgaaggctacttctctgggtaatgaagggatgtgccgcttgggtaggtaataggatgcacgcttgtagggtacagtggaagccattgactacttgggatgagacatacctgcagacatatagaaacaataataagcacgaaccacttgctttctattgcctacaaaccttttgaaagctcaagtcttgatcgtaggcacccccaagagtgggggcgacggaagaaactaactgttcctcaggcataggaggctcaacacccacagagtatgaaagaatgttaggcatgggaggaagagagacctcaaagaaatctaagttgagttgggattcaacaag

SEQ ID NO: 247852 - DNA, 867 bp, Cannabis indica
ttgccgcaaattactcaaaactttaacaacttctctattttattatttaaaagaaattattaaattttattctctccattttaaatacatttttacattacaccatacattaatttctttaaaatacatttttaaaatcttacttgttaaaaaatttattatattttattcatttcaaatatataatattaatattgtaacaccctactaaattaggcatgttatcgtgattttatattaaccgtgcaatctgttgctaactaacgaatttattaaaaacgtaattaattaaaactttactgaattactcttaaatttcaaaataaataacatatatataactgggatcccgtatttaaaatatttacaactaagttataaaatatttattacaaaagttgtcgcctagtgactatacaaaatacaacctgctgtcctaaagatcgtacaccccaggtctaactgccctgacatatacaatctttatccactcgcactcactgttgttcaaccttagctttgccctaacctacacatgtaaacaataattgtgagtcgacagactcagtaaaaaaagcataatcataatcataaatatatcccgaatttcaattaggcgcccatacacacccaaccataaccctatcctcgcgtcctacacaatactgagtctagaatgttcgtacgacaatactactggccataatatcagtctatactcggtactcttgtcataccgatatgatcatttatcaatatcaaatacaactatatgtatatcaatactgctatttcaatgtaatctagctggcttcataaacatgcacgttaaacatgtaatcacatatatcattatactaattttac

SEQ ID NO: 247853 - DNA, 1271 bp, Cannabis indica
ccagatggaccaaataaaacagaacatcaaagccagatcatatttagtataaacatccaaagcagcagccacaaacaaacaaaaagacctgtctttattattattgtaaaaagtaaaaaacttggagtgtttccaagcttttttagcatgatgacacccaaggatagcatgttcaacagtctccgattgcatctggcaaactgggcaaactggagtagaaataatatgtctgaaaaaaaagagaggaagcaacaggaagagaatgggagataacacgccaaataagatgtttaacttttggaggcgctactaaattccagattttggaccagaaagatttacttgaaacaaaggaggaagaggtaggcatatcacgagactgaatagctaggtggtaagctgatttgactgtgaaaatcccagttgcttctggcccccaaatcatagtgtcattgcaattatagcccgaaataggaacctgcaatatatcctccactaaagcattatcaaaaaaaattgtttaatttacctctatcccaactcccagaaggggaaataaagaaagaaaggaatggtgagggagggctagaagtggaataggttttaaaccggctgccaggaagccaatgatcttcaagagtacgaatattcaaaccattacccaccttccaaataaggccctgtttaaacaaagcacatccccacataatgcttctccaagaaaaagaaggcctatgaccaggaactgcctcaagaatggaagaattaggaaaatatcttgttttaaggactttacttaacaaagagtgagggtattgaaagattctccatgcttgtttagcaagcatggcctgattgaaatgagttaaagaccgaaaacccaaacccccaacaaatttagacggacacacacttgaccaattcttccaatgaactttaggtgactcgaccgaggaaccccaccaaaatttagaaatcagagactcaatttctttgcagattttagtaggaattcgataacaagccatggcataagaaggaatagcttgaaggacagccttaatcaaggtttcttttcccgcccgagagaaccatttgtgattccaggaatggataatattggcaaccttatccttaagaaaagtgaaagcaggatatttaacacgggacagacactgaggaagacctaagtatttagtgataaactccctatcctcaagttgaaaagtttggaaaaaaagatttcggatctcttgactcgtattagggga

SEQ ID NO: 247854 - DNA, 689 bp, Cannabis indica
taagaacataaatataaaaagtacaaaaaaattacaaatttaactaaatgaacaaggtcgcacgtggtatgaaaatatatagtgcgaccatgtgcgaccctatgcgactagtgagaccgtgtgcgaccttagtggtcgtttatggttgttcagagcaaattcaagttacatagtgtaaattcaaggtcgttcatagtcgttcagagcaaattaaagttctttaaaattggttgaagaacataaaagaccattatggtcgcatagtgtaaattcaagatcatttatggtcgttcagatcaaattcaagttctttaaaattggttaaaaatcataaaagaccataatggttgcataatataaattcaaggtcgtttatggttgtttagagcaaattcaagttctttaaaattggttgaagaccataaaagacttttatggtcgcataatctaaattcaaggttgtttatggtcgttcagatcaatttcaaggtctttaaaattggttgaagaccctaaaatattcaaggtcgtttatggttgttcagatttgaaaaaccgtgtttttgcaaatgtcagttatatataagaaaatataaaactgtatgcgtctgcagaagcagaaagtaattctgctacagcagaaactcgttttgtagtgacaaaataaaacaggcagaatataaaatatt

SEQ ID NO: 247855 - DNA, 1594 bp, Cannabis indica
atggaaaaccttctcttcggaatccaattgcacttgggagatttggtcaaagtaaagcaacgactaggtgagccactctgggcatgcatcactatattcatgacggaagcaactaaagttttgcgggtagttgaggatggaaagttatccccgatactgggtggcattgaagtcctcggtgaactttgaatagatataaagaagaacgggctggtagactcaatgagtgatttccttgactgagcggaaagcttcatcaagcttgaagaagccattcaacaagcagatggtgaacaaaagtcgggaaaaacgaaggctccttccactgggacatccgcccaacttcccaactattctaataattcaagctcaagtggcaagcgttcaagcaacaaccacaagcaaggaaatgggaagaaaggaaagttcactgataaatccggacagactccccgagagaatcatgccaaatacattgcattcactattctgactgaagatatagaaagtgtatatatggcaactcagtcgttaatcccgtacaagaagcccgactaccaacaaaagggacatgacgaagttttgtcggttccacggagactacggccacgacactaacgaatgttacaatctgaaagcgggaaattaaatttcgaataaagaaaaacaatccgcacttgccgaagtatgtcaagattaaccaaggtcagaacaaccaagatttgctacctccaccagtagatgcacacttacaattcataattggaggcccgtacattgctagagattcaggtaatgcttggagaggtatgcccaaacagcaaagcacgagcaagaagaagtcatactggccgtggaagaaaggaagcccaaagttccacgagcaggagagccaaccataactttcaacgatgaagacgctgtcaaaattagatttccgcacaacgacctgctagtcgtggaagtccagatagccaatgaaatgttggccagaaccatgatcgaccatggagcttcttcaaaaattttgttcaacactgcttacaaaaagatgggactccaactcatcaaggatctaactccatgcctccagcctgtctatggtttctccagtcaaggagttgcacctctaggacaaatctagctacccctcactattggacaagctccgacaagcataactatcatagaagagttcctaatattggatgttccttcagcctttaacctaatgcttggccgaccagccctgtatgacttaaaagttgtcacatcaatatttcactcgtgcttgaagttcccaacaaagaatggggtagggtgtcttagagggaaccagcagtctgctcggtaatgttacaaccttgcagtggccaaggcttagaaggaagtatcctacagccagaggccagacaagggaaaaaccatttccaagtaggaaacttcccaaggcgaggatgaagatgtggataaaatttctgagagcaaacctagatgtttttgcctggtcacatgcggatatggtcggaatcgacccttctattattgcacatattctgaatatcgatcctaacatccggccagttcaacaaaa

SEQ ID NO: 247856 - DNA, 523 bp, Cannabis indica
taggacataaaacccaacaggagcacctcgagaaacacataaaccatgaagatttccatgtgttcttcaaattgaaagagttttaaaacaccttcagcacaaattgtgaatagataaggagacaaagggtctccttgtcttattccactagtaggcgtgacatggccttgaactgtaccattaactgaaaaggtgaacgacacactagttaagcatctcataataagccccacaataacatgatcaaagcccatagcacttatcatgctctgaataaaatgccattctactctgtcaaaagctttactcatatcaagcttgattgctacatacccctttttgcctctttttaaatgtgttaatggaatgtaataactcaaaagccaccagcacattatccattatgagtctagactgaagaaaagcactttgggattctgatataacttgtgagagatatggtttcaaacgaagcacaatagttttagacaccagtttatacaagacgttgcaaaggctgatc

SEQ ID NO: 247857 - DNA, 677 bp, Cannabis indica
ccgccactttccaaaggtgatgatggcaattttttcagatatggcggaaagcattcttaagatcttcatggatgatttttcagtatttggggaatcttttggcacttgtttagctaacttggagaaagtgttgaagaggtgtgaagaaacaaatttggtactcaattgggagaaatgccatttcatggtaaaagaaggcatcgttttgggtcacaaggtttctcacaagggtattgaggtggacaaggctaagttgtaagtcattgaaaagttactgcctcctataacggtcaagggtattagaagctttctttgacatgcggggtgctatagaaggttcatcaaggatttttcgaagatttcaaagcctctttgttcgttgttggaacaaaactgaccaatatttgagttcactaaggagtgtcatgaggcttttgtgactttgaaaaaggcattggtgacagccccatttattatcgctccaaattgtactttgccatttgagttgatgtgtgatgctaatgattttgctattggtgtaatacttgggcatcgaagaggaaagattttccattctatttactatgtaagcaagactcatcgatgctgaaattcactactcaaccaccgaaaaggagtttttggttgtagtatttgcttttgacaagttccgatct

SEQ ID NO: 247858 - DNA, 942 bp, Cannabis indica
attttataaaaataataataaaaaaataatattatagtaatattataatactaaaaaaaaattaaattagtggaagcggctatattacttagattttattataatttaagtatttatattataaaattaatgaaaaaaaaaatcaatttacaacattttaaacaatcaataaatatatagggaaacttacaaaatactggaatttaggttaacttttataaaaatactgccacacgaattttttttcaaaacacaaagcataacaactcaaaacaacagtagaacactagtaaaacaccagtagaacaccagtgaaaacttaacacagtatactgcagtatgaaacttataaaaaaacacagtaaaaagtaaaaaataccgcctggcagtatttttgtaaaaaaatagcaaaagttagtataccatgtaaatttaaacacattactacaaaatagtctaataaacagattattctataattatggaaataatttaaaaataacataacttgcgctcattaacagccatcacaccagtcattgttgaccgccgatgacgaagtttctcagctctcccgactgacttatatatactcttgacggattaattcttcaacggctattgttcattacttaagaatgtgcaaagacaagaacggttgtttaagaataattgttaataaatagaattaaaatcgtctacatagatccatagctggaggtgattattaaggaaaattaacacatttcttgtaattttctgacacaacgactgactttcttcctgaattcgcctcttctttctctccattctttctgcaataacataatttgcaagattctaaatcagagtgccaagccaataatatgttggtctaaaggaggaaatgaagaaaacaatgacacttaccgcaggttcaacatttgcaggggattcatcgtt

SEQ ID NO: 247859 - DNA, 733 bp, Cannabis indica
gttctgatgcaagctaacaaagttatattctatgcctcccgtaaactgaagaattatgaccagcgctatctaacgcatgatttagagcttgctgctgtagtatttgctataaaaatatggcgacactacgtctatggtgaaaaatgcgagatttacactgatcataagagtctcaagtactttttcacccagattgatttaaatatgaggcagagacagtggctggaatttgtaaaagattacatttgcaaaattctgtatcacctcgggaaagccaatgttgtggcagatgcactgacaacaactaccaaagtacgatagggatggctcatggactacgagcctgtgtcatggactttgaaggttcatggagtaagtacttgcctttaattgaattctcctacaacaatagctaccaaagtatgatagggatggctccttatgagatgttgtattgtaggaaatgtcgatccccaattcattgggacgtactggagaaaggaagtacttgggttcaaaattagttcaaaagaccaatgaagctatagagaagatcaagactcgaatgcttgcttcgcaaagcaagaaaaaaagttatgctaatccaaagcgtagatatgttacattctaggcaggggaacatgttttcctacgagtttctctagtgaagggtattagacgcttcaggaagagaggaaaatttagtcctaggttcattgggccatttcagata

SEQ ID NO: 247860 - DNA, 843 bp, Cannabis indica
aattgactctttgtcaaacaaatagaaaataaagagagcctctttctatttttttttttttttgtaatttctattctttttcttctaaattttttgaaccctatagtgtatgagtgactgcccacaaaatttaagtcaatactcaagatagtgtggaagattgtgtagtattcttatcacatgaaggataaaccaggttcagatcttgatcatactttgcgacagaaaagattatgggctagagatctgaacggaaggagtcatattattctgctgccatcaatgtaagattttctataactttatatgtgtttaataataattttagagaattcatattaaggatgttagattatatatttataatcaaacatacctgttagtaaatctagttcctagtaaaataactttcaacagagtgatcttgcatacaattctaaggccttccttgaatttctagctaggtgagagcctccaatcacaatctctagccttcctacaactgtcacaggctggagaggtgaatttctttcagttggaggttcaagttgttgactcaaaaatctagattagactactaagccatatctgctcactagattggcgagaatgaaaagtttgttaagtaattaatagagacaccttagtttatagtagttcatccctatatcgcgatattaatgggactacgtctactttgagtttttatttctcacaacatggtaattacaacaattatttaagtattagaaactccaaactctaaagagtggaagtctgaccttgtgagtagttttttgaatgtgaaaaatgagctaagggagctctccttatataggtgaa

SEQ ID NO: 247861 - DNA, 569 bp, Cannabis indica
ttataaccccactaatccatatccaaataatgcggtcattacaattgacatctatcttcgctgctttgtgtgtgacaagccgaagcaatgggctgcttggattcttgggcagaatattggtataacattgcttgtcattcttcccttcagaccactccattcaacgctgtgtaacatcaagatcccccacccttgctgtgttttgaggttagttctagaccgctgtccaatgttgaccagcaactccaagagtgcgattcgatcttggccaccctcaagtaccaccttttgcgggcacagcaaagggtgaagtatgcggttgaccttaaacgaaagctgttcagtttgagtttggggacatggtgtatgtcaaacttaagccttttcgtcattgttctcttgcccagcacaagaataagttctctccctggtattttggtccttattccgtggaatctcacgttggagctgttgcttacaagctgtcattgcctgtaagtgttcccatgcatcccgtcttccatgcttctttgttgaagtgcgctgtgggcactaccactccgacccaa

SEQ ID NO: 247862 - DNA, 1546 bp, Cannabis indica
atacaaaagtaaatatattgtgtgtgatttatgtgtactatatcattactcttttgtcataattctatgaatctttatttttaaggcaagaaaagaatgtataaagatcctttagcaatgatgaagaaaggaaaaaaaataaaaatgaaaattaaaaaaaaatatgataaaaaaaaagatgtttagtgatggtgtcgtttgatattttacgcaagtaaatcattgcaaatcaatgtttgatgatagtctgcgatggtttcatgagatttttaaagcaaaaacgatgcaaaatgatatatcaagatttttgaggtaaaattatgcaaagaagattgtatgagattttttaggcaaaatcaatgcaaaacaaaaccatttatagttttgctataatttgagatttttaggtgtcattttttagtttaattttgctattttttaacatgcgcaagtgttcagaatgtgtagagctttaaatttgaggagcataacaacaaatacgagatttgtgctattgtgtgcttgaagacataatcaagattaacgttaaaaatttgaggggcatgacaacaaaatttaggttctacacaccctaagtttaaactgattttaatgcgtaaaaatattaaaagaaaaccacaaactaacatttgagtgaaaatttatacgcgaataaaaaaattattaaatttatggtaatcctattacgtcctatttggcattgttttgcttttaaaattaaattttcatagaactgccgcttaagactttgttaaccatccatttatcaccatttttttgccaaaaaaacataaaagtattcgtagcgtcaacatcattaataaaatatttttccttcctaaaaatatcaagtttttctgataccgtcactagattattatattttttttatgataaaatgctattatattaaaacaaaacgttataatataatagatattagataaggcggcacttcctccaaccataaacaatcagtgtccaccgaaagaccgtgctcaactaacaaatgagcatcattattcgcagatctgtaaatatgtgacatctgcagtctaggaaaattagacactcagagaaatatttactaacaaataataaaaatgagaagcattagcttgagtagattgtaatcctttcaccaccataagagaatcggtctcgatatagtgaataggtatctaaagatctttaagccattatagactatacatcaaagccactacctccataacctctggtcgaaaatgaaaaacctaacagtgtcaatttcttcttagttgattttaaagaccaattcttatctcagattgcaagaaataaattagaagatacagatttacaagcttcatcttgttgggaatattttaccaggatctagatttactaacaagtatgttgattaatatcctaaatatgaatatctctaaaaaaacgaaatttaacacataagagtttagaaaaccttacattggttgcagcgaaatataatgactcattcgacttagatctctaacccttgttc

SEQ ID NO: 247863 - DNA, 551 bp, Cannabis indica
caattcccttatcctgtgtcaaacacaaaaaaaaaaaaagggttttacatcatacataagctcatgaaagaggattcttcagttatgtactgtgatgaagagaatcattaaattctaagtttatttcatcaggctaatcaagagaacggtaaattataagaagaggctaagagattataaagtttgaacacctcaaagtcctcccacttcataagcttcatattcgacctctcaagaagggacccgaaattcgtacagttccttttgaaacgacgaagccccttgaaggagcttgcagggtcggcaaattcacagtcatcttcataagcatcaagtgtaaggttacctaattgtcatatatcaacaatacagttgagcatcattaaaactgaatctaagactaatcactcatacttttacatcaaaaataaaactgaaatcgatccagggatgacattatcacaattattgtccatatttccataccagaagaacatgtctgcaaaattctcattcttttgaaaaaacttggtaccaagtaagacaaacac

SEQ ID NO: 247864 - DNA, 1514 bp, Cannabis indica
acataaagagtaatcatatcatcactaaaattatgaatcttactaattctttagtatcttcattttggatttggatgtcattagctcatatcattaatttccacactggactaatggtaatctatttcaaattcaaatgtgatttttagtcatagagtccattaatacccaagtagataacccttcacataactttgagatccttagttcgagtaccaattaaaacataattgtaatatataaacgcttaaataaaaaaaaaaaaaacaaaagccttcaaaaagcatattttaactattcttcctacacacacataataataataataatcttaaatattcaaaaacaaaacaaaccaaaactcaaagctcatcatctctaacacgcccagctctgtccttagcagcctcataaacctcctctgttttcttcttaccaccatccacacccctactcacttcctcctccatctcccactctttcctcttcactttctccgccgcttccttcgccttttccgccaccttatctttcccctgcttcgccttttccgcggtttctttcgccttctccttggccgcaacgctggcctcgtaagccctttccttggccttctccccggcctcgtgagtcctctccttggccgcaccagtggcatcataaaccttctgtgcagcctcgtaggccttatccttagtagcctgagccgcctcataggcgatatctttcgccgatttggcagtgtcatatgctttgtccttagctacattgatggtttcgctggttttatctgtggcttttcttgccttgtctgagctatattccccagcatctgttaaattaacatattacaaacaattttatatataatgagaaattttgtcaagggcaccaaattacaacaaaatatttcatttccaatttctattatattggattcaatgtattttgtaaatcgtatatatgatttttttttttcaattcaagaaatgttgccaagtacttttttttggaattgccatgtaaattacatttttcattttttaaaaattatttgcatttctagattaaaatgtttctattttaagattatttttatttcaagattatgttgtttccgcccccaatatcactttaaaactatgtgttttaaaaaaaaaattaccattctattttattaaatcaaaatatagaccctaaattgatttttgaatgaattaaatttaataagaatttaatttagagatgttataataaaattagttatatttttttttatctgttaggattagaaatgatctttaaattagttaactcactttaaaaaacatgagaattcaattaataattttgaaaaacacatctataatagtatttagccttaacaaaataaccatatttagtcacacaaatctactaaaaattacactgtaaaacgacccatatggttgttttgggaccataagtgtaaaattcaaagtggttattttgcatgttagtttctcaaattacta

SEQ ID NO: 247865 - DNA, 645 bp, Cannabis indica
tgatcatcattatgatatgaattgagtctttattataaatagcatgttaataaaggtagctttattcttatcaatttttgtcatatgtaatctctattatatatagtaccttcactttgatgtcgtactataaattcaaggtattgtatttttatatgatatattaaaattaattttgatgatgcgaatacttatattaaagttaaagttgatttattgtgaatttttagcaaaattgatatttgggtcacatagtttctgctcaaggtgttcaagcggacccaacaaaaatttcagcaatggtagattggccctgattacgctcaaacttgtcttcacaaagcgatcgttgtagtgtagtatgagcggtcgtgtccacagagagatatcttattcaaaaagtgattagtggaattttaagcattataagtaaataagtcaatgggtttcaagattacttgcaccgaagaacggtcatcagtgaaccctactagcaaccttcgattaaagattccataactttaatatgttgctaactgttttattcatggctaagtgttcttagttctctgtatagctacaagtcacaacctcatatatgaattttttttctcgataattttataaatttttcaataataaata

SEQ ID NO: 247866 - DNA, 872 bp, Cannabis indica
ctttcctttgcgggaagggctcaactgattcactcggttcttcttggtatcaaaaattattggatgagtttgttcatgcttcctcagaaaatcacggcggctatagacaaatgttgcagggacttcctttggggctccaacgggaacagaagcaagttgcatatcccttcttgggagaaagtttgtctccccaaaaactctggtggtctgggttttcgagaagggaagaaatggaacatagccctcatggcgaaatatatctgggctatatcgaacaaacaagataatctttgggttaagtggattgacgcgatctacttgagaggtatgagtttttggacagttgagtttaagcaagatgctagttggtattttaaaaaactccttcgtcttcgttcaactgtcaatgagtctaagattatagctgccacagtgagaggtaagttcagtaccaaaaccttttatttctcttatgtccaagctcaaccggttgagtatgccagtaatatttggagtagaatggtccttcccaaacatagatttataggttggcaagtggtgaacaaccagctgctaaccagggacaacctcagcaggtttttgccgatctcctcccccttatgccctgtctgttgcagcgaaaacgagtcgcaccaacaccttttcagtcactgcaggtttacccgtaggctggtctgtgagattactaaatggtgtggccattttgattggccaattaacttccacagatggttttcaaaggcagctaacacattgcagaaaagaattatcaacactgttattttagctaccatttacacagtttgggcaaacagaaataaatgtatttttgatctgagttgtaggacagc

SEQ ID NO: 247867 - DNA, 890 bp, Cannabis indica
catagtcccatcttggtgactatctatgaagataggttctgtgggaggaaaccatttagatatttcaatatgtggaaacaagctgctgaatatgatgaattggtatccaaggcctgggagggaaacattacagggacaaaaatgtatggtatagtgcagaaattaagaaaggtgaagctggtgctgaagaacataaaccaaaccgggtatacagatatccaaaaaacaatgctgactacaagggaagctttgactgagttacaagtgaagttgaataaggagccacagaatgaggagcttatgaaccaagagcaggaactaaggaataaatttacagaagttagtaaagctttctctagtttcatggcgcaaaaagctaaggtgagttgggccaaatatggggatgaaaactcacacattttccatgcttctttaaaattgagaaggattaaaaatagaattttctcgattgaagatgattatggaaattggtgtgacacccctgaaaaagttcagcatgcctttttagattactaccagaagcatttgggatctacaataccagacagaaggaaagttgttcaagcaattatggatttgggacctaagataacaagcatccacaaggatattctattggctgaatatacaaggaaggaggtcgaagatgctatctttactattgatagggacaaggcccctggacttgatggatatggaagcgcctttttccaagacaattggaaatttgtaggggatgagatagtagacgcagtattatcttttttaaattctggaaaaattttaaaagagattaatactaccactattactttaattccaaaattaaaatgcccaaagagtgtagtggatttcaggccaatctcatg

SEQ ID NO: 247868 - DNA, 292 bp, Cannabis indica
aaaggattttataggattttagtggatttttgtagaataatccatcttattctgaattctttagtggaataaacaattagctttatccttatttcattaagtttgaagatagacttaaaaaacaaaacccatctcttggcttctctcttgcctagcttggccctaaggaactgttgagtcccactattccaccttgtcgggccaccaccttaccttaacgcccatattagtatgatattatttactttggacctaagccctcacaattttatttttgggcaccttcccaaaa

SEQ ID NO: 247869 - DNA, 1311 bp, Cannabis indica
aaataaaaaaatagtaaaaataaataggtagggaataattgtagaaacttctttatcaaagcataaatgtcaatttaggagaaaagttagtatatggtgtaaatatttctttaacaaaatagaagatcttattgagaaaattacattctataccctttttatattgccctcttttatttttacattcttttttaaagtttattatttttacctctttttttaaacattataccaattttgtccacgtcacttcaagatactctccatgtgagtctcttatgtcagggtattttgggtacaatacatataaaaaaggtatgtttcaattaaatataaaattagaggtaaatttaattaaatgactaataaaagtggtatttttcaacttaccacgatcttattagtaatttttgtctacacaataatttgatgtttttataagaattttgtgcctttaacgatttttgtgccttttacggctgttgtgctatttttatggcttgtctttaattatttagggtagttttgtggtatgatcattgggcaagataagtgatctattttgtgctcaggagataagtatttcaagtctttttaagtctttatatttaatatagattgttttatattatattatagattgttttgtcatcgtcctttcacaattatttaatttttatttaattttgttgtaatatagttttatttattgttatttaacttgttgcttagttttgtggaggtccttcaattattaagactttgtcgataaatttaattttaatttaatcaaaatcacacgtgttttgctaagtgttcttagtttgttgcttttgccaaaaggttgtacttttggttggttctctgtaagttttggtcgggatttcattctccttttgtagttgagttttaatttttttagttaggtgtttaaatatgaatttagtctatatagtttaattcaaggattttattttctaatacttgtgttttcttggtgttgtttgtttttttcaagtagtatttctatattacaagtcgaaactttggctctctagtaaagctatcaacaaagaaagggtgtttttaatgagctggaggtgctgtttgaggatgttatagttttatcgtctaaattttcaggggcagttttgtcccaggctcgtgataaaaattttgcagtgcatggtttgacaaagcatgtccttcggttagacgatgagctatcctggttcgaagagatgatgttgtcgtttgcggattgctgcaatgttaatcatctgtgattttgatcaccgcgttaaaaaaaaa

SEQ ID NO: 247870 - DNA, 1712 bp, Cannabis indica
aatcaatacattcatgtttctttaaaataccaaaatcaatacattcatgtttctttgaaaataccaaccatattttatgcaaattcaacttattttaaggtaattcatatccatttttaggctaagttccatcacttatctcattttgatcatgatagaccatcttcacttggaaaaatataaatgtggacaagtctatattacatctctcttaagaaacattttagtctaatgtttttttataattatgtattttatatttattgtaacaggatataatattgtattaaaacatttgacataaattttaacaggagttgaatttgacataagatttaatatactatagaagaataaatttaaaaaaaaaatatatattaaaatataacattattataccactatattaacactattaaaaataatcttaaattctactaaaatctaagtaatacaattttgtaatctttacactaataaattatcgtggaataaactcggaataagtaaggacaccatgatttatcacttttgtctatttaagtattatattattactaagagaaatgctaaagggcaccagcggtgcttagtacccttttatgtgtcaatatcgctattggttcaactaagtatcgagtcccacataatttaatataataacttttaaggagtatcgctagttaatcgcaacacgacatgtcgagaatgtactaggcaccactggtacctaataacaatgctctattactaattataagatatttaggcttaaaaaatgggcatggtataacaaataataccacacaactcatttaattatacaacgacatgacattaaaaaaaattacatatagtgacaatcttttagtcataactttaatttttgtgactaaatgtgactttgagtcacaacaaaaaattacatatgactaaaatatttgtattttttttaaaggaaaacatgatattattaaggaactaaatcaactgttacaggagcactcaaaaatctagaacaagcatcagtctgcaacttaactcccaacgaactagtaacaaacttagctagtgcatgggtcatgccattcgcaacacataaaatagcctgacacaaaccaccaccaacaacagttaacagaaaaataatgtcaacaataataggcctaaaagcaatgttactacttggggaattcacccaattacagacatacaatgaatttgattccgccttagaaataataaatcccaaattggacactcatcgcaaccccaaccgaagagccaaaagctctgcaacatcaacccaaaaaattacccacaccaccccattaccatccctaattaccccaccaaacctcgcaaagccctgacctactgtaatcgccacgtctgtagacagagagaaaaattcccattgtggatgaatccactgacataccacctcccgtctccccccacccctctcacacacaccaatagtaactgtctgcatcacccctaccccagcatctcgagctcctccaccagccaaaccaaacctcccaacagctccacccccatagctaccaacacaattcagcccaagaggacgcaccccacctgaataacctccccttttggccacgccagcaaccaaaccatcaatatcagtagcagaaccaacaccacaaaaattcataaatactgcagctgccaataaattaatttta

SEQ ID NO: 247871 - DNA, 610 bp, Cannabis indica
tataaataattaatgctaattgtctctctaatccatatccttagtacgcggtcagtacactttccttcatccaacgcccctcttctttccttacagttgagttgataatcattagagatgggattcgattggtcgtagaaaagaaactttaaaacacttgtacgtatatcgtctcattttcttgttgcgattcagttaatcaattctaatcaaagaggttgtcgcgaggttaatggttttcctaaagacattggttctcttttgctaagtttgtttcaaatgataaatcaactgctacttggaatggtgccctatgctgctagtccttttgttgatttggacttgcctttcctctcataattgtttggttggcttaatggatatcttccatttcaaaaaaaaaaagacatgtaaaataggggtgacagttcatgttcgtaagtcgtgtttatgttatgttgaggtttaggtatattccaaacccaaacccaaacccgaccctatttattaattgtgtaaaaaactaaaacttaaactgaactcgtttataaacgggttgatctcactctgaccagtttaacctattgatataaagaatcatgcttaattt

SEQ ID NO: 247872 - DNA, 1642 bp, Cannabis indica
taaaccgtcgggaagttcacatttgcaacgtcccctattttaccagttttgggacggtcgtataggcgacggttatagaaactgacatgaatactttaaacgactgtttaaaaacgtcgagaaaaaccatttttgtagtagaaataaatgatatattgcaaacccactccactttaaaaattttccaaataattgattaaattgtctatggacaatgttaggtcaaaaattaaacctttcttgtcaaaaaaggaaaatcgaagtagcacttgtaaatgaaatttgactcataaacaaaaaacattaagctacatgcatggctgaatacctaacgacttgcattatttaggcatgtattataaaggaggtaccaagattccttgaataagcaatcaagaattatacaaagtaattcataaaatgaattattcaaagtacgtttaagttttcttactaagttataaatggcagattataactactcgtgtaatgtagaactgataaaactactctcgaatataaagcatagtagaatatagctactcgcatacatacatagtagattaataactacttaagcaagctcaaaggaaatacgaaatcaatggaaatgcttacttaaagtatcttaagtttgatcaaaatataattatttaagttgtgaataaaaatgtaaataagcaaacatattaagttcaaacataaggatgcgaggcaataaatgaaagaaataaataaaagcaaaattggccatccaacaatgcaaatttgtctttacaaaaatttccacaaggggcaaattatttttcggccaaaaggccatttcttaaatatataaaaataagttagaaacctagcctacattgtaggtaacttggacaaaccttcttgctccgcctcgacctcttcctcctcaccaagctcttctttcctagtcttctcgcagaagccaagcatggcctcagctccttcgtgtaaaaaactgaagcccgtgtcagggtttgccaaccaggcctgataaatgcttctcttggcaatgctattgaccctatttttggtgtcagccttcgtctcttttagctttttgacatgggcagcctagagagatttgatgaaatcctcaagctccttgatcttctactggttaggtagatgttgcttttcagcctcttctcttgtgcaaaaaagctcaactttagagtcgtttgacttttttgccatggtgtccctatgctctctggtctggcgaagctcagtctcaagcatttcagcgcgctgagacgatctatgctgagtagcaagggagagaagaaatgccagcaaaaaagaagcaaattaagaggagtaaaaagaataaaaataagaacaagaaggagaaaaggagactaacctgatgcataagttcataactccttttagatagagtaaggaagtgacgccaaccttttgtagcgtgcaacgagtagatttgcaaaccttcagtcccggcctcaagaggtagggaataggagggctcgagaagaaccatctctggaaaagaactagagaacttcacttggttaactgacccagtggattattcattggcacttgtcgcagctgaacagtcttctctagagacttggctgacttgatggtgagt

SEQ ID NO: 247873 - DNA, 601 bp, Cannabis indica
atgatgactagtttatgatgtcgccccaaaactctgctcatctagtaatgaaattgtattaaattttagccataatattttttatattttttttttaaataatagaataagttttctttatttaaaaagtccttttatatttttagtataagatatcatgttgggaaagcacattatttacatcaccaatcacacatactaaggagagactagactgcttgctatcgcaagtatacaaaattgatcccaagacttagaatgtaagctcctcttccactcaccataaaagctatagtcaaaccccaagaagaagaactagacaagataacttcaatatcaacataattataagcaaaattaagaagattaattaacatcatttttattttgcgaaagagtaacaccaccactcctaccacaagcctcaactgcgattatactatcaaaacccaaaaacgcacacacccttttaaccacatccttacaacaaagaatttcgcaaagaaaacaaaatcaagtttcttttggatcactagatcctgaaggaattgaataacctgtagcttcacaagcccacgatgaatccagcttaaaatactca

SEQ ID NO: 247874 - DNA, 1060 bp, Cannabis indica
tttttaatattttattaaattaaaaaattaattaacattaaaaaatatatagctaagatatttggcatggatgtgtatataactattttttaatttataaatttttgctagctatatatattaaaaacaaaatacgctaaacataattataaataacttaaaactatatttttatcaatcttatttttttcactatctcggcctatctccttcttcttctatttctttatttttcatcttttgagattatggttagcaattgtatataatgcaaatctaccaagaatacacatacatctactcagagaaagaatgatcaacaaaaggaaagagttggtttggcattccttttaatatcactctcttttattcttttacattatctttatgctatgttattttatcttataatttttttttatgtaccaacgagttctcaataataatataaataattagatatatgtaccaaatctttacaccgttgaaaattgctaattattttttgtatattagtggaagttttattcacagataaattgctgatgctatacatgtgcaattttattgagattaaaataatattattctccatatctaatatgtatgaggatatgtaggttggagaggtcaattctcataggtttttttaaagaaaaaaaatatcatttaaatttattttgtaactaacttagtaactaacttatataaaaaaaaattaaaagctacaatttaaaaaactatctatatataataaaattaaatgtgattcaaaagaatatgattactcaaaaataatttatatactaatattaaaaattaagttaaaagtgattacataaattaaatttttaaatttgtaattttatatcctattttatttgtaacactaaaaaaaaataataaataattcaataatctcaaattttaaatagggattttttctattttgggttaatattactttaaataaacatttataatgtttcaagcaaaaataaacatttatattctttattaatttcaaatttactatttttaaagttttttatttacaaaa

SEQ ID NO: 247875 - DNA, 534 bp, Cannabis indica
aaagggatcttgatcttcgattgcaagcaatgcttccacctttttcaaacagctctcataaccttggttatttgagtcattgtccgtaaaacactccacattatgcaccattaaattattagttagagatcttaccatacactccaattgagttgattagtcaataattgcaaaattaaaatagattgtacgaaattgaataaagagaggaagaagaaattgaacaatcatattaatctataaaataaattcaaatggttcgcataataatcttcaaaataaattagctactaaaagatattctaaaacaataaaaattcaattaaaaacataagagatagagatagaggagaaagaacattgtttggagtcctccactggtacctttttctccttgccctccttctacaatcagaatttctctcaatttttgaatggtatcaaagatttgcctcagccctctttaaatagagcaaaaaatttgagttcccaaaaaaaaaataccaaggtcgcaaccttacaagcgatttcctc

SEQ ID NO: 247876 - DNA, 667 bp, Cannabis indica
aagtataagtaaaataatttggtgaggatatgacttgactacatgtacataaggtattagaactagtataaacgaaaataaagcgatattttggattgatattattaatacaatggctttaggtccttatatacacaacataatagtgtataatagtaataacaaatctaactatctaatataactaacttcttaacagatttaatatgcccccctcaagatgaagtgtaaaattttttaatacccatcttgaaaacttaagtatgaaaatgtgttgctaacagtggtttggtaaagaggtcagctatgtttgatttggaggagacgtggttggttttaatcttgccattgctctatcttttcatgtatgaggtgaaaattgatttctacgtgctttgttcactcgtgataaattggatttttagagatgtgtagagctgcactgttgtcacaaaagagggtcaaaggaagcttgatgttgatgttgaagtcatggatgattggatgtagccatgtgagttcgcatgtggcattagccattgctcttcattcaacttcagctgatgatcgagagacagtgtgttgcttctttgatttctacgagatcagagagttgccaaggaaaacacaatatcttgagatggagcgtcgagtgtccaagcaggct

SEQ ID NO: 247877 - DNA, 1347 bp, Cannabis indica
tttgagatttttacttctccttgattgcattgagaaaatcttttgcaatctcagtttggggaatactgtcatgaatggagtcatccatatgatacctcataagcatcagacaacaatgattggaatgctcccaatcctcataggactttctatccttttcaatggtatcatcagtaggtttcggagggtcatcagttctacccactgcttgtggttagttccgttcaacgtcaacatggcagaggttcttggattgcttaaagctaatgaaaaacaagagcaataaccattaaatgcatgttataacataatcatgccatttgtgctctcttctcataaataaatgatcgcaaaataacaaatgatcattatccatgctaaagttctcacacaaattaacaagatggaactcatacacaggtaagaaaaatctattaaatattataatcaaatgcattaattcactatcgaaaggatagataaattgtgatttataatatttaataattttcttcaccatattaagcatctttaataagcaaccatcatcgataggatgattaattacttataaagatcataatgttatgtggaggaaaaaaatacaatacttaaataaattaatatttaaatgttcctcattaccaaacaattttacatgcttaatcttatgataggcaagaaaataagcactaattgttgaaataaatcacaaaatttatgccacaatactaacattatcaaccaaatatgaataaaattcatgcaattagtattttgcaaaccaaaaataatagagaatttaaaaacatgaaaatagtggaaaaatggcccaaaaacacctctgcacgcgcccccatgcgcccattttcttcctctttttttttattcattaatcgtacgacatgtcgtttttccaaaacgacatgctgtttggtggaagaacgacaagccagaggatcataaatgcgcgacccgtcgtttgcactgaaggggggctgagtcgttgtgcgtacgacatgtcgttttagagaaatgacatgtcgttttccccgaacgacatctaaaagagtcagaaaacgacccatcattttttctcagctggggttgaaccaatagggcgaacgacatgtcgttttgcctgacagaggcaaacgacatgttgtttttctgtcgtccctgtcacccaaaattgcagacacgggtccgtgggtctgaaactcggatcaacgcgacccgattcgtgacccgaccatatcttccacattcggctaccaaattcgatgctgtttgaggcgttttgtcccatttttaatactctatcatttttccaatacccatatttac

SEQ ID NO: 247878 - DNA, 548 bp, Cannabis indica
gccgaactgaccaaagatctacaagccgccgatcagcttgaagccgccattgcctccttatccaaggaagtgaccaaccttcaagaagaatgggaggttctccgggttgttttccgcaggttggaagaagagaagaagaccaaggaggaggagcttagagatgtggttgagaagtataagtcagaggccgggcagcagagatccaaagtggagtggctcggagggaaagtgaatgccttagagacaactggtcttgagattttttatgactcttggaaggccaatccccaggaaaattttgaatatttgggcgattccaaggacatgtttcttgagtactgcactgctcaggcggtctatggggaatccgaggcgaccacttccacctctccagctgaccaaaatgtccccgctgagacaaacaatcctcctgctccagctgattcggttgagatgtataaagagcctgggactcaagccgtttgaatgctttcttttttatctcttcttttttttttttttatctatttggtcataaggcctttttt

SEQ ID NO: 247879 - DNA, 1833 bp, Cannabis indica
aaggagactgacacatgcaaaatactttctgggagtgtatgaagggtattatctatgtagatgtcattctgctattttcttttgttgtgttttctccagctaagaaactcttttcctagattacctacaacgactcatgctcatgacgtttattgcaggaaaaacaactggaaccccaattcatactatttgtacccaatactgatcaaagaggacatggtaagtggccattgctagaagtgaccatctctatacagttattcgaagtaggggcgggcatgcgattcaatccaatttttagcttaatctaatatcaaatccaaaaatttaatcatatcaagcctaaaaattcaattacaacatctttttgtaactagatttcaaattagaaccttatttctaatattaacttgaaaacatacaaaaggtcacataaaaattatacaccaccatttaaatcattcatttaagttcaatactatataaaattatcattcttacaagtttaataaaaccaaaaacttgaagtagctaatataaaagcaatgattaaaatgtctcaggatattcaaaataactagtaaatgataaatatttagggattgggtcgagatgtttttacttggattttggtattgccatccaataaatgatccaatttgtattttcaaatccaatccaattgtaattatatatccttttttttgtaattggattggataggttcgatatcattgaattggcttagatcttgcccatccctaatttgaagatcctatcgcatttaatgtttatactgttgaatggaaacttgaagaatttcaactgtttcatgttgcaaagagtacttaattgttatctttgtgcctttaggattacactgagatgtcaatagcttatagaccctcccatgcagatgcaacctacgatatgaagtatggtattagagctgtgcaggtaccctattttatagtgatatatttatgcagatccttactacaggtcattggtatctaacttaaaatgtgattgaagggtggtggtaggtcatcggcaagagaaacaataggaagagttgctgctggagcaattgccaagaaaattctcaaggaattttcaggaactgaggtctgtttctcatctgggctggaataaaaaattgctctttccattttgcctgttgggcttggatttagaagttttgggctttagttaaaattttataaaagttggcatgggatgtttatgcaaaatagtctcttttcgcaatgtgttttgctttttagatctacagttgaatttcatagcaaagtaaccttcttggatttcttacttaacacattgtttgactgacatctacccaaccaagtgttacatgttattggagaagtattttgcaaatgattttttaatataaaaaaataaaagtaatattttaaaggtttatttttagaaattactgttcttgtttccatattgccttaaatcaatgaatgaaacaaaataaaatcatatttatatattctatatataaaaaaaaaaaagaagaactcttttgaagtaacttacgtaaatagtatatcagaaagtatttactatttactttcttaattctttgaatgtgtacaccaaactagtcctttatatcaatagacaattatccttttgctgtcatatttagaactttgcatttctgtttgcttgttggtatttgtatatttatgcaatctgatattcatcacattcctttcccattatttaggtttttgctttatgtttcacaagtacacaatgttgagcttccgctggggttggttgatcatgaggccttgc

SEQ ID NO: 247880 - DNA, 576 bp, Cannabis indica
atcttccatgtattacgatatattcattacataacaatatactttacgtggaaatgtacttaagcgaataaactctaaactttatgtttattttggtcctttaaaattttctcaaataaaaaataagatgcatataaatatataaaaaaataccaaaataaaagtttcatcaataataacattatttgtataaattacataaggaaaccaagtctcatgttctctacatgatccttaaatttattaggctgcaagatttttgtcataggatcaacagtcatcaattcaatgctaatatgatgaatgaccactttatttggttaaacacgttctataatagctaagtacttaatatcaacgtgattgcttcaaatttcacttttgttgttcttgccaagaaaacaacagctaaattgtcacagaacattcttaatggcctagatatgtaacgacaactctaaggcctaaaataaaactctttagccatacaccatgtgatctagtctcgaaataagaaatgaacttagcctccatagtagaagtagcggttaaggctgttgaaaattattttaccag

SEQ ID NO: 247881 - DNA, 633 bp, Cannabis indica
cttatatcttctcttgcttgttaaataactaactgaataaataaataattaaatagatagatttccataatttcaatttgcttagaaagcaaattgcagtgaaaagcaaactgaattcagattttacaagagtgaaagaaagtggaaatcaagaggtgagttgcgcggagttattatcaaacgtggttccaacgtgttgaataacaaagccatagatctttctcttcaaacgatcgacttttccggagatcacttcatcacttctcgaaaccacacggtccagccactcattcactcttttcaactgtgacaaaaccgtagcaatggagccacagtcgagggacaatcttcttccatcagtactaccctctccgaagacccgaaaaccagcatcaagggcctcctcaacgaaacgtaaaaaccacattttcatctccaatttcagcttatttccaagctcaacagtctcctccatcccatgaccccttgtccacgacccaacaacttcagcattgtttggattcgaaaccattaatgagattttgggattattctttggggagggtgtggagaaagaatgtctttttgacaagcttttatgcagtgatgaagtttcattgtcttcttgagtag

SEQ ID NO: 247882 - DNA, 4190 bp, Cannabis indica
cagtagcggaagcctgggggagcggtaatgatctcaagaagtttagcaaaaggctgaatgatactcggtgtgcactgcagaaatggaggaagagtaacttcggtgactgcgataaagaaatttagctgattgaagctagactggcttggattcaaggtcagcaacttaatgataatttggaaggggaagaaaaggacctaagagtaaagcttaatgagctgtggttcagaaaagagagtatatggcgtcaaaagtctagagagctatggcttgatgcaggggacagaaatacgaagttctttcatgcctcgacagtcattagaagaagaagaaatcgaatttgggagattagaacgaatggaggggagtgtctcaggggtgagaggagaatcggggaggcttttaatactttctttagagagctattcacatctgaggctcctaccatcaacaatgatttctttgatttattccgagctcaagttactgttgaggagaatatgtggatgaaggaaataccctccactgaagaaattactacgacggtggcgtctatgcatcccctcaaagcccctgggccggatggtctttcagggtgtttctatagacaatattggcagatagtgggtgagagtgtgatcggtatgatacaaagcttctttgctgagggtcggctggatggaaggttgaattacacatttatctgtctcattccgaagacggagagggcggatacggtggagaaatttagacctatcagcctttgtaactttgcttacaagataatctcgaagatactggcaacgagacttcgaaaagtcatggataagctcgtgtccccctttcaatcggcttttatcccggggagatggattgccgaatcgtccatcctcactcaggaattggtccacacaatcaagaagaagaagggaaagggtggtcttatggctctaaaactggatatgcacaaagcatatgatagaatggaatggtgcttcctagagaaagttcttcgggctaacggttttgatgataaagtgtgtgaactaatcatgacctgtgtcacctcagtatcgtattcagtgttgttgaatgggaagcctttgaagaagtttgctccccaaagaggcctccgtcaaggtgacccgttgtcccctttcttattccttttgtgtcatgaagtgctatcgaaactgctaacaaaggaacaggaaatgggtactctcaaagggatcaacatagctagaaatgcccctcctatcaaccacctcatgtttgcggatgacacaatcatatttgcacgggctaacgctcctaatgctcaaataatttgtaagtgcattgaaacctacgagaaatggtctggacaaaggtgcagcaaacccaagtccaatctacttctctcggcaaacatcaatcacaaccaaaaaatggaaatgctaaatttgctggaggtaaaggagtgtactgggcaagaacaacacctaggcaacccttttgtctttaagcgaaggaagaaggaagagtacattcggctcaaagagaagatgttgactcgccttgagggatggagatgtaagctgctatcttatgcgggccgagcgaccctagttcaatctgtggtcatgaatcttcccctgtattcgatgtcgacttgtaaagttccactgaccacttgccgtgaacttgatgctattgctcgcaagttttggtggaccggggggcggagaaagaaagatataaggccttgttaagttgggaaaagatttgccgccccaaaaaagcaggcggtttggggttcagaagatttgaagacatgaacaaggctttactcactaagcttgcctggttcgttgccaatcatcaagatagaccgtgggttacttgtttgttggcaaaatattgcaacaaaaagaatttctggactgtagatccgggagggaatgactccccaatgtggaaagggatcctttatgccagaggggttatccgggagggaagtatgaccctaattggggatggaactaatacagatgtgtggcgccagccttggattccttggctaaacttcagagagtttagggagttgatgagctcgattctaccgatgaatccaagcctgaaaacagttgctgatctttccctgcctggcaacaagtagcatatggatgccttgaagcacctctttggtagtaatatgggagaaagaatagggagtatacctagattacctgcccctgcatcagacaatctggtatggaaaaaggctaaagatggggagtttacagttaagagggcttattgggagtgtatgaagcccattatggactgcaccagtaagatttggggtgccatctggcacacaatattcattgtcgtctctcgaccatgatttggagagtggcggtcgggtgtctacctactaaagataagttggtgtttgtgcaaagcaagggttgttttttgtgtgaggcagatgttgaatcacatgagcacctcttttgggactgtccttttgcaaaagctctgtggttcagtgggccatttcctaccaaatactcatcctgcgagggcatggggtcgaaagatgtcataaatgaaatcctcctgcatactcctactaacataaagaaggagttcttgtcgttcatgggtgttcttttcgaagaaatatggaaagtgagaaatgaagttatgatcaaggccattccggccaacatcgaggcggcgagaagtaaactggtgcgaagatttcatgaatttacaaaagtttcagacaacagagtggatgataataacttgaggaattctatgacttacctggaaaggaagattcctgaggaaacaagatatatctgtgttactgatgcatcttggaaagatggagtcgcaggcattgctgtgggaatcttcggaaaagactcaggacaatggagttggaatgcaaagagaactctggctagatcccctgaggacggtgagctgcaggcgatcacttgggcccttcgtttgggtttggatcacaggtataactcgatcgctattttatctgatgcttcactattggttcatgctcttcaaaagagaaaactccctccttactgggagttgagaccgatggttttggagacttggaatctcttggacagatttgaatctgcttccttgttctttgttaagagacaggacaattattatgctgataggttggcaagatgtgtaagaattaatggtaatttggatggttgttatcaaagggaggggtccccttatgtgattcccaactaccttatttaatgaactttaagtctttcaaaaaaaaaaaaaagatacgataatgtttattaaatcatgatccaactttattatgcacccacaaactttttgcttcattattgtacgacagcctattctcacaaactaataatacaaaaaatatatcaactgctccaacaattcacatacgtgactcaagaaattcatccgaacgaaccttctccaatggaatcaaaggaatactctgatccccaacaatctgcaaaataattaatttgtataatttataagtattctaatttacatatattgccatgaaaatcatatgttatatgtaaagttaaattatactaaaattaaccactagctgtgacatatatgtgtatgtatatacgtaccgatatttttcttgttaatagaaacgaaccaagcttctccaatggaatcacaggaatactttgttcatttctgaaaaaatttcctggatctaccttcctctttatctccaccaatctccaaaaattctccttaaaatgcgtaattccaagatcatgcgcagtacgataattattagtcttccaatcgtgatcgttgattcccaaatcaagatctctgtaattcaggtaggactctctggggttgtttgacacgtacggagtcatatggtcgtacaattttctcatcaaaccaatgtagtaactcgaagcctctgttcctggttcatcccaattcaacttatactgaatcttagctaagttcagtcgatgcggaaaaggcgttgcatttgttggaatctcagccattctaccaccgtaaggattgaaaaatagagctggatattctagctcaaccattttcttgaagatttcgttcagaccatctttggaaattggtttcttcaaataatcagattt

SEQ ID NO: 247883 - DNA, 578 bp, Cannabis indica
gactatgaaggcctttcttacacttcttccacagaaacgcgcttctttcttctagacatgcagaagctctgctccattgatttagatatggctactgaaacggcttgggttcaatctggagctacactcggcgaactttactacaagatagcccagaacagcaaagttcacggcttccccgccggagtatgtccttcggtcggtgtcggtggccacttcagcggcgctggttacggaaacatgatgagaaagtacgggctcaccgttgaccaatcgttgacgctcagttagtcaacgtggaaggtcgagttcttgaagaatgtcaatgggggaagacttgttttgggccattagaggcggtggaggagcgagcttcggcgttgttttggcttacaagatcaacctcgttcgtatcccgaaaacggtgaccgttttcagagttgagagagcccaagaacagaacaaggttatcgacgttgttttccgttggcaggaggtggcacctaagctagatgaagatcttttcattagaatgatcttagacgtggtcaaatcaagtcaaactggagaaaagactc

SEQ ID NO: 247884 - DNA, 4017 bp, Cannabis indica
acgattttgtctcgtgatgtaactaccattagatgggtctcaggtatattaaatgagtgtcaggtacgtatctaaattttaacctaatcacccttagatcaatctcagccgtcagatcaaataagtccattatctaatggctgccgtacatcaaagtataatcacgagacaaaatcatatccctatatatgtaataattataaatattatgagaatttcgtttttaataatataaaaaaccgctaacaaatcgcaagtatcgatatagcaatagctctctataaatagttggagctgagaaactccatttccccatacaaacggaaaataagccattcttgtgaatccacgcaagaagagccttcttctcaatcggttacgctcttagcttagcttagctgcctatgtttcagaagggaaaactctttaaccgaagatctcgtagcttttccagaagtcgaattgccattgaaggatcttgatttcattatcatcaattgtttttcttttttgtttttgttttcgattgttattctttgctttttcaattccgattcgaccataatggctgctgttgataatggtaacgttcgattacggttattcctttttgtttttgctttttagtggttttgattctgatttttgtttttgttttgaagcgaaagtgttggaacaagagcgtgagattcagaagaattattggatggagcattcggcggatctgactgttgaagctatgatgcttgattcgaaagcttctgatcttgataaggaagaacgaccagaggtgtgttaatctttttttttaacatttctttttgtaaaaaatgtaattaagatcaaaaggtttgaaatgttaattaattattattattatgattatgtaatttataggtactgtctcttttgccgccgtatgaggggaaatctgtgattgagttaggagctggaatcggtcgttttactggtgaattggctcagaaggctggtcatcttcttgctatggatttcattgaaagtgccataaagaaggtaaattaatacttgatgttatatagtggaaattaaacatatttgtttggatttttgtgtgatttgtttaattgtgtttcgtgtagaatgaagaaattaatggacattacaagaatgttgagtttagatgtgctgatgtgacttcccctgatcttgatatacctgaaggatctgttgatttgattttctcaaattggcttctcatgtatttgtcagatgaagaggtaaacaatttcacaatgataaatgcttactattctcaattaaggatctgttcctgaaactttagttccctgaaatgtattgcaggtggaaaatttggctgaaaggatggtgaaatggttgaaggttggtgggttcatatttttcagggaatcttgtttccaccaatctggtgactcgaagcggaaatacaaccccacccattaccgggaaccgagattctataccaaggtttgccttctgattgagttatcaaacatgttcaaagaaattgctttaactttgtgttcatgatatgattagaatttcttcaatagtctgtgatcatagtcagaaaaatccagtttctgaaatcttattagtgataataagaggttacttggtgaggaaagaagttgactcactgatacttttcattacccttttcttcttactgaagtttttaggttgtttgatcacaccaactttgtaattctaaatattgagctaatcctgtgtttcatttcatgaatcaaaaattgtttttttttctttctctttaatatatgtatatttccattgatgtttcagatttttaaagaatgccaaacaactgatggatctggaaattcctttgagttgtctcttgttggctgcaaatgtattggtgcttatgtgagaaacaaaaagaatcaaaatcaggtgatttacttgacaagattaaatcttttagtgctattttcttagtaaaagaagcttactgataatttttgtatgatgcagatttgctggacatggcagaaagtcagttctcaggatgatagagggtttcagcagtttttagacactgttcagtacaaatgcactggcatattgcgttatgagcgtgttttcggctcgggctatgttagcactggcggaattggtaatactactttgtccttataattgagaaactaaaataactgaacagaatgaaagagcatactagcactttataagctgaataatgaatatgaaatattttaattacaacacacatgagctatgtatgttttcagtaatatgccataactgaatacattcgaattgtttttcttaggcaacaaattagaattctacacgattcaagaacaatatctttatttgcatcttagtatttcacactactttcgttgattaggaaaaagaaagagaaaaggaaagattggatattaacagttcttgcatttggtctctcctaacaatatttaaatcgcctatgcagaaacaaccaaggaatttgtggcaaaattggaccttaagcctggtcagagagttctagatgttggctgtggaattggagggggagacttttatatggctgaaacttttgatgttgaagttgttggcatcgacctctccgtgaatatgatttctcttgctcttgaacgcgccatagggcttaattgctctgttgaatttgaagttgctgattgcacaacaaagacttatcctgataactcatttgatgtgatttacagccgcgacaccatattgcacattcaagtaaggcactcatttcttctattcatttaatcatgtggactattaccttaaatcttttttgttgacatgaaacttttattaatgtgaaatattttaacatgtgcaggataaaccttcattgttcaagtcattcttcaagtggttaaaaccaggaggaacagttcttataagtgattattgcaagagttcaggaaccccaacctcggaatttgcaagttatattaagcaaagaggatacgatctccatgatgtagaagaatacggccaagtatgtttagatatatttacatttcaacacccttttagatgtttattccaatttcctctacttaacaaggttccttttttcggtttgtattaaactcagatgcttagcaatgctggttttaaggaagtcattgctgaagaccgcactgaacaggtttgacatatgatctattctattcgatgaccatgtttcggttctttcttaattttcttttcgtattgtgtttcagttcttacaagttctgcagcgggaactggatgtactcgaaaaagaaaaggatgaattcatcaacgacttctctgaagtgagtttcttccttctcatttgttgtgcttcattgaaaaatctttactcatatttatcaataaatgaatcacttgtaggaggactataatgatattgttaatggatggaaagcgaagctgatcagaagttcatccggcgagcaaacatggggtctgtttatcgcgaagaaaaacaaagagtgagtgaagtttgattaagtcactaaatttagtaacaatggtatgtgttattttaataatgaagaccccattttgatggactttgtaatttcatgcttagagaagtgattatgtctagtttcaagattattgctattaccattgtgttgtaattttactattgtgatattgaaacatcagatttggtaaggaaagaaataataattacctttgtcttttcatcaattgcttgatgctaatatggctcaaaatgcttgttgttttgtgttttgacaaaaggttattttaatagtgtgatgatatgtttaattgtttcccacatagatttgtgaaatgttatgatataaattgtgtttgtacattatatcacttattttgtaaaagaggtattggtgggatgttttttctaataacaatttcttccttaatggggttgatatagttttttatgttttaaataggggttttttcattagtgta

SEQ ID NO: 247885 - DNA, 536 bp, Cannabis indica
atgttggaaacacaaaataaaaaataaaaattacgtaaaaacacaacaagacaaaagtttatgtctacgtattattcaaaaaggtcttaaataaagaataatggttttgataatatggtcggtcaaagaaatgaaaataatgtcaaaatgatgattgttaaggacaaagttagttaggcagttacaatgttagttaagtctgttatttttactgttatgtttgtatcattgctgtcatgtgtgtctaatgacagctttgcctttatataccttgtactcttcttcaattaatcaatagactaaattctcagtttctctgttttcatctctctcgttctctctctgtctatacaatctaacatggtatcagagctgtaattcgttcaacaatggaagcttcagcaaccggcaatggaggagctttaagatcgaaccatgctttcctccctcgttctaatcctgtttcgttctctcattctttatcgattaaacttgatgaacacaactacctgccatggaaacatcaagttcttgca

SEQ ID NO: 247886 - DNA, 835 bp, Cannabis indica
gaaaatttagagtctacttatgctgtcactaaaaattattcttaactatttagtaacgcgcacaaaagtgagagtcactatatagtgtcactaaaaggttaaattgtagtagtgataatttcagatccttttttagtagaactgattcattatttgtagaggatgttcaaaataggattcaaactcctcaagctgtcatcccactaatttagagaatcaactcatctttctaaaataaaggaaatataattaggattccctttgactgtgtattcattactacaaaatgggtttttagcttccctttttttcaatccattttataaaaagggaagctaaagggtctaaaaatacccgcttattgaaaatttacctttagaggcagtttttttgataaaaactgtaggcataaaattggattataccatttaccgtcagtgtggaatcaaacgacatagggtttgtttatgcaaccctatgccgtcggttgttatagaataaccgacggcatagtgttatataaacaatccctagctatgtcgtcttcatcttcttcctcacgaccaaaccagagcccaccagcagccaaagagaacccaaaaccctcgccaaccaccacctctgccaccccctttctctcccatttctcaaccatttgagcccatttttttttaaatctttcatttttgatacttaatgccatacacccaaaaagtttttatttttaccctctttaggtgtcatccgaacccatacaaaagttgtgggtataactctgaccaccattatttgttgagaaaacattgtaatgtacattgttttatttttggttttt

SEQ ID NO: 247887 - DNA, 1192 bp, Cannabis indica
agctgcattcacagtagaggtgtcttgttcatctcctcaattttaccacagaagaagccttcttcatctctccagttttacaatggaagaggccttcatcatcccctttgcttcacagcagaggaggccttcatcatctcatcagcttcatattggaggaggcctttgtcatctcctcggcttaaaaacagaggagattcaacatctcctcaactttaaaataggggaggccttctggtgactatcaacaaagtgttgtagtagttgttggccattctttggtcaattgagatgtgaagaactcccaaattaatatatccaagatggggttgatgtcttcctcatcttgggtgcaccttgaaccaatcataggtgtggtctccattttttccttgttcataaccatggtgttatttgtcgtccctttggttgtattcacaacgaaagaggcctgctcgagcccatcttgagaaacaaaagaggaatatatttttatggaggcattcgatgttgattcttcttcactttcgtgatcaatttccatacgagactcaagaaatggataagcaatgtaattggttgcttctagttgaacaactcttctgaccttcttgaaagcctcttcgagcttgacgaaaccatcaactatgtttgaaaattcttgaacaatgtgtactgatttgagtttcaagtctttctagtatagactcataattgttagcccatttgtcattgccatgaccttggcatcttcatcgagtattcttgtctgcgtggtcacttctaagaaacattatagataatcatttagagactcatcttcttgctacttaatgcagaccagatcgtttggctcaatcagtgtgtgccttgaagggcagaattggtcataaaatgcttgattaagtgttttccaagaatcaatagatccaatagaaagcttgaaataccactaatgtgttacttttgatactgtggatggaaagattcaacatcaagaatcgtcttgaatgccttataggtcagtttgtacttcgaaattgtgtatgtgagagagagttaatattttactagtgtatggatgccatactttactattgacaagatcaaggcacggatgcttgcttccgaaagcatgcagaaaagttatgctaatccgaagcgcagagatgtcacatttcaggcaggggaa

SEQ ID NO: 247888 - DNA, 2378 bp, Cannabis indica
taattaaattatttcaatttgttttttaaattgtagattgcataagacgagatctttttagcgagagtgattcgtctccggtaagtggtttatcttgctacaacgatgaaaatatttattttctttaaagaaattaattataataatattttgttgaaataaattaagtgtattgcactaaatagattcttacttgttcactatagtatggctagttgagtagtgtggactcaattttgctaaattcttcttaaaccttataaaatttctttatttttagtcacactttttaagttatatcagaacagtaatacaaataatattacacatgcctttgaaaatatgcagattggtcttggggattagtttagctcagcactatgggcttctctaaattctagtggttatttaggtaccttatacatcagtgctattttattttttattgattttttttaagattggctacattttgtttctgagatgtaattgtgtttttattaagatctgttatacgagtttttggggttatggttcagtgttattgaatttaagatgtttaatccattaatgagatggacattgcaaatacattaatggattttgatgttttccaaggcattgttttgtcttgatctctatgtattgttttggaaaaggttgctttttgttttgaaaacattggggaaaggaatggattttgtcgagaagtgtatgtgagtattgaaggcccctatgaagaacctggtcaaacatggaattgactatagtactatgtatatataaggatttttgtgtgtgtgtatatgaatagaccccgcaacaaaaaagttttaagatgggttagaactgctttaagagtttggtaattcggtcaattatgtttcagcaattgtgtaatctcatactttctcttatgaactactttttttcttccttatgaagtatgtactatgtagtctcttatattttatttatgctctgtaattagcagcaaataaaatgaaatatagcatgtttctgctttgtttatcttcgtaagtgaagtggaaactacatatttataagtatagatgccatatagaaatgtctttttgcattttactattttataacattttatttatttcaatttataatgaacttgtaaaacccatgtttcttcactgtctgatgtgaaagtagaattatttttgttgtatcttattgtgctatgaaattatttttacttgtctatgctctttccgtttggcataattttttatcatttcatctctgtaggtacagtgtagcaattaagtgtgcaactattactccaggtgattatctatgcatcttgttcttcgatctatatatactgactaggttgaaattattttaaaatctttgagtttaaatatttcttttttgaatctggtctttatttctctttgaggtttaaggttttcatcattgttttactagtagcccatctccaatagtaaaacttaaatttggtgttaaatcaatgctaaaaaattactatttcaacttttttttttttcaattccaatcacaacactaaattatatattatttattatttattatatataattacttaatttttcctcttaaaaagtattatttaattattagattttttttttttaaaaaaaaaattaaagtgtggtgtacagtgtcccacacgctgtaaacaaagctatttatgagtatagttttagtatctcattggaataaatatagtgtgaagctacattatatttagtgttttaatgtccggttggagatgctctttgattacaacgtgtttagaattttggagttcatgcctttttttgtaagtatcagttcctggagataataaaatttggaaataatttctatttttatatcctcaaattttccgtactgtggattaatgtatacatttctttaacttatcttttttcttctcactatttttatctaaacattctttcttttatctgaagctgacctcatttatataataattacagataaacatcaactttactagaaggtttaagaatttaaaggtggtgtgagtgtgaagatggatgtagcagtatcgttcaactgccacaaatctctgtcgtttaattcggtcagctatccaaaacgacatttattgactcctcaacattgtcgcttggttgttatacgatgtactaccaatgaagaagattcagtttcactttcacaaggtctccccttcttctcctacttatttcgttaatttttattttgagaaatttactgctaaacaacttctgtttgattcttttaacacttaattctttatttttttggacaaaactaccttcacttttgtttgcaaattcgaagtttcaatc

SEQ ID NO: 247889 - DNA, 1111 bp, Cannabis indica
ggtggtgccaaattagagtgtcatgaccactgaagtaactcaaggggatagttaaaattctgtccacatccgcaggagagaaaaactgatgtaagaggggaacattccactgccgttcatcagaaataaggttagcaacaacaccattggatggacccttgtaaagaaaaggcaaaaaagtattgtgcccaggaatccaaggatcataacccgactgaatatgtcttccatcaccaaccttccagcgtaagcccttgagaagaagctctctagcccaatggattccttgccaagtgagagacggagagtgacccaaagaagcttccaaaaaggtgttatgtggaaaatacctgctcttaaggacacgactgagaagtgaatccggattgtcatagattcgccatgcttgcttagcaagaagtgcctgattgaagtgaatgaaggaacgaaaacccatgccgccctctaattttgatttacaaagaaggttccaagagcgccaatgaatttttgatccattttcagtcaagccccaccagaaatttgccatcatagattccacttgcttgcaaaagtagactggtaatctgaaacaactcatggcatatgttggtatggattgcacaactgcttttaagagaacctctttaccccctgctgaaaaaattttctcatgccaagtgttcattagtttccatatcttctctttaatgtggctaaacatttcttttttatcgcgtccagagtaagatggaagacctaaatacttctcatgacattcacaaataggcatggcaagctgctgatgaaaaaacacttgagcagcaagagtggtattcggagaaaaagacatgaccgatttgcttaaattaagctcctgcccagaagctttgtgataggtttccaagacactcttaatagcaagacaagatctctcagttgcttgacagaaaagtaggctgtcatcggcaaagaacaaatgagtgaatgatggagcatggcgtgtcagtttgaagcccattaagttaccaatttcttgctgatgctgtagtaatcttgagaagccttcagaacaaatcagaaacaaatatggggatagaggacaaccttg

SEQ ID NO: 247890 - DNA, 1060 bp, Cannabis indica
ggtatgacttgatgaagaacacgcctgagtgaaagggaagcaatccactagatggaatcaaacttgtatagaccattttcaagcttcccaaccagcaagatcttcttggattcctaatctttgacagtatagtgagaatggtgaaacccaaagaaaactttattgtcaagtggaaacttagagacactgagtacatttttagttataagaggcacatgtaataatttgtgaatgacaagttgtttggtgtaaacgggagagtgaaaagaaatgttaccaatggtttgaataagtaaacttgagccatctcccatttggatctattgatcaccaaagtaatcaaagttgtaagctaggttttgagcattaggagttaggtgatgagtggcacccgagacaggataccagctgttatcattaaaagttttagggctagcatattgagttgatgcttcagcaagatgagcactccctgcaaaagtttgaaaagtttttggtcttgtgaatgacttattaaatctgtaaaaatatttgcttacaatttgaccaagtttatggcacacttggtattgtgctttttgtccccaagcaaaaaattatcctctacactaggtggtccccctctgctgttgctggcatgccctctgctctgaggtcgtctcccacgagattgtccttatggttgatgaagtccaaatccagatggaggataagatgcatcatagtagcctggcggtccatagtagggttgtcctctgtacacaacagaaggtggagcaaaatggtaaggtgaaatctatgaggaagagaatgtaccttgaccacctgtaaaaggtttagtgtgggccaaattggcttcaactttggcaatgtcaagctctcctttgtccttttctaattgaaattcttgtgccatgtgtagagcttcgaggaactgtataaacataacgccttgtattaacagatgcgactaagacattatattcattggacaatccattaaaggtagcttcaatgtgatcctaagtcgacaaaggatggccaatggagattaaagagt

SEQ ID NO: 247891 - DNA, 858 bp, Cannabis indica
catataattcaaccctaagccctaggttaaacactataaaaggaacaggatgctctcatctcatccacttgacaccttctcaaattaatgtcaacttgactattcaaccaagcctagatgagagagttccctccttagtgttttctcacctccttcattgctcttccatattcgaacccttagtgatgagtgccatgcccacacatagcaagtcaagtactcaatcacagtgagtaagacggtggttacaaaacccgaaggagagaaagagatccaggttcatatcttgataatgctctgctacaaaaaggaatcaagggctagagatcttgaacgaaaggagtcattattattctgttgaaatcaatttaaggttttcataaaccctaatttttttatttcattgttttagagatattcatatttaggatgataatcaacacacttcttagtaaatctagatcctggtaaaatatttccaacagtagtcacgcctaatgaccaccatattatcagggctcagagtcaactcacttcctgtacatattctaggtctttcacctacagatgagtgtacacccgatctaccaatgatgacatagagactaggtcgtgaaacaataatatgcacaaaactatgatcaacttgagtctcataagaaatcagtataaccaaaaacaggcaatcaagaatgtcaaaagaacatattcttttcttttttttattttaggaaatctagtagcataacgactgcaatttgaataaatccaaaaccataacgttcaaaatattcgtacaaaatatatgtggcaatcagtgccccagaatagttcaaacaaatttgtagattaagtttt

SEQ ID NO: 247892 - DNA, 743 bp, Cannabis indica
tagggcataaaacctaacagctaagtcattgttgtatcaactggagcataccaagggaaatttaaccacccaagtctattttctaagtctgaaattatcacaactttaatcactcttagcttcttagttttagtttatttagctcaaaatattatttttcaactctagaattaaggttaagaattttttctcttgaattgattagttattttgctttctttttacttgtaacttttgaattggttttagttgatttttcattatttagtgtaaaagtccctgtggatacgaactttgattacttatcattgtactacttgtttgtgattgtgtacacttgcgcaattataaattgatataattttcacaacagcgaccttgcttgcagcaccatttgcgacttcctctgcattggcattctcaatgtcctcagggaaaatatttcccccaagtcattgggtctcagtagacgacatagcacgaaatgcatattggctatttcaattgccttcgctctaagaattgcgaagtcaaagtcacgcagcttggacaaagtcgtataaatataattagaaacggcctgatcatgttgtttcttcctgatctccttttcattttcaaggtcgtgaacgagtttgccaaatcgcaattctaaaagtttgaccttttccttcgcttgctccttggctttcccaagatgctcgatgtctttgtccttcaaggtcacgtccaacttcagtttt

SEQ ID NO: 247893 - DNA, 1728 bp, Cannabis indica
caagctgaaaatacaagcactattctcatttgcaagctaaaacagaacataaaaaacatgacaaatcaacatgattaatacacatctaatccacataataattattacacacaagaataaattcaacaacaaaagtagacgcacaaagcaacaaacacaacagtagcaacacttaaactaacacactcatttcaggaacacaacacataacagtcaaactaagttaagtaactaaggagaaaagagatactccctcaacaatcggactctccaccaccagagtccctttctttatcatcaatggggcaccaaggctcaaggatttcctctgggaaagcggggaatgcagcgcctgttttaggctggttgcgacgaagagttcgcatcatccacgcatcttgctccctttcatagttccagtgagaatgcagccgcttacacatatgcgactgctgctggaacatctgttgttgtaaagcctcatgcttggcccgccgctcatccattggatcccttgaagtagaggctgcagtcgtggatgctgtggtgcgcttcggggcacgagcagacctgaagctaactactccatttttggaaccggctcctcttcagacaacatcggtacaccagcgcatctacacatctcagtaagtaatgaggcatgggaaaaacaatttcccttttacccggtgtgcacattcaaggatctctttagctatcaccttgtcgacattaatcttcttgcctttcacaatgcaatatagcatccacatcctttcctgactcactggggagtcatgtgacgtagggagcagaatggattgaacacaccatgctcgtctatatcccactctgcttctagagttgccaattagggcacaatcttgtgcatcagctcatcagtgagcttacaactatcattagagaactcacaagtcatatttttgagctggtagtaatgattgatgtctctatcggaaaatttcactttaacctctcacactgtaatctcagctggcaattcatgtgccaaaaaatttgcgtaaaattcctttaccacttgaaaaattgttgaggtcaggtcttcacatagttctaaccatttcctcttttttatgttctctattagccaaggcggcatgctgccgaagttatcatcttctactaccatccctcgctcgacataaaattccttgtggcacactgagtcacggtattttttttcagcagtttgcgaaacaaatttttcagcttctcgagcatctttctgtggaggcttatgagcacaatgcttgatttttggcattatgtcctttgatttagtaaaattcagccacacaagatcttttccaacagtcccaatccacacaagtgtactcacaacataaaaaaatttcaatactaatccactacaacaagattcaaatagcacaaacaagattctgattacctaatattcactttagcacaatccgttagacatttttcagaatccaaaaattttacctcgattttctgctgtgttaaaactatcctgtgtgattgcttcaggtctgatagtgaggtcgtgtaaatggaggggtcgagctattgatggtgattgatgcttcgtgtgggactggtggtggtgctcgacggtgtcttgctactgaattagttacagtcctccttgagtggcttcgagtagcattggaagtggagctcatgaaggtggtgttcggctggtgt

SEQ ID NO: 247894 - DNA, 528 bp, Cannabis indica
tttaacctgtatcggttaccctaacaaaaaaaaaaaagaatgcgaaggttactgtttgggttattataaagtttgactaaataaattaaagggttaattggataatgatcttggaatataatgcttagttgttgtttagaaattaaataattatgtgagtaattaagttatatgtaaatagataatgtttaaaaattggatatttggttggtatcatataggtctagccatttatttattatgtaaataattagaatatttcaaatcatggtttttatttgaaaagtatttagaagtagttttagttaaatgatatcaaagagagtaaatagaaattgggtgatgtagttaagatatacatatagttcaattggagtttttatttgaaagtaattaaaattttcatagaatagtgggagatatttttttaataggttcatttacttagtggcagccgaaggttatgataggagaaataggaatttattgttaagatgttttagagcaattagttattatatggcacaa

SEQ ID NO: 247895 - DNA, 1267 bp, Cannabis indica
tttactctctgaccagtagccatagcaaagagttgtaacaattgaagcacacgagttacttccccatttgtggacttacaaaagagaaagctatcgtcagcaaaaagcatatgagtcaccaaaggagcaccatttgcgacttaaattccatgaatccaccttttttcctcaaaccttctgataatagcagataaactttcagcacacacaaggaacaaataaggagaaataggatccccttgtctcaatcccctacttggaacaatcggccctatagtatgtccagaagtaacaatatgatattgcacagaggataagcacccataaataagtctaacccacttgtctgcaaaccccatttgtctcatcatagcacacagaaagtgccaatcaactctatcataggccttgcttagatccaacttaagagccatatacccttctttaccaacttgtttccttttcaagtaatgcagtatttcaaatgacaccatgatattatcagtaatcaagcgtccaggaataaacgcactttgatttaaggaaataatctcagttaacaaactcttcattctattggcaagaactttggtgatgatcttagcaataacattgcaaagagatataggccgcaactcacttatctgctctggctttttcttctttgggattaagactatattggtatcattcattccatttggcataaactcattagtaaaaaaattcctcacagtaagaatcacatcattgcccacaatggaccaatatttttgaaaaaatttaggattcataccatccggtcccggcgatttgtcaggatgcatctgaaacacagcttcttttatctcttgatcttcaaccggccgaagaaggatctcattgtgctcagcacgaatcgtaggggtcacacaatccaaaacctcatcccaggtagacgatttagcagtgaacaagttggtgtagaattcaagcagaacattatccaaactaggggtgttcataaaaaccgaaaaaccgaaaccgaccatcaaaccgaccagaccgtaaccgaattttcggttccacgtcatcaccgaatttggcggtcggtttcggtttcggtttttttgacacggcggtcggtttcggttcttgaataaaaaatagtttaaccaaaaaccgtcaaaaccgccaaaaaccgcccaaaaccgccaaaaaccgcctaaaaccgccaaaaaccgccaaaaaccgccaaaaaccgcctaaaaccgccaaaccgaaaccg

SEQ ID NO: 247896 - DNA, 641 bp, Cannabis indica
ataatactcgtcatataatgaaaatatatcaccatgattcatatgtttgttatatagcaaggataatcattaatttttaagtggtaaattaatttaaataccgactaaatgggagaatgttataatattttatatacaataataaatgagagaatgttaaaatattttatataatgtaataaatcaataatttgatttataaaatataattaattatttaataattaatcaaaatcattttaattatggttactattttattatcaaatatttcaattatccaatttaattgtttaactattttgataattaatgtatcacaaataatgatgagtactggtcccaagctataactactcattctatgaaaataataaatccatctaagaaagttaaaagagagtttgaaaattcaaatacccacactaacttagatttgcttttcttgtagatctaaaactcatgtataatcaaaactcaaagaattaatagttagatatgtttagtttatttttttcctaataaatttatgttcaattcattctgaactttatacaggatttaatagtgatgctcaattaaattggttggattatatgggggacgcgttgggtttactactatcaaataatgacttcatc

SEQ ID NO: 247897 - DNA, 1140 bp, Cannabis indica
aggtagttacaagttagttttttctacttttgtctctaatctgaattgtataaatatttagagtttaattctttgtaaagatatagccttgtacaatttcttatctctctctctctctctctctctctcaatgtaattactccatttatcaataaaacaacacaattaatttcaacatgttcttgctggtttttgttcattggttcttgatggtattgttactggttttgctattttattgctatagcattcttgctgatgttaccgttattgtgttctgcacttgaacaactaatcttgattgctaaggggtgatgattgatcgcaacaattaccaacagttccaagtcaagaaagaatgagtaattttcctctcctttttgtactttaatattagggtgtctatctatacatttggtatcctgtgttttatctaaatacaagtttggtactctgtgtttttaataatatttttgtgatacttgtattttataatcatacctatttggtaccgtaaatttaattttcttaataaaattttatcaatgcaatcaacagtctaaaattttatgaattctgagttcaaatttaattatttgattacatataactgaaaactgtttggttaaattaattaacttatattgattaaattttactttaagatactaaatatgtacaatttaaaaatatgaaataccgattaagtattattgaatatacaaagtactaaatatatttttcaccaaaacatagggtgttaaatgagaatattcccttattattattattattattattttttttttcccatttttctagttgaaatttcggagcatgtatgtatgtactaatgaacatgtgttgtttcaggtacttggaggccagggatgaaaatagaattggattcctcaatgcttattgcaaagggttttctagtacaaaaccaaaatgatattagatgattgtataagttgtgttgatagattaggtgacctcaactctagtaattatatacttgaatactttgtttaagtggaatgtaccacttttgtactcatcctctatgaagtttacgaaaaaggcaaaaaactggaatatcatcattatcttcagtaaattatatattttcaggatgca

SEQ ID NO: 247898 - DNA, 552 bp, Cannabis indica
ttttttcttttggatagtgcataatctcaaaaaacgccataatgttatctgtaataagccttcctagaacaaaagcgctgagactcagaaataattccatccaacaaaccatttagcttattagccatcacctttgaagtaaccttataagcaacattacataaggctattgggcgtagatcacccacatattcagggttctttttcttaggaacaagcactaagttagtgttgtttagctcatctgaaagagtagcagaactaaaaaaattccttactaagctcacgacattagaccccacaatggaccaacatctttagaaaaatcctagagtcataccatttggactaggagatttatgtggatgcatctggaaaagagcatttctcacttcctcagtagaaataggagccaatagatcaaaattcatgtcttgagaaatagaggggataatatcatcagtaatatcatgcctaagaactccagaagcagtaaataactcagtatagaatcgaaccatatggtccgacaatcctgagtcccaatcaagc

SEQ ID NO: 247899 - DNA, 1852 bp, Cannabis indica
ttgagaagaaacacttggactctcatgaagacacttaaagatcgttccactcttccctggtgcattgttggggatctaaataatgtaacctcccaaactgataaaaggggaggtaatccgtatcccaactggttagtggaaggtttttgtgagactttggatgcttgtggcttgattgacttggaattaactggctatccgttcacgtgggagaagggcaggggtactaatgcgtggattgaagtcagaattgatcgtgtcgtggtgtcccaaaactggttagatatgttccccattgccaaactgctcaatctagaggtatctacatcagaccattgtcctctgttgctgttgctagataatgctataaaaactactgctaaccgatgttttaagtttgaaaactcttggctccgtgagccaatgtgtttacaaattgtcaaagaaacttgggaaggtggagttgactggccgattacacaaaagattcatcaatgtggggagaagttgcaggtctgggggagagatttcagtggaaatttcagagatcgaattaaagaagttaaagctgatatgaaatgttggaagaaaggcagagattcggtagcagttcagaaatacaaggaggccgaagttaagttgcaggatgttctcttacagcgtgaaattttttggcgtcaaagatcgaagcaactttggttaagagaaggggaccaaaattctaaatacttccatgctatggctagctccagaagaagaaataactccatacaaaagcttcgaaaggatgatggtacatggtcggattgggagagtgatttggcccaggttatgactgcctatttccaaaatttgttcactacatcctcgactgattgtagagaagtggtaaactctattcctcaggtggtttcgaatgagcagaatgattgtctccttcagccaatttcagatgaagaagtaaagaaggctctgtttcaaatgcacccggataaatcacctggccccgatggtatgactccgggattttttcagaagttctggcatgtcgtaagtagtgatgttatcaaccaagttaagggtttctttgattcaggttctttcagttctgaattaaatgaaactaacattgtgcttattcctaaaaagaaacatcctgagtctatgagtgaccttagaccgatctcgctttgtcaatgtattatataaggtaatttctaaagttctagctaatagaattaaaggaattttaccttcggtcatatctgaaaaccaaagtgctttcttgtcgggtagactaatttctgataacatcatgatttcgtttgagataatgcattaccttaaacgaaagaggatgggaaaggaggggtatatggctttaaaacttgatctcagcaaggcctatgatagagtggagtgggtttttcttgaacaaatgatgctacatatgggattcaatcagaaaattgtttcattgatcatgtattgtgtctccacggttaagtatagcattactcatggtagtaatataatggggccgattataccaagtagagggattcgccaaggtgacccactgtcgccttatctctttctcatttgtgctgaggggttctcttcactagtcaatcggtttgtacaaagaaggtggataactggttgtcgtgtggctagaggagctcctgttgtatctcatatgttgtttgcagatgatagctatgtttattgcaaagctaatgatttcgaagccaccaatgtgcttaatctgcttgctagctatgaacaagcttctggacaaaaagtcaacattaataaatcatctgtgttcttcagtaacaacactaatgca

SEQ ID NO: 247900 - DNA, 809 bp, Cannabis indica
actattccattttgaaatggaaaaagaccattccaatgcaacatttgaaaaaaaataatatttcttaattaattttaaattttattccattccattccattcacattcaaattctcattcttattccccttcttatattttcattccttctaaccaaacgccacattagttactaagcatatttctaccaaacttttgatagtcatttcagaatctaaaatccaaacatatataagcgcagatatataaaatgtaattaggcacattatagttctccaaaaacatcaagtcaatgtttactattgctagacaaaagcctctcatgaagttctttttgtcctctctacattcattaattttgaaattaaatatatatatatatttcaagcttcaataccctactaattcatcattatctttcatctcataaacaaaatctcccaaagtatattagaaaaagattagaaacaggttaatactgctaagattggtatttattattaatattgttcagctcttatattaaattaagcaaagcaataaagtaaagatgaatgagtggagatttttattggatgtatttaatgtgtatgcatgtaataatcctcttctactactatcttccaatactagtgtccaaggactcatgcattgacaaaatttgcaccatctatggaagatgatcttctagtacatatgatcttacaagaagagaaaaagaagtaatgaaattgacaagatataactgtaaagaaaatgttttttttaaaacatatatatatatatatatatatacatatagaggtata

SEQ ID NO: 247901 - DNA, 531 bp, Cannabis indica
caatcatgaagatgacatggaagaacagtatgcacggctgaacattgaagaggaggaggaggacagcctagtgtacgaaggtggggttgatgatctgcaggagatcgatgacagatggttgttggtaggcagatttttaacgcataggggagtggattttcaagctatgcaaaataaaatggcaacattatggcagccgggaagaggtatgtatgtgaaagaacttgaaaacaatctatttctttttcaattctatcatgaagttgacattgaaagagttttggatgggagcccatggacctttgatcgggtgccgttaatatttgaacgtgttcaacaaggtcagaatccaagaaccatcattctaaataaacttgatttttgggttcaaatacacaatttatcaacggggtttatgctggaacgagtggtgcgggaccttggaaactacgtgggaacctttatcagagcggatccaaacaattttattggtgtatggcgggattatctacgggttcgggtacgaattaa

SEQ ID NO: 247902 - DNA, 534 bp, Cannabis indica
acttaggagaaaaaaatctcattatgtataatttacatccaagattttttttctgactcataaatggtagtttaaagaatttcgttagactcgttaaaaacatgttaataaaaaaacttaaggatttgtcaacaagagtttatagttaagttgttttgaacttttgaactagctactcattattttggaggtaaatcaaagaatatgttatgtggagctttaaagtaaatatacttcatctcaaacaaatttttgagtttatttttttggttgacatatattatgtatgaaggggtaacattattaatttttatataattttttaaaataatatgagaagttaaggtgtacaaacaggtcagcttaacatgtaactacaaaattttttatgttttttattaaatgaaagtttgacatggttcatataacatttttccatataccttgattcttcaaaaatgtttttcatcattatatgtcacatgttgtcatctttgtatcactaactcgctatcattttggcttaccaaaaaa

SEQ ID NO: 247903 - DNA, 610 bp, Cannabis indica
tttcagttgtgttaggttgttgggtggttctctttctaaaatttttgatttgtgtaacactattagcagcgggatccgcccctaataataaatacatccgctgctaatagttttttaaaatattttattattagtggcagattgcaccgccgataataaatatttctccgctgctaatactatattattattattaatttaatattaaaactacttaatagcggtggaatcatatatccgctggtaatattgagattattagcggcagatttgtccaacccctaataattccgctagtaaaaatcatttttcttgaacttaggttgcgcatcagacgaagattttaatcccaggaagcatggatcgtgggttgaatgtgtgtgtaagaagtatttgtataatttattttatttgaactgtaaatttgtttatttggccggctgaaatttttttttttgtaatatatgccctatattatttatatatataataaaattgcattatttggagaaagcttgagcttttgcctcattcaatactgacaaaataacacaaaattaaattaaattatatatatatttttggtgaattagatgagtatgtattcatt

SEQ ID NO: 247904 - DNA, 514 bp, Cannabis indica
gcaaatcaacgttggtattaaaatttttatcggcacaaaatgaaaagtgttgggcaaaataattttttttagcatgtaaatgtactggtaaaagtttaaattttaccactgtttgtaaatgtgcactagtaaaactttaacatttttgtcagcgcagtttacaagatgcgctgataaaagttatttttacgagcgcgcggtaacaaactgcgctaataaaagtgacatttcttatagtgttgtgtcgctttacatgcatcgatcgatcatatgatactcatctcattagatactttctattcgattataattgacaacaatataatacctcgccatgaaccaatgacaacattcaagattgatgcacctctcaactatttgaggtgcatcaatcttaccctcttgagcaggtatcttgagtcccagatgcctactgaaattaaaaagcgtgataaaaaaaattcattgcatactctgaggtgaagatggggtaattatttcaaagtacatttga

SEQ ID NO: 247905 - DNA, 557 bp, Cannabis indica
tcactttgcaacaaaactagctgatcaaaacatctcatcaacatcgatgactgaagcatcctggtggaaatttttttggtccctgcaattacctgaaaaggttaaaatttttgcttggcgtgtgatccatgatgcactccccgtggcaacatctttagtcaaaaagaaagtcataaccgatgctacctgctctgtatgccgaaatgcttgggagtcaattggtcatgccttttttggatgtcgatacgcaagggctgtttggcgctgtgcttcttttacttttgattggaatatggctgctgctttatttaaaggtgactatttgaaacatctctcttctacacactctaaagctgaaatggaacacatcttttgtactctctggtgcatatggtatgaacgcaatcaggtagtccatggaaagtcggcgcgaactgctgcctcacttgcttccttctcttccaactacttgcaaaattttcgtacatcgcagcagaaatatagaacaccagcagcaaatcctcctctgatttcggcaaggactccaccacctgcta

SEQ ID NO: 247906 - DNA, 1264 bp, Cannabis indica
tgatataatttcattatatcaggtggttcatattccactgcaagacacgtgtcactttccgaagtgaagtcgaatttcgggtataacagtattttatcctttaaacacttagctacctataaatgatatttcagtaaactaatataattacataaatgagtactccaccatttatctctattaagccaagctcgaaagaaattatcatttctacttttatgcatttatagaagatatatattatgtatctatgattagcgctcccactcaattgaataattgtgtccttaatctgtatgtcacgagagaatctaattggtcgactttaacgaacaaattgaagaacatagataatacaactgaattagaacctaaccatctcaggattgagatcatttgatctaagatcaactataagatattgaattagatagacattatagtaaatttattatatcttatccaagttcaatatcggtcccttccgatgtatactctatacatccaatctcagcttactttaccaatgctctggaaaggacatagcacttatccaaggtgtaagtaaattatattgtagattatcatatcagtgaaatcttgtgtactaataaatcataagaattcatttaataacataatcttgattactttcgactatgttgacaccacaataatcaagaatatcaatataataaggatttggatgaatttataaatcaaacaaatgatcatgaaataaacatgtgaaccaaataacacattaaacaagtaatgaaataaatctgtttttttattgataaaggaatattcaagattacatcgaaatagagttttatttatggcacaaaacccaataaactcccacttgcactagcataaagcaatcagtacatttcaattaatcttagattctctatgtgcttttcaaatgcagtcactgtcaaaatcttggtgagtagaacagctaggttgtcttcagtatcaacctttttcaccagtacgtcccctcttaccacatattctctgatgatgtggtatttcctctcaatgtgtttactcctcttgtggcttcgaggctctttactgttggctatggcaccagttttgtcacaaagtaaaactagttgtttttccattccaggaacaacaccaatttctgtgaagaactttcttagccagaccagctccttagcaacctcagcagcaactatgtattcgacctccatggtagagtgtgatattgcggattacttggaaattc

SEQ ID NO: 247907 - DNA, 870 bp, Cannabis indica
cactcattattaggttaacaaattatgagttgacaaaatttgagcaccattataaggtcccttaatttacatatatgcatatataatttcaaatcatcaattatttttcatgtgactctcataatagtgatttagtttatatattggaattgggatgattgttagtactatagatcaattatttgctatgtgcaatatcatgatagagctgtcctttattacttgtcataataattcttgttttattcaatttaattttaatattaaaacgagattaacgggtgctccacattcaaggagttcaaaactgttttctcatcacttgtcacaatatataattatattcaataatataaattcttacataggccacatcaaacacataattttctataccattttactaagtgaccttcacaagggtataagtttcttagtagaatgataaaattacaatttataattaggacggatcttgagtatgagttgtattgggtcttaaaaaaaataattttttaagatactataatttatctttatttggggtctcagcttgagtggccctaaacacggtcttaactcacattaatctagcctagggctagccctgctcatggatctaggttcttagtgtacatatgtacacccaaatgttcttaaatgcattagattgagaattctgtttatcacatttcataaggtgttttaagtcttattgttagggtttataatacacttaagaaatatataaatcagtgctttaatatagaaaactctaaatcataaatctataaaacctttgctaaattaaagaagaagatgataataaaatatgagcggaagcactaacctgaagccattgttggagat

SEQ ID NO: 247908 - DNA, 783 bp, Cannabis indica
aaaaaaagataagattttttttctctttttctttgttaatgaatttttgaaattcccaaggactaagcaagagtgttcaaagtcctcattcagttgggaatgcttaaaaaatagatacaagtgcctaagaatgttaaaattgatgaccatctagtaggttcgagcgaaacgggtttgattcacgtcatcaagtcaactccacgcaagtgtgaaattgacttgggggaaaaatgttaacctagaaacttatctcggtgacatggacatcaatgtttgacacatggaatgaaggatgctgtcaaggagttgagtagacttgagtcatagcagtcgacctgggaggggaccctagccctacgccaatgttgactcagggatatccaggatggaagttcatacttcaataacttgaatccaacccactatcttacccaacatctagattgacgttgtatgtcaacttggatgctgggatgtcaacctggggactgggttgtgaactgtcttcagtaaaacaatcataactcactcaatattaatttgattgatacgattcaacttgtgttttgaagctatttcaatgctctatcaattaatgtctcacacttaaatcacaattctgaagttatcgatcctaaattttaccctaagtgagttacaaaaataagccccaagttacctgcagcgggtcacgcatggctctaaaaaatgactattcgcatcgaaagttaattttgatcattggatcatcatctacggtcaaaattagccaatttagatttt

SEQ ID NO: 247909 - DNA, 595 bp, Cannabis indica
cagttcatgtcttaatcggttgtaccattatataatatacatatataagtgcctctgcacttactctgtaattcaatttattccaacataatctcaggtcagttttcattctcttttctctcttttataataacaggcaatacaaccgctcacaatacggcgaagatggcattggggctgcactatttcttctctttccaagtctcgttagagctgttgtttagcctccttatctaaaaaaaaaatcatatatgaaatcatttccgtcaattcgtttttttggtcttcttaataaaataagaattttgaagacattttcacaaacagaaggtgtatacttattccaaaagtgaattggtcgtatctatacgtgtatagacctataaattatatttcaagcaaacaatattaaagcccacatgactttctgaaaataataagaaaaaaatcattagctcaggaagcatcaataaattaatctcaaaatcaaataagtgatcttttgttttcatttcttgaaagtttacaaagttaaagttaaactccattatggagtaatgattacgtacctgaataccagaacatgagtaatgag

SEQ ID NO: 247910 - DNA, 884 bp, Cannabis indica
atagatatcgttgattggcctagtgttccatatacattgttagttcatctatgggatgatgttgaggtaaatcatacttccaagttgattcatttaatttaaatatatgaattgttaaaatttgttttatttttttgtaggccacatttgaagttgatccaaattatgataaacgctacattatggaatctatttcaaagaaatggagggatagaaagtcacaattgacaaagatcatattttcttatttagaggaccctgagtttgcaaaggataatccaacaacattaacagacccgccaaaaaagtcaaatatcacaaaggaacagtggaaaacttttgttgcttctcgagacaatcctgagtttaaggccatacgaaagggggcacaagagcgacgtgctaagctcgaatacaaccatcgatctgcaagaacgtcattagcgcaaatagaggcaaacttacaaaaagaacatggtacatcagaacaaattgatcgagctttaatttggaagaaatcacgaatgaataataaaggacaattcttagatgagtcaactaaagaagtggctgaaaggattgtaagtattcactaacttcaatcttttataactaacaatctagtaatgttttatatatataaactaataatcatgtatatttgtgtaggatgaacttttggagaagaagggcaaaggtgaggtggtggagattggctcaaatgatgtcctcactcaagctttgggtaaaccagaacaccgtggtcgtgttcgtggtaaagggttgtccgtgtgtcaacgggaggtgttcataaagcctccacggaccactttcgcacaattacaaaaacaacaactccaatttcagcaacaagaaaaacaaga

SEQ ID NO: 247911 - DNA, 895 bp, Cannabis indica
agtcaaaagttttctgggtttggctagttattactgtcgattttttaagggtttttctaagattttaacacccttaatcgaactcaccaaaaagaatcaacgtttttgtggacagactagtgtgaagtaagcttctaggaattgaaacagagattgatcacaactccagaattagccttaccatctgataaagagaagtttgtgatgtattgcgatgcatccagacagggactggggtgtgttttgatgtaagctaatcgggtcattgcttatgcctcccgttagttaaaggtatatgaacaacgatactcaactcacgatttagaacttgccacagtagtttttactttgaagatctggcaacattatccttacggggaaaagtgtgagatttacacagaccacaagagtctcaaatatttttttactcgggaagatcagaatatgaggcagaggcgatggttggagttggttaaggattacgattgtgaaatcctttaccatcccgagaaggcaaatgtggtggcagatgcccttagtggaaagggtcctacgcaagtgactagttagatcaagatttcaaagcacctagcagatgatatggtcagatcaggtattgagtttattgtaggtaaacttaataatttgacattgtaatttgatcttttagacagaattaaagcatctcagttaacttatttagagccagtgaagatcaaagaggaggttttagatggtcaagctatagatgttacagtgttaggtaattggatgctgttgtataaaactagagtttgtgttccaagtagtgtcgaacctaaaaaagagattctcaagaaagctcataccactctttattcactgcaccctagaactaccaagatgtataaggatt

SEQ ID NO: 247912 - DNA, 513 bp, Cannabis indica
taagtagatttaagcaggttgtggtgcatgttttttgatttaaccaagtttgagttttgaactcaaagcttggagatttaatgggggattttaattcacggcgtgtagagttgttttgttgctttagaaatgttcattggggtctaattagcaggtctggaaagttcggttgagtttggaaacgttttggttgggggtttcatttttgtaggttttctgggtaaaaccggctacccgaattttgcagcagggtgggaaaaccgatttttcgcagcttgtcgtttcgtgctagtttcaggttttcaggcagtttattccctgctagtttggggtatttttgtattaagttgcagtaggttagagcggttttaaaaccttcgccccggttgtgatttagcgtgtcacttatctgtgttgtgattgttacggtttaggagcctgtaattcgtcgagcagatcgttccactcaagttgaccggcacacctgaattcggaattgaggtaagattagta

SEQ ID NO: 247913 - DNA, 948 bp, Cannabis indica
aatgatgttgtatttgtgtttggcaagttacattttagttttttactatatttttgtatcttatgatttggtggctcttttttatttgatattttagtataaattgtaggttgtcaaattgtgtggttagtgttttgagtgtttgttgtttatggtgtaatttcattgatttgttgtagttctataagttactaataagtgatttattatgtttaagtgatttgttgtgttttatatataatttagcgattcacattatcatatatgtattattttagtttcttatttggtgcttgatttttttctcctaagtgtgtttgcctttttgtgtgtttttatgcacactgtgtgttataagttactattttagtttcttttcgatatatgtatgtatcagcttatgtattgtataaatattagtttattacttttgattatgttatgatatgttatacttcagtttttaatttatgtgtgttttttgtgtgttgcagttgtgggaatattgagtcttttttttgcctattgtgatagaggtatatatatgagttactaagggtgtgtaatgcgcatagcagttgttcatttttttaggaatgagtcagttgttgaaggcgatggtttctgaatcggagaagatggtggttttctaatatatttcagcaacaagtcccacgcgtattactttctattttcggtatgaccagaaacggtatatcacacaattaaatgatgcacaagatatccgtaaatttgttataataggtatattattaaaaattaccctaaaaaatttgggatatgatttcgtcccgtgatgtactttcacggaatgtattacgtggtacattagatgggtctcagggtacattaaatgagtgtcagggtacgtttctacttttttaaccctaattacccctagatcaatctcagtcgtcagatcaaata

SEQ ID NO: 247914 - DNA, 793 bp, Cannabis indica
ttgcaacgctagttgcaataggggtttttatacgattttttttgttacaatttaggttacaacgctagttgcaatatgagtttctatgtagaattctgtaaaaatgcaaaaaaaaaactattttgaagtgtaaaaataaaaaagcccctaattttttaaaaatatcactaactactcacaaaacggcacatctaaaaattattaaatatcactcatacctaataacaatcttcatatatatagggacatgattttgtcccgtgatgtactttcacggaatatattctgtgatgtacgtcaaccgttagatgggggagaatcatgacctagaagggctcatttgtgctcttcgccaagaattgacgaggaagaggtatttgatcgtgttggaccagtggtacggagatttgagttcgagtgaaggggatagtttggatttggtacatggatttccaaaaggctatggaggaacagtgatagtgacgagaactacagagatcttgatttgggaatcaacgatcacgattggaagactaataattatcgaactgctcatgttcttggttagttattttaaggagaattttcagagattggtgcaaataaagagaagggtagatccaacaatttttttcaggaatgcatagagcattcctgtgattccattggagaaggttggttgcaatatgagaactgaaagtcgacttcaaaatcgattttgcttaaggaggtagaagtcaatttcaatcgattgaaaatactctagggaattctagagctgtaatcgcatatg

SEQ ID NO: 247915 - DNA, 1525 bp, Cannabis indica
aactgaacaaaaaaaaaaaaaacaaattacaattgagatggttgacattagactaatagaacgacaaactatgtacacacgtgtatactatctctaggcaaacgttccgacgtgacctcttatgcattgcagtagacaatgaatctctgattcctactgttgcattatccatggttagattcactgcataccagtgcggagcactctcagtatccaataggggtatcaccatctatgacaaagtaaaacaagcaacgtcataaaaaaaagttaactaaagaaatgtcaaaaaacacaaaagtatcaagaaaatgcaaattacattgtgacataaatttaaatcttcattgtaataaagagtggaccactgttgctccctctccatcctcctcacagtcttcgatcttccaagtaattgtctctgcacaataagcacacacaatagagtacatgttaaattaaagcatagtcgacaaagtattaaagaacaaatacaaaaggttcatgtcaatttttaaaaaacaaagttcgtacagaaattattgtgggcataaaccatgttctcgttgatccaatgtcattgcacttcctctctcgagaattcattatttgagcaaagtaatcaatgagctgccatttacacaaacagtatccattatgttatgattcatacaatgacagtacaaagatgaagaactaaaataacaagattcatgagcaaagcattcaaaatcaaatgcggtaagaagaaaacaattagctcaactttcaagtatgcttatgtctatttatatacataacaaacataactaacataactaacaaaactgtcacaactcacaaaacagttaggcaatagtaaatagggaatgtgccttcaaagcaccaaaagcaaagtcttactttctagaccatatacaacagattacaataattaaagtaatgaactataaaaattagaaagcaaccaaatggcattttctacgtacactatttgagatgtcggactccggtctcatgcattggaaatcccgagtatcaacctcaaccttcccaaaatggtctaacacttcggtgaaacacaaaacatataatcaaatacaataaatgtactgatatcaactacataaataatattcaacaaacacgagattacctgggattattggcgctagagaaaatgtaacgaaagaactcggaaaattgattctctcctccagaatctttgaatctttccaaggcagcagcatcaaaatcaatccttaatggtctgctcaacttcctctttcacaataatagggacttcttctccccaaaagttgatatcttcaaaagaatcttcaaaaacagccttctcaattggaacatcgacattatcttctgatagattaagtgaagggacactcaatgcatcatcgaccgcctctttggatttatccttcgtcccttcaccatccttttggtccacacccacatcatctttcttctcgatctctcctttaaaagaaagcgagcgctgaacttt

SEQ ID NO: 247916 - DNA, 1846 bp, Cannabis indica
caaccaaaaattgtataacaaccaacataaaaactgccggagaaatactttaaaaacttaaaccacaaattaaaaaaaaaataattaaaaaataatataaaaaataattcccctaaaattaattattatattaaaaaaaaaaaaagaatgtgggcccaacactaatacccaactcagcactgaatctgaattggccaaaaggaaagagaagcatagccagtggaaacgcaaaaacgacatcaaacacattccattgaccactgttcaagttctgacattgttcggaaaatggaaaatcagagagaggaagcggcaacggcagcggcggctgtggatgtgagaccggtgccgttgccggagccaaaagtaggggttgtggtgttcctgttgaggttccaaacgctactgctcggcaaacgtcgctcttcaattggtcattccactttcgccctccccggcggccatcttgagtttggtcagtatataaatatacatatatacttttttaaattcgaaatttgttatatagggatcagatatcaccatctcttgaattaaaatgaattgttgtacttttatgtttcgaattaactttaatgtactcttttttttcctagggtcatcatcatatatgtatatagtagctttcattcgtatgagtttccttcccaatattcctctactagagaagcatgagcccaatatctagtttggactggctggagtgataaagccattactttgtaggtttaaggcatcaattttaagatccacccattgttctcttacttgtagtctttgaccatgttttgttaggagagagctttgaggattgtgctgcaagagaagtgaaggaagagactggtttggacattgagaagatagagtttgtcactgtcacaaacaatgtcttcctagatgaaccaaagccctcccattatgtgaccatcttcatgcgtgcagttctgaaagaccctcaacaagctccccaaaatattgagccggacaaatgtgatggttgggattggtatgagtgggacaatcttccaaaacctctcttttggcctttggaaaagatggtcctcagtggcttcaatccctttccaggtgtctagaactacttatcaataatagttattatgtttatcactctcactttctcaattcaagcgaaatgggttaattaatgttaagcttttgtagtattttgtttagggacccttgaactgctccaattgatgtttttgttttgtgctttagagtctgcttttatcaccctgaaaattttcctactagctcctcagataaattaatatgtgatgaactttttattggtttggtgccgagttcacactcaaaatgttgagatgatagaatcttaacttgttcaatggacataactgaagctttgcttactctttagcctgagctgaatatgctatgaagcagagtgtttgatcctgacatggaaactttcttttcaacttgggaagaagagaagtatagattagatggtaattatctttacattgttattgctatgcttaattaataaaacgaaatggtctattggttcaaagaaaaagaaatgatctacatcactgctcattctaattctgaaacaaacttaatttaggacattctgtttcatattgtataactaggtaactaagttgccatttgcggtgttattcaacttttatatttttttattatataaatatactgtacttattgagtgatataatttaaaatatagtattttaatagggaaatttcattaattgatcctaataatacaacttatatcaaaaattggacccttttattttgggtaaataccatt

SEQ ID NO: 247917 - DNA, 532 bp, Cannabis indica
aattatcattatatatttaatattaaaaaataaaataaaaataataataatccattacccttaatggtattccttacaaaattggtggggaagttttccctttattttctctcttatttaatgaacttctctcttttctaattttaataatacaagtaaacaaatgtaagggaatgattattttactattgattcccattaccataaatgttattatggtttagtggcttgaaattccttattatttgagctattgctcttcttttcgacaattaccgtttagtgagaattctttcttttaaaaataataatgaataaataaacatttgacaaaataattaaataaatatagaaaaagcgagcaaaacaataatagcatcttttattcataacaaattaaaatatagtacaaaatttataacggcgtacaataatttaaagagaaagatagtattagattactactatatagtaataatatttacgaaaaaaaaatgttgaagcattcaaattaagtaataataaaaaatta

SEQ ID NO: 247918 - DNA, 1105 bp, Cannabis indica
taaacataaaaactcaaattttactaatactacccattaaaaatacacccgtatatataaatatatatttttcattaaatatttccaactactactcctgatcccatttatatattgatcaacacctggtttcacattttcattataataacatatcctattttgttattaatttcttcttcttcttcttacttagatccatatatatatatacatacatatatatatatatatatattacactaatattagtctattaattttctagaaataacaaaatcatatttacttgaatagcttagaaaaaaatatggaagaatcgtttacctatggcaggaggtgatggcccatacagctatgaccaagaattctaatctacaggtataaatatatataaatatatatataaatatatatatataatttatataatatcttcaaagatataatattacttgaatatattattaattgtaatatggtttaattacgacctttattaattttgagtaaaattaagtatttttttccacttggttttaggtaggttttgtaactaggatgttgttgttaattaatctcagttttagtcgatatacccaaaattttataaagatatcctatttttaacaatttttatttttaaagaaaatatatctttaatttatactaattttttttctaattatattctcaaaaaaaaaaaatatacttattaattaaaaataaaatatattttaaatatgaagaccaaaaaaagtaagataaaaaaaaataaagttttattagaaaaaaacaaatatatatgatttttttaagttaactattaaaattaacatcaaataatgttaaaaaattaaaaatgttaagtgactttttaaaattaatttaaatattttcagtttttttgaaaataattacataagacactattttttgtaaaaaaattacttttttacgttaattgaatttttttttttatcaattttttaaccacacatgagactatacagattgaatattatttttgaatatttaatcatatcaattcaaacgttagatgaggtgttcaaaaattttaatacaatcttatatacaattaaag

SEQ ID NO: 247919 - DNA, 1104 bp, Cannabis indica
gtacacccatttacaccctatagcttgccttccagggggtaagggaacaagggagtaagttttgttcctgatgagagcaagaatctcatcatccatagcacctttccactgaggcatctgaagtgcctgagtaacagaagtagggacagtggaaacactgaatactttgggcttatggacaccagctttagctctggttgtcatttggtgactgttctgtattctaggaacagggacagtggaaactacaggagacagtgagatgggagatgagtgtgaggaagaggcaggtgtttcatgatgagtgtgagatgggagatgaatcacagggattgtggtgacacgagtaggaatgacatgttcaaaaccaggaggaatctcaggtgttgatggagagtgactatgcacagagggtgtagtgccaacactggaatcaggttgaacagcagactcactgacactaggtgatgtattgttagagatagtggtgtgtttgatggaaggaatttgagcagacacataccagtgttcaggatttataggatctggtttggtgctgagtttggaatagggaaactgatgttcatcaaagatgacatcacgagaaatgtacattcttccattggaagcaaggcatttatagcctttgtggttaaggctgtaccctaagaaagtgcaaggttcagacctaaactgcattttgtgtttattgtatggtctgatgtttgggaaacattggcaaccaaatgtcttgaaccagctgtaatctggttctttgtgaaacaagacttctaagggtgttttatgattgagaacaggtgtaggtagtctattgtgtatgaaaacagctgtcctaaatgcctcatcccaaaacttgagaggcattgaggattgagctagcaaggttagaccattttctactatatgcctatgcttcctttcagctaatccattttgctcatgggtagttggacagggatgtctgtgtagaatcccaaactgttgaaggtacttaggaaaggttctaaattccccaccccagtcagtttgaatcattttgatctgagttcctaactgtaactcagcttcagctttgaacatttg

SEQ ID NO: 247920 - DNA, 1003 bp, Cannabis indica
caaaaaacttattagctgctatttgagctgctcgtcctggttcttcctgatgtatacacaccttgtgggatttcctgggtcgagaataacctcttccaattcctcaattggtttcaataggtttcactcatcttggactcagggcttaagatcttcgtctttcttctcattttcttgtgccaagatcgccatcaactaatgatcgactttcttatgttgcaactcaatgcgatagcaattgcgagccagcatctgttttccacacaccactcccacacattcttgtgtatggaatttcaaagataggtgcttgatcgaactgactacccctagtccaatcagtgctggacgacccaacattatgttataagccgatggtaggtcgacaactaagaagtcttgcataacagtggtagataggggtgcctcgcataaggttaatgcgagctcgattatgccaagactagcaatgctgtctccggttaattcgcaaagattcaccgtacaaggtcttaatttggcctttttgagccccattttccgtagagtctccttataaaggatatttactgagctcccattgtctattaaaaccctcttgatccttttattggcgagttgaatggtaatcaccaatggatcgacgtgaggataccatacatttttctcgtcttccttcgtgaatacattgggagattcctcggttttcaccttcttggaaggttctggggcagatgccgattgctcgttctttatctctttaacatatcttttctaggctttattgctttcccctacaatatgaggcctcccaaaataaccaggatctcctctccttcaacaggaagaggttgtaacccctggtttttgggttattgggtagactgggggggttgtatccctggccctatcttttcacatactgtttaaaatggcctcgagcgatgagactttctatctcatctttcaattggtgacattcgtcggtcgtatgccgaatatc

SEQ ID NO: 247921 - DNA, 602 bp, Cannabis indica
cttctttttttgcagaaaccttcccagcagaagaagagggcaaaaccaccaatagagaagcttacaaaccagattaaccccaggtcgaaactcggctccactcaggtccacactcacataaacccgaccaagaagcttcgcgttggtcacccaacacgtgcgatgcgccccgtgtagaccgagacgcgaagggtaacaggctttccagcagccttgatacggcagagagcgatggaattgaggtggaatccagcagaggaggtggcgaaatcgggcggaggagaatcgccggaagatgagcagagagggatgagagccgtctgtgaggggaaattttaggtggggagtttgagagctagagactccaacattaggcgagcgaatgggcaaggatccattgtcgttttgtgaccttatgatgtcgtttttggatttcgattgaagttttttctctgcgtttttatgggttaaaagagagaatgggagaatggcaaaaccgttcttctttttggcagccattaatagtttgtaagcttctctactggtggttttgccctcttcttctgctgggaaggtttctgcagaaaaagaagaagaaagaa

SEQ ID NO: 247922 - DNA, 876 bp, Cannabis indica
tgtatactctatacatccgatattggtaaactttgctaatgccctggaaaggacataacacttatccaaggtgtaagtatacctatcgcagattatcatgccagtctaaatccactgaattgacaaatcatggaaattaaacttttgaacatataatcatgattatatttgttatcccaatttttgcactccgacgtggcatcacatgatggtgacacgtggaataacctttgagtatctgctcggagggtatagtctgaataggatgcctcataggcatgcctagagaaaagcgatcagcaattcgcgcatagcgataaacacttagtgaattaagctttcgcaccatgagtcatcaaagaaatccctataacttaggaatcagatcacagcgatatggcaagctgtcctaatcccacgatcagtgtattctacatttatcatgcaatctttctgcttagaaatctttctacatttataccaggaaacttgttgatagtgtggaaacttgggctggctgtttgagttggccgaaaagcttcagggagttgcaggagagaaagtgcctagccaaacccgacctggctgagttgattatgaatgctatctattcagctactctttaccagttgtggagaaacaggaatgattgtctctttaatgccatttgtcacttagtttcttttcttagtaaagagattaaatgtatggttaaggctagagtagttgggtttcattgtaacaatgtaaaaggaaaggatagttatatatggagggtagtgaatagttggtagctgcccttctccttgtgtggcggttggttgttgcctccgacctttgttttgtatcttgcttgttcttttgaataaaaagttt

SEQ ID NO: 247923 - DNA, 809 bp, Cannabis indica
gggcacaaaacccaacaggttgatgctatcactagctactcagtttgacatggagattgaccaagtggatgtaaccacgacctttctacatgggaatctagaagaagacatctatatggagcagccaaaagggtttgtggttaaaggcaaggaagatcatgtgtgcaagcttgacaagtctctatatggactgaaacagtccccaagacaatggaacaaaaggtttgacacctttatgaccaaagtggggttcaacagaagctattatgaccactgtttgtactttaaatgttcaaaattgctaaagttatctacttgctactctatgtggatgatatgctaataattagcaaggagaggtcaaatatcaacaaggtcaaggatttgctcaagtcagaatttgaaaagaaggacataggtgtggcaactaagatgttggggatcaacattttaagggacagaggcaaagggaaactcatgctacatcaagaagactatatcaacaagatcatagaaaagttttctatgaaagatgcaaaggttgtttcacagtcgattgccaaccaataccttatgtctaagtcaatgtgccctaagaccaagttagagcaagaagagatggctaatgttccctactcgaatgcagtagggtccataatgtacttaatggttagtactagacctgaccttgcttatgcaatcagtgtgctaagcaggtgtctagtcctggaaaagaacattggaaagccataaaatggcttatgagatacttaaaaggtacatctaagttgggattggtctactagggt

SEQ ID NO: 247924 - DNA, 517 bp, Cannabis indica
tcaatcaagattctcaatcggaacttgaacccaaaaaaaaaattagattcatacatggaaaagaggtcgttgagcttgatagaaccattggctatggcagtgacgagtgttttgctaaatacccaagagcatcacccttcaagattaacaaagaaaaaaaaaacaatgtgatttatgacttgtagtacatggaaattttgaatagatttagaaaagaaaaaaaaaagaagattaaactattttttatacctgcctaaagagaagcattcctcgtcgaattgcaaaaattgtttcatgagggttgttgttgttgccaccagttatggcgtcccagatgcctgaaaccaaaggaagaaccactcttcttgatatcgacagtaatgggttattgtggatttgaattcttggtgttacttgtttttgccgtttattttttaaaaattgattttatttttcattcttattaactactattttaaaatctttttaaattagtcaaattttcatttatatatag

SEQ ID NO: 247925 - DNA, 773 bp, Cannabis indica
ggaaccttggtgtatctttgacactgttcgcacttctaaatatactctatacaatccttcttcattgtgggctcaaagtaaccctaacagaggatatttttgaatagccttggtcagaagtatggtctccacaaaaacctctgtaaagctcgtgtatgatagaacttatctcgatcctgaatatgcacctcaggttttgcacatataaccccctacaataaagcttcccatctagcatcacatattaaggagcctggtactggaccatcgaagaagtagctatgtttgccagaagctcccctaaattaaggaactagtaaatgggccatatctaggaatttgaatgacaaacaatggcatttacccctgtgtttcaatacatgaagcttcctaataggtcacaagcaccacttcatattgaatgatctctaggcctatggcgagttttgcaagcatatcaatgaatgaattttggtcttggggttcctgacagatgttgtaacttttaaaccgttatagtagctcctgagacatcatcacatattgttgacctcgcttctagccaaagatagtgagtcttaattaaagaaattagataaaataaatgataaaaagtagagaactgtaagtaaagaaaacactagaatttctacaagttcggccatgtgatagtggtaataacctactctccttcaagttgtattgacttatgagacaaaaaataaattattctctatctaaagctcttagagtggatctctgagtaattctct

SEQ ID NO: 247926 - DNA, 794 bp, Cannabis indica
ttccctcaatttgacctcaaattttttcaaactaaggttgacgtctctatggagcatcagggaactcaataccccgatcttcaatatagggcctactctttagccgaaggaagcgtcgttgggccgcttcgcttacaaaccaagttttatcaaaagttgaagatggtgggttggatgatgaaccctcctcttcattaccccttgttcttttggcacccataatcaacaaaaactaaaattttttcacaaacgaaatttttttgagaaaattaggcagcacctccccttatatttcttgatttctcaaaattcaaatatcaccaaaataacacaaataacaccaatggcaatccacaatccacaatactcaaaactatactccaatcaatcacaaaacattccctaatactcaattaattccaataaaccaccaaatccttcaatcaatctcttaaaataagaaaagggatgatacttactaattgaagaagccactaatccacctccattgttgaatatccttgaaaagcttgaggttgaagatgatgaatagtgttttcggatttaggtaagaattggtgattttgggtgtgatttttgaagaaaaaggatatttaatgagagaaattgagtttttggatgatttggattgaaaaattgataaatgggtgaaaaaatttgaagaatggatgaggagggttggtatttcggctgagaaagaggttgaatgagggtggaaaaatatttttagggtttggttgaatgagatgaaatggggtgtttttataggtatt

SEQ ID NO: 247927 - DNA, 1157 bp, Cannabis indica
accaattgtaaattattgattatcaaaaaaataaaataaaatatctcagtttggccaagtcaaaacttgattattgtaaaattcgaaagagatcaaagtaatctcaaggtttttttttgatagaaaacaagctgcaagaacaagaaacaagaacaccaagcagcagagaaggaacagaacaatccctcctaaacttcttcccttgacctgatagcttcttttgcaagatcatgggcgtccatattgaactgacgaggcaggaaatgcaaagatgcttcagggaagttggagaagagcatacgtatccgagacacaagaccagaaagagcagagtggtcttgccattcactgttaactttggagaccaaattcaagcaatccgagaaaacaaacttatgactcaactgagagtccaaacaccacaataaactctgcaatagagcctgcccttcagcaaatataggagtagaagcaccaggcagaaggcgatagtgagaggctacaacacgatgatgtccaatcttgaagataaaaccggtccctgttaaaacattcttgtgatcaagggctgcatccacataaagagatggagaatcctcttggaaatcaatagtttgcagccgctgaggacgatgagtgatgggagtggcctctaaatccaattgatctgcatgatagctttgttgagcctctgtaaataattaataacaaactcttccacattgttaggaataccagatctgttaaataaaattgagtttcgagtattccatatatgccagataagagcaataaagattgggaaatcctgttttgagatattttgcaatgcctgaagataaaattccctaatgtctgttctatgataatcatagtaaaattgtttgaatcttgaaagcttccaaatgttctttgctctggggcaacccattagggcatgagtaatctcaaggttggaacaaatatgtgcatatacaaacaaaaaataatcgtataagttgatgacttaggtttatggtgcaagttgcttcaaaatttatatatgtgcatacataaagataaggaacatattaattcttgtggtacctttgaaaagtcaaacaagacaatgtactatattaatattattatctttctttataaattatacacatata

SEQ ID NO: 247928 - DNA, 1197 bp, Cannabis indica
tagattaaagttaaaaattaattattttagatcaacttaaatcaagtaaatttttcattaatgatttattaaaataaatagactaaatatattatattttaattagaaaataagtaattagttagtgaaatatctagatagttaatttctatttacttaaagtttttttaagttatatttaattaaaaagaaaattaatatttaagttgattttattcaagatacttaaatatttgatatttttcttagatatttaattaaataggaaaattatatttgtgttgaaaattaatatattaattaattttggaccaacataaattagaataatttttcaagatttattttatgcaaatttggaaaatgtatattttaaattctgctacaattaatgtaaggtttcttgaactttatatgtgtttaaattctattgttttagaaattcatatttagtatgttaaataatatacatggtagtaaatctagattttggtaaaataatccccaacagtgggaactcactttagccgctttagaacccgagtcttgggaagatgtggcaactcccttcttacatatgtagttgaacattttggatgacatatctacaattaaggcaataaaaaggagcaaccatgaggaatcatactattggttgtaacgataccatcgacaatgaaagtgactgttgagatttaatgccctaaattttatttttttttgaaagaaagtatgaaataaaacttttttttaatataatcagatttactaattaataaaatattaaaaattattttatgttgcatggttcacatgatttctttcatgataataaattataagttttatataaattctattaaattcagaacatatagttattcatgattatagtgttgtcaacacagtagaatataatcatgattatatatttcaaagtttatgtctcatgatttgtcaatacactggatttacactgacatgataatcaacgatagaacttacttacactttgaataagtgttatgtccttcccagagtattgacaaagtatgctagaactacatgatagatttatttgctcacttatgctccctaaagactagggtggtgtttggttggaggtaatgaaatggaatggaatggaaaggaaacaatttttattccattcctttgtttggttgcattttaaagttt

SEQ ID NO: 247929 - DNA, 763 bp, Cannabis indica
agatcctggtaaaataaattccaacatatccttaccataagtacgaggtgaacagaagacctacacagctatcacctcccgagttcaacaccgagcactaaatgaatggaagaaataagggaaggtgagcagcatgacaaagctacaaatatattcaagtcaaaaacactcaacgacatcttccaggtgaaacaaagggtaagaggttgaccaacgaccaactatcgtcttagacttaattactaagaccatcagcaagtctaatgttgtacaattaaccataatggacttattatctagccttatacagagtttccaaaagaaaccacgcataaggccacagttgtatatgcctccaaggccaccccaagaccctaactgtggtccaaagaggtgaaaactgactgctcccttggagccttggccttggctggctaaggttccaagtcctagaggccggccagacccctattccaagcttagaggccgactaggaaccctagttctaggcataggccggccagcctagggacgcagtccctatggctggccagaccccatggaagcaacccatggccggctaggcttcaaacaaagcttccttggccggccagcatgtgcatggatcaaaacacgtgattttcaagaactcaaacatgttcttcgtgttcttcgtgactcaaagagcaatcacaacgaatgtcagattcggttctttttcatctataaatcacacattgttcatcctatggctatcatgcat

SEQ ID NO: 247930 - DNA, 1702 bp, Cannabis indica
actcaaggggggtactaaggcataccacacagacaaatgtaaaagaagccaaaagtaaaaaagcaaaatcaagtagaatatatatctaagcgaaatatatattgaaatgttaatataagaaatgtcctcacccaaaagcaagtcctaaaaaaaatattaagggcttcgggacgggccttaaaaactgtctccccttagaagataataattaattgtctgaaaaaaaggaaaagagactgtagatgtaaagaaaaagaaaaatagttgtagtggtgaactggctgaactggtcggcctaatcaatgcggggaggaagacgagggccctgacgttcttcaagcaaagcatcaagccttttcttcttctcccgaaagcgaacgagggcttcctcaagtttgggataaaagtcaagcttaatgttctggccattcgactgccaggccatgtagacgccatcgtcaaaacgcttgacgcagtgctttcagacgacgggggtcaggagctcatcccttttagcctttttcaaggcttggtccttaaagtccctcaactccttcacttccacggtcaggttggccgtcgacagcaagtccgcctggtgcagctcctccaaggattttaacttagcggccattttatccatagcctccctggcttcccgcaactcgcgcttagccttggccgtagcctcggctctgccttcagctccttccgatgcttcgcctctgcctgagcctccctctgctgggcctcctcccggaatgccctcctctcagctaacaagtcccgcaaaatcttcacggcctcgtccatgcccccaaattcgaacatgacaaacccgtgattaatcagggtcttaagacaaaatataagcaaaaagaaaggaatgaatcgcaagaactcaccgcagccagggcagcgctgatgtcctgaacctggtaaacaaagttcattgaggcacaaaccgcgtatctcttgcctgggaattgagtcagatgggagacatactggctggtcatctcagaggcaaagggggcgagggtaggaccgacgaagcggttaagccagtccgtcaggggatccatgttcaggtcccagggaattctgaaggcatcctcttgcaaggtattctgttgctcctgccgcaagaccttcttcagggcttccacctcagcgtagccccgactgaactcgtctagggcttagttgtgtttggcgattcgaagcagttgcctctcttcgtctgcggggaccggggtgagaacgatgccatgcggcacgatgtacccctccacttcggacgggatccctgagtcgttgcttgcagccggagtgtccctcctcctgggcctcttagaagactcggtctcaaccatcttacccttccccttgcactcgcgggcagtccaatcccctcatcctcctcgacttccccttcctcatctatcaagactattgtgcctaaaggagcactggacgaggacctcccgggggtcaccagtttggatgaggtcggaggcagagaagcgtccggactataggcctcggcgagggtcgccaggatatcttccattggcttggctactgcaacaaagaaataaataaagtgttaaaataactatgagaaggcatgcacccaacaacaaagaaataaagctaatcctaccccgactctctaattcagccctagcaaagtcttgaa

SEQ ID NO: 247931 - DNA, 1241 bp, Cannabis indica
tttttgctcgtaagcttttttagacacagtcaattttgtgagttcaatctatgccatttaatatgttacgttattgtgaggtataaaaactcaatgattgtgctaaaaaaaataaatgtctcaagcctatgattaattataattttttttattacatacaaacatatacgtcatgataagatagcgtttttttaatatttagttcataaaaataataataatttaaaattttaaaataattataagtaattaatattatatattttgaattttgcacttagttataatattttctttaatttcaacattttgaattgtgatcgggtcgttaattagggttgaaaaaccctgtagatagtcaatgtaagcataaactacaacatttgagtgatatgaacagtgatcgataccaattcaagctttttgactaggaaagtcaataagagcattaccaattagtgtaataattgaacttagaacatctcgggtggtgattggatcgttgattaggtctgaaatactttataattattaaacgtaagcttagaatatgaatctgggtgagatcaatggtgaccgatactaatctaagccttttgactactaaagttaagaagaacactattgattagtgtaattgttgatcttagaacatctcgagtggtgatcgaaccgttgaataggttcaaaataccatgtagttagtctatgtaaacataaatataaaatttgggtgagatcaatgatgacccatgctaatctaagccttttaaatactaaagtcaacaagaacactattgattagtgtaattgttgttcttagaatattttgaattgcgattagaccattgattagggtcgaaataccctgtagatagtcattatgagcataaactgtgaaatttgggtgatatgaacagtggtcgttacaaatctaagtcttttgactaggaaagacaacaaaaacattatcgattattgtaataattgttaatcttagaatattctgggtacaaatttctcttatgctatttgtcataagcatatttgcacattagtcattttatcacccgataaatagaagcttaagtagttagaattctaggagaaaagagagacgaaaaaattaagagaaaaattcacagttaactgccaccatggactgtttatgtgtacactcttgcacacgcaatatgttctatcggtacacctaatatttttatttcaaaatttattttaaa

SEQ ID NO: 247932 - DNA, 852 bp, Cannabis indica
aattatatacgcgttcaagtcatcttcaatgtaggaaatgtttaataatatggtgtgacttatttgctaacgtgtcgtgtgctgctttttatatatagagaaatgtataatggatcgatgtattaatataaccgaactttaccaattaagtgtggcttgctttcatcgacgctgtacaacttataatggtgcatttcattagctttataaacaacattaataatatcatcaattagttttttttttttaaaattaaaagatgtaataaaaatcttcaagagccggccccttcaatcaacatagtgctctccattattccgtcttcaactccatccatcaaaagaagctatagaacttatcaattgctaaattaattaggacaaatttaattagataattttccttttttttttttatataggccatatatgtatataatggttacatttttattgtaaccatcatggttacgttttttttagccattggatcagcattaaatggttgtgattaatttggaaattaaataaaataaaaaaaaatgacctgtaacctgatattaacctgttaatttatttccttttaaaactttaattaaaattaattatattttaaaattaaattaagtattattattaattaatttattgcaatttattattaaataaggatcttttagcaatttatttttttacacttaaattattttaatttttacaacaaaactcttaataatttaaaattatacacatataacttgataattaaaattttattatacttataatattttaatttaaaatgattacattttttttttttgaaaacataaaatgattacagtttattgta

SEQ ID NO: 247933 - DNA, 1108 bp, Cannabis indica
tatctaataataatactctaaaagaaactaatgtgaatgactataatattttgatggatacaattaaatttatttcaaccaatcatatttatttttggcgagaatgactattttaaaaaataatatcacatgttttggtacataatttttgaaaaaaattgtagtacactcattaaaaaaaatgtattttgataaattttctatttattttgacataatttttagtatgagtgaaattcggtcactgaacatttataaattataactttataaaattaatcatatgattttgagcaatttttagcgatctggcagatttttggtagttttgatttaactattttttttttttcaaaaaacaaaacagaccgccatgtcaaaaaaactgtaaccaaaactgattactgaattcgatgatggcgtgcctccaaaaattcaattacgatctagtcagtttcaattttttagattttatgaacacgtctagtttttagattttttttttattaatcgtatatattgtagttatttaataatacttgtaaatttttaaaaacattaaatagtttatagtgctgaaaatagagatcaaacaattatttaccacacataataaaaaaataatcacacatataactaaatatttaaatttattttccacattataaactactccaaaaaaaatttccataatttttacacacatgattattattagtcttcctctcaaaaaacaaaaaagattatttatggaccatatattatggatagtctctagtctatatggtccatctccatatagcccaactatcttaattaattcctactccatgaaccatcatatacatggaccatagtccatagctacaaaacaaaccacctaaaacaaagaaagtctccatattaagaaaaccaaacatgtcataaaattgaatcagtgatgttatcatagtgatgttaattgtccaataagtgtattccacatgttattatcataaataaatgtgtgtgaacttataaataaatagaattagaactaaaaaaaaattaaaatacaaaaaaaataatgaatataacaacaataattataaacaatatttaatattat

SEQ ID NO: 247934 - DNA, 1306 bp, Cannabis indica
ataaaactataactataattattttttttttcagatgatagtgtgttatatatgtaagtgttgacacagtttttcatcaactgatctaagaagatcataaaataaaagagggccacgatgaattaatctaattaaaaaaactgcagaaaattaaatggacatcatggatttatagtagtttacccccatgtcgcgacgataaatgagactacgtctatttgtagttttattgattagatccaacacgccagagttatattcttaagagtgtgtggataaaagtacaacaaatgatttctaggtgaaatcttaatcgaaatttatgaatataagactcatgggagacttggtattcataaaactgatctaaattaaaggctgtaaagttattgggaacattaaatcaataatttgtggaaaaaggtgtgtatcaattgtgtttgaggattggtgtcgactgagtatggtggtgttacgaaaaatatgaatagctacgcaagtgcacgtaatcaagtagtactcacacaggtgaggtcgatctcacagagaattgaattgattaccactaaattagacttataattctatttggcaaatcaataatttgttggcaataaaaataaagattaacaagaaaataaaattcagcaataaaagtgcttgatcaaggatgagaaattagggagaagaataatgtttatttaattacccaattattaatgctaattactgttctctttctcaatgtgaataacagattataaaaattaacctaattcttttcagatcttttaggccctaactcacatgttatctaatcatctctgaaatagactaacatataatcagcattaagcaataatctcaatgtcacttaggctatgaaaatacttttgtttcacatcaaaacctagtttatcaaattttagcattcccaaatctcacttttcagattttgaattgggatcataaagcatgaaaaaggtgattaatcttaaacatgtaattaaacacaaatatggataaattcacaatcaagaaaggagaaataacaattatcattaacctaagaaataatttcattcaacattcatcatcttcccaaataggagtttagttcataatctccatagtcaaatccataattaaaattaaaacaaaaataacatggaaaaattaaaagagaagaaagaactggttgaagaaatcgattcggatcgccaccagccactcttgatgtaaagaccgcttagtttaatttggaatttagcagttaattaagatttaattaggaaaattatttata

SEQ ID NO: 247935 - DNA, 532 bp, Cannabis indica
tttcactaaccatatcttttcccctaatttcacccactctcactctgttgtaaggccttctagtcgcaagactcgacctttcaaggagtatatgtacatgggtttctctagttccaatggccaaggctcttctctccatgtgcttgacaaatggtgtttcaagatttatcacggctcattcaccattcctttggatattgttgaagaaggagattgctttgtttgctctccagatggcgaacactctgccactgccactgccacttttgttcttggtgttggatgcttagttactttggtaatttcagttatagccattgttcttgtggtagtttagattaaggaaagaaagattgttgttatgagaagactcatcggcatccgtttgctcgccacgatgagactctctctcgtctgcgcacacaccggcgctagaaggagattcaaaatctcaaatccctttatccgattccgaagccaccgaactccaaaaaccaaccccgatgcggagctcctagatctcgttttggta

SEQ ID NO: 247936 - DNA, 5044 bp, Cannabis indica
ttcttttttttttttttcaaattgtcaattctcttttattcgttcagttcttttagtttctgagaatgaatacattattaaccattggcaggactactgctggtttggaagctaatggatctacacattctttacttcctcgtctcccagcatttcaaccgaggctgctgatcaggtattttaataatttgaactctgctgaagccatttgaaagtggatgatcaagctgtaatattcttaacatcttttgtttcccatttttgttgttttcttgatttggatttagtgagcatggtagttggtatgctgtggtttcctatgaagcttgtgttcgcctttgtcttcatgcttgggctctaagcggttctagtgaagtgcactgtttccttgagaatgaatgtgcattactgcgagatgccttcaggtgagttggctcgtcttgtttttgtttagactctttagagcacttccatttggcgccagtaatgctcatttgttggtcatgttcaatgacattcctttttataatactaagcagtctgttaggtaaagttggaatacaagaacattaccctgtgagaatctggccattatagtttagcattttccccatataatacagcagttttctataacatgtcaatgtgatgttttttgtagaagtagctcttttgcttctttttttttttttgcttttactacttttaatccctgacttcttcttacaactgtagtctacggcatgtttttctccaatcagaggacgagttaatggaacgacagggatctgcagagctagttagtcaaggagctgctcaaaaatccaagaagacaattggaaagataaaattgcaaggtaaagatagagtttttggttttctttttatccatgaaagtgttggtaatttttataccattctcatcttttgtcattgtatagtgcgtaaagtgaaaattggttccgacccacttccttcatgcggcaccttaccaatcataaactcttcagtgctcgagaaagaattacttcaaagacaatatactcatttgaaatcaaatatatcttctagttggaagtctatacagaatgttcgtctagctcctaaggtccctacaaatggctccttttctcgctggagtttggcttatgcgaaagctgtcagtaggtacatgaagcaggtctctgaggtactaaaagtaggaacaacagatttatgcagaggccccttaccgtttgaacaagtgattcaaggtatgttttcatatttctgtgttcattaggtatttgatatgagttcaggttttattttgtgttttctttataaacttttatattagtcatctttcttgctgatatgaccaaatatgacagctctatattggatgcactattagcataaattattttttggtagaggaagaatatttttctttcattttagttaagctgttgttgttgttgtttttttttaatgccattcttattttgttggtctctggatgacagaaacgtactctttcttgtcaaaattaaagagctcatctgatgaggatgtagttcgtatgcgaccaggatctggtgaagaacatgtgttgtacgttcttgattgctttatgttgaaacttcttaattcccttttccttgtgtggataaaatatatggttcctcttgtggtgttaatacagctttccagatggtcttggtgattatttgcttgttgatgtacaagattctaaggggcgtctttatggtcgagctcaagttcaagtagctgccatagctgatcatccagtatgatttttttttcttcctatgtatgtgagaaatacacaaatattggactctaaatctttgttaatgcaggatgagaagctgcggtggttgccaatattcagtgatccagaccataatacagttggcagagtacaattgcacataaactatacaagttcaagtgaacatcctaaggtaatatcaaaataaaattgacaaatttcatacaagcaaccaattatgatgcaatatctgtttgatataggggttgtcaacataagattctaactatagttatatgatataagcttatatgaatctattcccgagatgttatgattccatttatgcagaatctttgttaaagtttgcaagtttgaatgatactatatcactcttttccactgcagtgcggctctgttgcagaaactatggcatatgattatctactagaagttgctttgaaacttcagcaatttagccagaaaaatttgatactaaaaggcccctggaagtggcttgtgacagaattttcttcatactatggagtgtcagatgtgtataccaaattaaggtaatgggatttttaaaaaatgtcaaaaaatatactttgccagtggccacggtttaggaataattgagagaaatttctgaagaatactgtgatctgttaatgatttcattgttatggatcttaaagttgctactaaatttagtcagtatcctgtttgacttgcagatatctttcctatataatggatgtagctacacccacagagtattgtctgaacttggtgcatgagttgctatctcatgtattgatcaatggaaacaacagcaatactttgagtcatcaagaggtcaaatctaatctatatcttatattccttattatgattgacgtttttcttttgtttcattgttagaatataaaatcaactcctaataacgagatttgatgctatttctttttctttatggcttcaaatcacgtcttcttaaaagtgtgagttcaattctgacatggcttattgatatgtatatcagaaacgaatcctaggagatgtagaagatcaaactaaaggcatacttgctttggtttttgaaaactacaagtcgcttgatgagtcttcaacctctggaatgatggacatttttaggcaggctaatgggttggtggcgcctgcattggcacctgctgttaagctttacactcttatgcatgatattttgagtcccgaggcacagttgaaattctgcagatattttcaggtgttgtatcatgtattttagtttcagcagatcaacttggtcctttcagtagttgcctcttttaaattccttaataaattcgaattgacaggctgctacacagaagaggttaagaaggcacttgaccgaaacagatgagtttgtgatgagcaacaatgagggaacacctgtcgatatctcaatatcttatgagaaaatgaagtctctgattttgaatgtcagaaatgaaatttttacagacgtggaaattcacaatcagcacgtgcttccaaggtttatataaaatatatattgtagtttgatatatttcttactcattgtgggtttactttttctgccttttgaaattttctgaaggaatgatcatggagaaaatttattactttgctgcattagatttttttggtgtcatctaaatcattgagaaattaatgtcatattttttcgtctctgaagtttcatagagcttccaaatatttcttcttcaatatattgcgtggaactctccagtagattgcgtgcattcctcgttgcacgccctcctcctggaccgtcccgtcctgtttctcaacttgttattgcagctgcagaccttcaaagggatcttcccctctggaatgtcaagtaataacaattttatctcagtttattcttttaatgattgttgtgtttattcttttattaactcgtgtaaaaactttttcagtcctgttaatggtggagttgatgccaaagagttattccactcttatattacccactggattcaagacaaacgagttgatttgctcgagttttgcaaaccagataaggtattaggtgcatttatacgtttttcacaagcattaggttgttccacagaaagtacatatttattttatacatttccagaataattttgggttactaaacactttctggttactcttaaaataattggcaattgaccgaaaattcaacactttcaggtgaaatcatgcagtgttgggtcacagctttcaacatctccatttattgatgagatgttcaatcgcttagaggggacgatcaatgaataccaaatcattctttgccgctggccagaatatatttctctcttggagaaagtattcctctaattagtcctgctgtctaatttttcctttgagacttgactaatatcataaacttacagtttttaattttattgaataggccattgcagatgttgagaaagcaacttttgaagccgtagagaagcagtttaatgatgttctggcaccattgaaggataatttgactaacaagatattgggacacaaatatgtccagaaactatcaaagggaacaattaacatctatttggtcccagatgaggttcgcttctttgttctgatatctcattaaaatataattcaaatgataaccatatttataataataataatgagaagaaatttctggggttttcagctgggagttcttttaaattcaatgagaagattgttggatttgagatgcccaaaaatagaaaccttgttgaagtcttggagttcttgctttcctgatgatggacaatcagtcataggagaacacctgaacgatgtaaaagttatgctgagagccaaatttagaaattacaggcaggcaattgtagagaaactggcagagaacgtaaggagctagctaatccttttaaatttttagttcattcattttattttttttttttttttttttccgacattacttctgaaatgcagacaagagtgcaaaatttaacaaagttgaagaacataattcgagactcgaaagaagaagcagatgtacaaaatcgaatgcaaccattaaaagatctactgatgaagactcttcatcaccttgatactgttgttgaacctcccgtgttcatacaaatctgccgtgaattctgggaacgaatgggacaggtaaaaactggagcggtatacatatggaaattctggatcaggactttagtttctcatttatttattttt

SEQ ID NO: 247937 - DNA, 640 bp, Cannabis indica
ctttttgatccacaaaacagtgatatctctcagaattggtgaataggttgatgtcaggatgtcaacctgggcggtgggttgtcaacctgggtgtagggtgctgaacaacattatgtaaaataaccagaactccctcaatattaatttgattgacgtgattcaacatgcgtttcgaagctattttaatgatttatcaagtcatgtctctaagccatattgaaattctgaagatttcaagtccaaaatttgtcctcaacatagttgcaattttttttttcagcatattacaagaaaacgatcccacagacgagattcaaactccaaaaaattgaccttcccaaaatacggtctctatatgagaccttcccaaaatggtttctcccaaaaattttagtatttgaaatcaacatgaacatggatcacctccagatctatcctagatctcctccataatcaatgtattctccgaacaacaccactaatgatgtagaagtttttgtcgaacaccatgaacgctggcaaaaagctttttatcgatcaccatgaacgccagtaagaaactttgattcgatattccgttatggcagcgggaccaacgatcagagatctccatgaaaagccaatgaaagaagatcaacaa

SEQ ID NO: 247938 - DNA, 973 bp, Cannabis indica
ttacaataatacaacccaatctccatcttttttccccaatttcttaggcaaaattatatcaatccttaattttacctcttgtttaattcgatgcactactgctgttggaggagtgaggtttttgcaccatagaacctcatttcgacacttccaaatattatatattgcggttgccagcacagtagcaaatatctgctgtttgaacttcgacactttcgttctttttactgatttcagcagctggggtagagagttagttgttgattccatcctatccatccttcaatgttctctaaacattccttgctaaattcaaaatcaaaaaataaatgtgatatactttcatctgctcgattacatagaagacatttactttccaaggtgatgttaaatcgcatcaatcgatccttagtttgcaatcggtttagaacagccaaccacaagaaaaaccgatgcttggggataagaaatctcccccatacctctccataccagctcttgcaacataagatggagtaaggagttgataaccctgtcggatagagtaattgaagcccgtaaattgctgcaatgaaactttcttcttaatttcttccttcactcgaactatttgacgccaataccaactattttggttggaacttgcatagtcccacaagttgtgttttttgagatagacacaatggatccatttgacccataagttgtcttgtttcgttgcaatcgccgacacatatttgaattttatatatttatatataattttcgaaaattaaatattgaaaatttatttaaagttggaaataaattttcaattattttcggaccaactttaatttataattttcattattaaaatataaataaaataaatgattaaataaatatatatattttttttaaataatgagctttaatcaagggatattcgatctccattgttggttctacatagttcttgttttagtgagta

SEQ ID NO: 247939 - DNA, 1115 bp, Cannabis indica
ctaactacgacgccatagggttatataaaaaaaccctgatttttcccaacccccaaccgacggcatagatatatatatatatacattctatacctatggtttttactaaaaaactgcctccaaatgtcaatgcagatattttcaccccctttagcttccctttttataaattttgttgaaaaaagggaagctaaagacttacattgtagtagtgattatttatccttcttctttatgtataatggacattaaatgttcaacaatatcgattttattcattttcttgcttgtctttgtatgtttcttttttcttttcctttttaataatatacataaacttttgttgtttgtttgccaactactaaggcacatcccatttatcaacttagacttagttcattgcccttttccgtttacaacactagttagagtgccttctcataatctgttaggccgataccaactaatctcatgatgaatagtactaaaatcagctgacttccagcccacatttcatgtattttttgattttttatgtgctgcttttcagaaaatctggattgctgaaatcttttgactaattatcgtagcgtggagaggatgacaaagaagaaacgaattcacaggctcccagagacttgccttttttgcctgtgttcggcctgcctattcttctgctaagtttttctattgtgcttttgtatgtgagaatttgagttgcttaggcttacatgatcaattttgtataaaataggatgattatagtcatgatcaattgtttatgtgtaattcaaagtttaagttttgttattttatttaatggtggtttatatttgtgtatatgtgaattgcacgatttgtaataatgtggtggtggtggtggccggtggggcagtgctctgatttttttttttaattttcttttgaaaatatttgcttcggttcataaccgaagcaaaaaagtcaattaccgtcggtgcactactatttgcttcggttacaaactgaagtaaaaataaaaaaattttagcttcagcaaagtattacttagtatctttattattatttttttttaataaaaagtacgaaaagaacatttaaccaaaaaaaaaaaa

SEQ ID NO: 247940 - DNA, 1098 bp, Cannabis indica
gctcaatacaatttcccaatcccgactctctctctctcatataactgttttattttaacttctctttctactatatgttgtgtctctctcccttttttagttgagtctttttcatataggccaatgactcattatgcttgcttgtcatttttgacaattgtgttagttaatgactaactaacttaactgaatgtcagttgggaagttaaagaataataccacatatacctatttggtattttatattttattaaaatataaatttgatactttgtatattcaataataatatacaatgtccttaatcagttttaaattttaattattatattaatgagagcaattttgttaagttaattaaatttaaattaagggtataaatatttgcaattagttgttgatttggatttcttttataaattttgacatatacgaaattgtgcttcttaattaaaaatttaagggttgtcaaaaatttctattaaactattgagattgttggattaaaaaattttcgtttaattttcactacaaaaaacaactacttctagtgacaattttttagtcacaatataaattttttgtgactaaatgtgacttttggtgacaaaaaaaaactacttgcgactaaaacatagtatttagatacaagttatcactaatttatagggctgaacatttctagcgggttcgacccgaacccgagcaacccgcccgaacccgaaccggtgaacctgaaatatttttttttgaaaaaatgttcgggcgggttcgcaggttgagtttttaggaatagcgggtttcgggttgaacccgccaacccgcctgccaacccgcaatttaaatatgttatatatatttttatttttttattacaatttatatatatatattaaattattaatttataaataaaaaatcctaaactttttttaaaatttaaactcttaattttttttataaatctattttcttaaataatataaattaaatatatttttatatataattttttattaaaaatttatatatatattgtactaaataatttatatttagaaatatataattttttttaataatatatataaattttat

SEQ ID NO: 247941 - DNA, 521 bp, Cannabis indica
tggtaaaatatatccaacaagtttaactcctaatccatagtattcgtgggatatttatagtagtttaaaaattacatttggttttccatttccatatattggggagtttacaataaacaatactcatgggctttctcatgaagtccagcccatggggaagacgatctactgactaggcagattagatttggtgtgatctggtcaacactgcgtacactgattgtgggcaattaatctgaattaattgcacaatatttgttataggaagtttcccttttaatcttgatacgatactcttttctgatctaacaactggagtttccttatttgtgtgtaggatataaagggaaccagaagggtcttccaggaatgcacagtctcatctctctggtctcgtggtaacggacatgtcttcctggtacggcttgctgagggcgaaaggctttgcgagtacagaaccaagatacgttcgtggaaggacatatctagattggtcttgcccattttatctttgttgagag

SEQ ID NO: 247942 - DNA, 2420 bp, Cannabis indica
gttctatttagtactattttagaaaatacagagtccattttatcatttaaccagttctatttgtactcttttacaaaacacaaggtttaaaatggtatttacccttattttaaaggttatttaaaatttttacccccgagctatgacctatgcattattgtgctccctgaacttttcaacccgttagaaatggtccctaaactattcacagtgttgtaaattggtcattctctcaagttttatcacacgtggcaacaaaatgataatatgactgtttagttagttgtcacatcataatttttttttttcaaattaattacatacgtgatatggtactgacgtgataactgtataagcagtgatatcatcattttgtttgtcacgtataatgaccaatttataatactgtatatagtttatgaatcatctttaacgtgttgaaaagttcatttgcttctcgcgacttcttttactataacttattatttatttccaaaaaattgatgtttaatgtataagttatagttcgggaagcaaaaatcttaaatagctttatttgaatgaggtaaagagaggcatatccaaacaatgagataaattcctctatgcttgtaagttgtaataaggacactcacttacctacaaaacttaactttaaatcaaatttttttagacatgtgaaataaggttgtataatttttcaccttaatgtgtgtgtgttatttttaaaatttaccttgggccatttattcagctttcttagactaattttgtgcagattttggttatttcaaatcatagatgtaaataacttctaatcagaattaccataaccggttgaagtagcatgatcaccctcttaagttttgtaaagatatcaattaatatcatacaaatcaagcaagcaagccatcacttaaaaacaaaatttcataggtaagaaaacctcactacatcccaaaaatagtgggtaaataaatgaaaaattaaacagcttgctcttcaaaatagctgccaaaattgcttggatatctaatatgttaaccactttgtctctgatatctacaataaatattcagagatatctttactactaactatcttgtcttcttaggctttagacaacttcttctttcttttcttcaaagccttgggcactttattctttcgaccctctctcttctcttctttcaccttctttttgtgctcttttctagcagctttcttatcagcaggagtttgtgactcagtttccgatgaatgcccttcagaatctgtcgagtcttcttcgtcttcatcactactagcctcggattcagtctccgcggaatttcctacaaggttcgcttcattttcctgtggctgatccccagatagagccggttgttccttagaaagagcctgctttagtccggtgatagtctgatagtacatatcgcccgtgtcctgaccactagtcagccgaatcacatcctcctcaacatttttcacatgatccaatgtctttggaatatatgactgagaaaagtaccaacataaaatattaaccacccaacattagcttaaaaactattatctttgtaagatattattgataccacaaagatttttatagcttgtcaaatatggtacctgcacaaatacagaatctgcaatttcttgctctgcagttacatcccctctcgacatgattctttgttgcagctgatataaaacaaaataagtcaggattttcccaggactctttcgaaaataaaaataagatttgaatgcagataaggtaatacctcttcaaggtaactttctacaccatcatctgcaatacatggatcaactataaaatcaaatagttctctgattgtcataacggccacaccatgttttttgaaaaaatcctgcatttcaccgaatgttttataaggttttgatgctgacttttaattgaaaaaagtagatatttatcagctttaatgttgtctggataacttacagaaacatgaacacaatcttcacgtaggaaatcaagggcatgaggatggtccaaatcaacagattgagaaacatcaattatatacaagtgaccctgaaaaacaaaagagaagactacttgtgaataaagatgcagagaataacatgtataccgtatcaccaagtcatataacaaatatagcttacctcataatacagtatgttgtattcactaagatctccatgcaccagtttgcacttttgatataatgtcctcatagcaattattatctgttaacaattcacaaagacattattcaaaataaatgaaagaaaaaccatcacatcccagtgaccccacggacataaaacaacttttagagcatgccttcagcagagcaggctatggcatgcataggtttttgttcctatttgcaaaaataaaaaaaaat

SEQ ID NO: 247943 - DNA, 580 bp, Cannabis indica
agtgagctgattttgtgaatctgtctactatgacccataccgaatcatacattcctgtggttctaggcattccagttacaaagtgcattgcaatgtcctcccacttccactcaggaagaactaaaggttggaataacccttccggcctttgacgttcagccttaatttgctggcaggttaagcatttggacacgtagtccaccacatcccttttcatctcataccaccagaagtagggttttaaatcctaatacatcttggtggttcccgtatgtagtgaataaggtgtggtgtgagcttcatcaaggatccctttcttaagctcatcaatactaagaacacaaactcaagctttgtacaacaacattccattatttgaggctgaaaagcctctatgccgaccaaccattacctcacctccaaccttgactagctcaggatcttctagttgtgcatttctgattctctctaacagatcagattgaagtgtcaagttgtgcaattttccaaccacaaacacaatccctgcactaaccatttcagaggctagttgaggggctatcaaaatcgtggtacaaac

SEQ ID NO: 247944 - DNA, 615 bp, Cannabis indica
agatagatataataccagtttttcaatctattctctgttcatatctccaaattcattctcttcttatcttagataacattccacaacttccagccttccatccctcaaacatcagaactttcacatcataatggattagtatattctacgtggtctacaaccaacagttcagaatccatagacccataacataatctgataagcatatctgggaaaaatcttaattcatctaaaataactattcttcccagtctattagcaatgcataattgagcctaaactgttcaaaattcttccattttagttctgtaaaatcatttcaacaaccatagactgcaacttcaactcaaaattccagccatgctcacaacataaatcaatagccatattgaataataataaaaaaaaaagcaaggtcgaaaaacaaaaggaaaaaactagcagaaagcccaattaacatgatgtatcatcaagaccaaacttcaaatgggaaagaagctaaccactgacgtagagcttagtagaagctttcgcgttcgtcgaagaagaagaagaagtagaggccgaaacagaggagcgaccatgtctgaattttaaagacaaggaagggaatga

SEQ ID NO: 247945 - DNA, 819 bp, Cannabis indica
tacttagttatgcatattcgctccaaatatgatattaatgagatttatatgcacagatgagaaaatttcttgatacttgacctatattaactatacttgttgaaaactcaaaattataggtcattatgtgaacttttggtgaacttcggacttgatttcaaacaagtgaacatgtgaatttttgcatatttgattttcttgtgtgtctgtatgtttaaacatatgaaatttaatgtatttagtgtgcctataacattgttttaactaaaatacgcttgaaacgaatttgtggtgctctacttgttgattttataagtttttaagcttaaaagagtgtttttcgccaaactttctcagttttcaacatttttcaatttcgtaagtttgtacacctcaaattttaattcatcaaactactggaataagaatttttgaatttcgttgcataaaactcattttcggtaaggttctagttttcttggcaattttcgaaaagcttactgtaaattgtcatttttcatcatttttctgtttttcttgtttgagcaattttgttttatcatatttaaggtatcagaatttttttggggtcatttgggttaaaattggaatttttagggcattttttagattttctggctgttttcctgcaccaaccggaatttcagttgtctgtgcccagaccatccagaatttcggatggcgcgggaaacaaaaaccaaaggccctttttgtcttttcacttgcaatttttcccctttaaaagcctaccaccaaatttttaacccccattctgattttataacctaaaacagcagc

SEQ ID NO: 247946 - DNA, 698 bp, Cannabis indica
tctggaactttcctagttacctggtccttaagtgtcaagtcattatccacgtgtcattttttattggtatatttaaattaggttaaataaaaaataaaatttaacgatcttgactaatcaaggtctaccatgtggccattaacttgacacttaatggccaagtacttaagaaagttctaaaattttagcttagatattattagattcaaaaattaaacttaaatatttatcagcaattagaatttaaacttagatatttatgctgtaaattactcatttattttaatatgaattacttgactgtaggcttatttaaatatgcgttaatgtatgcagcactacaaaaagtcttacttttagtcacaacaaaatttgtgactaatgataaatcatcattcttatgttgtgactaaaaggtgtgtggctaaatgtattagtcacgaaaattacaatttgttgtgactaaatgtatttttagtcacatttcttattgtgactaaaactaaattagtgacagtttgtatctaaatattatgttttagtcacaagtaagtttttgttgtgactaaaagtcacatttagtcacaaaaaatttatgttgtgacaaaaaggttgttactaaaaataacagttttttgtagtggctcattaatttatgttttattatcaattattagattttataaaaaaaaaaaaaa

SEQ ID NO: 247947 - DNA, 1216 bp, Cannabis indica
agtttttcgtactttatttatttatttatttttgaaagcaatgattaatttcattgatactaaataatgttatattaggcttaaggactatatatcatacacaagaaaaaataataaacaatacatttaactaacaaattgtttatctatataaagagtaagcacaactaattcatgtagagtcatattggccgaatgatatacatggaacaatgacacttctaaaaatatgaataatatacttgctacattctccaacaatgatcctagatcactgaaaaaagaatatctcctaataaaactagacacaattgttatgggatcagaattaacaatatgcataacaaattttgaaagaaaaattctatccaacgttactaaaattgtcagtcaatatgcttgaattactacaaagctccatcttcctcctaagtgaacattcgatgtttattccactccttctaaatattccgattgaaaataagatattccaaactgcataaaatacaaagaaaattaacaactaataaagatcactaaaaactatttttaatgagactgaaagtgtcatactaaaaaaaaaaaacacttatttgataaaaattttgttctctaacaaagcaaccatatcattagaagtcatcaaaactctaaaattgtcattccaataacttcataactttcaataacggataactttattactctaataattaattccaaaaatactctacttaccaaaaataaatagataataatatttttaaaataataataataataataataataataataataataataataataataataataataatttttatgaataaaatataaaataaaaataataaatagaaaacttccctgatttgtaattttagtaatgaatccattgtaaattcaaatttaaattgacttacaagaaccataaaaaatagaaaaattttataatgcacccatttaaaaggaatgcaccgatatatttctatctatttcagtatccgaaataatttttagttaaattttgtgggatatcttaaatagttataacgtacgtacatgaatatgaaaacaaaattaagaattaaaaaattacttctgaatgtcgaaacaagtagatggtgcatcaatacatcccttttaagaaagtgcattgtagaatcacccttaaaatatatacacgaaaaactctgaacaaaacctatat

SEQ ID NO: 247948 - DNA, 1186 bp, Cannabis indica
ttgtaaggtgtatttaattataatcaatatatccaccttattgatagctcatacactgtctgaataaaatcgtagctcaattgaaaattttcctaaaataattattcaatcagtctagaaatttttcgttctgcacccacagaatcgcgagcagtaagtgcgactttccttttatagaaaagaaaattcttgttttggttttcttcacaaaaaatctgatcaaatattttagaaaatttcacaaaggattagatatagacaactagaattagatagaaattggttgagtcatcaaagttaccctttataccttactttctataaatagaaaagctagtcatattttctaccttatataattcaacaaaatttagaaaacaaactaaacagctcagtcgaaaataagtaattaaattataaatatttttgttaattaaaaaataccaaaaataaaattaacaccacaaataccaattttgtagtcacttggtatgtgccagtcaaagtgtgtgaccaatgttatatagacaatttttttggtggtgataagtaaatgatgaatgcttaaaactctcttactttaccatttttaagttagttattagcctactcacaaagcaaataaacaaaaagctcattcacatataaaataaaagaatgctagggcttatttttggtacgttgtgttgtgttgtgttgtattgtattatattgtgttggattatattgtattgtattaatattatttaatataatattatatttggtgttgacttgtattaatagcttgtgtaacattatatttatctttactataaactcgaccccaactctgaaccccgtctggaggtcggggtcggggctgggttcaggactaaggccagggctaagtccaggtctgggttcggggttcggggtttggggtccagatctgagtttgggttcgggtctgggttcgggtctctgggtctaggtctgaggccgggttggggtccgagttcgagagccaagggtctaggtttgggtttggggttgggtttggggttctggtctgggttcgtttttcttacccattgttggtttgggttttgttttctggggttgttttgggggatttttagctgtaccggatgatggggatgatcgtgtaacaaccatttagttgtaggatgagaagtatttatag

SEQ ID NO: 247949 - DNA, 603 bp, Cannabis indica
tttactattactattagtagcggaatctgccactattacttgctgctaatagtttattcacaaaaattcccgctcatttgatttcaatttttattagcagtggagcattagcggcggaccacaccattaataatattaatttattaaaaaatatatatttatgaaaatatagtatttaataaatatttttttaaaattttccattaattatattaacagattacaaatatttataaagataatatttgtattagtttatttgaattaatcttaatattagttatttttaaattaattaataatttatttaaaatataatttttattagtttatatttacattttattttaattccctcaaatggtaaaaatagtaattaaaacataaaaaataaaaattagttgcaaacttaataaattttgttgttacatctgacacaaacaatagtagcgggtctcactgctaatacctgccgctattaatatttattaacggtggatgctaagttcaccgcttataactattaatagcgaccgattaatgcaatgaactcctgtcgttattatttattagcggcgggcccctctgcagctaatgtgtata

SEQ ID NO: 247950 - DNA, 714 bp, Cannabis indica
gtcaatgagtttggaggcacaagctcccctcattatttatgaaatatgaatggcacatcatttttttctccctcaccccatttttcacttaaactcctcataaaatttagaatttttttttaaaaaaaccatctttttttttgacaaaaagatatgcatctcattcatgtttggataaattatccaccaaaatagtttgaaaaagtagtacgggacaaaccccccatcatagccatgacttgggaaagaacaaacaattgtcgccaaccaattggctgtcttgttcgctaaatcgtttaacaaaaacacaagaaacattattaagatcagacattaaagtacaacaattagaataaatagctaaaccaaaaggagacaataaagaagctgaactatacaaggcatcaatgatgcttttacaattcgactcaacaacaacttgatctagtttagtctagctcaaagctttcttcaactcaattgcctccgccaaaagaggagagacacgactagacaattttttagaccaatgataaaggagagctccatgatgatcacaagccaaccttccaatcccaaaataaaaaccctcagaagtgagagaggcatctacattgactttaatcatatcaataatgaaaaccgattaatgctctacacgaacacaaggaccggaatctattctgtttgcaaaattttcatgagcaatcttcc

SEQ ID NO: 247951 - DNA, 636 bp, Cannabis indica
gaccctgtagtgcatctaaaaatgttgccaaaggttagcaggtacgtttctattggcttaccggtatgctgcctacacggtacgtggcctaaacctccaagagacgttgtggtgcacattggccacgtgtcgcaacacaagatgacacaggtagtcatttgtgggctagtttgcgtacgaacatatgaaccatggtggaaagagatagaggtctaacatttgctactagtttggtggcttatctcgagggcctgccaacatgcatggaggcatcgtgcctcgaggattggaccatggatgtatgggagtccttgggtgataaggaagactattcggacagtatagaatgggtcataattagaagcgttggcacgtcagcttagtgttggcatcttgccacacatgctaccttggtcacgactgacaaggtgagcgacggcgttgggatttgccttatcatagtgggaacctatggacagtgcaagtatctgttgagtattattttaccatgacactactacaaaaaggagtattttcgtcagttttttagtgacatttaaagatttttgcgtcggttcacaaaattgacgtaaaaactatagacgcaaatagtatttatttgcgtcgtttctaaaa

SEQ ID NO: 247952 - DNA, 1208 bp, Cannabis indica
aataataatttatgattttaaaataatttatttagtttttttttttaattttaaattattttgaattaaaattataatttaaaccaattatttatcgacacatggcattttgaattagaaaagggatccgttagaaaaaggaactaacggactaacaaatattgcgaccttagggactattactatcaattttcgaggttgaggactaacctgcattaaccttaagtttttgaagacttttgccacaattatctcttaactttaattaagttttacatatatatgcacgattattggaatttgttatgttacttttcgatgcatgtaagaacaaaaaccaaaagaaaattttcattaactatgcataaaaagacaccctaatatcaaataaatttcctcttattatcttatgcaaattaatgttaatattaacacccttatatcaaaattacccctctccttaatttttctaaatttatcaaacaaacgtgacaaaccatgtcagagttaccacgacggccagctcgttgctcgtccaccacaccccaaatcaaatgtccatattctcttcaataataggtaaatgttttttatttttttaaaaaatatttagaaaagtatgtagtttatttctaatagatctgtgtggttgttgtttgcattagggttgctttgtcatttttttttctttggaattgagagatcagatttttccggtgagatctgagttttttatgatattttgatggtatgttgataatacgttaatgttttatcgatgataatcgtactaaagttaaagatgaatttaatagacaatttttcgattgatttgagatgatttctccataatttttaggattgtctgaatatttgtttttttacacttttcgttttattatcaatattatatcaataggttttcgatacatatggtatcttgaaaattgttattttttatccatcacaagtgtttatcgatgctttgtctatagttgttagaaatttgttattttgtctccatcacgattgtttctcgatattttgtcgataatttctcaatgttcacttggaaaatgttgttttgtatacttcacgatggttatcaataatttatcaatattttctcgatgaaatgtattttttttattttgagtgtttttaatatttttgttggttattgcttaactaacttttttttgtatgaa

SEQ ID NO: 247953 - DNA, 602 bp, Cannabis indica
ttatttttaggttttgaaaaaaaataaatagtatgggtattttgggtaaattaataaagagttattagaatagtattgtataaaaaaattaataatgtattttttgtagaaggcatttttatcaagtataagaaatgaaacttccctttaaaaaatatatagggcatcgtgtcattattacctatctttcaaatgccaagatagagaaaacatatatattatgagatatataagttaaaatacaataaataatatatcaatcaattatgatgatggtgattgagttggactactcaattgtatcaaaatctatgtcagcttgatatatgctaaaaaaaatactttctttatttaaaataataataataataataataataataataataataataattaaatatgataataaacattgcctatcaatatatatgcatcatacatgcatcatcaaaaattgaggagtgctaagaacactctctatcacactctgttttgcactctctaatggggatttatgtaatccctcacttttgatttgaagtgtgagatccctcacataagacaaattttatttactatagtttcaggttaatttttta

SEQ ID NO: 247954 - DNA, 615 bp, Cannabis indica
tttcttggtgatttttccggtgattttgccggtgattttgctggtgataatgccaattctgacgacttttttgacgccggtagacactctgacaatttttctgacaccggcagctattctggcgacttttctggcaccgacagcaaactccgaaatagtcgtcaaaattggcattgtcgccggtaaaattaccagaaaaatcaccaagaaactgttttcttcatcaagaaaccagtttttcatcaagaaaccaatttcttggtgatttttcctgtgacaatactaattctgatgactttttcaacgtcagcgccaactctggtgactttttcggtaccggcagctactccgacaactttttcggtgccggtagcaaactccgttgattttttcggcacgagtgacaactccgccgatcactgtagtttcatttgttttattttttaaaaaaaataaatgtgaaggaaattttaatattttttatggtaattcaatcccgtatacgttaaatttttatttttaatgatcttaaattcagattccatatttttagtttgattggttagataataccatatttagtggtatttactttttatgtcatatttatcataa

SEQ ID NO: 247955 - DNA, 1359 bp, Cannabis indica
acgttgtaagctttgatactacaaataaaaaaaaccaagatgggagaccttttgcaatgtttcttggagtgaataatcataaacaaacaactatttttggtactgctctcctttatgacgaaactactcaaacatttgagtggttgtttgatacgtttgccacatcaatgtcaggaaagaaaccaaagacaattcttactgatcaagatgccgccatgactgaagcacttggttctcaatggccacaaacatatcatcgcttgtgtatttggcacatatatcaaaatgcagcaaagaatcttagtactgtatttgaactattttgagaattttcaaaagaatttagcaactgcatatatgattatgatgaagaaagtgaattttttgaggcttggaataagatgctaacgaaatatggtcttgaagataataaatggttgaaaaagatgtacaatttaagagaaaatgggctttggtgtatggtagagagacattttgtgctgatatgacaactacccagagaagtgagagcatgaacaatgcaataaaaggttatgtaagctacaaacatgaccttttatggttttttgagaactttgaaagattgcttgagagtcgtcgctatgaagagttgcaagctgattttagagcaactcaaactaaaatgaaattatcatttgaagttgaaattttaaagcacggggcaagcttatacactccaacaatgaccaacatgtttcaaactcaagtatgtgaaagttatgattgtgcaatgactttatgtggtgagaatgagacattgtcaaagtacaaagttgtcccagcaaagaaaaggtatctccatcatactgttcactttgattcaactgataatactgtgacatgttcttacacaaagtttgagtttacaggtatattatgctcacatgctcttaaagttttgtctgggaaaaatgtaatgaaaattcctctccgttataatttgaaaagatggacaaaagatgcaaaaattggaggtgaattagataatgatgtgcaacatgtatacaataaagatcctaaagtcaacacatggcaactcgttatcgagagatttgtagatttataactcatatagcaacaaaggcatccgaggatgaaaaaactatgattatgctatcagtggttttaaaaatattttggaaggtttgaaaagaattgaaattagaaatatcagttcaaatggataagtatgttcccaaaagaatgagaatcaacttttgggaagagatgaagatatcaacactatcaaaggagtgaaattaaaaggaaaatttcgtggtaaatctacaaaacctaaaagtgctcttgagaaagcta

SEQ ID NO: 247956 - DNA, 932 bp, Cannabis indica
cttccttggaaggttagggatgattccatatgtaaagtgagattattttgtatctttgattcacttgtaatttttatttgagcaatgcaagttcttatttcacttttattttcttgttcttcatccatcttatactactatataggggtgggcatccgatctaatccaacctttttttcctcatccgatccaatccaattagacctcaaaatccaatccaaatctgtttttttaattggatatccaattacacacctaaatttcaatattagcttaaaaatataaagaaaaatacgcagaaaactaagtatcactttttatttaagtttaatacttcataaacatactattcttacaacaacatttctaagtaataaaatacaacaaaacattatgaaaatgaatatactaaacaatcaagcgtgacaaattcaaatacaaaaaaaaatctaataaaaatataataaatatttattatatttttcaatattttttattatataaataatattttaatatatataaatgtaattggattggatcggtttttaattggattttgagattgacatccaataaccgatccaatctaattagaatccaacttttagcatccaattcaatccaattgtaattggatatccaactttttgtaattggattggattggatcggttcggttcaattggattggattggatgatgcccacccctactactatatatgctattatactaaatttatatatagacttagccatgctctttctatatatttttatttagttattgtagtaacagtaatatttatcttgttctatcttttatgttcattcttatttactttttattaaacatataggtttggtcatgctcttcctatgtgcttaaaaaattaaaaaaaaaagtaaatattaatgttcatttccttc

SEQ ID NO: 247957 - DNA, 593 bp, Cannabis indica
cagcatcagatcaattttaaaattaatctcctacttcggtggtaaccctagtaactcctctggaaagacatctaggaattcttaaaccaccgcaacatgttccggtcccgttggtgtttccttcgtagtatccaccacactagctaggaaactaatacatccatcccataacaaatctcttaccttaaacgccgagaataatggtattcaagatcagataccgaagctttcctcatagtttgcatggtatgtgccatcattctatgttaatacgatagtttttacttggaggtgtgcctcccaacagtccaacattgtcagctacagtggtatgcctagaagatggagctagtcaagcctttggaagtgtgtctacaataccatgtagaaccctatatgtctagaaagccgagagataacgtctccaactattcttcatctcctaggtaataaaacaatcatacccttctccacgtatctggtcgtggtattgatggtgctgcaccacaggcttcaaggactctatatggtcactactgacttcccaatcttcaaaactagagttttaaaggctttcttgtgatgagaatgag

SEQ ID NO: 247958 - DNA, 561 bp, Cannabis indica
tcaagggcaagatgcctctgagtctggccgcatatcggccttcttctatcaggcctttgaccttggtggcctcagccatgaacctttgaatgtagtctttgaaaggctcatattgtctttactttatttcaacgagatcctccaattgtgaaggtatttgtcttgaggcagagaattgaatatagaactcttgagagatttcttcccaagaattaaatcttcatagggccagcttgaaatatcacttttgggctatttctactagggttgccagaaatatttggcattgcacatctcagatacttattggagatctgtttggatctcaaagtattttaggtgtgttaggggatcttctttccctatgtacatattctaagttggcatcttgaactttggaagggaagtgcatttatgtatgtcaagaatggtgagccccttgaccaatccagtttaaggtttgatggtttcaggccaaccaagcccttaatcatgtcttatttgatccaactatgcttgcacagaaggatctgatgctgtaggtattggaaattattttac

SEQ ID NO: 247959 - DNA, 805 bp, Cannabis indica
acggaaaatgtgatggatggccgttagagtcacacgggtaagtttaaaacctattttttagcgggacaaacataagagatatttagaatgtcgggtttaagcgggaattatggtttcagaccattttgcccctaagcttataagttacttaaagtataagaaaagggcatttttgtattttacacttgaggattaggtggcctgctccaaggttgggagctggccactaagagaaataagacaatttttatcaattacccttaattaccattttttttaagaaaaatcaaaagaaaaataagaggttcatctttctctctctccctttgctcgactcccacacaaaccagagaaaacccagccaagctttcatttttgctagaattcagcaaggaattcagggtgtatcaagtggaagtaagctttacaaactcttatttcatgatttcgttaagttcttgttagttgtggcatgtaatttgaggtttttagtgttgttagggttaggtttgattttttgaatttattttaagttgaaattgattgcttgatactggtttggttgagttgagaggtgaatgggcaagtttgagtgagtttattttgataattttgttctgcagtaaccactgaagtcaataaaaaaaaatccaatcgaaaccttacttaaatattctaaattctaatgttcctaaaaatacaacctttaagaagaaataaaatcttaaaacacattcttaaatggataaatatccttttggaccctgtgttttgcaaaagttatcaattggaccatctgttttgt

SEQ ID NO: 247960 - DNA, 804 bp, Cannabis indica
agcggacaacattagagatacttcgaatgtctagtttagcgggattatggtttcaaaccattttgccctaagcttataattacttaaagtataagaaaagagcattttttgggatttttacacttgaggattaggtggcctgctccaaggttggcagttggccactaagagaaataagataatttttatcaattacccttaatcaccattttttttttcagaaaaatcaaaaaaaaataagaggtccatctttctctctctccctttgctcgactcccacacaaaccagagaaaacctagccaagctttcatttttgctagaattcagcaaggaattcagagtgtatcaagtggaagtaagctttagaaactcttatttcatgatttctttaagttcttgttagttgtggcatgtaatgtgaggtttttagtgttgttagggttaggtttgatttctgagtttattttcaagttgagattgattacttgatactggtttggttgagttgagaggtgaatgagcaagtttgagtgagtttattttgataattttgttctgcagtaaccactgaagtcaataaaaaaaatccaattgaaaccttacttaaatattctaaattctaatgttcttaaaaatacaacctttaagaagaaataaaattctaaaacacattcttaaatgggtaaatactattttggaccctgtgttttgcaaaaattatcaattggaccctctggtttgttaaatgataaaatggaccctgtattttttaaaatggtacaaataggaccctgaattgattt

SEQ ID NO: 247961 - DNA, 796 bp, Cannabis indica
tgtcactacaggtttgacaagaactgggtggttcctaaacctcagcaaccccctccacgggctcatctcactgaagcagagtttgagtacgatcctcaagcctactcaacaactcttgttcaagattttggtgatgacacaacctggtatgccgacactggtgctacagcccatgtcacatttgacaactcaaatcttgacactcaacatgcctttcatggatctgaaaccttgactgtgggagatggtaagaaactaaacattactcatattggtacttctgttattccttcatatcatcccagttgtcctttacaattaaaatctgttttacaagttccttccattaccaaaaatctagtcagtgtttctaaacttgttgatgataatgatgtgtttcttgaatttcacaaacactggtgttttgtaaaggacaaacaaacaggtgccattctcctcaaaggcaagcgtagagaaggtctttacatgctcagtaatggttcagacacatccaaatctccactacagtgtcttcttaccactggttttgagtcagcaccttgttcttgtgttcctactctttctacttcttgtaatagcatagctgatgtacctgcttgtactcaaaatgatatcaataaagactcttgttctaatcatgtgcctgctgcctatcttactacaaagcttactgatataaatatatggcatcacaaattaggccatccatctatggacaccctaaggaaattattgcccatattgccccatattggttcccttaagacattacaat

SEQ ID NO: 247962 - DNA, 757 bp, Cannabis indica
gccagactgatattctgaaagggcaaacagagattatgggttgcttgaagacccttttggcactcatgggagatccaagaaggcccaatgcagaggtagacccacatccagttcccgtctcttcaggagatgagttcattcttcctaatgattacagacattatgatgtggaagatgtactccatacaccccagaacatgtcaatcacgtccattggagatacgcaagatttagaggtataagttttagagaccgctccaacaacgatggagaagaagaggcagaggtggtttgacgagtacaccgaaatgaagaagaacatgaatccatcgatagctcatgtgaatatttacccactttggccctatgatgagaagctactgtatagtttcgaaattggttagtgagaaccattggaaacaagtatccgagggacgtcttcaccagtgtacatggcgtggcttggttccagaggctacttactaaaaaaatggctttttgatgatgtaagtttcttaactaagtattatttgttgttatttaaagttgttatttgttttattttttttaatattctaatgtgctcgtgctaacttatttctatgtgttgtacaacacttggatgcggctttccatatgatgagaaggcagcaacactttttcccatagttgtacccacgtaagtgtacattcatgccatcttggtttgcttcattgttaaagggtcagtgggacgcttggaagaccaaagcttatc

SEQ ID NO: 247963 - DNA, 564 bp, Cannabis indica
gcaaatggacttgcaaggggtaagaggtgatgttcgatgcaaattatttcctgccacactcgcagaggccgcccaacaatggtattccaagttgcctcctgggagctttaactcatggaatgctttttccttggagttccatgcacagtttttgtaacaccctaactagcataggcgtgttaacgtgattttttaacgtactgtgcagctcgttgctaatcaacgaggttattggaaaacgtgaataattaaaattttactttttaattaaaacataacatattatacttataaaattccgggatcccgtttaaaaattacaattacaaaagtttgctattcatttagaaaagttttgtcgcccagcgactaaataacaaaagccctaatgtcccgaggattgtacgctccaggcctaaccgcctcgacatgtacaaccttcatctgctcgtcctcacgattcctcagctttgcccttacctacacatggagataccattgtgagtcgacagactcagtaagaaaagcataacataaatatacaaataacccgggttataacct

SEQ ID NO: 247964 - DNA, 538 bp, Cannabis indica
aaaaaaaatctattaataataataaatttaacggaattaactattcacattaaccattcaaattcaaaaagaaaaaaaaatctacttttaaaaccaaaatattctaaaaataaacaaataaatttataatatatcatctcatatttgccattaacgaaagaacacaagaaaaattcatacgattgaattttttgaaaaacaaaaattccaaactagcttctttttttgcgatcaagaaaaaaaaattcctatgattgatggggttttgatcatgatgacatgacgatgacaggtagccttctcggaccaggcaagttccgacggtactaagtgatggtttaagcctttcgcagatcgcacagaccacatgtagccttctctgcccgtccaactaagcaccaaatcaaaatttcaattcgacaatgaggttcacataaacaatgggagtttatagagccgacaacaacgactatgattgatcagcgttcactggccggagtcgatcgagattgagttattaatattagatgtgatttat

SEQ ID NO: 247965 - DNA, 460 bp, Cannabis indica
actcagacacatgtgataacactacttaaaaacccagaattcttgacatttttacactgtcgggtaaagaattctcgacaatgtataaaaccgtcgcctatacgagcgtcgtaatatttggtcgaataggcgatgggggaaaaatatcggtataaaagaattcttgatggtttaataccgtcagctatagtcgatactataggccacagtttaaaacccccggctatactatagccaacggttttaaactgtggcctaatagtatagctgacggttttaaaccatcgctatagtggattgccctaaaaaattatcttcttcatcctcctcaaaaccacttctcacatttatcgagccgctccaaaacctttacaagtttcattctcctcctccatcgttgtgctcgtcttcatcctccttgaaattttcttttacaagtttcggattgcttttcacttga

SEQ ID NO: 247966 - DNA, 594 bp, Cannabis indica
ttgtccaagtgggagagatattgaatcttgtatggactaatataatcacaaacataattccatattcacaaccatgttagatgtttttctaaagagaccatatgcgattagtttttcacagcaactctcaagatactgagattcaatggatcatatcgttttattctgaatagtctcatgaatgttgtgactgaataaggatttacatataacactatttaaggagctttaatattatgaggcaatataagacattgtatttgacaatcttagattttaatcatataagagaagacgaatatctcaaaagttttattgagaatatctagtttaatgcgtatatctctcctagctattattgttgataagtatataaagctacatatgttggagttttaaattggcattagacatgttttttaaaattttctttatgggataattgggcttatccctcattttgttgcttccgctgttattattaatgaccttctattggccagaatatgataagaaactccatatgtggacaaagaaagataaaggatcgagacaatttgacgaacttgtgtttctatgtacgagataagtttg

SEQ ID NO: 247967 - DNA, 648 bp, Cannabis indica
taagagattggtaatcaggtttttggttaaagagaacttctaaaggtgtcttgttatttagaataggagtaggtagcctattatggatatagacagcagctctaaaagcttcatcccaaaacttaagaggcatagatgcttgagcaagcaaggttaagccattttccacaacatgtctgtgttttctctcagctaatccgttctgttcatgtgttgttggacaaggatgtctatgtaacactccaagtttatttaaaaatggtgtaaagcttctatactcccctccccaatcagtttgtaaaacctttaatttggtgcctaattgtaattcactttcagctttgaaactttgaaacactttaaaggcatcagatttatttttcaaaaggtataaccaagtgaatctcgagtacacatccatgaaatgaatgtagtacttatagccattggatgaaagagtatgggaaggaccccataaatcagatacaacaagttgaagtggttgtgtgtactcagtttcagagaatttaggaaagggaaacttgtgtatctttccaagacagcaagcagtgcaaactttatttctctcaacattattcaaggacacattacaatggtttagcacagtttggacaaccctagaggaag

SEQ ID NO: 247968 - DNA, 940 bp, Cannabis indica
aacaataataagaaatattagaatatatgatatcatattacactgttttattttatacttttttaaagtagtgttcgcattacagaaattgcaatatttctggaaccaaaataggtaaagatggttgtggttctagagacttacactaaaaatttctggaactttgatctctcgcaaatcattacatgatgaaccaataagctttgtcagcatatcctacaaaatttcagcaatatccaagttcagcaaagtcagcaagggtattacgaacttccaaggcaaaaagatggtaaagaagtaaacttacagatttgagaacagatacagaagtaatggcaagcaagacagcattatttgcagtctttacagcctcatctagtgtaaccaaatcctttttcagtaacttgttggtgtcaagatctgcaagtacaaaaataccacaatctagtcagcatggcaagtagcatatcacccagtttctatgtaaagtttttcagtttttaataataataataataatagcaaaaaggacttcagattttcttccaattttctcttcttttttgttctactctcagcgagtgtagaactctcatgcaataggtgcagaatcatgaatcaccatgaaagtcattttactctacatacaaatatcatcaaaactttaccaaaaaaaaaaatgcatataaggatatgcaaggatggattagatgatgaaagacataagctgcacattctaacatatgctctacccaaaaactatttacattgatgaaaagaaaatattagctaacaacaagatcaataaaacattgctcaccaattaataaattagtatgctccttaattttttccatcaaacttctgacctgaaaaccaaattataaagaaagtgaataaaagatattatattcggatacaataccaacaatgcactact

SEQ ID NO: 247969 - DNA, 773 bp, Cannabis indica
ttattgttgttgctccaatcatgttctctacttttattagtgttgatttcacttttagctagcaatagtgatttaaattaaagcgattaaaaataattagttataataataaaaataaagtaaagagaataccaaaattttatagaaatttggccctgtaatagtgataagaaaagcaagaagatcttaatctctctcaaaagctcttacaataattttttagtttttctctcttgaatttatgattcttctctctctgatttttcgtctaccctgaataatcaaatggttttgctatttataaggaaaaattacatttaaattggtttcccaaacttataataattaaaatgggaaacttgtttactttccttaaacaaatacaataaaatgagaactaggtaggtttcttttattctttgataatgtgaatccgtcccgtgaaattagggatacaatcgtagcttgaatctcgaggattcacgagacatatttttgaagatattttattcgcattctttggttggtgtatggatactttgtccagacattcttagcttcttttatagattgattattttcaagtgataaatcaccctgaatggcacgtcataaggggaactgaccgtccggtcatgaaatctacttcatatgtcacctagatagatgccacgtcacctgatgcaaaaattaggataacagttagtatttgattattttaataatgctttataatttaaatttgtcaaatataaattaattttataaaatga

SEQ ID NO: 247970 - DNA, 2456 bp, Cannabis indica
ccatggcgttccttgtttctttctgtccaaaggctccataaaatgcaagcaaattgttccaattgcaaagttgaccatattgtagagacatggatcatgaactcttcgagtgaaacatgagttgaaatgaggctatcaatagagaaattagagaacttccaaaatttcctttgatgtttgcactggaagagagcatgaataattgtctccttctcacggtgacataaagaacaaaggctattagtatcacttatgtgccttgtatgcaagacgtccaagactagcaagcagtcttgtattgctctccaaaggaaaatttgaaccttagatggaattgatagtgaccaaatttttttccaccaagtaactcctgctgtattactggtgttcggttgctgttcttctaagagcagagccatattgtaagcagatttaatagtatagcatccattatttttatggtgccaaatgagatgatcattatggtgaaatagtatgaatcttctcaacatttgagtccaggaaaagagattgaataagaggagaatcccatcgtctattgtctgaaatcgggttcgaaacattcatttctctgtcacctcctttgaaaagaagaggtttaaagtaagtgaaaccaggtatccatagatcggttgcacaacaaatgttgtgaccatcgccaaccttccatctcagtccttgtgtcaggagctcttttccccatatcatgcctctccaagttaaggatggataagttccaattttagcatccaaaaaattattatgcttgaaatatcttggcttaggagagaggttggattctgaaaaattctccaatcttgcttagcgagtaaaacttgattgaaatgaacgaaacttttaaaacccgtaccaccttccactttagcttgacataaatcttttcaagttttccaattgatactagttcttgaagaattggagccagaccagaacttattcatcatgacctctatttgatcgatgagcgtattagagagtcaaaaaacaactcatggcataagtcggtatcgattgtgcaaccgcctttaaaagtacttctttacctccaatagagaaaagttattcttaccaagaggataaaaatttccaaagcttatcatatatatcaacaaacaatattttttatcccttccagagtatgatggtagtcataagtatcgttcatggcatggttgaataggcatatctaaaatctattgaagattcgattgaagttgtggagttgtgtttgatgaggtttgatgagaaagagatgactgatttgctgcattaatattaaacattaatatatttaaattttgtagtacaaatcttatcatattatgaaaataattatttataactaatgattttaattttagaattatataaatatatattgatatagatagattttttataattttatatttgatttataaattatttttgcgttttacttattttttaattaaaataaactttaattataaaaactaataaaatattatataaagtataatcatataatactattatgattgatattttatgaaatatttttaacaaatttttaattaaattaaaataattgtgtaatactaagttaattagttttaaaattatatagatatatagatattaaactttcgtcaaataaacatcacaaaaagtaaaaattcaataatggtacaaattaaaatatatattaagatatagaattatgatttctctaaacgtcaaatatagaaacatatccagaaagagaaaagtggtccctactataatttttttatatattttttatttgacttataaattatttttgcatatatatataaaatttacttatttttcaattaaaaaaaattaattcttaaaattgataaaatattttataataatatataaaatataatcatataatactattataattgatatttaatgaaatatttaaaaaagaaaaaattaagataattgggtaatattaagttaattagtccctcatataagagaacaaaaaaaaaagtaattttaatacaaataaaagtgaataattacatgtgttatttataatgtacaacataacatataacatactaactaatcaatatgtgacttctttaaacatatattatggagcatatcatctaaaattggaaacatatacaaaagtgagaaaaaatgagaaaaaaaataatataaaaaaatgaaatcttataataccacatcatctctcttagttttaaaacatttagacgtatacgtagttatctaacagtttttgttggattgataaaatattttaagaatataataatatttcgttaatttaacggtgttagcagggttacttttataaatatatataaatattaatataatttagtttagataaatttaaatatataaaaatattaatatattatttg

SEQ ID NO: 247971 - DNA, 533 bp, Cannabis indica
catttttatttcacaagaaaaatatacaattaaataaatacaaatttttatttattttatattatttgttccaaagattaacatattaaaattagttttgttataaatgtataaatattcaaattaaactatacatgtgatatactcttaacttaaaaatatatataagaataatatttaatgcatattattgtgagtaataatatttagtgtatatttaatgcatattattcacgttaaagactttcattatttggttgtcatattgtactgtgcattaatcaaaccattatacgtatcaccaattttaaatagaaaattttgatttttttcatgcttacattacatttaaccaaaaacaaaaaaaataaaggtagtttttttttttttttttatttttttttattatattttaaactagttttttctttctcaacccaaattgacatggcaactactagagcaaccatcatagtaactgaaaccgtaaaaataaataaaaaagttaaaaaatagtatatggagcgattccc

SEQ ID NO: 247972 - DNA, 713 bp, Cannabis indica
tagctctctcgagccatcgaatcagaccagcaaggttgtgattttgcagtttccattacagccaatctttgatttgttgtagacacaaccgagatattgagcagtcaaagaataagtgagctgaagtttcagtatgcattttacacagcagacattgttgatcaacattaattcccatcttaaacgatctatctcttgttttgagcctttgttgaatagctagccaagatacaaaactatgtttcggtgtgttaagtctccccatatttgtttactccaatgcactttcacctgaactggatttagcagattgtaaccttgagccacagagtacttttacaccaacagcttgccattcaaaccagtcttaaactgctctttgagtctcaccaaacatgtcaagttccagctagcttggcttggtaggctgtaaccccaccaatcctcatgttgcggttatcgatttgccaatggatgaagcaaaagccattggaaattatctcaaaacaacaacgggtcaaacaaagaaggaatcgaaggaatagtgggttctatcaacagagaaatcagaaccagacacagaatcaacaacagactcagcagtaaggctctagtggaaattctggtcttcagacagatttattgttacaatttatgacagaaactagatcttccattaaagagttacaaactcaaatggggcaactggcaac

SEQ ID NO: 247973 - DNA, 517 bp, Cannabis indica
tgaaccctccccatcttgtgctcacctttcacgtgcatgggttctagtggatctgctctacccatgtgttcttaactttaacctgctaggatctatactcgaccctgtttcttgaggttcctctcacactcgcctttgtcttcaaaaaagatttgacatgcatcccctactcagataagtgtgtgagttgtctctgtcattgtgatttgacctttatgggtgtctcggtggtcaacttgatccaggccaatttcctacccctcttgcattgtgctgaaaagatccttgattcccaggttgtgcctacctggtattcacattcatgcaagatcacgttggattctcaggttgtacatttccacagtttgtaaatccatgagaagttcctggatcattaggttgagtttcttgatttctagtttttcctagattttgaggaatcttatcattcactgggatgtccctcgcatccttaggttgatcctccttagtgttcgagggaattctagggttattc

SEQ ID NO: 247974 - DNA, 1885 bp, Cannabis indica
tttcttctcaaaattagatattaacaatttggctatttagtacggtggagataccttctccttttggccttcaggtggcggtttgtcgttctcttttggccgatttgtcgttagtctcaattaattttgttaaacgttctgtaaacaaagctgcacattgtcttgctcgtagctcttgtttgtatccagatcgtatttttagtgaggatgatgttcctcctgattttctttctattgtattagttgaatcttcttattaataaagttaccattttccttaaatcttcctctttttccgtgtaaaaaaaaaaataactcttgttgtgccaacaatcgtatctattattcgaaaactatgccagctcccatacacttcattctctttctctctaaccacactactaacttcatattgatctcttcctcttcttctctctgattttttcataatatatataaattaataaataaagtgtatttatattatctttgtttatggttcatgagattgacttatatgtatgtttatataaatctacagcttcgagatgcatacctctgggattgatttagatgtatgcttatataaatccatgctttgacatgcacacattttatctttctcattaatagcaagtatgtttattaatttcaaaatcctttattttctttacctctctttctctctatatgtacatataaatgtaaaatccctaatattttatccatatttttcaatttttttttttaaaatccctaatttatttacctctctttctctctatctatacacataaatgtgaaatccttaatttgtttcttttttcaatttttttttttcataaataaaattctcaccctattactattttgatgaaatttatcttcctttacacatattttaatatcaattttttatttttgaattttttggactgatgcctgtttggtaatttttctttaaaagaaaaaactaaaaaaaaatatagataatttactcaacaaatacgtgttacaatactaaattttttatttttcataattatcaatttttcataatttctgaatatctgttactagagttttcaaagtatttgatgataaatttttgattttatctcatattttgctacgtgttaaacttattgatacattagtgctgagtcattatatatacgtgttatttgatttgtcagattgaaagttatcctctccttaaaggttagtataagtatactattctaacatgatcgaacttatcaaataaacagttctaagaagtgaaactttgttgtagaataccaatttgatgctcgtaattgcttctttgatttaacttttttaaattctcaggttttgtttattgaagttgtgttattttttatatttatagcagagttttatgatatgaagatgtttatatatacatatataattaagttgtgtgttatgtgtgatctgatatatatgcgttagtagttattaactttacgtgattcttacaattatttgatgagaaatcttttaggaactttctaatatttcaattatcagtatgatattaacctaggcatacacaggttaattatcattgaaattgttattattttgattaattaaactgatgaccccttatatatatggtcctctcaatacatatatacttgtatagataagattcatctacaagtaatatatataagtaatgggtttatatatgttattactacttttaaaaagtctatatatgtttgatcttgttagagaagttaaaaattaaagctgagacttcataggaataaaccataaaactaattactcaatccaaaagcagcagtcacttctactaatggtagaagaaattccaccaatagaagtagctaac

SEQ ID NO: 247975 - DNA, 832 bp, Cannabis indica
ctgattaaatcatcaccaatcttccccaaactttccacaatagtttagtgtactaaacaagactaatacaaaactttaaaaaagatttaacccgtaaatataaaatctaccattacagctcaagttttaaactataaagctctaaattcccattttcaaagtctatttcaataagttcaaataactctaacaaaaaattactcaaataactctaacaaaaaattactcaaataactctactctaacctcaatatataaaactataatttatttaaacacaaaatgcctaatcatataatagaaaactaaataaaatgttttctttcaccaacaagcttccaaacacctcaagaacaataccttttccaagagttgactccaagtgttcgacaaaataaggaaatgagggtgacattgattgttgtctaaaaatttctatcaaaattcttaaaggaataataaatgaaatctattttcattaattactcaaaaagtaccaaaatgtcgctcataacaaaactttaataaagccaaacctaaggataaagttgtaagtttcctgttccactaacaccaaaaattggttatttctaatgacccgcaatttattttttgtcctgtgtttttaaatgagactttattattatatttatccagtgcaacagtttcatacaccattgttgagagtgacagtgtcagatttatatgcagaaaaagtttctaagtcttatcttttttaaataaacttatgtaatccaagtgtgtgatcgtgtacaagactaaatgatctcatatttcagtcaattttcattttcaaagaagatgtcaaatt

SEQ ID NO: 247976 - DNA, 582 bp, Cannabis indica
attatttagggcgttacaggtatcttaggggttaggtggatctaatcctttatccctttttaactgatgtgatccctcataaagtagtcgtcactaggcttattaatcatagcgtaatagctggagaagaggggttacgccgtcagacttaatacttatggcagctccaatacgccttctcccatgcggcattaaatgcgaggtgactgttcagattgggtctgatgcctctcggaggtgcttcgctatagctctaccctctgggagtacgtggacccctcatgccttctccgggaggtattttgttgctgatcctcttgatttaaaaagacttagtcaaattatctcaaaaccattttcctcaaatctacgtgtcccagtcgcattggtccacgtattttgggcaaaattaagggcaacatttaccccccaagccttgtttggtgggaagtaaacgaggcttacttaggtgcctcctactgccttattgactacctggcatgtgctttgggcgcgtggggtgcatttatgaccatcatcattgcagtttttactttttacaggcaacgattcgtttcctat

SEQ ID NO: 247977 - DNA, 617 bp, Cannabis indica
gattttagcttttaagggaagctgaaatttaagtttaatgaattttttaattgacctaattaccctcattcaaattaaaaaattgtcattttacttagggtttttttctcattcgtaaaaatcaacccagaggcaaaaatatcatagtacggctcctcatctttgatcacaggagtcttctccgtcaccgatcacccacgccgctgtttgccaacaccgtcgacgtcaatagttcctgcacaatcaaggtttatctcttaacttttcttttcaattaatgccatgaaaatattttttttttttcttttttttttttcaacttatgttgatcgcatgagttttcttttatttttatttttttatttgcaaaagagagattatttgtagtcgaaataatcacattatcttgattgaaattgtttgtagcagccattaaatcagacaacttaaccttaacaagtggtttttgaaacaataaaattgtattgttatcatcgttttcgatcaaggtatgtaacttggtcataaataatttttcctaggaaaaacaacattgctatctttactgtgggaaaataatttcccttatacggcatcctttgttttttttttttttt

SEQ ID NO: 247978 - DNA, 772 bp, Cannabis indica
gaaattaattaggcaagtaatgacacttactcaatatttgatatttgccacatttaattattgttatgttgatggctttaaacttaagtaaattatatccaacaatatattatatatatataatatataatacttctaatatattattgatattgcccccatttaattttctaacaattgacgtgattcattaattttctttatttgtaacttactacacccaatatttcttttataatttattttattttgttgaaactagaacgtgtgtaattaattatttaaattttatttttaacacttttaattttttgagagcttgtgagatagatcttatattaataatatacattattatataaaaaaatttaatttataatttctcaatataccgaaaacaaaaacatcctaataaccaataaaaatataagtgatatccataaaattttcttctcataatatgtataatgggggagacaataatggttggacaataaggattgggttagccactaattttcattaatggaccctttttttctctcaacccattttccatggacagatgtgaaatactagtccatgcatgaagtaataaaatgatatatttttttaataatatttataatataattaattctaggtttttcctcttttaaaaaaaaaatctaggtatttactatctagctacaaattgctctcaccctgttatgacttatgagattattaatattttcactgagcttaagataaaaaaattaatattaaattt

SEQ ID NO: 247979 - DNA, 758 bp, Cannabis indica
caaatactttcgtttcacataaagcctagattatccaattttatcattctcaattctcactttttcagattttgaattgagatcatagaacatgtagaaggtgatcaagcttacacatgaaattaaacacaaatatagataatttcacaaatcaagattaaaagaatggcaattgacattaactaggcaaaactttaaacaacattcatcatcttccccaattgggaatttagttcatgaaaataaaattaacatccatgattaaatctaaaacagaaatagacataaagaaattaaagagttgaagaaagaaactagatggtgatttagctccggatcatcaagatagcttcctctcctccttcattcacttttcggtgctgaattttgatgcctttcatcatctgagtcgagtcccttatataagaattagggttgtgcctctaattggaaaattatcgtatttaggtcaaaaatctcgtgtttcgtatctggtcgcgaccataggcaaaagtggaaaaacatgcattctgccaatccacccaagtcgcgaccatagtcgcgaccagagaaaagggtcgcgacaaggccttgtcatggtcgcgactactgatacgtttctggcagtttcagcagattttcaccaaattgtcccgtcttttcgccaattgactaaatttgaactacaatgcaccggaaacctgaaacaaggaaaatcaagcataaaactactctaaaaggctaccataactgagaaa

SEQ ID NO: 247980 - DNA, 587 bp, Cannabis indica
ttttccaacggttttcataattgaccctcttattaaccgttgggaaaagctcattttgtagtagtgacgcctttgctgtcggttgtcatgacgggggcaacttttgactttatcgtcatttccattaaggcgtgattcttcacttccttctcctgagatcttgttggaccttatcagggtttctggttataattccttttctgcccatacacatggactcttccatccttgtggtactgggtaacatgcccttgagacccccggcatggcgaagaggttcatcttcatctcttccttctgtcctaggtcagaagttaacttggtcatctttttcgaggtactgaccaggtaaaacttgctcatcagcatgacagtaatgattatgctcttgtagcctcaaataggtgggtttgtatcttctaggcgattgcacgtatgttttaggatgttcttctagtccatacattggcccactccctgttattattgttgggaatattttacaacgatctagatttactaacaagtatgttgattaacatcctaaatatgaattatctaaaacaatgaaataaacacataagagt

SEQ ID NO: 247981 - DNA, 912 bp, Cannabis indica
ttgaaatagagttttatttaaggcacaaagcccaacgtactcctacttacactagcataaaataatgagtatatttcaataattaatcctagattcagtctgtgcttttcaaatgtagttaaagtcaaaactttggtgaatagatcagctaagttgtcttcagtatccactttctacaccagtatgtcccctctggccacatattcccttatgatttggtatttcctctctatgtctttgcttctcttgtggctttgtggctctttactgttggctatagcaccagtgttgtcacaaagtaaaacaagtagtttttccattctaagaacagctccaagtcctgagaagaactttctacgccagacttgtaccttagcagcctcagcggcagctatgtactcagcctccatggtagagtctaatgttgcggcttgcttagcacttctccaaacaactgctccactccaagagtaaataccatcccagatgtagacttcctgtcatcatgacaagcctggaaatctgagtcggtatacctacgagatttaaagtaaaaccttgtagactaacacaaaatgccttgtacttttaaagtacttcagaatatgcttaactgcagtccaatgtttctctcctgggtttgtctgataccttttcacaattcttactgcatagcaaatgtcaggtccagtgcataacattgcatacattacacttctaactgttgaagcataaggaacccttctcatgtcctttatttcttgaggatcagtgggacattgttccttagatagacggatactaggtctagaaggcatcactggccctttggtgtttgtcattgagaatctttctagcaccttatcaatgtaagctgtttgagagagaacaagggatatgttcttctggttt

SEQ ID NO: 247982 - DNA, 705 bp, Cannabis indica
tatgatatctttagcaagttcaatatcagtccagtccaatgtatactccatacatccgatactagcatactttaccaataccatggaatggaaataatacttatccaaggtgtaagtaaaatttatccctgattatcacgtaagtgtaaatctagtgcactgatgaatcatgagacataatcttttgaagcatataatcacaattaccttccactgtgttgacgtcattgttattgtgagttagaatatgttctgtatttaacaaaaattgtatatcaaacaataagcatgaaacttgatctccagaaagcctatgatattattcaaacatcctactaagttcattcaatggtgatgaactatgctaggactcccaagttttccattatgttcaatggaataatgcatggattttttgagtaaaaaaaggaactgagacaaggtgacccgatgtgtcccttgttgtttgttttgggaatggagtacttgtcaaggatcatgaaggaattggtggcaaacgagatttctactttcatgactaatgtgctgagctacaactcaatcatcttaaatttgcaaatgatgttctattattctgtaatggagagttcaaaagtgtgtattacatgctccaaggtctgaggctcttctccttgacctcaagcttgcatcaaaacgctgtaaagtctgtaatttattgcagca

SEQ ID NO: 247983 - DNA, 553 bp, Cannabis indica
tcagcgtgggagtggccagaaccttcggacaagggatgaagagcccaattgttgaggagcccagtctatgggagaaggcacttatgaaatagaaaactgacgcttaagacgccgtttagaagaagcgtagcatcggaacactgaattagagcgtgatgcagccacagccagggcggcacaggtgacgactgctcaaaatcaacctgaacatggagtgagaagaccacaaggcaggcctcgtggctcacgaactaggagacaggaaaatgaccgggaagaacaacccagggaaaatgagatactccctgaaaataagaatgatcagccagaaccctctcatcgaaatgaagattggaggccaccaaagactgatgaacaagaaattcctcatgacaatgaggaggatctcgggactcaattgggagaacgtaggtcacctgcgtgaaatcacctgcgttcttcccaaacccatacagcaagaactggtacacaccctaatgagggaaatacgacaaaccgcagtcaggggaaagaatagagcatgaagaagcaa

SEQ ID NO: 247984 - DNA, 514 bp, Cannabis indica
atggctttgtggccaggaggagtttggttacagtccaagtgtgattcttttcaagagtttcaatttcagtatcatggcttgaagccaatgtttgaattgtgacgcttctgaataggaaagtggttcaagttgagagtaagctgcaaggacaacaaccttgaagttggggaactttaatttggcagtaggagatgaagttcttcaagtgggagtaagttgtggggtgtagtgtgacagacatagtctttcaaatattgaggtctagagatgtgtcgacctagtttttgatgggggtggccatcatttggtttatgtgagatggagaatgagttgttgtcctgggatggatgttcaggaatggcaactgattcaggtggttaatgaggaggcataatggtgatttgattctcaggaacaatttctggtactgagttctgcaaagtacatttttatgattaattctaattgattgccaatcacgaaagcggaaatatatgttggaattaattttacc

SEQ ID NO: 247985 - DNA, 551 bp, Cannabis indica
gggaagaggttacaattggctccataaaagtagtgattaacgagtgaatattcctatattctagggtgtcgttatgatctgttgaagctcctctattctcagatagactaactggatctgagtttgtaggattcagtttgggataattttggaagcttgttgaagaagaaatccaagactcgtgtagccttgttcgacattcctggcatcgtttcttctggctgacatattgactacctagccaggcccctctcaagacttgcctttcttgtgggattacctgtggaatcattcttgcaaggtatcacccttctcttctctggttggcatgtcgatggcctagccagatgcttaatggaaggcaatccataacttatggatgccacccccatatgggacctgccagacacacttctccctagaagacctttatcatgtttaagagttgactggattatgacatgtataagtgccacatcatatgtgaaaactttggagtaacatttgcccccaagtcctcgtacaaatgtctattcggatggggacttttg

SEQ ID NO: 247986 - DNA, 511 bp, Cannabis indica
aaatgcgctagattttatatgaaaagttggaggttaatcggttagcgtatgattcgaaattagagatttgtaccttgtacatgaaaggacaaatggttccacgatccacctggtgtttcatgtatcattgcttcgtgctactttaggtccccatcaacaagcctctcctcttcctccgagtctcacttctaatctcgaatggctgcatgaaccagaaacgctgctagccattcaacccgacactcacaagacaagtcctcaagcttaaattaaatggaagaacctccccgactttgaagctaccaaggaagattttccagtcattcaagttcaatttcctcatttataccttgaggacaaggtgaaacttcaaaccatattgataagccacctgtcacttatgtgtatgctaggaagaaggatatgtgtaaatttgttatgcgagttgtgtttaggtgtggcttagtcttacagtagatagctggggtatggcatataaatactgtgtagc

SEQ ID NO: 247987 - DNA, 710 bp, Cannabis indica
catcacatcttgctgggggttgacctagtggaccgtatacaaaatatcatataatatatcaaatttgatcctaattctacaaaattttcggcagcatcccggctgtaattgaacgtccccaaaagtttcaaacatgcctagtaataaatgaaatagataacacaattgattatccatccatctgaccacagtacatggattcccagaacttacttcactatggttaaatatttaagatatttaaactccaataatcattgattgttaattaatgacaaaagttacctcgggtgttaaaagaagctatttaggccaaggaaggaacatgtttgctactttcttaacgtatctgcacccctcaattgagattgggatttcaacatcctcttgcagcatttatgaaatgagaactcgggcatgttacaacgtaaggcttagtgtgaactgtgttggaccctgatgttcgtacagataagctcgggccactatgttgccaatattgcttgagtagagaaatattggctgattacctaccctctgttcaacgaaattatacatgacaggtggctcatttaaggaaacaaattcttgagcataattttttggatcctcattctcttaagcatattgttggggaacatacacctgatgaaccacctgtccttcttcctcatttttctcttgttctgtaatatttttcttctatctaa

SEQ ID NO: 247988 - DNA, 927 bp, Cannabis indica
gaaaaaataactttaatatgcaacacaatagaacaagtccagttcaatctctgaaagaacttgtccaattcgtagtccagaaatcctagtcactactcaaccctagtgatctcgaacaaccccatcaaaaccatgtcttccctccccgtcaaacaacgcaacatcaatattcactttgagtttttcataacctggtttggaccatagttcaaccctatttaaaagataccaagtatcaaacgaaggaaacaaacttatttcttgagcttttctccactagtgaagagtgatacgagccaaattgacaacgaactccacctgactttttttacccttcacaagagttgatttcgtgcgaatcaaatcgcccaaaccaacattattgccttaacactttgtttcttacccaatcatgagaacaagtaaagaaaccagtccccaaacgaccctgcatcaattaaaatcatagtcaaacccgctacttgtcaacaattttgcacaaaatcacaagcaactaacagtacaaagttgatccacctgccccatggcaaaccgaacacaacaaataaacatccacatatttagtcttcaactgaactctcgtaggaagacacctactaaccgccctccatacacaattttttacctttagagaaagttttaattcccaaaacttatgccaaaatgctacaatctccccgttgacattaccctttcgattaggggtatgcataaatcaatccaatccaatgacaactaaccccaaatattggacatccaattctgatcggattggattaaatgttatttttgaatatccaattggatcggatccgatttttgatgaggtgtccaaaaatctaatacatccaatcgaactaaataatattttcatttagtttgaatgagtgattagattttatgttg

SEQ ID NO: 247989 - DNA, 1596 bp, Cannabis indica
ttaagatcttttgatctaagatccaccagtgatattgacttagaaaaatacaacgctaagattataatatctttaccaagatcaatatcagtcctagtccaatgtatactccatacatctgaaactagcatactttgctaatattctggaaagaacataacacttatccaaggtgtaagcatactttatcgctgattatcacatcagtgtaaatccagtgcactgatgaaccagagacattgtcttttgaagcatataatcacaatcacattccactatttttacatcattgtaattgtgaacaactatatgttcttgacttaacagattttgtatatattaaaccattaacatgaaaaactacaagtaaatataaatgacttctaatcttttattgataacaaatcagattagattgaaatgggtttatttagaccataaaatccaaacaacgtgttgctctttgaagtgcagctgaattttgggtataacaattgccccttaaaaagttctttttttaataaaaagtactttttaaatgattacaaagggtatatttgtcttaatccaatttaaaaaattgcatgcttttgaatttgacggttcatgatttccaggaacatcattagcatttaatgacccatctcttcaaattctcccttgttcttgtctgttagatctctatttcttttactctaacggtgtccaatcttaaggtataaaaaattgaaaagaaactattattccactatttttgctttcaacaaactttgagcttttctgcgaaaaactctttttccaattccttaaaatcttgcatgccctctttgtcattgacttatttcctacgagtatcttcaaacttaatcttcaatttcaaaattaaagttgccagggttcatttagttgtttatctcaaatccatttacaggattcctccctgggtaaacgttcatctttgaccagtaagttgtttattctatttttcttggtatttatttttttatttataactaattgcattaccgttctctttgctcagttttggtagttttgatttaacttttttgggtaatttttaggatttggacagagtaaaaattttaggttgatcgtatttataagtttctagttttaataaatttcttccaagaatcgggatttctcttccagaattcatagaaatagagtgcactaatgaattagctcttccatttaaactcaaaacccaaaaacctcaatccttacttgaagtaaatgatgcaaagattagggaccatttaataaaaaccaattaggatgaagttgctagtcattatgggtgatttctaaaagagatatctgagggtatatgtcgtttcttgcgagacgcagcctggcttgaacctccatttttatcttctttgccactcgcgagactgttgggttttgtgccctaaataaaacccatttcaatataatgagatttactaattaataaagatcagaaatcattttatgttgcatggttcacatcatttatttcatgatatagtttaatgtataaattctattaagtctaaaacatatttatttgttcatgattatagtgtcgtc

SEQ ID NO: 247990 - DNA, 718 bp, Cannabis indica
atgcacttttattcaactttatttgaatcacctccgactccttcaacatgacccaaaaacaagactacggtggtaaggaaactgttgttggtaatggcagcaaactccagatatcacacattggtagtggtaaacttaacactaattcttggaattatttgatgctatatgcttctagttcctaaaattgctaagaatctcattagtgtttccaagctcaccactgacaataatgtgctgattgagttttattctgacttttgtttggtgaaggacaaggtaacaaggagaacactgctcaaaggggtgcttaaggatggactgtatcagcttgagtcaccaccaaagctatctatcaacccagttttcacaccagtaaagtcgagtcactcttcttctcagtcgacactttttttttgtttttaatgtttctgtccaacctagtgtaaatcagtcccagagtaataatgtttctatttccaaacttgatgtgtggcataggagattaggccacccatcgtctagagttttaaatcaagtcttaggacaatctaatgtaagtttttccaataatgaaatgaaaaatttctgtgatgcctgtcaatatggtaaagcacactccctgccatttcaaaactctcataatcgtcccaaagctgtgttggacttaattcataccaatttatggggaccaacccctgttgcatccaatgttaat

SEQ ID NO: 247991 - DNA, 547 bp, Cannabis indica
ttttggttttaacttttaactgataaagtagtaaaaataaaaataaatatttaaaaaataatataatattataagtattaatgtttgtacttcagtatgggtctgctgtccacatgagtttctacttcccaattcccattctgatcacgtatcacgtttttctttaaagccaataataaataaataaattttcaaaaacattacctaaaaattaattcacacctacgtcaccatcaaattatatatatatattttgttctttagtttatatagtattcgggtctcggattcacacccgaatcctatatagcagtattctcaaaacccgaacccgatacccgatttatacattttcgggttagacccgacccgacaatccgagttttgtttttttttttggttttttcggcagcgggtcggggcgggcggtcggattttcgggtttccgggtccaaatgttcatccctaccaatagaagctatagattccatatttatgttcagcgctcccacttagtcatactatcatgttcccaaaatatacgtat

SEQ ID NO: 247992 - DNA, 605 bp, Cannabis indica
tacattttgatatcgagtaaaagaacaaataaaatatagcacttgatgataatataaaactaaaaaaggtagaaattaattcctataacattacatgatcaatattaattgaaatgactacaactctcacaactttaacagattgtcacataaatttcattaatttctaacccaaccttttacataacattatatttatgttataataaatataatgttatgtgtggtcactacttagaaaatttcaatatatcattgtcgcaacctaggtactgaaatgggaataatctttgggttgtagtatttcccgccacatgatcatgatcatgagtaacttgatgatgatcagacgatgaagaggggtgacacttggcttgatgagctagatgatgatgatgttgctgttgttgttgttgttgttgttgttgctgatgctgatgattggaattggcaagaagcttgtccaaaaatgtccaatcgcctccgttgaaccgctctggcacagtcggaacctgcattcccccacaaccattggaggtcaacctcaacaagttgtgagaacactcaaggtcaatggggttcaacgaaatcccaccagaagcggg

SEQ ID NO: 247993 - DNA, 680 bp, Cannabis indica
gataagagaagagaacacagtcataaacagaagttgcaaacagatttgtaccttaattccatagatgattgttcttctatctatttagtacttgacggcaattcaaaatcaattgcaatacatctagttctagagaagggctgaagcaaccaaagtgattgaagttattgttcaatatgaaggatgaaactctgaatgaaatcttaattttaaaatataaattgattgtgtcaaagaaacttattaatatcatcgcacaaccattaaatattctaccaaaatatataactaaataataatttacagcagaaaattacaaaatataaaatataaaatataaaataaaaaagaagaagaagaggagtcaaactatcatacctgtctttaacagtgatatttgggatgtgagcaataattggccagtcctcccctgtctccttctccactcgtggtcttagcaattcacacaaagtgatatgaagatcagaaagcgaagtgggtagttcttttggtaagcaccggaggtttgagcacctttcaatcgtcaactcctcaagggaggtgaggtgctgaaaggcctcctcgtctaagtgggtcaagttgggacaatcgttaaattcaatcttctttaaagtgatcaaaggggcctgcatgagttgagctcttgggagtaataatgg

SEQ ID NO: 247994 - DNA, 1451 bp, Cannabis indica
tctagactgcaatactccaaatggacgttcaatattttttctacatgcttcttgttttcattacaaataattttttttggaccacatggatcatggatagtttgaacaagagtagactattttagatatataccatcagctaaataatagcctatattgaactattttcctttaataacataattagcgggtagagcaacaccttgagcaagattagcgaaaatatgacatgcctttaatacattaatgccattattagatcctagtaagccaaaatatgcatgccatatccagagatcatagtcaactactgcttcaagaataatagtcgggcacccactatgatcgacatattatcctctccaagtagtggggcaattttttccatttccaatgcacacaatctaaatttcccaacattcctggaaaacctcgacgttcaccaatgtggaaaagtcttgcaacatcatgagtgttgggtgatcagagataatgggctccaaacacctcaacaacagcacgaaaaaattgcttcaagctttctaaagttgtagattctcatattttgatgtattcatcggtaacatctaccggcacatcgtatactagcattcaaaatataactattactttttgcaagtctgataaccttagttttctcattctatcccttcactggaagaagtaattatcatgtctttgtatagcatccaaaatgcaaatgaataaaggatgacccattcgaaatcttcaatgaaacatcaaattggtaaattaagaattctctgtaaaatagtcgttgaaaagattatgatcagcattttctcgatcacggttaatgattatatgactaggagtcgagcctcgatgtgagccttggtatttttggtgttgagcgatacaaaaattattgttagcagtaagatttgacctaccgcttgcatttctatatcatcatactattcatcatctgtaaaagatgatgataaataagatgaactaccaggataagaattcatattttttcaaagttaaactatatatatttttggtgtacctcatatcatgtatcatattcatgttttacagtgtaaacattcttatcttttgaatccaaaattagaagataagaaatctcgcagtttaatcttgcctgtcgaaataatttgaacatgatgtgttgtcacatcacatccttatcttttgaatccaaaattagaagatataaaatctcgcagtttaatcttggtcgctgaaattattttaccacaatctcaactgttgtagtgtgttgttacatcacacccttatcttctgaatctaaaattagaagataagaaatctcatggtttaatctggtccgtgtaaaatattttgacctacgactctcaacccattacagtgtgttatctacatcacatccttatcttctgaactcaaaattagaagat

SEQ ID NO: 247995 - DNA, 1015 bp, Cannabis indica
aaatatctataaataatttcctgattaacacaaataactgctaatttccaaattaactaagcgggctttacattttgattcatttaattttaatattaacgcgactcttaattttatgccgttttaatttaaattagtcttctttttggttcatgtgttgtaggagacgtcaaagtatgagccatcacatcaatcatgtcccccacatctataatctcatatgcttgcttacatttctttatataatttaaattatggctctttattttatagacatttcaatatactacataagattataatatgagagtgagagtttatttttaaatttattcataagtttagagtgaatttttttagagagatttcaaatttgctcaaaaaaaatttaaaacaatgaattttatttaatagaatgttattttgatactttatactttagggagtttttttattattctgtttgttgaatgtgattttgattctgtatggttaatatttttctttcttcatttttttaggattttatgatgtttgttagaatgtgttttcgatattgtataccttaatttttttttatttttttttatatgattgtatagtgtatactatattatttttttatatatgatttaatttattgatcatgtatttagtgattaaaataaacttgaaggttaacacaatgtatcttaaacataaattatatgagtaactcttaataaaataaactacatgaataactaaaaaagatatattaatatgtaatatgcttaatagtaacctttctaaatttttatattttaattattaattttttgaaaaaaaaattttgcttaaataatttattttatataatttacattttaaatttattttatataattggtatcttatcgagatcataattaattggtccaaaaaatgtgtcttattagtaatgatttaaaagttaatgtaatttcattctttatttaaataattaaaatgcatgtattaatttatatttaaaaaa

SEQ ID NO: 247996 - DNA, 759 bp, Cannabis indica
aacaagtttctgtttgcagataataagaatgtttatatggatatataaccttttattgtttcttatttgcaagactacaaagtagcccaagcaatgatcattctccaatcagatagttccacccaaaaccgagaggcagcttaatcgagaccaacttcctcattgtctattctagagcaatacaagcttagtgtagatgctacaataaaaaggcaggttaacaaaaatggatatggggttgtagttcaagattcgaatgacagagtcatagcagaaatctattcttctacaacttcaggtgttcctccaatctttgctgaagttgaggctcttctctaagctttaatttggtgtaaggcagtccactttcccatcaaccttgtggtttcggattgccaagttttagtctcaagaatttctaaaaagacgtaagatcatttagccttgtctgacctggtttggaaagtcattgactctttgttctcttttcctaatgctacaattcattataaacccataagcaacaacaaatttgcacaaaatcttgctcatatgaagagtatgtttggaacaagtgtgtttcaactctccattaaatccaacccgccttttaaattcacccccatactcgctcaacacccgtttaaattaaagccgggacgggcggggagttacccgaccgggaggaaaattcccactcgggtacccgataggaacgataaacggggcgatggcgaggccacgggattgctcacccaa

SEQ ID NO: 247997 - DNA, 992 bp, Cannabis indica
  modified_base (975)..(975): a, c, t, g, unknown or other
ttaggggtatagactagaggatattaattgtattggctgtattgtattgccaatatgtgtccaccccaaaattggacaatatctgtatatgtattaccaaagaataattggtgcgtttgagaaaaagtgctgatgcgaaatctacacgagctgtaggaaaagaccttgtagctgtgggatacttttgtttttaaggtgctgatctattttgtctttaccttgaacaattatatcattagctaacattaggccataatttagtgagaaaaaaaatgctaaaaagtattggtgttgcttaagatgaaggtgtaatatcgttatggtataattatgtattgagtcttatgtaattttaatataataatttttatgaaacatcactaattatttttaaggcgacacctcttaaaaaaaatatatatatttaaacaataacttcatagtagtgctaggcaccacttgtacttattagcaatgttaaaaaaatggggtagggtacttttttttttgttctttttcaactcattaggttttcttttttggatggtgctaagtagcatcaagaatctccattttatatcctacccatgtagctaaatgggtgagctcgtaattttcaggcacatggtatcttataacatccattggaaataccacttttaagattacgaataaatatcatcttagggtttacgtgaccaataattcaaaggttctagatactaaagtatcatatcatatgattttggtcaaattaactgcacagaatatgaccaaaagttcgatataaaatatgatgcctaagactaatgccctattaaaaaaaggaaattactatatatataaacaataatgatacataatactcatggatctgattgtcacctttcacacaacataattcctcaatggcttttgcaccataaaagggatccgcattatcctcttgggctcccgtacgtcggaaaaaaaatntaggctcttaatgtgct

SEQ ID NO: 247998 - DNA, 1210 bp, Cannabis indica
atgtcaaagttcgaggggtataatttagtagatatcaaagtctggggaacatggtttaattactacataaacaatcactaaaatagtaaaattgaatgaaattaaattaaaagttcttaaatctaacaatttcaatagttcagggtaatttttaaccgccaaaaaaatttaagggacatgatttgatacatgttaaagtttaagtaattagtaaaatcttaataataataataatagaaaccagggtactcctagatttttttccatatggttccaaatgaagtcattggaacttgtaactaattaagtttgattatacacatattaattaaacaaaattaattaattatagcatactctgaatttgaactaaaaacaaaagattttagggctcgagctagaacattaattattattaaggttcatcaaattaactcacaataataaactgcatgatcctacatatggtttatccaaattataggatcaatgatgattattataatttttatataaaacattaattaattagacaaagcataaaacaaaacaagtacttatataattatattcaaactatattaagtggaaaaactttagtcctatacaattgtttaatttaattaagtaataataaaccaaattaattatacatttatatatcaagcccatctacgttacaatgttctcttcaatcgtggtttatgatttatctgtctacttaattataatatataattaaaccacagtactaaacataagtcatacaatttgtgttctctcttccatttacaggtaatataaaagggaagaaaaataataaaatcaagaatcttttgtaacagtaatacttactgactaacaataatagtaaaattattactgaatgagaggctgattattaaataactaattaggtaataatattattattatgggcttttggggtgggtgtggatcccacaacatgaccatatgctgactggtcatcgcgaattcaggcattgagaagtgtaggaattaagttaggaacagatttctttatttttttatttaattatatataatttaatttaaataaagtaaattaagtagagtaaataattgccttacactcataaatatgtgattaggtacggattgaaaatttaagactacgactactctggtagtactactgatatgtacattataatttctttgtattctt

SEQ ID NO: 247999 - DNA, 518 bp, Cannabis indica
gactcgaacccgacatggactcagacccaaacttacacgcggacctagacccagacccaaactaggacccagacctaaactcgaactcgaactgagactgggaccaagactcaaaacgggacctgggatacaaacccaaacctaaacctacacccagaccggcacctatgaccaagacctagatggtggaagcagacttgggatccaggccctagaatcgggattgtgaccaaggacttgacaccggacccagattcggacctatgactcaaaccgagaccctagacccgaactggaaccagaccgggacctgagacagggatcaggacatggggcttggacttgacccgtagtcggtgtaaagatttgggacacagacttagacccaaactcagacccataactagacccagaaccaaaccgagatccaaacacggactctgaaaaggactcagaccccaacatggacccagacctgaacagcaggacccgaacttgggactagaaccagaccaaaa

SEQ ID NO: 248000 - DNA, 565 bp, Cannabis indica
gatctgcaaactacttacaggggagccttgggcctttcgctccacacccatgagttactggaacctgccaaaaatcgctttgggattggtcgagggaggaatagctcgatgagtcatgttgatgtggagaactagctagccaagagtgtctctataaaactgctgctccctgtcccaaggagccttcacgcaatgacggagctacgggtggagagagtgctatgggaccccaatattttttaaaagtttttaatccttataaattattgtatgtaaaaaaattattaacaaatagaaataaaataattttttactctatgaagttatgggttagctctttgaaaatgacaaatactagaaggaaaaaaaaaattgacatttacatttgggatattaacgtcaaaactacttatactttatatttcttaacaattacccacctaaatcaattttttggtgagaaaactacccgaatcctatttttgttagctatttacttcttccgtctaaaaatctcagttaaatgcaacggtagaatgcctacgtgtacataagtgtacacatg

SEQ ID NO: 248001 - DNA, 521 bp, Cannabis indica
aagatcaactaagtgatatttacatagaaagatattaaggtaagtttatgatatcttttctatgtgaatatcggtccagtccgatgtataacaatacatccaatacaaacttactttatcaatacattggaaaaaacataccactatctaagtgtaagtaaacaacattgttgattatcatatcagtagaaatcttatgtactaataaattgtgggactaatatttaatcacataatcttgcttactttccactgtgtagacaacacaataatcatgaatgataatgtgataaaaatttaaaagaatttataaatcaaataaatgatcatgaagcaaacatgtgaaccaagcattatatttaaataagtaataaagtaataatgttcatttattaattaataatgattcatgataatattgcaataaagttttagttagagcatataacccaacaatatattgtcatgtactatagttcaattaaactcgtatacagataaggtgtaaagcccgcttagtt

SEQ ID NO: 248002 - DNA, 656 bp, Cannabis indica
acatatcttgggctaacattttcacgtaataatcaccatggctctaacaaggagaagtatgtccattgaaccccaagatccgatggctatggatcccaatatccaagttccatccactattgataaatttcccaaccctgcgcgaccacctcaagtaaactcatctacagggttttgacctgaaggcctcacaaatgctgagcaggtttcaatcaatgttgaatgcctgcccatagtaccacgggggctcttttaacaagagctacccccaggtatatgctggcaaaaccaggcctagacttggccagcctagtgtcaacgagccccatattaacttgggggatgattcagagctagagaaactaagagaggtcatcaggcaagtccaagatcatacgaatatcctccatcatgatcaagaagaaacacgcggtgctgttagcgatgctttagcccaatagagacgcgaattccaagaatggatggatcgacaggctgtgatcctccaagcctactaggtggaattaaaccgctgtaatacagaggcgaatgacctaattagaaggtttaatgaaagggatgtctccaaagtggaataacccgtactcataagagacccccttcaagtaaaaggtccctatatctcgaaggaaact

SEQ ID NO: 248003 - DNA, 582 bp, Cannabis indica
ccatctcaaaactaattgatgatagaaagagtagctcattcctcttatatattctataatctttccacacattaacggtgtgggactatctaacaacctgatgcattgatcactcacatcctgtcttttctccccaatgaagaagtcgctcgaacgtgccttctttcaaagcattggaaactcatctggtattcagtccccactatctttttctccaatgaggataatatggatgatcttgaaaagttgtacaattatgtcaataaatattattagaaaatgcaaatatttgactagtttagagttgcataagatagagttagatacttcttattcatttagttttccatctttaaaaactctattgttgaacgatgttcaaatcttagatactacagacgatgacggggtatttaagtttttgttgctttgcccttctcttaagaattacaaagttcaagccttaagttcatggaatttggatacttaaacatttatcatgagtcacatcttcaagttgaagccataaatctgaagtctttggtactagaggaagttactttgaacaaaatagatttctct

SEQ ID NO: 248004 - DNA, 894 bp, Cannabis indica
aaaataaataaattatataaaatttatatgctccaaattggcttaaattattttataaatataataacaacaaaatttaaacctaattataccatgtaattaacgattcatcacctctcatacattcataatcataaaaccatccattcacatacatatctcatatatataaatgcataaaactcacacagtatttaatgtatacacattcatggaacctgactgtaataccaattgttagtttttatagtactaatcaggtacgcaacggaagagttttgtattatatgattatcattgtactataatccaatggatctccaaatctatgtacattaaatcaaaataataaaattataagtttagaatatacctcttaaagcctatcaagatatctcaaaacatgtcgtaagttgtattccttaatccaattgatgagaaatgtgcaatttagactcacaccagtatcttccaaattgatccagcacacacaaggaatagtgtgggatattaggataaagtgtataacttttgttcttatttagttcttaacacgtgaacaagaataattgagggaaaaaaattatttttttctctatatttaaaaaataccagttcaaaaagagtgagaagtgtttcaaaaattatattccaatttctcaaagtaagctcttatttatagtagttagattcttttaattaaataatattttattgtttaaagggtaaatatcattttggaccctatggtttgcaaaagttacaaattgaaccttctgttttgttaaatgacaatggatcctgtattttccaaaacggtacaaataggaccctgaactaatatttggtcaaaataaaatttaatgataatccgatctaaaggtgttatgacaa

SEQ ID NO: 248005 - DNA, 539 bp, Cannabis indica
ggtataattgccatccctagtctggctggaccacccctagccgaccatagtgaagcatgggccgaccagcctccagtaaatggtaggtcgaccaacttctttcatagcaaacacagttggtgtcgctgcagctttcaccttggacagacaatggttcgctctcagctacgaattcactctaacaacccacaaaagtaggggttcaacttcagatatttacctattctttaagaataattaataggttattttttatatatttaatatttttaaaaagaggtgatatctcctcattttaagggatatcaacctactttggcttagatcttctgtaagctctctcctatataaagagcgctaggttaaaccaaaaagttctaagttctcattcttaagctcttgagttcaagctcttgaaaccctagccccctctctcctacatgccacttacagtgtgtgagagactaagtctttctcatctcacttacttgggatctgctctacattctcactatagtaattcaaagagagccactcta

SEQ ID NO: 248006 - DNA, 892 bp, Cannabis indica
caataaacaagaacataaatgtgataagggtttggataaatttataaatcaaataaacaagtaaatgatacaaccaaagcgggcaatctaagctccctacatggcgttacagacccaatcaagtttgaaggttttggaagtcagaattttggcaacaatgcagaatgaatctgattgaatttttgggtggataaagacatgatcgaaatcgtggatcaattaatgaggtcaagaagaaagtacataaaataagattgtaagtttatgatcaaacaagaagaaacatttgaatatttctatacggtggctttgctttaaataaatagcattgaccttattattttttttttttttaaaaaaaaaaaaaaataaatatagcaactttatgctcaccacgtgttttggttactagttattttatggtcttaatataaaatatatttgcaagattagtaccaatggaatataacaagtagtatatatgcataattgttatgaccgaacctcaacatcgatgttgtctataatataaataatattttactctttttttatttggtaattttaaaattatataaagaaaatgtcttctttgttcaataaaatatcaaatatatataacgcttgaagatcaaaacaaattgtgtgaaactatattcacatagagagaatggctacgcttacggtacctcatccagttcctcctgtgggcgacgattgtgacaatctacacaaagcatttcaaggtttctctttaattatcatcacataatattcttattttttctttcatacattttttatgttctattttttctaatcacgatcgtcaatattatttcaagtcttgcaaagacttaagaatttgaacaagaatctgtgtttattaaag

SEQ ID NO: 248007 - DNA, 715 bp, Cannabis indica
attttgcatttattgaacaatattggaaaaagtaaaataattaagggaaaaaaaattaattattatataaaaacattagttgtccccatttaattaaaaaccctatttcttttatctctcttcaagttttcattaaccggccttttcttattcttctctcacttagccaaaaaaatccagccaaacccatgccttttcttattcttctccctcactttgtttctaaattctgatgaccacctgcgtgcgaaccacctccaagacgacgaaataatgaccatccatggcctcccagtgcccgtcgacggcggacaacagacggagtaaaactctaatcgatcttctgcctcaccaaactttgtaacctcttccgaagatattgacccatgaaccttccatgccagcgtcctaattgttagtttaagaggtatttttcttattttgctatcttattctctctctctctctctctctctttgatatgtgtaggtggacgacattttgaaaccatcgttcgtggttatgggtggcggtaaccaacagctctaggttcgtccaggatcgtggttttgagttggtgatggatgagaacttttggtttgtggatggagcttcggggttcattgtggactgaaaatttgatttgatctgatttgtattttttatgtttaggtttctaatatttttagactagacatgtttatgaccatttttt

SEQ ID NO: 248008 - DNA, 468 bp, Cannabis indica
ctcttccatatatatatatatttcgttaattttaaggtaattttactgctacatctaacttttacaaaatattatctacaaaaaaaaaaaaaaaaaaaactttttcaaaaatattattctaaactttaaaatttatttataggtaatttatatatataaaactataaaaaataacaacgtaaaaatgcaattaataatattatttatataaactattagacctttcttgatatgtttggacagaagaaagaaaacaatcgataaagaacaggccgctatatagctaggaaagagagaagacaccttcttgacaagtaataatattatttgaagtatgcgacccaaatatgaaattatactaataacggttttaacacctttgatagtgcttatatatagagagttacgcgtgtatttattatataataatccatttaatatataattacaagtattagttcttgtatt

SEQ ID NO: 248009 - DNA, 520 bp, Cannabis indica
gtacaaataactcagccaagtaacagtgaagaaaagttaactaagaaactacatgaggatgggtcgcccacagatcaattatcctgtgtaggaatcgcccttatcacgcttggggggaaacacgtaggcaatcaataaggaagtcgaatatgaagctttgatcgttggcctaaaactagcccaggagatgagagctgaacacatcgaaatctgtagtgattcccaactggtggtaaatcacgtatctgaagaatacgaggctcagggagaaaagatgatagcatatctgagcaaaatacatgacctgctcgcacaattcaaaagctacattctcagaaaaattctaacggaagaaaacacaactatagacgtgttagcttgattggcaagcagtaatgcaactgatagagcgaacttggttcctatccaattcctcaaagagcctagcattattggcacggaagagatcgaaatgattgatacttccccaaactggatgataccaatagcagcctacctc

SEQ ID NO: 248010 - DNA, 551 bp, Cannabis indica
cttaattggttaatttcatcccaaatcactgtgagcttggtgaaataggagctaacagaatcttctccttgatgaagataagtgagtgtttcattgagttcaaagattcttggcccattcccttggttaaacgattgtgtaacacagtccacatctcgacagtagtgtcaagatacataatgctactcttgatcttaggaaagaccgaatgtaaaatccaagacataaccatttggttacatcagattcaagaaccgaaaagagaatcgttaggagggagttgagggagtgtaccttcaagaaatggtgttttgttgcgggctccaattgagatcttgaagtcgcgtcgccatagtatgaaatttcgatctgtgaggatcggagtggcaagaactaagctcggatgatcaacattactcaggtatgcagggcgatcagtttgaggttgctgaactggtggtggagctagtaacagagctcgagtgttgttgtcagcggaagtccgagatgggaggggatcgatcggaacaggggcatcgaccacgggatcg

SEQ ID NO: 248011 - DNA, 1488 bp, Cannabis indica
cacttttgtgcgagtcactaaagaatttttaatgacatgcataattagactctaaacatttaatgttagtgtcatacaatgtgtgtcactaaaaatatagatagtcaccaaaaagtaaaatctaaaattttatattttttattaatttaaaaaacactagtctatagtgacatgccaaatgtgactgggtaaatgtattcccacacacttagcgcgtcactatatcataatttaatttttttacaaaaaataaataaataaatacatctgtagttaataattaaataaaaaataataaaaggtaagttttaattaattaagaattgtacctgcctttacaaaaaaaaaatgtacctgcctatttaaaaaaatataaataatattaaaaaagaaatatatccatgttagaaaccctattttatcactaagaaaatttataaacacaataggcgccgttcctctctcttcatctccctctatcacgcaagcttcctctccttctccctgtgtggcttctgagattccgaggcacaacgtcgacctcccaaggccaagcccgagccacgacgatggcctcccaagcccacaaccactgctcggttgttcgccgcccaataacccacaaccaccgctcggttgttcgacgcccaataacccacaaccactgctcggttgttcaccgcccagtagcccacaaacatatttttctcactcttgttcatctatagcaacctggccacccagatcgacccaccccaatagctccggccaaccctagttccaaataaatctcacaccttcgcactctcggtctctctcacttccttatacaagaaatcaaatggagaccagcggagaacacctcctgccttgcccagcgatgctagactttcgtgcgattccccggtttaattttttcattttgaaatgtgttcttggccgttttttggttttgtacaattaacaatttttctttggttgtatctgttgaaaaaataaagtatttatgtttaatgtatttgttaactctattagttgattgtatcttcttgtatggagttaatttttctttttgttaaaataaaatattaagaaaaaaattgtgtattcataggttttttaggttcttaattttttcagatctgttcttattgttttttttttattggagtgttcataataactgttattgttctataaatatttcagttaaaaaatttatattgcatttattatatccaatcttatataaatattttgtttagtgtttatatttcaaattttaattttcttccctaaaaaaaaaaataatgtaaataaatttaattatacatatttattttactgagatttaatttttaattcaaataaattataggttctttattgatttttataatataatctgaattgaaaaaaatagatattaattttttaaaaaaaaattatgatatagtgacactctttaagagtagctgatatcagaaa

SEQ ID NO: 248012 - DNA, 1431 bp, Cannabis indica
gaggtgactcggggaccatgaacttatatttcaaagctccaaaacacttgattatattgaatctcatcaatagaataatctaatttattaatttcattattactccatataaatacagaattgcactactttgaataatatagaactacatttacagaattcttacttgtagtccattgatataatcaatataagtagttcgccctccaattattatttcataattagagttgatgaaacttactattttacccttctaattatctctttgactccttatgttcaattaattcaatgtgaacagttaaatctataacttattatagatttggatccaattgttaacactcacagaattaacactttaaaggaacaaatattcgatccgctaggaaagcttgaattccactattgtataacatgttcccagccactcatgttattaagctctcaaaacagaagttgtaagaaacatcttctccgagaaactttaatgagtgatatgaataactctttcatggtaaacaacacgttaataaaagatatttattacatatcggtccagtcatgcataatcaaataatacacaatacctttactacatgtatatccacatatgtgattcgaatcaaaatcacacacactgtatagtaaatcatatttaagagtttcatattaaagattcacattactttaatacactaccaacttattttattcatatcatataatcttaattcgcttgtacatccttacaagattatacattctccatatgtataagacttttttagatatttatttattatacttctataattaatgtatcatttatcttataattgtatttcatatattctataatatattatctattaattacttacttttagggcataaattctaacagaatgtaatatatgaaccaagcaacataaattaatttctgttcttttattaattagtaaataagattatattaaaataaattttatttaacacataaatctccaacataaaattcttggacaacaattctcaaattgcaacaaatatttgtgattttttttttttctaaatgaaaattacttggtggtactctaagctgtctttgttcatttctactattctttatcttcatcactttattacttggtcataccctatgctctctttattacttggccatatcctttctctattgattagaatcttcatcctccattcttagcaataaagaactctattacatattaagttttgttttattgctctaaaaatttaggttagatttgattggaggtaatgaaatagaattaaataaaaattagtgaattagagcatgtttggtattgttttctattttttgttttaacaaattgtttttagaaatgagaacaaaaaatagtttttaaaatttttaaaacacaa

SEQ ID NO: 248013 - DNA, 659 bp, Cannabis indica
aaaaaattaattatgtttttttattaattcttgtttgaatatcaagtgattatcgacgagttgtacataggttatcaataaggttgggcagtgtaatatcccgataagtttaatggtaaatagttagaggttttatttatattatgtgttaatcaggtattaagtgggattatgatcctactaatctatttcaacaaaaaatttaaatttttctataaatgagtcaataagcgtaatttataaattacgggaatttatataacatgtgtgaatgtaatatgagctatatgtgggataaaaatatttttaggtctggcgaccttgaagatctaataagtggataaataagcgtaatttgttaattatggagatttatttgaaatatgtggatataatatgagttatttgtgaaataaaaatatttttaggttcgacgaactggagactcgattggaggccaaaatgtcacaacggttttcgttaaaaatatagattggattattgagataaattgattttagaaataccgaggtattataggatactcagaattcgccaaatactctagaagtagaagtttcttagtggctaaaaaataataagataactattaatgatgttatcccaaaattggcactttgacgtggcatcacgagaat

SEQ ID NO: 248014 - DNA, 559 bp, Cannabis indica
tttctatagaaaatttacaaataaaatcttacaatacatgtgtccaatgtaggagctgactctgccagattattcacattcaagaatagttgtccctttacagtctggccaggaactgtcactggtgcagggagcccccaaataccttcaacagggtttgagttagctccaagtgcttccttatccctaaacatcccagcaccatggtccggcagattctggggccgctcacattgctcaatggaccacaatggaaagttcagttgcgccacgggagaatgtggctcgggagagataggctgcaaaggagcagggggaattccaccagcaacgcttgtcgaattcactctagcgccaaacaatggacgagatttctacgacattagccttgtcgacggctttaacttgcccgtctcggtgaagcctgaaggaggggggtctggtagtaatgatggctgcaacacaactagctgctctgctagtatcaatgatgtgtgtccaaaagaattggctgtgaagagtggaagtggtgctgtagttgcttgtaaaagtgcatgtt

SEQ ID NO: 248015 - DNA, 661 bp, Cannabis indica
tacgtactctctctctctctctctctctctctctctctctctctctctctctctctctctctccaaagttttttcggccccaattgcgtcatctcctattccgttccgcctactctttgctctccattctatctcatccacctctattctctcaccgttcgaccaagaaagtaattttccttgtttttctatttgatttgaagttgagtttattgtgtaatgatgattatgtttaatgagttcaacaaatcaaaactcgtggttttattggattgaatatttgtatttggatttagttttgttttatgtaatccggattttttttcaaaacttgacttattattttttgtttgattttggaaaaatgttgttgttggtggtggcactggtaatgctagcatggtggtgataacagaggttgtaatggtagtgtggtggtaataatggtagtgattgtggtgtgatggtggtggtggtttcagtgggctggtggtgggcagtggtgggggctgaagggtgtgttgaagaaatgggttaaggtagtggtggtagtttcctgatggttccagagaaggaaaaaaaaatggattgggttttgatttagttttatgttaagcatgcctatgctgacctggatagtgccatgtaggccaattttgct

SEQ ID NO: 248016 - DNA, 551 bp, Cannabis indica
tactttacatttccataacattttttttaaaaccatacatatgtattagttgatactctaaatttaaatttcatcaatcaaattttataaattcgaccaaactattctagttatatatacaattttcgaatacatgatcaaataaacaatattaaaaacaaagagtactaaacttatttcttcttttaaatatatatatttataaaatacatgaataataacactatctacaaacaataatatatataactaataatctaatacaaaccattaatgttgcatgactatcattcctttttgtcttgaaaagttgcctaatctcctctgtctatacattttatacttggtctttctcattcaatcattttgacatatataattaatatcaaagtgtggatgagaatttatttatggtgtagcagataatgagagcccattttcttacaatgaaggaagtggtaaaggaccaaagaagtggggtcacattgacccacattggaaaatttgtaacaatggaaaattacagtctcccattgatcttcttcatcaaa

SEQ ID NO: 248017 - DNA, 905 bp, Cannabis indica
gaagaccaagagtgagagaccaatccaacacaaccattaatgtaacaacttctgctaatatgattggaaaagtccctacaataatcaacaaacagaggataagttcgaaaaaaataaattacaagcagagaaagtaaatggtcaatcctaataaatgaaaacaataacgaaagaagtaaaactacaaacccggtaaacaaaaaccatacaccgaagagaaaagtctccctcgggtcgaccctataatccaaacacaaatactccataaaataaacaaccttacaaactaaacttactaaaagtcataacctcacatccttagaaactacaacacttatcaaaaagctaaaattcctaacaaatacattataagattcattccttaaaaaaacatctatcaccatatctaaaaagtgaggatagtatcaacttcttaagattggacaaaacatacaccataaaggaaacgccattgctcaccctcataactaatgaatatcataaacaataaagcaaaaaaacacctcctatcataatcttataaagtcataaactataccaaataaggatctacatagacatccaagcacattcccagtagtatctcgaactattgtcccaatgcctatagtattagaattaacatccagcgacgcatcaacatttagtttatacgctcccaaaggcagcttaacccatcgttcaggagacaagcatgtcgacccctttgtcataatattatgtctcaaacattaactgtattcattaaataacttaaagatttgtgagaccataacatcagaagggttggctttgcgaccatggacaatttggtttctttcaccccaaatataccaagttgcaacaaggaacaattcgtaatcagatctagatagtatcttcga

SEQ ID NO: 248018 - DNA, 1599 bp, Cannabis indica
taactttataaatacatattatcatttcatcacaactgtacacttttgataatcagataaattaaattgtttttaatttagagatctaaagagaaagatttaattaatagtattacactattaaattcaaataattactagatattaatttaatacgcatatttaattattattattagtatgttctacattatatacaaacttatatcttgagtttatttaattattttaacataataataataataataataataacaatattaataataatagattctccatttctattagtaagcagctcagctaattaatcctatacataagctgatccgtctagctaatcttatttggcaataatttcttaaccgagctattttttcttattatgtgtaatattaatattatattaattagcttggttatgactccccccattatttgtttataatgtttactaattaatttttttttacccccaatttaaaaatccacacgcaatagaccaagtacgtagtacgtatatagttgtgatgacaaacaaaactactaccccatatataccatataagtcaatattaaaaacaaatatacaactattcatatgcacggagtttacttttcaacaatataatgtaggaatatgcacctcaataattggtggtatcatattggatccaatattatattgtttcatcaaataataatttatgtttatataaatatcgaatccttgtcagctaaaatatatgcatcttcttactttacttgtaaattttaataataattaaaatatgtttgagtgtgttctgaaatgactctctctttcttttcacccgtttattagtcatctgagttgaagtcactcactacaattataatttgttatcaattgaccaaacgtgagcttttatctttttaacatattccttttgcttaagattcttccaagaattattttgctataacgtacgtagatattaataatatgctcccaaaagtcaccgattcaagccacgtcatcaatgttaatgggcccagtatctactaatgtccacgtgttgggttaaaaagaagctgttgcttgatttcgataattcctatttcttttttttatttttaagattattgttattgaatatcttgcaatttattaacttaacgatccttcttaaaaattattaaattaaactatttaaaattcaatacttaattagaaaaatattaataataatacataaaagaatactagacactactaatacagtaatactttttataatttctaatttaaatttactctaatttaatttgtgtcatctattacaatgtgatacttgtaagttgtaatactatatttattggattaattttttcttttctctaaaataaacacaatattcaaagtaaatactaattaatattaaaagtaaatagatattttatttagagatcttaattcaagctatattataatataaactttaacatgattgcgatttgctgctgttttaattttttatttttattgcgtttttaattgatatcaaaaatctagtgctcaatttttctaaagtacagatctcatatgtagttcaa

SEQ ID NO: 248019 - DNA, 794 bp, Cannabis indica
aaaaaaaacacttatgatattaccttgagtttacttatagctcttaggcagtcatcttcagagacagcttctcggtcagtccttcgcctccgacgaagcaggttgcagagttcttgtaagttgatcaaacctccattgtgccaaacaaatatcaacaatttgaacacctgtctacccaacactaccatccaacatattagtctcacctttatgtacagtacacattcttatttaatttaaaacctccatctcctctatttattagaattatatttatttaaatgtgttgtttataatagtattatatatcctccatatataactaagaaaaagaaattaaggaattatatttatcaattaatttgataagcaaactttcaggtataactgagccaaaagattttccaattatattggcacaaaaagattgagctaatttgtttccaaaagtttgaattattacgactaatcactaacaatctaaaattagaggtatgttctctttgaattaatttattcattgggcttatatatttgtgtatttttttttgtgtattagtgtatttatgcgatatttttttttttttttttttttttttatgaaattactcttttacaaataaatatgttttaaatttaaactctataaaataataccttttttttttctagaaacataaagctacagactaatttcatcaacaatcatcaatacaaaatttaaactctatattaaaaaatatcctttttttctaaaaacataaagctacagactaatttcattaacaatcatc

SEQ ID NO: 248020 - DNA, 711 bp, Cannabis indica
tttattagccaagggtaaaatggggaaaatatgtaaacaaaagaattattttgtataaattaatttggggtctaaattttaattggaaaatttcattatatatgcataaaaatgtacccattatcaatctttagacttttaactaatttatactaaataatacatattttgatttacttttctctttttacccccctcgtattaataattgtgctttgaaaaaacaactctctccctctctctctaactcactcatctctctctctctctctatatatatatatatctatctatctatctatctataagtaaaaaaattaataaccaattcacgaccacgaagaccagcgacaacagtggagtatcctaattaaagccatgaatcacacacattggtcgtaacgaaacttgctgcacccacaataaatgggcaagtaattttacaaaaaaaaaaaaaaactaaacatttagaagagtatgtagttcatttccagtagatctgtgtggttattattaacattggtgttctattgctgtttttttctgcaaaaaaagcaggatctgattttttcggtgagatttggattttttttatgttatatcgatgatttattgataatatgtcgatgttttatcgatgataagcgtattaaagttggggaagattattatcaaaaatttttcgataatttttcaaggctttcttgatga

SEQ ID NO: 248021 - DNA, 4653 bp, Cannabis indica
gctatcaaattctggcctttgcatttggtttctacaaacaagacaatggttttgccattggaatctggtttgacaagataaaggagaagacagtcatatggacagcaaactgggatcaacagcagccactcccacagagcaaaacacttgctttgattgattttgccaactctgtttcccctgatcagcctgctgcctcagcttcaatgctcgattcgggtaattttgttctctacaactcagaatctcaaatcatatggcagagctttgatcatccaacagatacccttttgccaggacagagtttagagagtggaaaagatctcatctcagccatgtctaaatcaaatcactcacccggaagatttcatcttgtcatgcaacttgatggtaatctggtccagtacccgagaatgagcaatgtaaaagcctaccatgcttactggaactcacaaacttatgggaaaggatcacaaaatgtaactctgaactttgatgctaacggtaacctatatatgtacaacactactagctcaagtaatataaagacaattcattctgtaggttggggacacaagagtggaatgttacttatcgtctgacaattgatgcagatggaatactaaggttgtattctcacagtattgttcaggtcaatagcaactggaatatcgaatggaattcgagtaacaataggtgtgatcctactggagtgtgtggcatgaatgcatattgtgttcttgagcaaaatcaacaacccaattgtacatgtcttcctggtcatgatttcattgatcaacaacagagaagtttgggatgtgaaaggagtagcagcataaattattgcacagctgataatcgagataaagtttcacttgaagaattttatgaagttttgtgggaaaacaactactactctattgtgccaaagaacagcaggattgcttgtgaacaagattgcttgaaagattgtcaatgcgaaattgctgtgtatacatccaacacgtgcaacaaactaaggttgccactgagatatgccaaaccggatcagagaaatagcgatgtagtgaccatggtcaaagtgctcaaacaaagttctgaggcaacacaacatgggtgacgaaaggaagaagtgaacgagttcgaaatagattccttatcagcagtgttgtgttttctgttttggccttatggccttggcaatttcaattgcgcttatattcaagtttcgaatgtgggaatacagaaggattgcagatcagtggccatgattttcttgaggatgttgccattcgtccatacacatttggtgagctagaaaaggcaacagaaggtttcaaacatcaagtgggaaaaggagcttatggagcagttttcaaaggtgtcataccaacaaacagtttcaggagagttgtggctataaagagactagagaaaatggttgcagataacgaaagagaattcaggaatgagatgaaagtaattggaaaaactcatcataagaaccttgttaagcttcttggttactgttatgaaggagctaacaggcttttggtttatgagttcatgaaaaacggttctttagcagatttcttgttccaacccggaaccaagccaacatgggaagaaagagctgaaatagctttgaacatagctagaggaatggcctatctacatgaagagtgtgaaatacagataatccactgtgacatcaaacccgaaaacattcttatggatgaacaagcatgcgcgaaaatagctgatttcggtctctcaaagcttctgatgcctgatcaaaccagaacatacactggtttgagaggaacaagagggtattgggcaccagagtggcataggaacatgccaataacagtgaaagcagatgtttacagctatggaattatgttgttggagattgtgtgctgtagaaggagtgtggatatggatgttcctgagaatgaaattgttcttgctaattgggtttatgactgttttgtgggtggtgaaatgggaaaactagttcatgaagaagatgtggagagtaatgagctgaagaagatgattaagttgggactttggtgtattcaacatgaaccatctttgagaccttctatgaagaaagtttgtatgatgttggaagggattgttgacattccaacacctccaattccctcttcctctattagtgtaattaatattgtttgataaaaattgtaatggatacaaattatgtatagaaaccaaattagtgttcctgtgtttataatatgcttttgtatattatataaatatgctggtttcaatagtaatgactagctaatttgcacacatatatgtaaaatttataaatatactagctgtttatcattcagcataattttttgatctaattttgttttattgtgtaaatgttaaaatacatgaaacattcaattcaataagtgcactacacagtaaaatttgatacaagaaatgaccagttaatttcatattaaatctggtgtgactgtgagtgacgatgaatcttcaatgaagctattccctggctctggttttttaacatgccggtccttcattgaatttcttacactgataactcggttccactcccctgcacttgcatacatgtttgcaagaagaacatagtcactgctgtgatctgggtctaaccttaaaagatgttttctcacctcctttccaagcttcacatcaccatgagttcgacaagctgcgagaagagttctccatatgattgcattgcattcaattggcatacttataatgaattggtaagcctcttccaacaacccggctcgccccaagatatcaaccatacatccatagtgtttcattgttggtttgatgttgtagtctttagtcataatatcaaagtattttctaccttcgctgaccaacctaccatggctacaagcagacaaaactcccaagaaacttacattgtccggtctctcaacttctaacatttcggaaaacaatgacaatgccttgtctacatgaccatgattggcaagtgcgagaatcatcgtgttccatgatatcaaattccgcctcttcatcatcatgttgttgaatgtttcatacgcttcttcaacagctccgcacttggaatacatgtgaacaagtgaatttgatactgaggtgatatcgcgaaaaccagttctcttaatataagaatgaatccatctcccgaaatctaaggctcccaatgcagaacatgctgagagagtcacaataaatgtagcctcgtcgggttgtgtaccactcttgagcattctcaacaaatgttccaaaccttccttgtgtttttcgcagtagacatagctatcaagaactgtgttccaagaaactaaatctggactggacatttcatcaaacagtttaactgcattttgaatatctctaaacataccatacatatgaatgagagtgttcctcacaaagacatgagaatccaaaccatgttttaagcaagaacaatgaatctgcttgctcaaaatatctgatcccaattgctcagaaaccttaactaagaaagcacaagtgaaactatcaacctttccacctttttcttgcattatcttataaaattcaaatgccctttggggctggttagtcttgccaaatcccctaatcatagtattccaaagaaatccatctgggttttctacacaatccaaaaccaataaggcataatccaagtccctgccttggccaaccgaacaaaactcaacgatcttgcccataacaaagaggtcttgttgaaacccagctcgaataatgcgtccatgaatttggttcaaatctttcatggtggaacagagcttgaaaagggacatgacccattgaagcttttcaaaaacagtgtcatttctactgtgaaaagcacaagatttcagtttcgaattttggcgggtaataaggtgaccaatgctcaaaacaaccaactgaaaagttgtcttcttggtcctgatcatggtatggtattctcaaacatttctctttaatgtattatgctgcaaataataataattgatacaattaatagtggaactttacatatgaaataatttgatggattgattaaaacgaataaacctagtgtaatctttatttatcttaagtgattatcacaaacaaacattttgctattagaaaaatgtcatagaaaagactttaatttaatcgaaaaaaaaaaagactaaaccggaataaaatcacaaaaagattggaagaattcctaacgatttttttagtatctaaatctaaataaacttataaagatattattggggctacatcgtgctatcgtcttcaaattttttcgctttccacaacaaaaatatatcgagtctatattacgctgcatcgaactaggttaaaaattcaaatttttctcaaaacacgtatcaaaccattctgacgtcaaaatttaacataaactcaaataaacatattaataattttatatattttaactctaaattatgcacataataaaaaacaattcaatggagaagctgtggctgatagaaaaattattaggtctgtgggttgttaggttcacggtggtcattagattcgtgggtcgttgggtctgtgatcgcggtggttatggagagaaaggaccggagt

SEQ ID NO: 248022 - DNA, 546 bp, Cannabis indica
agacaaagcttcagggttttttttatacaactctatggcgtcggttattaggaaataactgacggcaaataatcctgaaaatttttcaacccacaaccgactctatagggtatagttaatttttatacctacggtttttactaaaacattgcctctaaatgccaattttaaactaggcgggtatttatcacactctttagctttttttttttataaaatgggttgaaaaaacagtctccaaaggcccatattgtagtagtgtcagtgcactgataaatcttgggaattaaatagtttgaaacatataattacaattattttttcctgtggtgacaatactatcattgtaaataactacatattagagatttagcagaatttatatgttaaacaattaatcatgaaataaatatgtaaatcaagcaatagataataacaaaaaattatctcagatttttattgattgaaaaataagattatattgaaattaagttttatttaaggcataaaacatcaacaagtatcatgtttctattcataatacat

SEQ ID NO: 248023 - DNA, 2098 bp, Cannabis indica
agctcctgtgttgagctcggtgagttcatgcaaagaaaaataaaagaaaattagtgagagagattatcagaacaagaagaaaaaaaaacttgaaataccaatcaaatttgtggcttggatttcattcttgattgtaacattcttcaaagtatagtgtagatctgagatcgttcttcaaggcaagctcaaagaggacgtacctctagatttagggcgaacctctataatccatgtgtttgttttctctcttgatgcatgttcttgtgtttgtatagctttgatccaattttctcgggttgggttctagtaagatcgatctagtttgatcgagaaggggatttagttcctaggaatcttttgagagaaagaaagagagaaagagattcgtttattaatctcgaaggtttgatgttgaatctgagctagagttatctcaattggaactatttgtttgtcttggtaaacgacaaattgttttgatctaaatgatttgtcgtaggggctaaacgacttgaaattttatcagtttttttacttaaatagatttgattgtttttttggtcatttgtgaccctatcgttttgaacataatattgagttgggtgtagggcattcttggaatttaagaattcctacatgttgttttcctatagctagcgtgttgatcatgaaggtttttcattcaacatttacttatctggtgtaaatacttgaaaagatgttgaagctaagtcttaagagagaactagctaattaaccatagctatagctaaaaggattatagcatacattaaaccaacggagggctagtttgaagctcaaattataacattgcttggaagttaattattatgttcttgagaacgtcaaaattaagagggactttaattgtatttctttgtatgaactgattgtaatgacattgattcttagtgcatttgcttcatctcaagaccaagtctcgtggattaagctaagagaaattttggctaaaccacgaaaaaaaataaatttatcattttttattttgcttttaagcatatgtcaaatcttatttttagtagtcttgcattgtgtggttattattaatgagtaggagtatttaatcaatctttcaagtactataatgtaacaatttatttctccaaaaaaatttatctcgaaaaaattagtgaaacatcttaatttagatattactatagctctttcttttgtgccttgtcaatagtgatctaataatcacaagttattataacacactatttttttttttataattagatattttaattgtaagaaaactaaaccagcttagaagccataaaaggggtcacttcccttaataaaccagagcttttgatccttgccactctagcccaacaagctaaagaattagtaatatggttctttgactgaggaataaacgaaacaacaacctccttaaaagtcttacaacgattcaaacagaaagagaacagaggataggtacttcaaccaaaaggtaatgagccaacctcaaatgcagtagcagttgccaacgagtcagtttcaattcaaacttttgttacctctttatccctcgccatctgcaaagccaatgcaataccactcaattctccttccagcacaccataaactgacgagaaatccacaactacccaaaactcctcaaaaacctgcacgttcaagtgaaaaacagcaaaactagcttcctccttccccacatacgcatccactttgtaacactagaattcctcctccagttgatgaatacgtctctacaagcttaagtctggcacttcctcttgttcaaactaatagcgattgtaaggaaattcttgatatctcatgatacactctgtataaacccgatccagatcacaatatttatccttgaagatcatatcatttctccatttccagattgtgtcacaaacacaagtagtaaaaatggttagctcaacatcttccaaagttgatccacgacttgccaaagtctataagatttgtccaattcatccagtcaatctgaagcccccactggcttctaaaccaaatcccacgagcgaaggtgttgggaattattttaccaggatct

SEQ ID NO: 248024 - DNA, 732 bp, Cannabis indica
acctcatgacaactataatatacttataaatatactattaaaaaatagttaattatttttactgaagatatatttttataaaaaaaagttcaaagtgtaaagtttttttcccttgttgacttatttttgtaacttttttttttttaatttttggtctattatgtaaatttcttttatgtatttatgaattgctataaattaatacaatcaatataattttaatagagaagtcaatgaccgagctatgggggccagaggggttaggccctccaattttttattttttatttattattattttttatatattttttgaatagaaatagaacttcattaagaagacaaatagtccaaaagaatagacataaattcagtaggactttattaagatgacaaatcgtctaaaagatcacattcattcgtggtgtgcctcacgtcgccatgttattcatacctcttgcttgaatctcttttgtttttacccctttcttacattggaggcggctttcagtagtgggcgtgttccaagtcaccgaaaaatgttctcacgagtattcgtcaagttagtatattctgtgtattggggttcgtaccccttctttatttatttttttttagtaggctcgctctggctttaggatttggcgctcttcttactctgagataggctcacttgagataagttaattttataaatatcagggtattttaagatattcgaagttgatcaaa

SEQ ID NO: 248025 - DNA, 579 bp, Cannabis indica
tatgccattctttcaaacacctcatatacttccaaacaacaaaatatatacatataattagagaatatcaaaccaaatatatatatatatatatagactatatagttattagttagttaattaattattaccaacaacaaaggcacaagctctccatccacctcttttggatctacgaactgggtttcctttaagatcaacactaccatcttctgtataatcatcaataccttcttcttcattacccataatataatctgatcacacaatttttctttattaattctctctcttttttatatatataagtttaattgagaatatagactttactataaagtataaagagctaccttggcttttatagacagctaccaattcctgccaattaataaattttttatgttttattataagacaagcaaaatagtgtcatgttttaattttaattattcacaccaaaaaataaattaaattaatataatttagtatagtcaggtattgtcgatcgattaacatgtagttattctatataattaattaattagtatttttattgtctaacgtataaattaaaaa

SEQ ID NO: 248026 - DNA, 555 bp, Cannabis indica
aaacaatggtctaaatggtttgtggctgagtactcttacaatacttcttaccattcttcactaaagagtacccctttttgagcattatatgggcttgaccccctacctctcctatcttgcaaaaaggtaccaccatagtatcatcagttgacgagttacttgaatctcgtgatgccatcctcgatgatctccaaatgcatctccttcgatctcaacacataatgaagctacaagttgatttaaagcacttactagatgagtttgctgttggagagcaagtatatctcaagttaagaccctatcgtcaacggtcccttgcccaatgctccaatgaaaaaatttcagtaaggtactatggaccttttcccatcattcaacgagttggtcatgtcacttacaagctccaaattttggaccaggctcgtcttcatcctgtctcccactatctctcaacttcgtcgagccatccacgtccctcaccaaagcccacaccctactattccccctcaattaacagctaattggactaaagtgcaaccgaaactatttggacat

SEQ ID NO: 248027 - DNA, 1338 bp, Cannabis indica
ctattaaaagggtaattttgttaagagtttttttttttgttttaagaaaaaagttctcatcgctattaataagttttgaatacaagtaggattctctaggcatcaaattatattttttacagtagtcagagcaaatttgggcaaagtatgggcaattccattacaagatctattacaatgaataaatttaaccaaatagagcctattgccaaggttaacaatatcatctagaacaagatccaaagaggtaataataaaagcattgtttttcaatttaagcacaatattcaagcaatcagacttaataataatgttttcatacccaagggagatgcattggaccaacgccttgcgaatagccaaagcttcagcaacttcaggaagaaagtagacatcgatatgccaactcgcaaatgctacagctattcccaaataattacgaatcaccatacccaagccactacatttgcccaaggaattgatagtggcatctgcattgactttgagatcaccaagctagggaggtttccattttgggaccatctgagaagggcatgccgagataccatcccaccagtagggacgtcagtcgcctccatacaaatgggagccatcaccaaggcctgtttgttgtgaaacgttcccagataatcacgagcccaatgcacagtaagctcgagagtcagctcaacgttgttgtggatcattttattacgtttgaaccagatcctccatagagtcaccataaccaatttaatcaactcctttaaaagggagtcaataatcttgtgaatgaaatcaaaaaagtctacacaatgaacaaaaggatcccccaacgcaaactcacatcgtttcctacaatgtaccaacataaagcaccccaaaagaggatgatgagtagtttcatcttccaacccacacaaaagacaaagcccatcagataacaaaccatgaagtgcaagattaattttagtggagatccaattaagtgacacttgccaagcaaagattttaatcttaggaggaagattaagggactatatctttttccgccaaccagaagcgccaccagattgaaaagcatgaggcataaccaatttgcgaaggctaaacaaataaccactcttaacagaataccaaccataattctcaaagttccaaattattttatcaggcacatcatgagaggaccaagggatagaaaggatatattcagcttcatggggcaagaaattggattgaatcaacatattatcccaatcacttatatctttccttaacactaacaccttactagaaccatcagttgactagacgcagataacatggatggcagca

SEQ ID NO: 248028 - DNA, 949 bp, Cannabis indica
gtgttcatgaagagcaagatctggttaaagcaggtgcaagaagagttgtggggtcagaaaagtacattaatattttaagagaaccttagttacatgatgaaaccaactggcttagttggtaaacatgtttcttctctcatgttggtaggaaaaagagaatgggatactgagattatttcagacatgtttaatgacagagacaaagcttagatacttaatatccctttgcgctataatagcgtggactagctctagttcattttctgttaaaagtgcatattagtttcttgagcatgagaaaaaaagatggcagcctgataacaattctgatttttggaggaagatatggtagttgaaaattcctccaaaagttaaaaaatttatgtgaagagtttttgaaaattaaacatgtgccaattgattagagttgtccaatgtgtaaggtggctatcgaatcagctctccatttgattagagctatggtttgttaggccatctggcagcaaaggaatgaactggtttggaagtcaaaaacatcttctgctgaggagatatgatcaatgatcaatcacaatcttcaccatagtttctgatatcaataagaatatttggtgattacatccttgactaaatcggtgtttattaagagttattaataaatcatatttaaggcatcaattttttattcacacattagcttcaaataactatttattatagattaaatataaaattttcagcaattaattctatattaatatttttatattattttatggtatacaaaactgacaatctaaataaattagtaataagaaagtgtttgaaaattatggtagtatctggtttgtgtcaaggggggttccattcatcattcttataagtttaatgaatttgttgttctttcaaaaaaaaaaatatattatgaaaaattctaaatttaatgaaa

SEQ ID NO: 248029 - DNA, 844 bp, Cannabis indica
gcaaagaaagatattgaggaaaatcaaagaatgcttatgaaagaaagaaaatccaagtctgaaacatgggttcctaaatattttagtgtctcctatagcaaggaaaatggatgggactgctcacctttgcaaaagactatcccacctgctcctattgttgtcccattgaacaattaaatatatcatgataaaagtaatgtatcttgtattctaacctacactgacatatctcatgtggtttcgatttgatcttgctataattaaaaagtattaaaaataatatgtgtttcttatgttgagactgattcaatacgatgattatgttgtataatacgatttgttgtaaaacacttaacgatatcacttatgtagaagtgaaaatatgtgaatttttgttatggcattttgaaatgtactttttaacctctaaagtcgcacaatgaggtatctaaggttgagattagttaaataattattatatgtttaaaataaaaaattattacataaaaaatataaattaacactttatttataaaaatacctttatacacattatatacatatataaataaatttaaaaaccctaaaactaatatatatatatatctaaattattaataaccctaaaaaaatctgaaatcttaaacactaatatattgcatacggtatttactttcaatggtcaaaattataaattatattatttagatacacataataataatctcacttaaaaactaataatatttttcctttaatttttatttgtatcacttttaaataacatagaaaaaaattagcataaaatttagtatacgtgcctcgcacatagctttttgctagt

SEQ ID NO: 248030 - DNA, 541 bp, Cannabis indica
aaaaataaccatcatcttgagggggaatgttgtagacgttgtcccacatagaataaatggtagagaattgagccatatataagaacatgggctactccactcatagccaattggttttgacatggaactccataattctcaacaatcacgtttattatttcaattaataataaagtcaaaactatagaaggagtcatatattttttttaaaaaaataaaataaaagagaaaaataaaacatttggatctcaccgctgaataagaagatatttatattggcagcttattccttaccaaaaatatgtaatatacactaattgtagaaggacgtcttctgctactccgtcaaaatctctcaattaatcacatcttacttttattattgttatttattttgaatagcatatcttactttattagttaaggttaagcaaaaatacatgtaataagtttccttcttgaataactaaaataaattatataaaaaaaatagaatataaaaaaataataatatcatatgtaccgtgtatttttttttttt

SEQ ID NO: 248031 - DNA, 661 bp, Cannabis indica
gctatttcattcgacacgacatggagaatccaagatatcactgtactataacatcgatgccatagctcaaagtcatcatcgtcctcatcgagttctggaagtttgccattaacgaacttcagcttgttcctcgcaattaaagcaacagtcatggctctacgccacgaactataattctcacatccagtaaggatcttaggaaccagactagctccaggatggtcactgttcgacagaaagtatagatttctagcatcatcggaaaaggattagccaccaggatccaaagtagagtatcgattcgaattttcagtggagcttcgagtttgagctcctccacctcgagccatgaagaagatgaaaagaaaggaaacgagaatggatattacaaaaagtctagctctgataccatattagcagaataatgaaagagaagaaagaaaaactctgtgtattattcattggattcgaaacagagtacatgagtgcttttataaacaatctgaatcaaatcgaaaccaactaacaaataacaaactctaactaactctataaccgtctaacaaccttttctaataaactcaggacactaacaactaattcacttttgatatggatagaaaaagaactaaaaaattacttttgatttctgtcatttttt

SEQ ID NO: 248032 - DNA, 578 bp, Cannabis indica
ccaaacttaattcatgcattgtcctcaatgcatgcaatcacaaaaatagagagaaagatagaaaagtacaagagtttagagtttagaatggtcatacctcaccttggagcatttgaataaagggaaagaaagtaaccgaaaataaaatacatacttataataaaacataaatactaaataaaaataccttactaagagtacatggaaaagatcaatgaccttggtaaacagaatcctcaagaaggatctcttccacttcagcagattttaattttaaaaatagtttcaatttttgtccattaactttgaaaacattaccattattaggattttcaatttcaattgctccatgtggaaaaacagtgcgcacaatgtatggaccagcccatttagaacgcaacttacctgggaatagatgcaaacgagaattgtacaaaaggactttctgaccttgagagaagtcttttctcaaaatatttttttcatgatagagcttcatacgatccttgtatttttttttaaggatcattccgtatttcttctaattcatttagttgaagctgttgggttttgtgccc

SEQ ID NO: 248033 - DNA, 608 bp, Cannabis indica
aataataacgtttaaagattactttaaactaaagtattattgtgcagtgaactgtttacatggaattttttttaaatataataaaataaaattaatttcttttatttggacattaaaataaaatatttagaaatcacaaatttaaatagagtacgtaagtacattatttttttaaatctttctttattaattgattacaaatttattcatctcaaaagacatactcaaaaatcacaccaaagaccctttatcttataaaattaacatttatattcaacttttaataaattattccttacaaaaaaaaagttttgataaattattaagtttgaaaaaaaaattgagagtcgacaatattaattaagttatcaataataattcaatggtatggtaaaaaatatgatattaattaagttatcaatattacacttttactacttgcacacacaatccatgcagccacacacgtcattgattgatgacttgtatcaatcacacattacattattcccttatctttttctcttctttttttttttattattttcaatttcttttagttttttttttttaaaaaaaaataaaacctccatagctgaactcttctc

SEQ ID NO: 248034 - DNA, 733 bp, Cannabis indica
ttttattattattttttctttttcttttacttatcttatttaatcgctttatttttgactcaatgtcgttggctagaagcgaggtcaatagatctcatcacagatcctctccaagggagactaatcgacaaatcggggaggttctacagacaaactttccaaccaagttcctctggaactaggacaaacgtttcctaacccgaaggaggacaagccttgtcatgaagatctagtggcgagaatagccagactctagcaaccattggcatgggggccgcccaagggtcttcagtacaacaacacccccaatcgtccaaccttcggccagccagcacctaagtggtgcacctttagctggctaacagggtgaattcctgtctcgaagcatctaggaatgagtaacttaaaggctaatctttaactggctaggttcgagaatgggtggaaacagccaagacagtaataactcgaggagtgaatacaatcacttcagacatttagatccaccaaactcttgcaattggtgtgatctattcaatgttaatgcacaggctccaccaaccagtcacgaaagaatgtgtagccaggccttgcctgacatagggctagccaaccatgaatagctaccaagctcagggctggccagcctcgaccatactctctcccagggtatggccagctaggctctgggccaatctagggttccatcttaatcaagaatggccaatcaact

SEQ ID NO: 248035 - DNA, 1041 bp, Cannabis indica
gttcttctttcttgagttgtgggtaatctctcttgtagtgtccaaacaaaccacactagaaacatccttgccctttacactcacccaaatgatgcttcttacgattgggacattcctggtaagtgtatcagttttcggaaccaccttgacggtttctaggaccttggttccctcgaaacctcttattctgatttgagccacaatgtgcagatggtgcctttctcttttgattagtggtcaagccactactacccctaacataaccagaggtaggaggagtagtggctccaccaacaacttgtgtccctcaggactccttgatgcacaaaactgcgcccttagctcgctgtgcttttcccaccatatcagcatacgtggtgttatcatcagttgtgatcatcaggtcgtgtttgattttgggattcaacccatccagatacttttctttcttactgaagtcgattggcacaattcccaaggccaacctagccaacctctttaactgggttgtatactcaataacagtcatattttatttctaagtcagctgagtcaattcttttctctttgcacttctgactgcctcgttataatactttgcattaaacaattcctgaaactcttccctggtaatggtaatgacatcccgagtaagagccaccatatcgcactagactagggcatcttcctagaatcagaatgtggcacgagccactctgtcgttactggtgacacccataaaattcaaaatccgtgtaataatagtcaaccattattcggctttcatcacatctggacctcccagaaagactagaggtgcctgcttccgaaacctttcatacaaaggttccattcagtttgccgttactaccaattcggcctgagcagcagggcaccctgctgcctcaatctctgtatctcaaggtcttgctcttcaattctggcttgcatttcagcaaacctaacttcccaattctgggctccctgatcggcttgggcagcctgggtagcctgtggcgggttctcatcaccccgaccacg

SEQ ID NO: 248036 - DNA, 575 bp, Cannabis indica
atcttgagaaatcaaggtcctcagagcagcaagtcaggcttcagcttcatccttgtccttgtatatcttccaacaaatttatggaataacttacaatgaaaacattgacactgctgaactggacatatatattttaaaaaattaattgaattactgtcaagtcaagagtattgataaaaaaaaaatagctgaaatacaagcaagcattcactattttttttttttttggttgagtatgatatataaattcaagataggtatgaatgtatgaagccaacaagccaaccacagattcaagaaaatagttaaaccatctcttcaatattgttatggagatcatatatgattaaattgagaattcagcaatccattatcaacaataaaagaacctttgtgcaaccaatgatctcaactgaattaaagttaaaagaaaatataattacaatggcataaagaagctcaaacactttatatggtggaatcaaatgatttaaaacataatatcaatatagatggaaacaaagaatattcataattgctaaacctgtttattaaaccatttaaacaaaaaaaaa

SEQ ID NO: 248037 - DNA, 498 bp, Cannabis indica
gtcttggcaagctttggtagacaaatctggcggctctgataccgaaattgtaatgccctaatgctaaggcacgctacagactttttcaattacagtgctatcattgctaatcaaagattttctcgagaaacgtgtgaaattaaatttttttaataataaatattaaactttataatatacataattatttacaaatatcgggatcccgtttttaaacttttatacaaaacatgccaaaatacactatccaggtcgcacaacgactataaaatataacccgagatgtccgaacactcgaggtcacgctgccacgacatgtacaacctcatctcagccaggctcactcctgttcagctttcccctttcctttacctacacatggaagcagaactgtgagtcgatagactttgtaagaaaagcatataacatatcatataatatcgacttgtatctaggtgcccatacacctatttacaaggcttaacagatgagtgagaa

SEQ ID NO: 248038 - DNA, 784 bp, Cannabis indica
tcgaaaatgaatgcatagcaatcttaccataaaaaggaaaaattattttgtcacctaacttgccaaaaaagtactttacatacttaattttcttacctcaaattccgatgtttaagaccttgtaatcccgtcactactccctataataacacataggtcaagaccctaacattaaaattctaactctttcaatacagcagaaagaatattatttttgaccaacaactaaatgaattcaataaaagttgccttcataaaaattatagacaattcaattatctttccaatgatatgctgattattgaaaatagattaaaactctgagagttatcatagttttactgaaacaatttctaagaaagaatatagagtaacgaatcacaggagacattggaaatacaaagttttgacattgaaatattccaaatcagagagtaatctcttcataaaagttttagaaaatcaaatttctttttgaatgacactaaaatctttaaaattggacttataacgtatgagatatagatattttaccgaaacagttttttagaaatcctgaagcaaacagatttcagactatagcaattaaatgatgattttgacttagaataataaataattggtgaatagtttcttcataaaacatttagaaaatcgaattatcttttcaacagtaccaggatcgctagaattagatcaatgttcagggagatatttaggttttactgagacaacttatatagaaaatatgaaaaaaaaaaaacgatttacaacaaacagcgta

SEQ ID NO: 248039 - DNA, 599 bp, Cannabis indica
attttgtaccattttgaaaaatagaatgttcaatcagtaacttttgcaaaatacatggtctaaaattatatttaccctttatttatttatttattttaaattaaaattataatttagaccaataaaatatcaacacgtgtttttaggagaaacaaatagagcagttaaattggatacctatagatttatgagaatctcgagcttggggacttttatcgcaactttttaagattggtgactaatttgtatcaaagtgaatcttttggagacttatgttacaatttaatatcaacacgtaatatttttaggagcaattaacggatctgttaaaatgaagaccaatagacttacaagaacttcgagcttggggactattatagtaattttttgaagttggagggttatctgtatcaaaattaactttttaggacttacgttgtaattttcttagaaaaaaatattacttatctccattaaaataacttttaggaacctttatgtctattgtgttaaaaatatttcttatattttatgtaaatataaatattaataataatataaaaaatgattctagcatgtaagtgcttctctcaagctat

SEQ ID NO: 248040 - DNA, 662 bp, Cannabis indica
tatgtctagtttgtgaattttcactaaacagggatgaaattgtaaagaaaagagattctaggtttattgattaattaagagactctatacgtctaaattagacccttttagggtcttccttgttcctaatagatcgctcaataggtattttgcttttcagaggggcctttttgttattcttcttgctcggggcttcctagtcaggcacagtctcttcggatgccacaacctttggcccaaaatcggctagaaatagcttgtacttgacgaaattagcctcagtggccaagagggagatgtttcgttcagtaggagaaagttgaagatcttttgcgccctcttcctgagctccagtgtgaacgatgggtggcagtaggatggcacttgctgaaagctagtgtggtcggtgtccatccccttgacaaaataatacacatcaacaaagcctcctatctacgtcacttcagtggccgtggtgcctctcaacaatttcttctcaatctgagacaaatagaataccccgacctattctgcttggggcttgactttcgatcaaaaagacaattggtatagtgggggacgactcaccccatccttgtgaggcgtagagtattaacagggcagacaaatatttgaggcccatgtgggtgaactgggttgga

SEQ ID NO: 248041 - DNA, 2573 bp, Cannabis indica
tttttcaaccatgtgaaaaagttacaatggtaatttttgacttgaggcatatgcacattttcaactatgcatttaatgcaagattgattttgtgtcttgttcatacatccaaggaggcctataaatagagctccatccctttcatttgttcatcccatcacaagctattccaagagtgaagagtgaggctcttgagagaaaaaatagtgagaatacctcttagtaagagaaatctaagagagtgagaaaaagagagttcctataaaattatgagaaatattttgtagagagatggtgagattgccacactagtgagtgtgagagatttgagtgtattcctcaagtatttgtcaaaacttgagagtgtaatattgtgtacccattattattatagtggaaggtttgccgtggtttttattagccacgagataatttcttggcgtgcatttagtcatttgattattattcataaagtactatttatattggaagatattcaaaaattctgaatatgctctgtgattgcagctttgactaatctttcacatcagaaaggaattttggagtccccattgtatttttctgcaaatattgatcctgaaggagaattggaatactatcatttattcccaacagaaatctcagctcaagaaagttaagagagaaaagattgtatttatactttctgaatgttacatggcaaaagatcaaagccactgagggaattacacgtgttagagaccttttaccaaaggaataattctaaaacttataaaatagttttacactaaataattgaaatactgaaaaatagaataataaaagcacaacaaccttgataggaacttcgaaatatttcttttttaacatcacctctcaaacgacaagggaatcctctgacttggagtttgtcaataagaaattaaaatcttgaaggagaaagttcttttgttagataatcgactatttgatcatgagaggggacatattgaatctccaacttcttctgcagaactttgtctctaacaaagtgtatgccaagttctttgtgtttttcttggcataatacacaggatttgaagccaaagcactagcactaatgttatcacaccaaacaactagagcacttttcattttgaaatacattgttagcaggctttctaaccaagctatatcagcagccaagttaccgagcgacctatattcagattccatattggatcttgctaccattgattattttttacttgaccaagatattagagattcacctaggaagacacaataacccccaatggattttaaagcatgcagacaataggcacaatcacatctgagtaacctatcaaacagagtctatcactcaaagtgatctgcagcccatgatacatagttcccttgaggtaccttaatattctctttgcaactttcaatatgttgtggtaggattttttaaaaattgactcaatttgtttattgagaatgaaatgtcaactatggtatgactaaggtactgtaaacctccaatcacgctcctatacattgttggttattcaaaggttcaccatcatgtattgaaaaaaggtctattagcaaccatcaatgtagggcttggctttaaatttttcattttaggtctctacaacaactctaaaatatattgtcctagagatagatgaatccatgtattgataaaatacttctatgcctaggaagtagttcaagggacctaagtctttgagagaaaaactttgttgagtcttgtgatgaaattatttatatatgaagcattgttccctgtaataatcatatcgtcaacatagattaacaacataatcacataatgaggatgcttcaatatgaacaaagaaagtcgaccatggaatttccaaattttcagtctagcaaggtgtttcaaaactggtcatactaggctcttagagcctattttaatccgtagattgatttatggagtttgcaaacatcttgaggtttttggggatctttaaaaccctatggttgaaacatgtagacatcctcatcaagtgtttcattcaagaaagcgttatttatgtcaagttgtttaatcacccaatacattaccgaaactattgttaacacaacttgaattattgaagcttttacaactgatcgcgaaccaggtcctcggggaataccagaccaaaggcttaaaaatggcgaagtatttagagaaagttcggatgaacttggaaagattcaattacttcaaaattgaacaaattctgagagaacaaaactccgtcgatgccttagcaaagctggcctcgcagaatgacctggatgaattgaatctagttccggtagagatgctgagcgagccaagtatatgtgaagctgaagacatcgagatgatagatagctctccaacatggatgacacctattatgaattatttactcgacggacaacttccaaatgataaaagcaaggcgtgaaaactattgtattcagtgtctcgctacacaatgattgaaggaaactatgtagaagagggtatccaatgcccctacttcggtgttcttcatgtagaa

SEQ ID NO: 248042 - DNA, 318 bp, Cannabis indica
aaaataaatttccaacaggatggccctcgggaaaagtgtcaaaaacactaaaattgaccttgtatgtctagtaccaaggtagataatgcatgtgacctttcttcagttcccagatgaaacacctatatctttcgtacgtatctttttaggatactaatgactttgcacctcgagctcggggaaagggtgtatttgctgctcacttgcaagtcttcaaagttggaattccaataatcatcactagacaaagttatgttggcatggagacgggaatgatctttgtataaaattcggagcatatgatgcttgcctccctag

SEQ ID NO: 248043 - DNA, 2030 bp, Cannabis indica
taatatcagataacattataattggtcaggaagtctaccatgctttatctcatcgaaaatctgggcgacatggctggatggccattaaactggatatggcaaaggcctttgatcgcgttgaatggagattcattagacaggtcatgaccagattcaatttccctgatcgtttcatcaatctggtgatggcttgcatttcgacagtatctttctccttttctatcaatcagcagatccttggcaaagttatcccatctaggggtatacgccaaggtgaccccctttccccctacctctttctcctctgctccgaaggtctttcttctctaatatctcagaagacactacccaacaactcccgtacccaggggcttggtttaaaaatagctcgcactgccccaatcatatcccaccttttcttcgcggatgacagcctgcttttcagtcctgcctcgtcaaactccgcaaacaccataaagaatgtcctgcaggattacagttctgcttcaggtcagatggtaaattacaataaatcatctctctttttttcgcctaatacggaggagaacatcaaaaaccatatcacctctatcttgggtattccggttcggaattccttcgagaagtacctggggcttccccaaacctttgggagaactaaaaaagaaatcttcaattaccttacagatcgtgcttggtcacatttgaataaatggaactcaaagcacttctcgaaaggtgggaaagaaatacttttgaaagctgtggtgcaggcaatcccttcttacgccatgtcctgttttaaactacctgtttccttccactcaaagcttgaatccatgatggctagattttggtggggaggatcagaaagtaacaggaagattcattggaagaaatggtcctttctcagtcgctctaagttccacggcggacttggattccgttcaatgaaggcttttaatcaagcgatgttggctaagcaagcttggcgcattcttcaggcacctcattcccttgtagccaccctgcttaaagctcgttatttcccgcaaaacacttttcttgaggctagcaaaggtcgtagaccttcttttgtttgggtcagtatctcctggggaaaggaattgcttatctcagggctcagaaagtcaataggtaatggtacaaacacttcaatttttaatgatgcttggatccctggttatggaaagatttcttatctcaaacacctctcagatggttgctctactgtgtctgatcttatgacctcttcccaccaatgggataccaaccgtatcagaaccattttccccattgacattagccaagccattgagtctattcctatactaccctcccagtattcagatacctgctactggtcttacacaccacatggtaattattctgtcaactctggctaccacaaagctcatgccttgttgcataaagatgagccctcaacttctgatggtttgatcaaccaaaactggtggaaacagttgtggactcagaaccttccttcaaaagtcaaacacttcatttggcgagccttttacgatgtccttcccactagctgcaacatgcacaaaaggaagataatttcttcaccacattgctgtcgctgttattaccacactgagtccctagagcatgccattttcagatgcccaactgtccagaaggtatggaaattaactcatttctcatcttttattttaaaatatatggaactaacttgcagggaaataatgtatatggctgcttcaactttcacggatcgggactaccaacttttcttgtgtttgctttggaagctttggcatggaagaaatgaatatctccatcatcagaaacacacggctcctggtctcttggtacagtcaacttatgattatttggatctatttcatcaacataacaggtgtaccctcccaacaggggctcattccgtttgctcagctggtgctactactaaagatcacccctcatttggtttaatgttggctgttgatgctgcccaaaac

SEQ ID NO: 248044 - DNA, 689 bp, Cannabis indica
gaaccaaaaaaatcaatgaccaattttttactcactattcgttatatttagtgactaaaatagtatttagtcactaaaactgtagcgccaaattataatagtggggagactaataatttttggtgactaaaattatttagtcactaaaaatttgaaaattgtgacgaaatagttagtcagtaaaagttaatgatgttttacaattaaaatattagtcttaaaatgagttgatagcgtgacattaaattatattttacttattacatttgttcatatatgtatggataatatataaatattaatttattttcctaaatatattaatattagtttgatatattatttttaatatgataaaaatataatatgttcatattttcattaaaatattaaacaatataccaacataataaataatataattatttttttttgagagtacacaatatttattccctaaaattttattgttggcggtaaatttcaaaagtttccctctattttcaattgatcagttgagcttctatccaatagcaccgactcaacctctctatcagctttctctcacaacctcagctcaccgactctccctatcctcaccctattcgaaccctaaacgaaccaaagaggttcattttctcacagttattttgcaccatctctggccctctaagatcgattttgcaccc

SEQ ID NO: 248045 - DNA, 598 bp, Cannabis indica
ctagactcgaacacagacccgaaccaggactcaaactcagacccggacccaaacctaaacttgggacccaaaatcgaaacttgaaccagaccgggcccgagactaggatccggacgtagaactagaacaagacccaaacccaaacctggactaggaccaggacccaaacctggtccctaacctagaactagacccaaacctggaactggatccaaatagggacccagacctagaccaggacccagacctagaccgagacccagatctagactgggacttggatctagagatggacccagacctggactgggacccgaacccaaacctggacctagacctaaacctggacctaaacccaaacttggacctagacttgaacccagactcagacccagacctggacatgaactcggacacagacccagacttagatttggacctagacccaaacccagactagacccaaacccagacccagactcaaacttggacctggacccgaacccaaacccagattgggacccgaacccaaagaaagaccgagatccaggacccaaaccagggttggggaccatgacttggacctttgaatcgagac

SEQ ID NO: 248046 - DNA, 831 bp, Cannabis indica
tagggttttctaattttctctcttaatgaggaagatgagaatagaatgacattttgtttcttggagaccactatcaatatataacatcataattaggttattaattttaagtatttctaatttaccccctcaataaattagaaatatcgtttaagaaatctacacatttagcccatgacactttatttagatcaaacttcaaatagcaatacaccaatatgtataagttcatattgagaattttaatccaacactaagtattaagattgttaaatgtaagaacttttatctaattttactaacgaaagtctaacgtgaataaaattttaagaaacacaatttagtacatgtcaaaattcagcagtacgatttggtagatttcaaagttcgtggggcacaatttgatacatggacaatcatcgtattaataaaactaaaggttagacaaatgcccttaaattaaatcaaataatttcaataattttttttgaaaaaaattaacgacttaaaaagattcaaagtataatttagtatatgttaaaatttagatagtaactaattagcctaataataataataatacatgttttgttgcgattggcaagcgatattctgtaaaaattattacattaaatgatatgcgacccgatattaaactaatagtaatattaatatataagaaaatgctaagcactactaatattttttaacatttctctaataataataagaataataaataatctgatctttcatgtcgctccatggctaagtataagaaatagggaaatttacatgatatactaatttttgccattttttacaaaaata

SEQ ID NO: 248047 - DNA, 887 bp, Cannabis indica
aattaatataataataatattaaatatcgcgaataatacaaagtgttacatactaagcaatactggccctggacataagtgagttaggcccgcacttaacgcccactcattttaggaactcaaatcaaaaaattatctttaaaaaaggaaaatttactaaaatactgaaatttaggttaacttttataaaaatactgtcacacggaaatcttttcaaaaatactgtatttttataaaacaccagtaaaacacaaagcagaacaactcaaaataacagtagaacactagtaaaacaccagtagaacatcagtgaaaacttaacatagtatactgcagtatgaaacttataaaaaaacacagtaaaaaagtaaaaaattccgcctcacagtatttttataaaaaaaatagcagaagttagtataccatgtaaatttctcttaaaaaatatacatatttttttaataatttttaaaaatactatttatctttatatagtaagggccaaaaaaatttttttttgcctataatttattttaactcaagaccggtccttgtactaagtattattaatgtcttataacaatatttaataattaattaatttttatgtcatgctaggctagctatgacattaattgtcatatatgctaaataatccattcatgctctgttgttggtcaaagtatatttatatattttgatatataatccacaaaagcataaaaatggcatctactcataatcatatataattaataattgttaaaaatgataattaactatttgagttttgtttttaaagatttcaatatgattatatataacacaaaaactgtgagcatatgaaccatttgatctgatgacaagtggcacaactcatcacttaa

SEQ ID NO: 248048 - DNA, 549 bp, Cannabis indica
cggagaaggaagcctgcgaggtaagtcttggacccctctgttagttgttagggttagaataattctacaatatgatccatgtgatattattgattacttagcttgcttttgaaattgaactcgtattcaaatgcttccactaaagcattgtgacacctaaattttgagaatttgatgtaaatatgctagatgatgagcataattaggagaacataaattttctgtgtcattctgaaaacaaaattggcactaaagcgagttctattgtggtgattcatagataatattttttcaatgcattttcccagtcctagttttcttggttggattctcaaatgattttagttgcgtaccatatgtatatttttctaaaatactaaaaatcgctatctcaattttgattcaaggcaaggattttagcatatattagtcattatctcttgatgcttttttatacgggtcagcctagattttgttgcttcttgtacattattacagttagtcactgttggattctgaattgagcggacatttgtcatgtacttatta

SEQ ID NO: 248049 - DNA, 500 bp, Cannabis indica
cctctatgttctccattggctcctaatttctttctaatccaacccttggatctaactcatcctcatatccctccaagacagcatccatttccatcgggacttccagttcaagcatctcgagcacttcttccccgaccatgaacatagtgcgagttgatacattatagcagtttcttgcgctctgctgttctcctttaatggtgctgatacatccattatcacatgggaatttcatacacaagtgtcgaatggaagttgctgcaccgaagttcactagagtcggccaacccaatatggcgttataagttgtagggcaatgaaacaccacaaaggttaagtgtttgaatgcactagcctcattatctcccttgacggttatcaacaattggattttacccatgggcattagggcatcgccattaaagccttacaattggacagggcatggagttaaatttccttcaattagtctaatcgcttggaatgcaaacttgaacaaa

SEQ ID NO: 248050 - DNA, 1441 bp, Cannabis indica
gaaggaaaattgtatagaagaggttattcaatgtctctactttggtgtgttctccttatagaagcaaacgagatcatcagagaaattcatgaaggattttgaggggatcatgcaggttggcaaagtctatcaaaaaagatcattagacaaggatattactggccaataatcaacaaggacaccaatgagtttgtcaaaaaatgttataagtgtcagagattctcacatataccttgcgtacaactagcggtattgaggatgatgaccttgccttacacattttctatatgagggattaatctgattggggcacttcccacagggcgagggggagccaagtacgcagtagtagcagttgatttcttcactaaatggaccgaggttgaacctattgtctccataacctgcatgaaagtcctcaaatttgttgtaagaaactttgtctataggtttggaattccaatgaaaatagtatctaataacagaacttagtttgatggtgacttattcactgagtttggcgagaggaacgaaataattaagagcttctcgtcggtattaaggcctcaggcggacaagtggaagctgtaaacaaaaccttgaaagatactatcaagaagaagttagatgcttccaaaggtagatgggtcgatgaactacctcagatactttgggctcatggaacagctgagaagacaacaacgggtaccgcatttttgctagcatttgggttagaagcaatgttacctatggaagtaaatatctcgactcacagatgagagttttataatcaagaagaaaaccaagaactcttaaaattgtcgttggatctacttgatgaaaaacgtactgagtcacaaattactaatgcagcataccaacatcgagtaacaaggtacttcaacaaaagggtcaaaaagaggctattcaatgtcggagagacgcatctgtaggagtatttaacccaaactgggagggtccttatgtgattgaagcgacagtaggaatcgaggtttacaaattggcttgactgaagggctcgctgataaagaactactggaacatggaacatttgcgaccctactaccagtaaattgatgattgtaactcacatttctgatgtaatattttgaacttcaattatgaatgaagttaatcctttttcaagtaattacaaagtgttactctttaaaaatacttgaggggcatatgtgtataatcaaccggaatttatctagaaatacatgatatagtgcaaacccaacactttaaagttttttaattttttttaaagtttttgttgatcaaacttttctgacgtgaaaggaagatcaaactattatgaataactttttgattaaaaacccgtctgatgagaaaggaaaatcaaaagttatgaataagatataactcataactcagtaccaactaattcattcgg

SEQ ID NO: 248051 - DNA, 913 bp, Cannabis indica
tgccttccattcctagcaagttatatatctaatcagaataatactgtaatcgaactggcttccggttgtatttcttcttcgtcatcgggagagaaaattgtcactccatgccattcttataacacaacactattattagtgtaaacataaatatgacaagattattgaatatttcactctcaacctatttatgccatatcatttttaagttgtgttatcaattatgtcgtgactcatataaattagggtaaatatcattgtggactttgtgttttgcaaaaattactaattggactctctgttttgttaaatgacaatatgaaccctgtattttctaaaattgtacaaataggaccttgactgattttttgtcaaaataaaacttaataataatctgatctagagatgttatgacaaaactggttacattttctgtatctgttcgtgttagaaattgtcttaaaattggttatattaaaaattaaaattgttgaaaattgagctcagtgtcctatttttaccattttagaaaatacagggtacattttgtcatttaacaaaatagaagattcaattaataatttttacaaaatacaggatctaaaatgctatttaccctataaataattacaagccataatagatacaaataaaaggaattttatccccaatcttgggcttataagcagggccgattggtgagatttgaacattgaacctcttggatattactttaatcaaattaccactcaactacaacatatatttaatattataagtataattcttttgttttattattaattatattttaatctttttcaaaataggagccctgagctgagagggccctacggcgtaccagccttcttcgggtcggccgaccctgcttataagacccaaaaccccatca

SEQ ID NO: 248052 - DNA, 514 bp, Cannabis indica
aatgggattttcttgaggcaatgctccggaaactaggctttgtggagagatggattgagctggttatgatgtgtgtgaaatcggccaaatgcagtgttatgcataacaacaatgaagttggtccaatcattcccacaagaggtatacgacagggtgatccactttcgccgtatctttttattctctgtgctgaaggtttcacagctttactgcgaaaatatgaacaacgagggtggcttcatggatgtaaagtggccaatggtgctccaagggtgtcacatatgctctttgcagatgatagctacttatactgcaaggccactgaaatggaggctcgtcggatccaagaagtgctatccaaattcgaacttgcctcaggtcaaaaggtcaacttctctaagtcctctatcttctatagtgctaacactttggatactatgaaagttagagtaaatgcattgttggggatgaccacggccattgaagggagtttatacttgggattgcctagttc

SEQ ID NO: 248053 - DNA, 1302 bp, Cannabis indica
ttccctgtattgagaaaggacaaaatagcttctgtaaactcagttcccactgtgtcccaattatcctgataaaaggaacttccaaaccgtccggtcccggagccttgataccaggaattgaaaacagagcatctttcacctcttgactcgtgtaatctgccagtaagatggattcatgtacattcgtaattttgggaccaagattaaccacggtctgcaatacactacgtctgttctgcatacttgtccctaataatttctcataataactcaaaaaagcctgttgaacaccatcaggagaatcgaaccaggttccttgttcatcttcaatcgagaagatcttgttttgcatccttcttgatttcagagaagcatggaaaaacgctgaattctcatctccaaatgaagcccaatttatcttagccttctgtgagagaaacattgaataagccttatgaatctccttatatcgtctagtagcttcttgttcagcttccatcaattgcaaggaagacggattcttggtcagtgcatcctgggctgcaatcagctcattctttgccatcaaatctgccttttggatctcagaaaagccctcttgatttatctgtttcagagttggtttcaaccttttgagcttggacaccaccttgaacatctttgtaccattaacatccccctgccagcattgtctcacttttgtatcaaaatcaggggctaatttccacatattgtaatacctgaaaggcttcttccccgagcaccaatcacgataaatggacactagaataggactgtgatcaaaagttaattctggtaaaaacactgcttccgagtctggcatagcatagctccatcgcgaattaaccatggctctgtctatcttcgaaaatattctatcctcaggcttttgtttgttattccaagtaaaaaaggacccagagtatttcagatcagacatgtcacaagcctccatacaatcccgaagccttgatgaaggattattttgagctttcctaccgattctctcattggcaaacattatttcattaaagtctcctaatattatccatggctcctgtataccagcagctaatctctccaaatcaccccataattcttcccttttttgctcatcattaaaaccataaatgaaagttaccaaaaaattcccattctgctgcattgattgcacacgacaatgaatcaattggctagaacagaaatttatagtaaccgcaaacacagtgggctgccaagcaataatgattctccctttatccaaccaaggattattattag

SEQ ID NO: 248054 - DNA, 571 bp, Cannabis indica
atcatattattgtgtgttagaatgtttgggaatgagttgcctcagagagaagctttgaaaactcaaaaatggaagccggaaattgtttcaggcaatatgtcacctcctactgagtgaaatgtcacttaaacattaattaatctttaaacactcaaacaattaacaaatgataggaataacaaattgagaacgacaatcgacagtaaaacaggggcaagcagagtaagtataatcaggagccataaatgcataaaataaagaaatcaacaccaagatatatactgattcaagtcctatagattgatgtgatctatggctctacttcagttctagaacatcactataattcttatttattgattgagcaagaataggtacaataaatttgagaaaaaaaattactttgttgagtcctcactaagtgtcttaactctcacacttacacccaagaatcttcttcatctacagaagattattattacaaaatctaaacccaatctctctcttttctatgcatctctcttttctatgcatctctcttttctatgcatctctctctctctctctacct

SEQ ID NO: 248055 - DNA, 834 bp, Cannabis indica
atatagatatcttttcagtaaacagacaagctcaccatcttttgattccaccttcaatccatcaggctgtctcatatagatggtttcttcaagccttccattcaagaaagcattctttatatccatttgctctatgttccaatcatattgcatagcaagagccaacatcattctaatggttttcattttgaccacatgagagaaaatttcaaagtagtctacaccttctacttgagtaaaccttgagctaccaatcttgttttgtacactattggttcatcatctgtcattccttccttaagcctaaaaatccacttgcaaccaataactttctgtccttcaggtttgagaaccacaacccaggtcttgtttttctttaacgacacaaaatctgaattcaaaacagtattccatttcttagcttgtttgctgttgatagcttcaagataggtctttggcactttgtcttgtgattccattgccatagatagagcataggcaattatatcagcttcaacatacttagcagggggtcttatttctcttctaaccctgtctcgagccaactgatagtcatccaaaacatcactcatttcatcaggttctgcatcagtgtcttcaacattgtctggtgtagtttcttggtctgagatgactcttcccaatttgagttgagtgctaacttggacatcattttgtttacctgaaaaattagaaactacacctttctcgtttcttttaaatggaaaattattttcattaaaaataacatctctactagttacaattttattgtttcaaccaagagaagtctataaccttttacaccagtag

SEQ ID NO: 248056 - DNA, 1739 bp, Cannabis indica
atactcagacaaagaaaataaaatcaagtagaggagtaaagaacgccaaagaacccacacccttaaatagctagaatgggagaaatacatgcatgttgaagtcttatgagagaagaaaacttcagtgatcatcatcctattctgcagaaatcctagaccaaatccaagatccttaggtgcaatcatcgtcctcctccttgaaagagccaaaatgacgacttctattaatggagatgggatatgagaagagagagagtagaaaatccaaggagaaaaactcctggaatatgattccctgaagattttcatttgaaagtaaatgaagagagaagaagggatgcgaaaggatgactgcggagtaattaattagagggctaatggacagaaaagcttaaagaagaagttaaatcacaataaatgaaggaagagaaagaaattacaaaagagaagattaagcaaaacaggtaaaacaccacgagggagagatcaagctggaagggaaccaggagaaactgcaacgggatacaacccactagaaagttccagagagagaaaaatttttctaggtgtgttgacttgctttgcataagtatatcagttacatgtttatacatcatattgatatataaatttagaagtcagcatttgcaaagctaatgagaactctttttccaatgctctttggttagacaagttcggtttggaggcccttggttgtgaattggttggttgagaggatcctaaatttagattttcttgaggataatgatgttgttgttgagtgttttatgttagtatgcatgctttctctgctatactatagtgttggaatatcagaaagaccaattatgatttttgctctctgaactttgacatgtactaaatcatgccccctgaacttttcaagtcgttaaaaattctctgaactattgaaattgttagatttaaaaatttatgttcatttttattcaattttgctaatgtggcaattgtccatgtactaaattatgcctcccgaactttaatattgactatatcataccctctgaactttaagatgtaccaaattgtgcctctaaattttcatccatgtcagactttctttagtaaaattagacaaaagtccttaaatctaacaattataatagttcaggggaatttttaacggcctaaaaagttcaggggacataatttagtacatgtcaaagttcagggggtaaaaatccaaattagcctatcagaaattgtgcttatcatgacttgagggagtgatctggcccctagcagacttaagtggggctagctgaattcaagtatgccttggctaagcatctttctgacccgccgagaaatgctaaaaggtaccagtggtgcctacaaccttctatgtgtcaatatcgctattggtccaattaagtatcaggtctcatataatttaatgtaataacttttagagagtatcgctagctaatcgcaagacatgtcaagagatgctaggcaccactggtgtctaatagcaatgctccctacactctctaagcaacattttttttaattgtggacaatttaattggaacattcctgattggtctctttttggattgtttttgacaattttttgtgttttatgactagcttagttttctcaattttgccatatttaagatttgttatttattctgccaagaaatattaattgattaattatcattaatttcttattttacaagaattaaaat

SEQ ID NO: 248057 - DNA, 648 bp, Cannabis indica
atattgcagtctttgaggggttttgctgtagtctaaaggtgatagaaacaagcttcagagcttgtagtaagtacctgacacttctctcatcccctttgctgaataatattacatcatctgcaatagcaaggtggttccatttcagctcaatacatatatcatgaaagtcatccttgtccccaatttttctcatcagtctagatagatactccatttctattacaaacagtaatggagatataggatcgccttgtcttaggcctctcttagatttaaagaaaccatggagagttccattgaacatcagagagaacctaggagttgtgatacactgcatgatcagattgacaaattgatatggaaactgaagtccacgaagcatttcctttataaattgccattccactgtatcatatgccttttagatatccaacttaatcacacatcctggtttgttggatttcctcccataatgtctgattagatcttggcagatcacaatattgtgcccaataaatctgcctttaatgaagcctccttgtgaatgagaaataatattaggtaaaaccaatttgattctagaactcaaaagcttagttgcaattttataaatgacattgcaacaagcaataggtctaaaatctttaa

SEQ ID NO: 248058 - DNA, 855 bp, Cannabis indica
ccaaagctagccagttatgagtcttcaagctcttttctagtcacctgttttcccccactcctatcagagtaatgaaagatagcactaaagtccccaagtaaaagccaaggcttaacatgaaacttcaataaagtgagatcattccaaagacatttcctttcctccaaggaatttgaaccatagacaaaagttcacaaaaatcatttggaattcttgccattttaacataacaatggatatattgatccgtttcagcaataacaataacctgaacaaacactttcctccacaagagcaatagcctcccctctgtaacattactagagtaatgattccaaccatgaaacgtagcttggaccataccctcaactttattattcttcattttagtctccagcaaacaagctacacctacattttttattctgcaagtatccacaacaacatcctgcttattactactgttcaaccccctcacattccaacacattattttacaattatccataaaacaaccagctaaaccaagttccccttagtctcttcaacaatctgaacttgaagagcctcataagcatttttcgaacaattttctttggtgttttcagccccctgcacttgaccttctaacattgttttcagtttgcttctatttgaaacaggttttcttggtgtaatccaatcggtgcccttgcctttttctcctccttcctcatttccttctcccctaaattggccttgattcttgaccctagcagcatcctcattttgagtactactttcgccctcttctttctgttcaagttgagcagtagctatcttccccattgcacagtttccttgttcagcttcttt

SEQ ID NO: 248059 - DNA, 857 bp, Cannabis indica
tcgccaagactgtcacatttcttagtagatgatacctcctctcaatgtgcttgcttttcttatggcttcttggttccttggacttggccaccgcactattgttgtcatagtagaccaccagtagtttttctacctctggaactacttccaaatcaatgtagaatttcttcaaccaaactactttcttagcttcttcacaacctattacatatcggcttttatggttgaatctgcaatattggtttccttaatgcttcttcagactacagctcatccaccaagagtgaatactgacccaaatgtcaacttttgactatctttttcttattgaaaattagaattagtatgtccagtaggattcaactctccactggaatatacaagtatgagatctctcgttctctgaagatacttgagaatgtgttttacagctatccagttttctaaacctggattagattggtaatgactaacaatccttacaacatagcatatgtcaagccttatacacaacattgcatacatcaagctcccaactgttgatgcataagggtagtttcccatgttctccatctcctgaggagtctttggacattgatccttacatagagtaattccatgtctagacggtaactatcctttcttggaattcttcattgagaatatttcgagcaccttattaatataagttgcttatgaaagcgctaatgttcttcgctttctatctctataaattttgatgacgagaatataactaggaataccactacattacatttaatgtatttgtatacatagacttcatcttcgtgttgttcgaagccatactttttaatagtcttattaaaggtgatatt

SEQ ID NO: 248060 - DNA, 712 bp, Cannabis indica
ttcttgggatagactttgttcacataagtctaaaggtggaatgggattccggcacctacgggatttcaacgttgctatgttggccaaacaagggtggaggttgctgtctcggcctaactcacttgtagctaaagtcttcaaagctaggtattatcctaatggctctttcttcacggcacagttgggatccaatctgagttatgtgtggagaagtgtgttggaagcacaagacctggttagaaaaggcactcgctggtgtgtgtttgatggtgaagagatcaacgttctccaagaaccttggttgccaagcgaagatgacccctatgttcactcaagtcatcctagtttgggtgaagctaaagtgagaaacttaatggtcatggagggtgggagttgggatgttgagatcttgaacgacttgtttaatgagcgggataagaagctcattttggatatccctctcaacataagccacggcagtgacaaactcacttggagttatgaatcttcgggattttattctgttaaaagtggctataatttgcttcagaaaattcatggtagatgggatggcaatgaagatgatctcaccaagttctggactaagttttggaagcaaaaaatcccccaaaagtgagaaccgtttggagagctgcccgagagtgcctgcccactctgcagcaactgaaaattaaaagagtggatgtgcaaa

SEQ ID NO: 248061 - DNA, 1829 bp, Cannabis indica
gccttccagccctgcagtttagaagtaaggttgtccaggataaaattaaagtcagcatccttctgacgagatctgaacagaggcagccccaagtaattgatagccccttctggcgtattaattcccaatgcttccttaatccctctcctcattccatcaggagtattgttactaaagaaaattgaggttttgagcttatttactttctggccagaccaagagcaaaacctttccagacaattccagatactcttagctatcattttcttcatctttaataattgtgatttgtagtttagattactctcttcattaatttctttacaaaattaagagcaacaatggtatgattgatcatgaccattgattctattagttcccattaatctatcaatgctatagttgttagttggcatttatggttggattgttaaatcatatttgtttaattttctaatatttttattttggatttttcttaatcaagctaccatgcatattatcaattcctacttgttattaaatattaattataatcttagtaaacagattatgcaaaaaattattgtaaataattctcaatttgttgtggcaaaattagtataataatgtcttgtatttaatattatctatgtggttataatttaataaatataagtaaatcatggccaattagtatattattctagttttagttaaggttttatatggttttagtaaataattgattttctaagatttttattatatttgagataaaattttttaggtaagtgtagagtatcatgttttgataagtcctctacttgttttggcatctataaatatttattaatctactttttttttaatgatctctacattatagttatttaaaaatatttataattttttaaaaaaattcaactagtttataatgatgaaaataaaatttaaatacttttattgcacatgtgattattttttcttttatacattgtaagtaactatataaacattattttcaacacattaaactatttaaaactttttgaaaatttaaaacaaataaaaaatctacaaaaatattccttttaggagatgtgctacaaaaatttccaacatactatataatttacttttttttttttgaatggctatataatttacttaaaaatactaaattatacaatttaggcagacacttcataattttgatttcatgaaagttaaatacgaatctataaagaatatttattttaatactaaattatacaatttagaaaggcatttaaaaaaatttatttaatggaagtgaaatatgaatttatatagaatatacgcttcaacaaaaattatccattttgtcacaataagaaaatacttaaaattttatattttatgcaggtaaactacgaatttatagagaatatttgtttcaacaaaaattatctacttttaagaaaacattttaaaattttcatttgatgtaagtgaaatgtgaatttataaacaatattcatttcaacaaaaattatctgcttttttcactaggggtgcacatttacacccgaaaacccacccaacccaaaaaaatctgaaaaaatgggattacaattttagtaaattaggttcgggttatacccgattcatcaccacttggattcgagcttcattaacccaatacacgaaaaatcgagttacacctaaacccacccgaaacctaaatatatatatatttttgtaattttttttatatattttttgaaaatcattaaattaaaacaaaaaaaaaaatccaattctaaacaatgatgtatcatttttattttcttcttcttcttttattt

SEQ ID NO: 248062 - DNA, 1079 bp, Cannabis indica
ttttaaaagtcattttctctcttatatggagtaaaattttaaaaatacttttaagaatttttaagtctcatatgctcaacttttctaagaatgaacatatcctcacaatattctaaccacacatcaaatagtttcaataagtgtatcacaagtgaacaaataatcactattcatagagttttcactctcatacgagtataaagggataattacaccacatactgaaattttcaacttttttacttttatactgttggttggaattttttttaaaaatactgtgtaagttttatactgtgtactgtgttaagttttcactgttgtttttagttgttctcttttgtattctttataaaaacacatatttttagaaaaaaaaaatcgtgtgacagtatatgtgtaaaagttaaccaaaattctaatatttttgtaagtttcccaatataaatgaccacaataaaatctttaaatgttaccaatcataaaatgggtttatagtattaattgagtgatttggaagtttttttaattgttagaaaagctcccaatgttaaaaaaatgacacacaattgtatgctagttactagttactcttttttttttttttggtcaattcttctccaaagtgtttcaaactactcctacttcattttgaactatttatacaccttataaatgaataaattaagtctccaaagttatatttccaataactattatttatttatattcataaacaattaataatattttttacttaattaaaaaaaaataatatttttttacagacttaagagttacatattcaagtgatcattaaattaaagaatttgcaactcttattttgtgattattatctacacatttataattctataatatatattattatttgataaaattaataatttatcacaattaattatttataacttaattatttaatctaaatattatagggaaattctacaatgcacccccttaaaatggatacattgatgtacccttgtctgttttagcacccgaaataatttttttgtcaaattttttctcatggttatgtatgttatagttattta

SEQ ID NO: 248063 - DNA, 528 bp, Cannabis indica
attatatatttttttaaaaatatcacatttcatttttttaagtcacattacagttttaaacttttttttacagttatatttttctaattatattacattaataaaaattatatatttcattttaaaaatggtacaaatttttaattcaattgcaacatacaataattaaaataacaaatttttaatcatcttaaaaaaatcacactaaataaatattttgatcattgttattaaatattaatatttaattatattactttataactataataatatataattataatttagataatcatatttaaatataatgcttaaagaggaattagttttgttttattttttaaagcgttagattatttgtttttaacattaatttggcttggtaggaaaattcatcaaagatgattaattagtagtatgaattttgtttggtcctcttatttgtgatgagtaggtatatcataggaatttttacaaaaatattagattttgggcaaaagctagtttacaattttactgtcatat

SEQ ID NO: 248064 - DNA, 336 bp, Cannabis indica
aagcctttagccacaaatttaactttgtatttttgtattgagctatctgtatttttttcatttattctttattttactaaaaaaaatgtatttagagaacatggttgaagacgcttttacaaaactataagatgctaaagccaaaaagctttttgaactaaaaagtaaaattcattacaaatccaaacatcaattatagtaaatatttttgaaaatggatgattagctaaggtattttggattagggtttcaatttgaaccaatcattgagttgtgtggcttgagggtgtgctagctacaaaatagctgtctatatatatacattttatgtgtact

SEQ ID NO: 248065 - DNA, 1217 bp, Cannabis indica
taaaactgtaatttttctttactttcgtcagtatatactctgatattgtcttaaacagagaacatataaagcttggattctatatcattaggtttcaatagaaacatgtagtgtccgttactttcaaatcttcttttaataaattcaaaacagagtctatactgataaaactgaaggaaaaatacaattttacaaatattggatactcataccgttaaaaaaattattagatttatgccatttacaaattcaaaactttgaatacttatgcaacaatttatctttatataaatgtctatctaatactaatactttttttttttgttatgtcttaatagtttttgttgcctcaacagagtacatcctctcataaaagaggtaattatatactcttgaaattatatattgtttgacaaagtgagaattaattgtaaactttactgtttgtatatgggccacacaatattcactctctcatttaaagcaataatataattatataaatgatgggaagaagaaaatgagtaatagaacaaaccaacaatgcaaccatatttcaaaacttgcttaatatataagctaattaatgtgaaaatgcatgtaatcaattggctttaagtgtatattttttcagttttaacggaattggcacgttcactagtttataatatatacaatatgtatagttagaacatagatattaattccactatattaaatattcaaaaaaaaaaccaaaattatattaaccttactcatttcaattttcaaatctgatacaattgtcaaactatttattcgatgaagatcgaccttagaagtttgaatttatgacttagaatacaagataacatgcaagaataattgtaattagttttccttcttttcttttaaaaagaattatcttgaaaaagaaaaaataaattaattaattagctgtaagaataaatcaaacctattaaataattttgaaaatcgtttataggcgggtcactcttgtggatgcctaaggctcccactaatgaggcttaaaaagtaaaaaatagctttaaaatattttcttatttttaattttttccagataataccataaaaattacaaaaacaataaaatacaagtttattgtataaacaaacctaatagttccacatttctattaaaaaaaaatcttaagttagattctctctttccaaaaagtttttttttttagtttttt

SEQ ID NO: 248066 - DNA, 572 bp, Cannabis indica
aacgatctcgatgtatttgaatttctaaaataaaagaggcatcaccaagatttttcatctcaaattgcttagataaaaaatctcttggtttcatgcaataagcctacatcattagtgacaagcaatatgccatcgacatctagaaccagaaatatgtatttacttccactgaacttttgatatacacaatcatcaataatattcatctcaaaaccaaatgagacaattacttgatgaaacttgtgatatcattgacaagaagcttgcttgagtccatagatggattttttaatttgcaaactatattccttaggtcattagacacaaagttttctggttgctccatataaattacctcatcaacgtcgccatcgaaaaatgttattttaacatctatctgatgtaactcaagatcaaagcaacaagtgccattattatcttaaaagagtctttcgataaaattggagagaaaatctctatataatcaatgttttgtttctgagtatagccttttactacaagtcataccttaaatctcaccaaattatcatattcatccctcttggttttaa

SEQ ID NO: 248067 - DNA, 542 bp, Cannabis indica
ccagtagattagatataaaagtattgagcataatataagttactctaattatcatcaattgattttgagatagaactatataattctcaatatcatattagagttatattcctaacacgcaattgtgcaaatacgcttgagatccgaataaaaataaacgagcaaatagtatggcttgtgataaaatataagaacatgagctattactcatcaccaattaattttgagatggaatctcataattttttaacattgagacaaaaaagacatggtcgagtatgaacgctgaaaagctactttgggtgtgatattattatatattatgataaaagtgaaaatgacccgaggatcgagtaattcggaagttttaatactcttctttatatattatacggggaattgatttcaattaatgtgacaaaatgatgttttcttttatagtattagtactgttgtttagtgattccagagatggaaaaacgagaatcgtctacgccagctaggaaccttcgtcgtatacccacaaagtttgtgaacttaag

SEQ ID NO: 248068 - DNA, 1584 bp, Cannabis indica
taatcatatacataatatattaagataaataaagaattaaaaaatctaaatacaaaggataatataagagattaattatattaatattacaacacatatattgttatgattaataaagacactaaaagatattggactttgccacattagcaagtgctctaactaactctattagttacaacataatattacaacacatatattgttataattaatgacagtaaaagatattggactttgccacattagcaagtgctctaactaactctattaggtacaacctgtcttaattataaatagctattaactctcttttgttgagagaggacttgcatcattactttatacaaagagaatcagagagaatattgagccataattatagacatgagatttctcggaaggatgttaaagggattgtcaattcttgaaatagcttccctgatcacgagagatgaatatgtaatcctagttaggcttgtttagggtgctcgatccattgatttctctctgggtttgtactaaaagttcaacaataaaagcttcttcattgttcatagtaggtttgatcatcatgaaacacattgtttcatagttcagtctactcaaattcttgtgttcatcttccttttctgttatattcatagctctggttattcaattcttgtttagtttgtttaattctctattattgatcttgatcaaggtatgttcattcacaacaaatggtatcagagccgaggttagcttgacgagatcatgaactactcaatcaaagttcaaagaagccaagaatgtcaatgataagtttgaaatggataagtttattggtgggaatgattttaggttgtggagactcaagatgaaagctatgttggtacaccaaagtttgtataaggctctagatacaaaggctcttgcagctattgaagaccaaaagaaaaagaaagaaattcagatcaaggctcatagtgtattattgttaagtattgggaatgaagttcttcgagaggtatctgatgttgatggcttattggaaaagttatctgggatctatttgaaaaaaatcccttgctaacaaattgtacctcaagaaaaagctctaaaatattgatgaaagcaaagaactaagaaggcaccttgatgaattcaacaagattattctggaactgaataatattggtgtcaagattgatgaagaggatcaaggtataattctactctgttctccacccaaatcttttgagcattttgttgatataattttgtatggcaaagaatcactaacaatggcagatgtaaagtctgcacttaactcaaaagaaattcaaaagaagtaatgagacatgtgacaacaatggagaaggcatgttcaccaaaggcaactcagataagagaggcttcaagaattataagaacaactccaagaatggtaatcaatccaaggcccaatttaaattagggaagaagtgttactactctcaaaaacacggggcacttcagagatgagtgcacagcactcaaagctaaacttgccagagattacggcaagaacaaggaagaagcagacattgcatctcagga

SEQ ID NO: 248069 - DNA, 470 bp, Cannabis indica
ctcagagcaagaattatctgaataaaagaagaattttcatttcatgtttggtctttcaaagttctatcacataacaagtgatcaaaagtgtcaactcttaatcactagggggcagcatacattatatcactataaagtcacacctcattacaactaaatttgtaacaagtgtaagagtaggaataagtatcacttaaaatcggaacctcatgaaactggaagtaagccactggcttattatatttgaaaataatttaacattcaactcagtataaaaacaggaagtattacttgaaattagaaccttagggaaccagaagtaagtcactgccttattatacttaaaatcaatctaatataatacgtagttaaactcaagttaactaaagacagaagttcaggcttcttggttagctcaagttaacttaatccaatgtatttaggtatcctataaatagagtaattaattt

SEQ ID NO: 248070 - DNA, 573 bp, Cannabis indica
gctaaactagtctcttgttgtggttgtggttgtgttttaggtagaattggctgggttttttttctgttggtgctttttttctttggtgtatattttttaatttgttcaccctctaaaacaacaagatgttttggccatgccacataagatctaaagacatgtttaaccaagtaaatctcatcaggatcaattgcctcaggtattaaagcatcaggaatcaagagttcattaacttctattcggtaactattttcatctaatggtttattatgaacttcagcagcttgtctaataatacctttggcaaccttacgatgtatggaatccaaaagaacacatcttgttgcctgtattaaaaattgtgacatgcatatatatatatatgtaagaaaagatttaatcaaataaaatttaccaaatgatagagttattacctgtttatcaacgagattttccaaatcaaactgactccatgtaccttcatttggtgtcacaataacatcaatgaatgactcatcttgtaccaaattgggataatcacttttatcttctatattgtgttccacatgttct

SEQ ID NO: 248071 - DNA, 647 bp, Cannabis indica
tggtatgctggcattgtgaattatcttgttactggtgaaataggtctaatctggataaaaataaattttattccgaggtgaaatttttatctaggatgatccatacttgtttaaatagtatcctggtcagatagtacgtagatgtatcctgaattacgatcaaactaaaatcatatcttttttgtcatgatcatgcttgtcaaggccatttcagtagtaaaaagactgttgcagaaaatttataatgttgtttttattgacccataattttttgtgatacatatgcatactctaaagcctgtgaacgttatcaaaagttaggaagtctgtctagaagaaacatgatgtctttaaaccttattcttattattgatatatttgatgtttggggtattaattttatgtgatcttttcctaatttgtttggaaatttgtatactcttgttgaacttgattatgtttccaaatggatcgaagttgttgcatgtcacacaaacgaccacaaagtggtggttcgtttcttgaaataaaatattttttcccgttttggtacactacgtgctatcattagtgataaatacacatttttataataagcgatttgagcatctcatgaaaaattatggcattacacacaaagtcagtac

SEQ ID NO: 248072 - DNA, 499 bp, Cannabis indica
tgtgttgcctgtacttgtttataaaaaaaaaaaaatacttatcggaattttgtaataacaaatacaattttaaactatgttttataactcgggatcccgatctttataagtaagtaattataatatattaaagttagtttgtaaatttagtatttcaaatacgggcgttacattaacctcatctctgataccgatttgtggaggcttgaactcccaacaagaaccaacacaacaccaaaaataacacagaatgatcaagaagacattccacaaaaaaccagcaacattaaaccagaaaaataaaccagtaaaatgaccttaatgaaagaagtaaagaacaataggaacttacatggttgggctacataatcaatgtgattatgagcttaatccacgggagaaagtagccttaatcattgttgtggtaatgatctttattgatcttaatagagttacaaaacagggataaaaccctgaaacaaagtggagacttgctcct

SEQ ID NO: 248073 - DNA, 714 bp, Cannabis indica
aacaaatataattttccccccaatctttatggactctttgagtagtgggagcttacagtcctcttctgactctcaaaaaataagtttacaacacatggacggatatattccgagagctgtcatttattaaagaaccaaaaagtgaaggtacaacgggtgtggcacacatgcgacacctttaatgctttcgttgataacacgcacgtgtaggagcacgtagttttaatgatggcaggtcaattgaaatgattcttatttaatacatgcggtactcgaggtgggcaatgatgaaaaataaaacaactctaagcatgttttaaatgccatattttcaacttcccatccgtcagatcacatcaagttttttggagagagaatccagaccattcatttcaagttgcaaggattcagtcgaagtataaatacacttatcaaacccattttctctttttttacaacctcagactttttgaatactttgtcttcaaactccaagccagagctcttgttctacagaaaacctttaatcttgctaccatttccaatggtgaatgcaagaagttttcgattacctgattccatatatctctaaaaagttcattttagcttgtatttctagatgcaaagttggtaaagccccaaaatactccaccccagctggtacgaggactttgacgttcaagtggatatcgatcgcgtgattgactgggtaca

SEQ ID NO: 248074 - DNA, 531 bp, Cannabis indica
gtcatttccaaaaagttgttcactcgtagaagccagtctcgaaaagagtcttgtagaatgatagtcgagtctaaaaaggtgttcacgaatgactaatatgtccactccaagttcagtcttcaagatagctagcctttctctagaaaggagttctagtcggttaattgtccttcttggaatgatagtttcggatagtcgactctagcaacatatccgtaagcatcattagcgagtgtccttggtccgtgagtccaaaagctcatatatattctcggaggctctgatactcaagctgacgtggaggcttcgctctatgaggagttggttaagttagttatttttaactaacttaacaacctcactcccaacagccaccaactttaggatcttgatcctaaggcgataaataccaccttgactagttattttagaaaaatatgaaattgagaactcagttatggtgatattgagaattggagagagaaaacattgagaggtagagagagaggtgtagagaaaagagagagattg

SEQ ID NO: 248075 - DNA, 693 bp, Cannabis indica
attttaagtgttaagtgctgtgttggactattcatgtgtgcatctacgtggatacagtgtacacatggcacaattctattggtcatagtaaaattaatttaaaaattaaaaattaaattaaaattaatttagaaataaaaattagtaaataaaaatatttttctttttttttcgtttctaatttttcattacagttctctctctctcccccctaaatctctctctctctcccccagaaaccaccatcacctaaccaaaaccaccagcatctcaccaaaaccaccaccacagaaacccaatcaaagctcacctgaaacaaaaaaaaaatgcaaatcacaaaatacaaccccattttgccgtccctgaacttgcaaccccccaaaaggaccagaaccccattttcctcaacattgatttcagagaaagaagctaaatttctcaaaaccccaactgcagaagcttggaatcaggtgttcccccttgacaaatcttcaatagagatgattggatgaaatcccagctctcgaaatcacagccacggtcttctctttcatttcaaccgagctcgaatccattaacctaaccaaaacagaaccacgccttgagcaacgacgatcatcacgttcttatcgtcttcttggagaagactcaaaagcgagtccatccctgagtttctcgactcgctgctcctga

SEQ ID NO: 248076 - DNA, 697 bp, Cannabis indica
aagaagcttcttaaaatcagaaagctaaattcaaaattaaaacaaaatagattaaaatggaaagcaagaaataaaaccttgcagatgaaaataggccaatgagatattaaaactgtgtacaatgaagaataagtaagcaagaacctttggcccgggtcggtagttttctgccagagaccgaattgccaatggaaaattcatacaatccacataaggtttcaactattgaacactagaaatacaatacctatacataaattgttaattgaaatcattatttgaaactttttataaatgaaaataattaataaacaaattaaagtgaaaaataaatgacatacctcttccaatttcaaataagtgatcaagcttttgttttgttttatgaacatttaacaactgtatagcaaaataaaagacagctagagctgtcaaaattattacaaaaacttgaaaaatatgtatacatacaataatggagaaactgtcaaaaatatgacatagttaagtgactaaatctgttgtaatcttttttgtacactttcaaatgttttttaaagcaagattggtgaactctgtatatcatactaaaaagaaagaaagaaaaaaagagagagagaaagagctctcttctctttcagatcaaacacaactctttctaatcctagatctatattcattgaaatattgctatcca

SEQ ID NO: 248077 - DNA, 1309 bp, Cannabis indica
tatacaacggtaatatgattacataatctggcgccaaaatccaaacaataactaacataacggtaatataaaactaaacacacaactcttcattttcccgcccttttctctctttcactttattttctctcaatttctcaagaaaattacactcaattttctctccaagaacaatggagaacaaaatttccttgtttggtaacgtagtgaagaacaaaaacaccttcttcctcccaactccactagcaacttccatcaaagcaattccaatgtctcgaggagcaactctttacattagcgacaaagtgttttcaggactccaagggtttcgcggggttaggccggtgttcatgcttgacggccgtgtcaaattcgaaggaaaagaatggaatacatttgtcagtgatcgcgggattcgagttggagatgttcttctcatgagaattactcatagttatccttacttaataaatctcacactaatcagattagacaccaaaaacatcaataacccaaccctgattattcctcctctacctaatactaatcaatcccatcatgatcatgatgatgatcttgattatgtgggttttcaaaataaaccatttttatgtgtgaagatagtgagtgaagatgatttgaaaagcaatcattttcatcaaatagaaatgcccaaagagattggagaagtgataatggaaaaaacagaggatttgattcaaatcttgaatgaagatgattttggggttgttgtttgaagatctaaacatttctatgagaggaaagaattacacttgaaaaaatatgcatagtgtatagtgagaattacagagcgggtcagatgaggagatttgttgggccttagaccaaattaatatatacttacaaaagaaagaaaaaaaaaatcaaaacaagtgagttgattgttggtttcttctaatagttaaatttttttatgaaattattgagattgttgggtttaaggatttttgtccaattttatttagttttacgaattcggtgattgtttatgtactaaatcatactcctctcttaaattttgacatatacaaaattcggtgattgtttatggtccgaaagtttggactaagaaaaaccagcaacttgagaagaaagtggaggatactcatcctactgatgtggttgattcggtgggagaaaatttagttcctgctgaagataatgactttatgggaactgtgaagaagattgatactaaggaggggaaaaagggtgttgaatctggaattactactccaaaccgggattgtgttaatgagtggaagac

SEQ ID NO: 248078 - DNA, 580 bp, Cannabis indica
atccactagcatccctagtacccccaggttgttcctcctagatgttttggggatttccttgatttgcttcctgcctcctggttcttgaaccccgaggtctacctcatggccttcttaccccactatcaagttgattatgtgcattagttacttgagtcacccttgccgtcgcagcctctctttccaactcagcattgtgttggttagattcggctaagcgttgccggagctggcaattttccaattcaactaatgggacatacccagttggatcataggcatcctcacttctaggtacatatcctgtagtagtattggtttcttcgttccttccttctgggttttgattatttccaccatagtttttttctttgaacgtgttattccagaagtatggggtctttgagaacccattggttctttcccagagcaatgggtagtttcttcaggacgacttccatcatattgtctgttatcagccatggatagattttcgtctgtaaggagggatttttttaagttttatcacgtaggctctcaatgaaagtaccaaactattaacgcagattttcgttaacca

SEQ ID NO: 248079 - DNA, 657 bp, Cannabis indica
atctcatcttgcttaaactctaactatgttataagttttctgaatttctttaattcttttaaatcaaaattctttacgatttgccaaatagaattataggtatagtttagtagtagttaatcaaattccctgtggttcgacctcacctgtgtaagtttactacttgattgcgtatacttgcgtagtgtttataggtggtctttgggacacattttgagatctggtttagggtggtgttttggatggtgtttctcttactcttttttggtttagggtggtgttcgagatacacttctagatatggtgcagggtggtgtttgggctactatgtgactggtttatggtgttttagaaggtgtttggaatctggtttgtggtgttttggaacaaccttctccttttctggttttggatattgtttgagatctgttttggggtgatttgttgagatttgactggcctttgttttttctggtttgaggtggtgttttggatggatttttagactcggtttggggtgattggaatagttctatatggaaagtttttttcttggtttggggtggtgttttggttgttatgtgggacttggttttgggtgatggtgttgggctttgtgccctaaataaaattctatttcaatgtaatcttttctat

SEQ ID NO: 248080 - DNA, 1592 bp, Cannabis indica
aatttaaaaataaaacacaaaaatcctaaaaaaaacacaaaaacaaatgactgaccttggcaactttagctaattgaatgaactcatcatcaagtttaaaatcggaatcagactcttcctttatagatcgatgacgtttagaaaccttcttagaaggggaatgaacatctaacttacgtttggaaggagcaggggaagtaggacttgaaggatggtctttcattttttccacattgaagacagggttaacttagatttacgagtgttttggagttttctaactacaggagatgaagacttagattgaatgacaaccatggaaaagaaacataaaatgaaaattcataggagaaaagggaaaaacggttaggagggaaaaaattagagggaaaatgagtttcaaataaaatagaaaaactgatcaacactcaactgctcaaaaccaaccacacgactcgcaagcttaaaatttcaaaaactaaaaaaaaattaataaagaagaagtgtacaactatggcggttacaaagtgattagatgaaatttttttatttaattattttttttttaaaaaaaaaggaactgccatgaccgtgataagaaacatcacatcaataacttttttgaaaaaaaattaattaaaaataaaatataaaagatggcataacataaaacatgtgtcaatatcgggataaacggaagtttcatatagttttaaaaaaatagtataaaagtatacagtaaaattgtaataaatatcgtgtgacagtataaaagtaacaaaatataaaactacagtatatcatataaaaatcccatatataacagtataattgtaaaaaatgatattctcgagattttttctattatagactaaaaatagatgaaatttacatttatgaccctaaaaaaggaaataaacaaaaatggaaactaaaaagttgttaattacaaaaatgccggctgagaaaacggaagggaaactccatcttcttcgtgaccagccgcaccttcttcgtgacccagccgtccaaccccaacaacccaatctcaaccatttttcttccaaaaccagcaaaatcaaaatctaaaaaaatgtagaactcctaggaaaccagctgaatcccgaaaatccaaaatcaaaaacgaaaggaaaaaaaaaaaaccaggaaacctccattgatgtacaaaaaaaactcaaaaacaacaatcattgaacaaagaaatcgcgatcagaggagaagaaccgagtagaaggagagctggaaatcaaagaaactcacccatgattgaatcagaaggagaattgaaggtaaacaaattttttcatgaacgtgaaaaaaatttttagtgtagatgaatagaaatttgatattaattgatgaaaaccggattaaattgaaataataatgaaatattgatgaatctgagaaaaaaacaacaacggtttgcatgaaaataaacattaaggcatataaatagttgctacagtgttttattctgaaactgttgtttacaagttgttttacagtggaataatagttgtttgggatctacaaactggaaaatatgaatctattgttattaattagtg

SEQ ID NO: 248081 - DNA, 628 bp, Cannabis indica
aagtaggctgtttattaaacaacggactacataactgagggtaaaatgagtttagagtgattaacgaagtatgaaaatagtgatgattgcaacgaagcaatagtagcatacgaatcatggagtaaaatcttagttgtaaaaacacgaaaagaatatcagagtcttagatgttgatgactcaataccatcaacgagggactcactacaagttgtagtggtagttcacaccaagggattgtcaataaaataaagaatatacatgtatatttctggatgtgttaaaaaagaaattttaggatttctacctaacatagatatggaactttgagatcaaggaatggtgtttgatcaatttttattagctaagaagttaggaaatggatgcaaattaaaatgagtgtagatggataagattcaacttgataataagatgaaaattcctcaagtaaaagtgaacaaaatcgatgaggaattgtaagaggataatgaaggaaatgacggaaattggatttaaataacggaagtaaaaaaataagaaatgcaagtaggaacgacaaagaagcatctactttttcataacccacaatgagcttacctaagagttgagcatacttaacttggggtaatc

SEQ ID NO: 248082 - DNA, 987 bp, Cannabis indica
tggtaaaatatttccaacaacacattgtccccaatgtgataaaataaaattgcggttgagagagacttacctgagccccatcagaaggggtttggtggaggtggttggtcataaggattgaagcggggaggcatttccaagtagttgggctcttccactccgacattcattcttgtgattagcgaattcaattgttgcacctgagtctcataaaaaacgctcctctgcgccatataattctgaatgtgcttgttctgctgaaaaagataattcagttgatcatgtgtgtactgcatggctgggtcgagaggcccagcaatacgttgcggtacattttcttcacgctcttcttgttcttccgcaggaggatctctttaagccggtggttgaccataggggtgcggtggtttaaatctaaacatcgtggccatggaaatacttcgttgtggtgccgcctttgtatcataggagtattgttgtactccatgggcctcacacaaagtggtgataatgtcagaagcccgagtccacccccacaagatccctcaatcatcatatcaaaactcattctaattatgtcccccacatctaggttgaagcacttcatgatggcatagacaaattcagcctgtctatctaagcatcagaatagtgtttatttggtaccaaccttgcacttacgaaatatagccatgcctttgccaccgggtttagttcacacctaaacagctgataaggttctccatcgtattcatgaaacctgaggcttgggtaaccaaaagtttcagctacgtcatcataattcaacctcttttctcggataggctgtttcagtggttgttcttccatggtgaaggttggtaagtcataaacggcatggatagcagctgtggaaaccgacactttagcccccctaacttttactttttcatcctctctttctggccaattggcaaagaattctaaagctagagtttggttatttcg

SEQ ID NO: 248083 - DNA, 529 bp, Cannabis indica
ttgaggatttggccctggagacatattaaaagtcgaaccatcaacaactcgaagtgaattagttccaataaccttaaattcaccatccacaacttttcccaccaaacaccccccatgataatgccaaaatgttgtaacaaaacttcgacaatagtcttcaatggatgaatcatttgattggttggttggcaaaagtggccctaagaacataaaatccctattaccattaagatcagtgtacttaaattgatccatagatttagtcttcaacaactcgccaaacttcttcgttgcgctaacgcaacgagctaggtcaaccgagttagagaagtagttgaacttcacatgtggcgcgactttgacatcagtggctgacgctagccagagagcacccgtggacaaaggcccaacaactttttccgcaaagacggctagagttaattgtggtggggataatggattggggtaaaatccaaaaggtaacatagctggtgaaaatggcatgctataagaattggtctctatgtaa

SEQ ID NO: 248084 - DNA, 1172 bp, Cannabis indica
tataagaattggtctctatgtaataatctttggtaattgctacaagttgtcctgatgttgatgcatctaatggaaatgggattatgagattaaggctgttacgtggattatcagccatgaattttccaacattgggttgtgaaaggactatagaaatattttgtgatgagaggtatgattttggaccaattccacttagtagcaaaagttgagggcttccaagtgcacctgcacttactattacttctcctttgttacgaattagtgccttatgagactttccttttgaatcagtgtacataactccaatagcacttggatctatttattagacaaccacaataatgttttcaaatttgttagtgtaatatttttatttcaacaccaaaatatattataatattaacttaagccaaagatgaggcctagtcaatgtgtcaaataagatgtaacaaatgtacaaagtatttatcagatagatacatttatggatttgataaaaaaaaatgatttcgtaattatgttcatatgacacatattctcatatttttatgtttatttgatacataatatgtttgatttattgtaatgaaaattacgagttacattagaaaagttatataattagaattacatcacaaaaagattaaataaaataaagctaaaatgattttatatcttttttatataaatataaaattaaagtaaaagataattttatcaatttatcatttattttaatatttattctaataataaaataaatatctaaattaattttcattatcattcttattccattattacattattattaatattataattacattctaccaagtcaaacatcacatttatttcaaagttaattagaccaaatttttcccatgtttgactatacatattttggtgagaataggaaatagaaatcataaatttttacttattaatttggttgtaaggagttaatcagggacaaacactataaaaaatctaacttttagtcacaacaaaacttgtgactaaaagtaaaaaaattgtgattaattataaatcattattcatatgttgtgactaaaaaatccgtggttaaaagtattagtcacaaaaattacaatttgttgtgattaaaactaaattaatgacaacttataactaaagactatatttta

SEQ ID NO: 248085 - DNA, 847 bp, Cannabis indica
cttcctttgtttcaaatgaatgtgcttaatttttaaacaaagtgtgttttgttctgtatcatagttattgtttggattttggcgccaatttgtgtaatcatattaccgttaccgttgtatatggtcgttatgtttggaccccggattaataggatagataggtaaaaaaaaacagttgggaaatcattgtgtgttggattaaacaagtttgctaattgtctcttcacttgagcataatttaattacaataaattaaattttaatcaaacttaatatgtcttaagaaagtcaaacttaatgttagattttaacaataattgaattacagtaaattcttaatttaaagtaatttgcccacactaaaaaaaatggggtatgaaatttttgcggtgttctatgatttaaaattttaaattttgatattgtagttcaaaccacatgttaaaaaaatttaaattattaaatagtcttaaaatttttggacttaaatatttcaccgctattaaaattaagattaattaagattttgccgcctaaattttgatatgtaccaaattatgcttctgaacttttcgccattaaaattttttcttaaattattaaaattgttgggtttaataacttttgtctaattttattagattttgctaatatgatgaatgtccatatactaaattgcctccaaaattcaatatttataaaatcatatcccctaaactttaacatgtaataaattttcattcatcacttttgttaataaaattggacaaaaatttttaaatccaacaatattaaatcaatagtttgagaataaattggagatatgtgtttagtttttatattaccg

SEQ ID NO: 248086 - DNA, 1364 bp, Cannabis indica
agggttagaattgaattatataagaaataaaaaaataataaaataataactaaacaagggaataagtggccgaccacttgtgggcgacactaattatatttttgctatttttaaaccatttatcgtttatttcacaaatgccatattttctaatttcaattttataaatgccaaaattatttatttgataaatataagtaattatcaaattgtcatttatattatttattaattagactccacaaagtctcttaattaataaataaatcctgaaatcttttttcttcacaatcaataacttaatgaaaattcataaataagagatagtctaattttagaattataattgattaattaaaatcaattaactgagtcttacaagtagtattgtctcaactagtatgaggaccattgacctatataactgagcttccaataagtagatctagaattcatcaagtaaatttcttaacttattaattcatacttgcaccaataggaattgcactctcaattatatagagcgatctataagttccacaatatagatacactatgaattatccattgttataattctaataatcaatgatcctctatagatgatctacattgagtagggacagatttaccgttacaccattcaatatattttatccttaaaatacttagctacctataaataatatttcagtgaattaatataattattgaaataagtactcaatcatttatctctattaagccaagctcgaaagaaattatcgtttcacttttatgttcagatagaagttgtagattctgtatccatgattaggggttccactcaattgaactaccatgtccttaatctatatgtcacgaaaaatagtgtattcttaaattagaaagttgtgaaaatttcatactaatttagtgaaatagtatatttagagattcttgaaaatgataaaactcacagtgtgggtgagtcaacaagggaagtggtccacatggaattgaattattttaatttttaatacacaaattatacattattgatattatgaagcatctatgtagcaggaaattaattaattgattaattgtttatacataaaaaaagaattaattaataaataacttgagatatagaatgaatgtaatattaaaaaagagaattaaagtaatgccttaattaattatatgttgtttggtaaagggatattaaataaatgatatttgtttgtattaattatacagagattaggaatggaaggatatcttatacttttcaattgactatacgttataactattttattttggattttatataggttaaatttatatccaaagtttatctatttagttttccctgccat

SEQ ID NO: 248087 - DNA, 1341 bp, Cannabis indica
aaaatgaaaaaaaaaattaaaaacatgaaaaattgtcttcccaccccaaacttaaaataaacagtgtccccactgtgcaataaaattaaaggagagaaaacaaaccagagcagctaggactatgggtacatagctgtatcaccgccatcaatagtaggtggatcgtcatcattacccctaggtggttgatatgatcgttggagctcatcaatgcatgccttcagtttatgcttgtgaacctttagaatctcacctttctcacttttaatactcacaaggccacaaggaagtaactctttgactttaaaaggatttttctatcttgagataacgttacttgtcaaagatttgaattttgaatgaatcaccaacactcattgacctattgaaatctcctccattggtttctttttattttgaggcttctttgtcttttatttatgattagtctctcgattatcttcgtttgagttacaagactcaaccatattgcatgtattctcaatatcggcttgattaaaagacttataaatatcaaacttgatttcttgatcattagcactcaaggttgagtggcctcttcgaacatctataagttcaccagaagctgttaagaaagggcatccaaggatcaatggcatatccttgtcttctaacatgtctagtaccacaaaatcagctggaaatattaacttatccactttaattagaacatcttctattattccccttggataagtgaatgatcaatctgccagttgtaacgaaattgttgtaggctttacttcaccaatacctaaatttttaaataccaaaagtggcattaaatttatactagccccaagatcacataaagacttctcaaattttaaaccaccaatctcacaaggaattgaaaagctacctggatctttaagcttttgaggcagctttttctgaattatggcactacattcttcagttaaggtcacagtttcataatccgtaattttattttttttttgtcaacacctccttcatcaacttaacataattgggcatctactctaatgcatcaatgaaaggaatgttgatgttgatttttctaaaaatttctaagaacttagcgaactcctcatcaagtttcttcttcataaatctttgaggataaggaattggcggtttatacattaaaatatcttctttcttcatagacttttcagtagacttgtcttcaggagtctcttctttggcttctactatgtcttcaacctcaggactggttgacttgtcttctacaaccccatcaagtactttacctttaccactcctcagtgatatggcattacattgttgtttcgg

SEQ ID NO: 248088 - DNA, 740 bp, Cannabis indica
gatacaattaccaaattgtatcaggataagcatcgacaatatcataaggtgggatatatgactcatcttaatgaatatatatatatatatatgttatctattgatattttttgttcatcgacaatctctctactctctgtttcgtctctcttcagagaaatttatctaagcattctgggtaatacatctctattgtgcctattcttcgatattaaccgcctaaattatatcgacacttcaataccggttgctaaaatggctgtttcttttccttacagtctgtaaaatggagaacagggacgaagtgggttcttctccaattgggtcgagacagtcggacttgaagaagtctttcaagctcgctgtagtttccttgctcactgcctgttctaagcaggtattttttatttttatttttattttttttcgaaggaaaatgataacctgttttggttttacttggactttggtgacctgggtttgtgtaattttgaacaaagattattttgcaaagaatttttttggaacagaatttgattttgtttgaattgtttcttctatatatgaacttaaaggatataagcaaggcatttcctaattttgctgcttctgagcaagattatctccatcgtctctttattcaggtaacctcctaaaatattagatattctcatgcgaagattttattttggttaaagtctcatgtctagagtctagaatttactaaaactctacccaat

SEQ ID NO: 248089 - DNA, 770 bp, Cannabis indica
aagaatcaaaacacttcttatttagagcacccagctacgcacccagcacctaagttgataatatgtcaacccgagacgcttcgaaccacaatattgaagaagtatctacaacattttatttgtctccaagaaaaacaaggaatcaagttcttttgggaaagaaacagatcaacctggaggccaaaattgggatccaatgcccagattgacctagtgctaagtcccagcacccaagttgacattttgtcaacctaggccatttccaacagcaatccaaacgaagtattctaggcatattctctgttttcatcaacaattaagaaatgggaactttcagggaataaacaaagccatctagaagttagaatcgggacccagcgtttaggttgacatattgtctacctgggctatttccaaatatttacctcaagatgtcttccgagcatattctctattttcaccaatacttgagatttcaatgttttcgagaatcaaatggttgcatctgatgagaaaaattgggatccaacgcttagggatgcattttgtcaaccgagatttgttccaagtattttttgagaaaagtgttctaggcatcttttccatttttgaaaataatgaagatacaagtgatctcggggagacaataagattctttgggagccaaaactgggcctcagcacccaggttgctgtacaactggtttgcatgtttctgctcctcaaatacacattctacttctggctattcttcttattttgatcaaaaat

SEQ ID NO: 248090 - DNA, 1535 bp, Cannabis indica
tgtcttgcgtgcccttagttggcctcttggaagaatccgcgacaggggtgaccaccacatcgctcttcctcttctgaggaacgataggggaagttgccactgttccagattttggcttgcggttaaggatgggtgcggaattcaagaaagtcatttctgtgacagcaacatcaacaaaaaataataataagtgccaataatagtaagattttaacacactagtttatgcagacgatatgctacctgatgttggtcgagaagtttgtttggagaggcgtattcgctcttgttgtttctcagattgctccttatacactggctctctctgaagactcgcgttctctggaatcaacttgtgttcccgcagctttgaagtcgtacacaataatcgccagtcacgatcttgtacaggaaggctcccgagaacttcagcagtctcttgcgagtcgcgtcaagtgtaggtcgaactggtctatctgcgacaataaaaggagcgagttagcttaaagtcacaaaataactcaaaaattgactaagtcaggaaacaagcgacatactaggtcgacggttaaagtcagtcctaatccctggaactttgaatacataaaaccactttgattttcaatctcccatattggaaaccatgccttccaccccattaatctcagaagtggcccacttgctgaagcaaaagaaaccgttgtggagacctacgctctttatatcatagaagtagctgaactcttctaccgtgggtgccctatgcacatactccatgtacatcgcgtaaaaggctagggctatgcgataactgttaggggttagttgaaagggagacacatcatactgcttgaggatagcagtaataaaaggatgaaaggggatcgatactccacatcgaagaatgggtattgagactaccacatcctttgtaggtatgatcgcaaggttggtaaaagagaggtgcgctctctgggtaggccgaggacgtaaagaggcaagcggcagtaggtttaacctcgtgaaggtggtaagatctgacttggtgactcgcgagaccaagtcctcgcacaaaaagggttcgtccaattggggattgtccaccgaatcagtcccgcttccctctgcgtcttcttcctcgtctgattcccgaactagagctgtccagttgtcatccatctcctcgacctcgacgtcaggagcatgcttggaatggacgagatgattgtgtgctgacaccgtagactcgttgtctcgaatctcgatggttcctggttccgcgagctcttgcaccatcctctcaatgtctattgaggacagcagacccacttcagtgtcttcgacagttgtgacctcttcctctgagatcgaggttggaataaagctgtcttcctggggatcctcgtcgccatcaaacgcgttgcctcctgagccaagcacttggctatccgatagatcgctcatctgaaagatagaagatcttttcagcgtggtgaatgtgcaaaaacaaaataagtgacctcacctgcatataa

SEQ ID NO: 248091 - DNA, 545 bp, Cannabis indica
tttacacgaatataatgtgtcggattatggttgagattttttgacacaaaatatatataaatcgagtttatcaattaaacatatcaacctgtataacacgaatatgactaacacaaattggcatccctaatccaaagatgagagtgacactgctagctgactcctcacctcttcatgatttatagaaagaaaaaaaagtgggaccacaaggatgtaagccccgttcagttagtcctaaaggaccaagtgaatgactgtaaaatcggccagttagcttcgggctggggagctcatatggctccacacacgtctcagcccaactccccaaagccttcgaagttcacccgtttccggagctgcatctctgcagtaatgggcccggggactttcctgggcctttattctatggttagtagaaataggcccattcacttctccttgtggtgaggtaaacataacagtcgaaagctaatatatatacatctattaaaacctgtaattaacctatgtgggactaagttctaataacaaactgaattatatat

SEQ ID NO: 248092 - DNA, 704 bp, Cannabis indica
attctactaagaagacagaaatcgcacacatgcatattaggcatatatataggaaaacttacaaaaatattagaatttgagttaatttttacaaaaatactgtcacaaggaaatcttttcaaaaatcccgtgtttttataaaacaccagtaaaatacaaagcagaatagctcaaaacaacagtagaacaactaaaaaacaccagtagaatactagtgaaaactcaacacagtatactgcagtatgaaacttaattataaaaaacacagttaaaaagtcaaaaataccgcctggcaatatttttataaaaaaatggcaaaagttaatataccatgtaaatttccctatatatatttatatacactatcgtgttttaaaatttatgaataatcattgtatcgaaattggggttaaaatgatcatcattacaaatttataattaagcgattttgtttttcgaactttgacatatactaaattatgttccgtgaacttttaaggtcgttaaaaatcctcctgaactatatcgatacggttggatttaagaaattttgtctaattttggtaagaaaagtttaacatgaataaaagttcaggggcatgatttggtacatgttaaaattcgaggggatgatttagtagtttggaaagcatatataatttagtacataggcaatcaaaaaattaataaaattgaatcaaatt

SEQ ID NO: 248093 - DNA, 735 bp, Cannabis indica
tttacaaaaaaaaaaaaaaacataggacaccaatcaacattgtagagcaaaaatattgtctaagaaaacaatgaaaaaaaaaaaatagaagtaattttaagaaagctcatcaacaattagtcacatttttttttataaagaaaataaaccttgatatatttgccaacaaaataatatcatgcttgctttatctttgttcatgagaacaagtcaaactcatataaacatacaaatattgtttttaccaagctaaagaactagtgcaataaaaacatacaaattacaaaagaattctcagccatcaaaaatattttaagcaattcaaaaagtttgttataattttataagactattaactactgtttattagattttttttaataaaattgtaccaagcatttgtgcgtgaaaatgtagcaagggaatattgcccaaattgttaaaaaaccttattctgagtatatgtaactaatggagacgctgtcacactatctcaatagtagcctttttcaatagcgtattctatacataactcctaattatataatatcaacatactcagagacgattttcacgcattgagattggtaactctattaatccaatagagcttgaacatacagtttttattatatttttatttaaatttcagaaatagtagcttacataatactaggggtgttcatccaatcaaatccgcactattttgctcatagtgcatccgattcgcactaa

SEQ ID NO: 248094 - DNA, 553 bp, Cannabis indica
gggggcattaagctttcccgaggtggccctactctgccccacatatttttttgcagatgacctaatcttggtgggtagggcctctctggttgaagcaaaaggctactgggattgccttcagaagttttgttcttggactcaaatcttctatatattttcagtagaattacccctatggaattgaaacaagggattcgagatgtttcgggaattggagggtcggaaggaaacgttaaatatctaaggctccccttattccgctctagacagaaggatgctaatttcaactttgttgtagagaatcttacctcaaaattgcagggttggaaggctaaaaccctctctaaagcgaggcgtgctactctgatcaagtttgtgggactgtccatgcctatgtatgtgatgcaaattaccaagctctctaatagacttgccgcaaggattgatggcttggtgcgtgaaatctggtggggatttgagaaagggatctgaggaatccagttgaaagcttgggataagatttgtcttcttaagtccagaggtggtcttggtt

SEQ ID NO: 248095 - DNA, 1586 bp, Cannabis indica
gacgtacacgtgtaactgagttgactggtagtttggtttccataagaaacaaaacttggggcgattgttgttgaacaagcaatcgaaggtgtctgaatgcactcgggttccccaaaccccgtgcattccagcttaagattttcatgatgagttgcggggttgcttagcaaccaccgcacttgagtcattggagaagctagaatcatcacagtcagaaactaacgcctcaacatcatcctctcttgacaaaggagaagacgatgatccatgaacattacgacatcttttcagaaatttcctcattgatagggagtcttgatgcctcttgaaagaagcatttggaggctgattttcctttgccatggacactttgggagaagtaaaagttgagataggagttgcgggttggttgagagagagtgaggaaaggttagtgtcgataggagagggtgttagtataggtggatatgtagcaaaagtgttggctgtggtatcaggtataaaaatgtggaaaatgtcagagatagagttgtcattttgattggatttgtcagaggtgttgtgggaaatttgtggctgctggtttctgatctcgctgatgtgagaaccagatggaggcacgggtagattggggggtgaaatactatgagttggtgtggtagcaggtttggttggagggtgacttagattagtgaaagagggaggagaaatggggttgctgatataagtttgagattgctgatatttaagtttggtggagtgagaaatagatgggggcatgagaagataggttgaagagttactggtgtgagagggtggagagttgttgttgaaatcgttgttgatagtactggattggtggggagtgatgtgtccaatggttagtatagagctgatggtcaaatttggatgtgcataaagatcagtaggaattttctgatgttggtagatattggtatttatttgtgatgaagaagagtttggttgtgaggtagtattgataaaggggctgatagtgtgaccatgggtgttgtgatcaaaagggataatagtggagaaggaagtggttataggagaggaagcagtgaaactatagacattggcagtgggattggcattgttcgaaccaagattgttattgtggtttgggggcttttgccttgaagattcgccagcataaagcactcgtggtgaggctgagttcgattgtttaatgctgggaatgtggtagtaaaatatgagcgagccaatctagtaagtaggggccaagcattaccttttgcaaaatcagtctgatatcggtcatagccattaaatggtagtttggcgcctttcatccatgggccatattggaagtcatcctcattgccactatccatacgctccataaaagccacacagcactcaaaaggatgtcccaaacgaccacattcaaagcaaaaatctggacgtcgttcatagcggaagtccacccaaaattcatcttttatcctaggcaaacagatcatttggcctctcaacaaaggtttgtttgtgcaaagtttgacccgaacccaaagaaaagggccccaaccttcgttagtgga

SEQ ID NO: 248096 - DNA, 335 bp, Cannabis indica
tgcaattttaaaaaaatgaaaaagtaagaaaaaaaaaaaaaagcatttaaagtattgttcaaaaaatatgtaaagtaaaaaaagaaaattgtaaaactatatttataataataacaattattgctttcttttcactaaaaggacaaaataaattaaccaaaatttagatacaccagtgcttcttctatacgagaaatgttggtgccaagcagcacatgtctattagtgcattttaatacacattttaatttaatatgctaactaattggcaattatagaatgtcgggcaatgctccttttatatatgtcataaatatataatgagcaattataaa

SEQ ID NO: 248097 - DNA, 966 bp, Cannabis indica
aataggaccttgagcttaattttgacaactttttttgttaatataaccaacttgaagataattcctaatacaaacagatatagaaaatataaacagttttgccatagcacttttagatcggattataattaaatttattttcacaaaaaattaattcaggatcctatttgtaccattttagaaaatacaaggtctattttgtcatttagcaaaacagatggtccaattgataacttttacaaaatactgaatttaattagtttatatgctcttaacttttatttttatagaccagtatttcattaaattttttttcttaattagtttttttccttaaatttagtatataggttcttcactataatgtaattttcatagttgattattaagtattatgacactcttttctcaacaggtacataattctttttaatatttgatatgttttattatttaaaacaatcaaattaattaaatacaactaatataatgttaattatgtagatattaaagtactagtattttgttatatacacaacttatagtatataacaatataacatccaacttaactacacaatattagcacgtgagtataaatcgatatttactatgaatataaattattacttattatatgaatatattgctccatatatataaattagttttctgaatatattttgtagaagttagttcatggaataaattattattcattgtatgcatatattactccatatatattagtttatagatattaattattactcattgtatgcatatattgctctatatttatacaactaagttcttggatataaattattactcattgtatgtatatattgctctacatatatacacgttagttcctaaaatctaaatttaccaaataagtgagttatattaagtgtacatttggatcctacacaaaagtgatgattttactaaattgcccaccca

SEQ ID NO: 248098 - DNA, 840 bp, Cannabis indica
taagaatcgagaagaaaatatcttcacacttgtaatccacaatgatcaccaattcactactgccattagatttttcataatttaaggatacgatatataatatcgattatgaatgataatcaaaataatgattatcgatgatatatatacactcatatatatatgttaaaataaaatgaaaactatatatatttgtatcgggatcagatatggtgtgaataatataaccccgcccccgttctatccccgcttcaagtattgaaattgtctctcaccaccgctccattaatggccaagaccgagaatccccatcccattaggggcgggtccctagggttacctatcaccgcggtataaatttttatctctaaataccacaggccaaatcgaaacacaatctccaatgaacatctcaattaacattatgatatttctcataaatatgagaaatgttaaaatgcattaatggtgtttagcacgctcctatgtgttaatattgctattggtctaactaagtatcaggtctcatataatttaatagagcattgctataaggcaccagtggtacctagcaccttcttgacatgtcacgttgcgattggttagcgatactccctaaaaactattatattaaattatatgggacccgatacttaattggaccaatagcgatactgacacataggagggtgcaaggcaccagtggtgccctttagcatttctcaatttaatataataatttttagagagtatcactagtcaatcgttgcaatatgtctagaagtattagataccactcgtacccaagaattgtcctccataaatattaacattagtttc

SEQ ID NO: 248099 - DNA, 1260 bp, Cannabis indica
ttatgtctcttacttggtaaggacgatgcataagccaagcatccaaaggttcggagatggtcataagcaggaggtttttataaagcaattcatgaggtgttttgtgatgtaagtgaggtgtaggtgtcctgtttatcagatatacaacagtttttataaagtatggccaataagcaagtgcaagggaagattgaaaagctagagctcttgcaacatttagtatgtgttggtgctttctctcaacaactgaattttgttgaggtgtttccacacatgaattgtttgtttgtatacctttttaagcataaaaggatgacatattcaattctttagtattatcacaacgaattgcttttatatttgtggcaaattgtgtgtaaacaaagctataaaattggggtataagctgttgaacttcagctttagattttaacatataaacccaacaaaatcgactgcaatcatcaactattgttaaaaaataacgaaaaccttctatgctatgtacatgaaaagggcccatatatccatgtgtataagatcgaaactagaggctgtaaaattattattagaggggaatggcagcctcttttgtttagctaaattacaaatagaacatggtaaggcttgattagaatctttgaaatgaagcattttattgataaagtttgtagtaatcatagaaggatgtccaaggcgggcatgccaagaatggacattattacaagagttattatgcaaagattgatgaaaaacagtagaagacagattaggttgctgcagcaagaaaaagagatgaccaactcttttagcaatcacaatcttcttgttctgagaaccctgaataagacaacaattttgagtaaagaaaacattgtgacatagtgtgttgagaaaagtgggaacactaaataaattgaactaaaattcaggaacataaagaacattgtgtagggttaaagtgtcggaaaaatgaatactgcctgattgtttgatgatgatacatattccagtaggtagttttatggaggtagcagtaggtttgttgttaagatggtaaaaaagatcaatattgcaacaaatgtggtgtgtagcaccactatctacgatccataaattttgagaaaaggatttcgatttaccagaaatgttggaggcaaatggctgggaaacatctgcagtagaggaagtgggctgtaatttctgactcagaagagaaattaaggtctgaatgtcttcttgtttggtgatattggccaa

SEQ ID NO: 248100 - DNA, 703 bp, Cannabis indica
tttatttgtctttgaatatatgtgtgttttattatacttgaaaatatatctagtccgacaagacaaatgcttctaactaacattctttaattgaacaaggacatatttttttttctctcctgtgaagttttgaatatcaagaaataagcttttgatactgagaattagtatggaaggattacagatttgagcttttgcttctatgatatgtattgtagttctcatgtatgttgatgtaaggtagctttgttcaacattattacaaaaaatcaatgcaaatgatttagttcatgtattgaatatatatattttttgaatttagatttgtttgaatttgatttgatttttgtttattattattaaatctcttttttgttatttgggtttaaaactaagctgttgcgggggtgttggtcggcagtggtggcttcggtgggtggtggtggcaatagtggtggttgtgttgtgatgttggtggtcgtgataatggtggttagaagaagaagaagaagaagcactacaaaaaatcttacttttagtcacaacaaaacttgtgactaaaagtaaaaaagttgtgactaattataaattatcattcctatgttgtgactaaaaagttcgtggtaaaaagtatttgtcacaaaaattaacaaaaaatcttacttttagtcacaacaaaacttgtgactaaaagtaaaaaagt

SEQ ID NO: 248101 - DNA, 1000 bp, Cannabis indica
gatttttaagtaacttccaattcaaaagtcttggaattattcttccaacacgtgtcgcaaacgattcccctagcaatggaatcacttcaaaaccccagacttgaaagctagtggaaacccacatagctcatagcccttcttgtcgcattcacactgataagactttaattgtttcgtcgaatgaacgacgaccccaaggatacttgtcaaaatcttcttcgtcatctactagtttcataatgaattcatcaactgcagtgcttcctctgttactttctaagatgtttgtcactgtaaacatcttagccatcttgatggcatcatcatcgtccttaattgttctaaacaacataaattctttcaaattatcccttgaaacaaaatacttcccaggaaagtatttctcctttatcctattaggctagttgctatcttcaacatgctttggaagttgagaacagtttaagcctgttatcagagcaaattcatccagtccaaacgttgctttcttatcttcaaaactcaattctaactctattttattatcggtatgtctttgatgtagcaagagagaatggatgatcatgttagctggttgaagagattcatccatatcaagaagaaacccaaaacaacaacctttaattctgtctatctgctgctcacttagaaattttttaatgattactaaaccacaccaataggtttgcacatgtattgttgattttgcaaaaatcaacttttttgcatctaaatcctacacacaaaataagggacatgttactatctagttatttgaaatacatatttggcatagaatgtggcttatttttttggaatgtaaacaagtaattataatattcgaaataattactatttaaattaaagaatagaaatgtaagatcaatatacgggaacttcattcattctcatttcttttttttttcctacttgatgaagctctcctttctttcttcaatggggatacttttgtcatatc

SEQ ID NO: 248102 - DNA, 2248 bp, Cannabis indica
ttatatgaaatgagttttatttacggcataaaacccaacagcttcttccagtaccaactagagtgtatagaagcgttgtaaccccaccaatcttgatctcttatgtctacactattcacccatctgagccataagctttcttgattatttgtaatggcccaaatgtacttggacattgcagtcttgttccaaagttctagctttttgatccccaatccacctgaagatttagattgacaaatattgtccgaagaaacagcccctgctccatggaaaatagcctgccctttccataaaaaagctctgcaaatatcttcaatggatttcagaattctttttggcataatcaaaatctgactccagtatgcttgtattgcaataagcacagagttaattagtgcaattcttccagcaaaagataagttccatgaactccacgttcttattctagctgtcattctttcaaccagaatctcacattctttccctgaaattttccttgcacaaattggaatcccaagatatgtaaatggaagctcttgtctcataaatccagatagttgcagcagctcattcacactcccctgttgcatgttactgcaatatatagttgttttactagcattggcctgtagccccgaggtaagagagaatagcttgagtgcctgtaacatgtataaaacacttgtgaaatctccatggctgaaaagtaacacatcatcagaaaaagccaaatgattcatcttaagatccgagcatctatcatggaaatggaaatcttctttctcccctatcttccccattaatctagagaaatattccatacccagaacaaataggagaggagacatagggtccccttgcctaagacctctcctagattcaaaaaaaccatgtaaggatccattgaacataagagagaacttaggagtagtgatgcaattcataataagttggatgaagcttctagggaagtttaggcctgttagcatttcctccaaaaagtcccactcaaccgtgtcataagctttctggagatcaagtttgatcatacaacttggtttgtttgctttcctgtgataatgcctcaccaaatcctgacatatcataatgttgtgccctatgaatcttcctttaataaaacccccttgtgattgagatattattgaaggaagaatttgactaattctagagctcaatatcttggttgcaattttataaataacattgcaacaagctattggcctaaaatccttaacagaattagggcacttgcattttggaaccagtgtaattattgtagaattgatctctttgaggatgttacctgtttccagaaaagccagtactgcaccactaatgtcttctcctatgatatcccaattgtcttgatagaagctacttgagaaaccatcaggaccaggagatttagttccaggatgctgaatgtagctttcttcacttcttcatgtgtgaacttctgagttaggacacatgtaagctccggagttagtacaagtcctctagccaaaactcttgcctcaactttccttcttttttctaacttggaacccagtaatcctttgtaaaattcaaggaaaacctctgtaatctaatccgggtcatgtactctgcttccatcttgcctttcaatagataggatacgattgtgcctcagtctctgcttaatgcaagcatgaaaaaggcctgaattacaatccccttgctgaatccaatctgctttagctttctgttgtaagaaggacatgtagtctccctgcatcttggtgagcttttctctaagttctttttcttgtaggtgaagtttaggatcaagaggctgtttgtgtatttcactctgaagaagatctaggtcctgcttaattcgaatgacatcactttgcaaatcagaaaaaccatctttgttaatctccttgagtctcactttaaattgcttcaatttagtcactacttgaaacattttgaatcccctttcatgttgcttccacacttctttcaagctagtatcatgcttaggatgagatttccacatcctaaagtacttgaaaggtttctttccactcaccacattaggatagattgatgaaatacacggagtatgatcaaaaagaccttcattgagaaatacggcttcagcaaactcatatttgttaatccatgtttgattggccaagatccgatctatctttgaaaaaattctgtcatcccctcaatgtattttgatcct

SEQ ID NO: 248103 - DNA, 998 bp, Cannabis indica
acaaagatgaacacgagaatcttatagtggttcaccattttttggcagtaataggctagtccatttggagtgttattaatttcaatgcttaaggagagttcttcatagttatgttctccaagagttcaaacctcaagtgaattttcagaatgagagaatgggagctcttgaatgtgattttgtgagtattaaattcagggtctctttacaagtgatttcattcccttgtataagttttcttctaggatttaaaatccttaaccataggtgtctcttcccataactatagttgggttaagtttaaaatacaaaataataataaaataatcattaaaaaaaatatctcttcaattaacatttctcgactatattttcgaaatagctttaagagcacgtgtctttcgcatttggcagactcgaatcgtcatgggcacacgtgggaagccaattggatttcttaatggtccatgccaattaggtccttgaggtgatttggtagctaaggagctctttatgccttggcaactgatggaacagggagcttagtacgtacaatgggctcctctggtagatagtggtgcaatgtgctcattcggttggaggtggtacaatgtgctcccttgcacttttatatctagaacaaaaatttatacataatattacattagatttttaagagataacagtgaacataaaagatttatttgatttaatataaaaagaaattattgatgttaattaaactacaagtgtcagaccctcaataacgaaactatttttttttctttctttttcttattttagggaagagactaattaataataataataataatcacttacagacggtcagtgatagttggacctcatccatggaggatgatatctggaaaatactgtggcagattaaagctcctcctaaggttttacattttgcttggaaagctctttcgggttgtttgcctacgcgtactcaacttcatagtaaacatgttcct

SEQ ID NO: 248104 - DNA, 789 bp, Cannabis indica
ttgaaggggaggagactccttgcccgcattgcctcttgagctctcttattcttcttcccttttgttacaacccaaatattattacttagcaaatttttgaagtcaacacatattaaaaaggattctatggtgctgttgaaaattaactttctctctatcttttcatctttagtcttaataccaaataatataaagaagaattactatccttttccatccttcctaaactctccctccatacaccctactcaacctccttcttatcaaatataacttagtatttttttgaacattctctagtatgtcttcctgaaatttttaccataatagtaaaaaaatttatcaaaataagcatttttgtatcaaatgtattatcaaattatgtaaaaatatcttctactctgttgatataatatgctgagaagttaacatatacttatataatgctttggaatattatcaatacaaaattatatctcctaacttaaaattgaattaattagttgtgtctcttgagtttaaatggaggaggttggcataatgagttacatgctaattttttaaagataaagatagagctcttatttctagcattcctttgaatatcactcaatgtcatgatgatttagtgtgttctccaactttatattgttaaaagtgcatataaattgatacaataaattaatggagagtgggatgataatgtgacagtgtcctctaggttcggaagaaagatttggagtttgtaaaatcttccaatgatgaagaatttgatgtggatagctgcta

SEQ ID NO: 248105 - DNA, 547 bp, Cannabis indica
atatgaagtcaagaattgaaaaatcttttctttaagagaaaattaaattagcagttgtaagtgagattctttctcataaagcaatagaaagctatatgcgatctgagtatataacagctcacattattatagcatgtattataaacgagatacaaacgtgtcttgaaaaataatacataagctaaaatatgaatagaggattaactattcatataagcaatcaaaaaatattcaaaatagttcttaaaagaactatttaaaatatttgaagtttgctctaaatatagcagattataaactgctcacaaataacatagcagattgcaaactgctcacaaaaaacgtggtagattattaactactcgtctaattcaagataatgacgatggaacgcatgtaacctaaaaatatcttaagctaaatcgaggaagaaaaatgtttgattgtgaatttaaacgcaatagacgaacataaataactcaaaaaaagtaagataagggcataaaaataaatatataaatcaacaatgttaaccatccaacaaagt

SEQ ID NO: 248106 - DNA, 835 bp, Cannabis indica
gaataccttatgaagatggcctccttttcaacttgcaataattaaggtatatataaatttctaaactcttccatctaattaaaacacttaatagttatatatatacattatatgatatttagttgatttatttgagtgaatataattgcttgatttggatttttatcttttagctaacttggaggactttttttaatcaaacatccagaggatattgaattggtacaaatagatttagaaaaatcttgaattttgaattaaccaacattcctatctattcatacgcataagggttatttggagcctagctacaaggaaactctcttgaggaggacaatggagacgaataatacgatgttgttatggggatgttgaagatgaggaagaggaggtttctattaggatcaataaagtggtggagaatcaacatgagcttttcgccattttcgatggcagtaccttgaattttcttctttttttgatgtttctcttaggtatttacttcattaattttgtttctacctgaatctgatatctatttggttagagtctgtcaagcacaattttttgtgattggcatgaaattagttgattagatatggtaaggttgttccacaagcatagaaagctcctgctgtagcagccaataaagattatttagatgaaagctatgaagaagagagatattttgatgaggtatgtttgatgtaaataaggtatgtttgatgttttcagtgttatacttctgctgagtaatatagttcaaataatctattgatagttttcttttacaaaaataaaatgattgtgtgtagaaaattaaggtaacaaatgt

SEQ ID NO: 248107 - DNA, 509 bp, Cannabis indica
gacagccagtggcttagggggtcgaccatggatctctggctcaatagcaactcccactggccgaccagccagcagcaggagtacccatgtttggccagggtacaacacttcctccgccaggggattgaggtgcacagaggtcgatcttcaaccaacgaggaccgagactgggcggaaacatccaaaatggtgattcaagaagcgaaaccgatcacttcaggcatttagatccaccaaaccccagcaattggtgtgatctacccgcgatcaacacacagccgacaccagtcgatcgaggagtcacgggcggcaagaccctgccctttgcaggtctagctggccatggaggagttctaggcggctagcctctacctaatgtaggtctagtcggccaagcgcaacaaccaggcgtaaactggttggcctaagccaactctcgtatttagggatggccgaccagggtgtgtaaggtatgactgatcttcaccatacactctcccagggtatgg

SEQ ID NO: 248108 - DNA, 744 bp, Cannabis indica
ttaaacatgtgtgttatgagagattaatatgtatataatattaatagtggttaaactttaatataattgatatgaaaatatattagtggccccaaaagaattaccttgctatctctataggtttgtccagtctagttaggtgtttgaaaagataggagattttgtgaataatttgcaagcattagttttagggtaaaacatatatcattatcgggtatttatatagtaattaatgtgttttaacggtattgaattgatttttaaataattttttataaataacataaaactttatatcaccattttttttgaacatatctccaccaaaaaactctttttaaatttataatgaattttactgtttgttttgttttcgattttgatataatgtttgaaagtaaatcaaatgatataagagaaaattaacgttaaaattaatgtttgaagtgtatagttaattaaggtccggtatttctggtagttttaaggggttatatatgaattattatggcttcttaattctagtctcttttaatattgttatttagtatacaccaattttctccctatcaatatgggacaaggttttctcgagtgaacaataacatcaaatagtcgaaaatctaataatttaacgttgttttgtcctatatatcctttatttatttccaaaatgtatttttggttgttaaattggtttttttttctggaagaataaaactttcattaaatttagaatttttc

SEQ ID NO: 248109 - DNA, 508 bp, Cannabis indica
gctaaaagcgaggtcaacaaaattatttcacaaagttcgtcaaaaaccacgtttgagaagacaattttaccttttgaattgacaaaagaggacaaccaattgttgtacttctatccttgctcctgtcatctttaccaaagaattgtaccttatataaatgaattattattacaaaaaaataaaataaatcaaaaaatggatttattatccggacttatgacttagaaaaaccagttactaacttaatataatattcataagagatttttacacttggtgccaattttgctatttttttacatatatgtctatatacggttatttaaacttttttaaaaaaattatttttcaatattatattttaaaaggtttgttaattacaaaatacctatacatgctgatgtcatgagttttctcccatattacacgccatctctaccatcttcttctctttccttctttttttgaatttttcctctcttttgtgttagtttttttttctttgtgc

SEQ ID NO: 248110 - DNA, 724 bp, Cannabis indica
atagaggacttggcttgattaacctgttgacccgaggctctttgatacacactgaaaagttgcagcactcttgcagcctcctcattattagccttgcaatagacatagctatcatcagcgaaaagcatgtgagaaacacgaggcgcaccccttgcaacttgacaaccagttaaccaacgattgtgttcataatgtttcaaaagtgaagataacccctcagcacacaccagaaaaagataaggtgaaagtggatcaccctgtcgaattcctctgcctgggattatagggcccattactttccccccatgtgtgatattgtaagacacagtagtgacacaagacataattagagcaacaaaatgaaaaccaaaacccattcggattagcatggcttctaaaaaagtccacccaactctatcataggccttactcatgtcaagtttgagagccataaagccttcttttcccattcttttccttttcaaataatgcatgatctcaaaggaaaccataatattatccgaaatcaaacgacccggcaagaaagcacttcgtgtattagaaataacatcaggtagagcttctttcaatctattagcaagaactttagagataatcttatataagacattacacaaggaaattggtctaagatcactcatatgttcagggagttttttcttagggattaaaacaatatttgtcttatttaaatcactaggaa

SEQ ID NO: 248111 - DNA, 514 bp, Cannabis indica
aatataggcccatcaactctcttactacaattataatatacttactgagattgatagttactaacatgagtctggatactgtttgatagaatgctccacagagatttgagttcttcaaacaaacttttgaggtttgttataatgttattacagaggaaacaataacttttttgcacttgcattggatgttaagattgtctatgttaccttatccacgttagactctttgatgacatgttaaggaaagagatatttatatatagacatatatatatttatgtaactgtatatatgtagagtgctgtggttatagatatgaaatacattggaggggaggcagaggttttcacaagtaataattataagcacattatattactccaaataagggaccactattttccaaaagtcttagcagggaccaggatttgagtcacccaccaaaccaaagtataatctttttgcatgtgctgtttgctacaccttgaggatataatttcttagcttgtgttta

SEQ ID NO: 248112 - DNA, 1104 bp, Cannabis indica
acatttataaaatctaggatcccgtatctatgtttttcaactttacataatcaaaagatgtcgcatatcgactacaaaattgtgagccctagttatcccgaagatccaacactccaagttgaatatctcgatatatataatcttcatccagttcaaaactcactaccgttcaacaacagctttgcctttacctgcacataacataatatttgtgagtcgacagactcagtaagaaaagcataaaatataaaagtataactgacctacgactaagtgcccatacacctatcaacaactcataaaccatgcaagcatgtataattgagtcttgaacgttcttgaccataataccacatgcactcagtactctagtaatcttcttccatttctagccaaaaataatcgaccctttgtattttcttgacaatttgggaccttcgactccacaggcaacattatgaatttcttccatctgagtagagatttcttcttgctctaaacatcttgctaacaccccatctgatgatcggtaataaagtgtcccacctataacaacaaagtgttgcatctctttgagatgagtctttttcaatttcgcgagcttatcaatcatttgttgtgtccactttttgctggcagactcttttccataccccgaggtgattgaacgctattgattgactattttaaatgtcaagttttggatttccgatacctcaatttttagtagccaaagcatcggcatacctattttgtgttcgaggcatatgctcgaattgacattcctcaaaattctttgctagctcttgggcattgtttgatatgttgccaatgatggctctttcacagcaaattcccctttgacttgctggataacaagtttggagtcccctctaatcacaactttgctgacttccatttttagcacgactgtcattcccagaataagtgcctcatactcagcttcattgttagtacaatcaaacgataacttataagcttgaatatgattcttacccataggatcagttaatactattcctgcacctcctcctttagtggttgacgacccatcaaatgttattgcccaccattcttgtgttt

SEQ ID NO: 248113 - DNA, 580 bp, Cannabis indica
aaaatctgttctcaaggatgaattaacattttaagtataccaattcacaattactcattgaatacattaactgattaaaattagcattatggcattgttcatatatgaggatgttcatcgttgaaaacacattaactcttccaataacttgatgactatttaaagcttcccacgatttctttaaaatatatatatatatttataaaaacgtgtactaaaccaaacacatgtacaatatctaagaaaacaaatgaattcggtattattccatcaagaaggaactggtttctaatacgagtgattagaagaacattctaaaaagatcaatgagtacaataacaagaaatgaattacacagagaacaagaaaacatgtatatacattaaatcagctgtgaagaacttacagaaagagagggacggtctggggtccctgagtcggtgacaaacatatatgtgtgaggttaaagaagtagtggcaagcaaacgagaatagaagagaaggctgttgaaaaaaaaattgaagaaagaaaatttcagacacgagagtaagaaagaagagcaagaaatagaaatagaaa

SEQ ID NO: 248114 - DNA, 930 bp, Cannabis indica
acaggtgcctgagtaggtagggtagtagcaaggtttaggagttgggcgcctcagtctctctcgaagactaagtgcattcaggcagttgttggggcctccgtgagcatgagggtcgagcctcttggagttcctcaacgcctcgtgcataagcttggcaactaatggaatttgaggctatttgatccctagttgcaccaccttagtccttctcaaactcaacatactcatggaccatgtgacacttagtcacatatgctctttctattttaccaataatagctttcttaaaaaacctttgaaacttatctctttttccataaataattagaaattctcaactttctcaataagagaactttgatattcttctttttttaaaaaaaaataattcctttaagtactaaaatattaaatatcctctttaataaaattaatttagctagttaattaaattaattttttttccaatttaatttaataaaattatatttttctaatttgatttaataaaatttagtttttatctaatttatgcaattaaattagtttttgtccaatttattttaattaacatagcctaaaaatttatcaagtgaattgaattcattttcatatttaatatttatttttgatgcaatgactatgcacctcggcatgggtctaatagtggtcgaggttattggacgaggtggtttgcataaagtggcttagcccatgtcatgcggtgttgaggagatgtggttgacgccatgaggaagcacctcaaccatgaatgagatgaagcgtctcggtgtgacgaagcagctaggccacaaatgaagtggatgtgagttttgtgccctaactaaaactctattcaatgtaatcttgaatattcatttatcaataaagaaatagatttatttcatggttcacgtgtttatttcatga

SEQ ID NO: 248115 - DNA, 870 bp, Cannabis indica
ttaattgcaaaaataaacaaaatataaatgttgtcattacttcagaaaattttatcattagttattgccttcacattgtatagattgctttttgtactactgttctggtttttaactgtcttagctaagctacccaattcaacctatgtctttatataggttaactcttgtacaatgtagtcaatcttgtaatacactttctcatcaataataagaaagcattcattattcatttccttggttaagagcaagtgctctggttttatgcatctgtgtatatggcattgttgtcgtaagtcgttttcgattgccaacaagaaagagtttgatcataagcgtaagattgcaaatccaacaattggtatcagagctcggagaagaagttcgaagaagatcatcttgatcttagctcaagaatctggtgaacatccaagaaaatgggcaatgcaaagaatgatcttgaaaaattcactggaaagaaatattttggtctatggaggataaagatgagtgcaatactggttcagcaagggattcaagtagctctgctaggagaggagaacttaccagaaactttgacagagaaagaaaaggttgagatgctcgacaaagctcgcagtgctataatcctgagcttggaggacaaggttctgcgtgaggtgtcaaaagagaagacaacttctggtgtgtggtcaaagttggaaagcctttacatgataaagtctttaacaaatagactgttcttgagtactcattcaagatgttagtacggaaaagtattgaagatcacctcgatgatttcaacaagatcgtccttgatctagaaaacattggaattaagatagaggatgaagaccaagctatcatcat

SEQ ID NO: 248116 - DNA, 1755 bp, Cannabis indica
atttcggttgaacacaaccaatcttccccttcttgaatacttctatcatagcaccatgatgattctaagctacacaacccatgccaaagcgcccctcttgtttaaataaagccccatcaatattaactttgatcttatttaactcaggtgcaatccaacgcttaagatttcgcccctatcatgcaacagagacaacgaaagacccttccttccttgagcaaatttatactgatcaagcatgttcctagctgatgcaacaatatttgatgcaaaccaactcttttttggccaaacaaattcattccgcgcgccaaatagcccaactcaccacagccacttcctccatttcaccttcgtaccctctgtcgaagatccccaatagctagttgttgaacggtttctgcatgagtgttacacaatggacagtcagcattgacgagaacatgacatttttggagctgaaattaagttgggagcacacccgaagcagccatccataagaatttattgatcttaggaggtatttgtaacgaccaaaggcgcttccaaaattcagtattggcatcacggcaccaagcacctttagattcttgtaaaaatttataggcacttttaaccgaataattcccacaagtctcaagtctttagttccaaccatcatttatggccgaatcactaagctgaatggacaaaataaggtcctgatcacgtgaaacaaacaagtctctcacgacatcctcatcccaagcgtgagtgtcaacttgaaagaggtagctcaccgatttgttcacaaaagcaggatgccttgtacgacatagctgttagaactatgtggaagccaaggatctgtaagaatggatacattcttcccattagcgattgttctttgagcacaagaatgtactagatctttagtttcaagaatacttcgccagatgaagctaggatgatctcccaattcagaagaaaacaagttaccatgagcataatattttgccttatagagcctactaaccaaagagtcatcattaaccaataatcgccaatattgtttctccagaagagcaaaattcaagtctctcaagcttcggaaacccagacctcctgcatgtttatgacgacacaattgctcccaactcatccaattaatacctttaccaccgctcgaatctgaataccaccacaacttagccataagctgctctaactccttacaagtgtctaaaggcaagaggaatacattcatagcataattcggcaatgcttgagcaatagattttagcaatatctcctttcccgcacgagacaaaatacgcccttcccaactttgaattctcttccgaagcttatccttaagaaagccagggatagcattcttattcctcccaaccgaacaaagaaggcccaggtactagccattttcatctgcctcataaatttccagcatagcacagatagaatcccgcacctcactacaagtattattgctataaaacaaagaagactgagtgaaattaattctttgacccgaagccacctcataagtacgcatcagctcctttacattgtacgcttcctcctcagtggccttacaataaatatagccatcatcagcaaagagcatatgagaaattaccggtgcaccccgagtaattttacaccccgtgagtaaaccactttgttcataactacgcagcaaactaaaaaaaccttcagcacaaagaataaacagatatggtgataaagaatcacctt

SEQ ID NO: 248117 - DNA, 1045 bp, Cannabis indica
caatagactctctttatagtaaacatatatagggctgcctagctaatgcaggctaaaggtgagaactggaatgaagatggcaacacgttgggaagatcttggccgttgaatttcatcatgttgagttgtactcgtcgtgctaacaagtgaggttttgactataataaaagggttaaataggagataggggtgttaaattaaaagaaaaaaaaatgcatataaatcagaaaaaaaatatcatagtttaatagaataatatgttaaacacgctaatgcacaattttacagcaacaaacctgctaaatcggttcctaaggagttgaataatttggacacttaattaagaactccatataatcctataattattaaattacacacttaaggatgtaagattgagccttgtaaggcaaaaacaaccaaatcttcgaaagctgtcaaggatgtaagttgggttctgttgtttttcgattttttttttttagtttttttcttgttgttgtgtttttcatttgttgttttatgtttcaaaattttttccccttgttgttttaggttaactctgattctgacttcgaggatgaagttcctgatttggaagtgaagcctaaagttaaatccaaggtatgtttaccttgaatttttttttttttaagttgaaattttataatcaactgttgtttttcattttgtttttgttttacctgtttatattcacggttttatgttttgtcttatttttgtgtgtactatttctttatgtatttatcttgatgttgattttttgttattttttagttgttttttggttttgtttctgctattaaacagtttggtattttagtgttgtattggtgttttctaaacagttgttttaatgtttgtttttcagtagttttcgtgttgtttaatttaatttcacgcttgacaatttctatagtaatttcatgttttacaaagtgttgttaatatgttgcttggaagttgttcatctttcaagctgtttatgtttgggtgtttttaaaatgttgttgtttggtttttt

SEQ ID NO: 248118 - DNA, 784 bp, Cannabis indica
taatacaagctaaggggagtaggatattgccgaaataaaggggtcgaaactctttaaaatcctgttaggggtgaaaatcggtcggtaccaattctgagcaaccaaacatgcaaccacccactgtgggtcaaggtgtgaaaatcggtcggtaccaattctgagcaaccaaacacgcaaccatccactgtgggtcaaggtgtgacatcccctctgactgggatcacacccggtgtgtaagagactggaaacaccagttcggcagccggtactcccaacactggaatctcatccacaactaaggctcagacgacaataggagatgatactgagattcaaaacctccgcaatgctcttggactcatgcaaggtcacactaataccttgcattatgacccggaagagctccgtgctgcactgaaccttgcattcgaaaagcagaggcgttagttcgttgaatggagggatagggagatggaaacgttgaaggcccagcaggcatccatcgacgactgcataagacaagccaccgtactgatatggaaagtctatcaagttgctaaccagcaaccagctgctacgtctagcatcccaatgggtgaaacagaagaaatttctgctgggcataccgccgaaactcttaacggtcagccgtcaaatccccgatcacaggttccacctgtggtccaagtggtaggcggccataccttgtttgaaaattcatcaggtggagttatacctaataactccatccaaactaatggttccgcccatagagagtggcata

SEQ ID NO: 248119 - DNA, 964 bp, Cannabis indica
ttcagtgcgtacaaaaggtttgggcgagcccaaaataccaaacagaaaaaagagcacacttgcaaaaaaatataagtggccaagagtcataagtgtgctcgatcacttggggggcacccatacctgtccaaagcatttggtaaaaataaaacaaacatagttgcataatgattataaacagaaatgatattcattaaagataacaaaagcatgtaaaaccaggattaaaggctgcccggtcagcccgctgtctgaaaaatgaaaaataattccaagtttaaagaccgcttgatcggtcactttgtctttaaaaaagccttatggccggacagatataaaaaaagatagaaagagaaagtattcaaatggctagagtcccaggctctttatacgggtcttctgggccagttggagttggaggatcatttgtctgagtggggggcacgtcaacatactggccggaggtggaagtggtcgcctcgggttccctgtcggccacctgagaagcgcaatactcgagtaacatgtctattgaatcgccaaagtaatcaaaattttcctggggattagccttccagaaatcatagaatatctcgagaccagaaatcatagaagatctcgccacttcagctctctgctgctcggcctctgatttgtacttctcaacctcagcattaagctcctcctccttcccattcttctcttcttccaacctgcggaagacagctcgaagaacctccctttcttcatgaaggctggtcacttcattcgacaaggagacaatggcagtttcaagttgattagaagcctgtagatctttactcagctcggccaccttcttcttggcagcaagaagtttcttgttgacttctttcagttccattcggatggctccaagtcgaaccctggctttgtcggcatccttcctggccaagtccacttccgcccgcatagtgttggaaat

SEQ ID NO: 248120 - DNA, 546 bp, Cannabis indica
tctatcctatctttctttccttccacaggtagtaggccggtcactcaataatttttgtttttctcgaaaaggtaaaataaggtcatcatgactcatgagactttgtatattaaaataatacaaattgggatgagaatttagatccacaatttctacaccacaaatttataattaaattatattcgaggatatacaataaaaaatttgaaaaatgttattcaccactggtcagagatattacatttctttgtagtttttgtcaaaatttaaataaattaattaatataaaaaatttcttacatacttggagggttgttatcatgatcattgtcatcgccagaatgataatttcctgtgtttcataacaagtcatgtgttagtttataatttagtaaaacaaaaatagttgtaaaaataaataaaactacataattaagcaagatacatgaaaatcattattaaataaatcaaagcaatttaattaaatatctatattattattacttgatacttttgtagagaagatgattttttccacagtggcat

SEQ ID NO: 248121 - DNA, 1265 bp, Cannabis indica
gtagcgtgccttagcattagggcgttacaatacaaaagatgaagttactacatccttgaagtctatcccagatgagaaggctccgagagttagtatttatgtcttccaaagtctgtaaagacattcctaattatttataagagttgaacattttgatatatgcatgaatgttaaattattgatatttaatattgaataatttatatacaaatatcaaaaaattctttattcatacatgaggttgtgacttgtagtacgaagaattaagatcacttagtcatgaataaaataattagcaacatattaaagtttaggaatcattaatcaataattgctactgcgcttaattgatgcccgtcacttggtgcaattaatctcaattcaaattattgatacactatttttattacaaccgtacagtgttgttataacaaagttttaatactaaaaatgttttcaaacccacagggattgattattaaattttactaactattatactttttaattttatactttaattagataacacaaagtaaattatattcaagaatcaaataataaagtaaatagaacaataaatagacaagcaacgatttttcatcagaaagtaagaacctagagcattgatttccctatttcaaactatgaatctcaatttaccgattatcccaatttatcttataatttgtagtttcaagaatcctaatgtaacctattaacctctctcaagcgatgataaatttaacttagaataactaacacgatgtctctattcaatgttaaatcaaataagcactcataaagttatatgattctctttaaatgaaactcatagaattagtggaatctctcaatctcacacttttcctatgtcatgcaattttaagtctgattttagattacctctcttaagtgtaaaacccaaaatctctattctaattaatggtgatcaagtattaaaaagataataattagcacaaaatttcataaacaaataacaagaacaaatatgatgataatttgtacatcattccttccagagaatgatacaaattgaattcaattactttttaaagagtgttcgtattctttatattagtcatgttattatacattgttattacttacaatgtttatattagaaattattgcatgtgatatatatcaaagatcaaattttgcatacattttgaagattatgcaaaaactatattcatatattctttgaaaactgaataattttttatatttttatggatgaa

SEQ ID NO: 248122 - DNA, 1245 bp, Cannabis indica
ggattttgtaagaaaaattgtctgtagatgacgaaaattcttgggtaagtgtgagagttgaaatactttgagagaacttaacagagaatctttctcgactttattgtacttgttcttgctcaatcaatatacatgatttggtggtgttcgaaaactaaagtaaagcgatatagatcacatcgatctatcagatttgaattagtatatatcttgatgttgatttttttattttctgtctttattgtttctagtttttttatactctattcatccctgtttttctccaattaatgtttgtatttgttgattcttatcgttactgttgacgcggtttttcgtcaacggatctaagaagatcgtaaaacgagcaagatgaacacaagcaatagttaatcaaagtaaaccggtttgcaaaaagaaattcaccaaaaacaaacacaagaattttatagtggttcaccccctttcagcggtaataggctagtccacttggagtgttattgatctcaatgcttgaggagagttctccagagttatgttctccaagagttcactcctcaagtgagtttttagaatttgagagagggagctcaagagtatgatctcgtgagtatcaatttcagggtccctttacaagtgatttcaccccccttatatagatattcatctaggatttaaaatcccttaaacataggtatgccctcccgtaactatagttgggttaggttcaagatacaaaataataataaaataattatttaaaaaataaatatctcttcacttatcattttttgactatattttcggagcagctctaacagcacgcgtccctcgtatttagcggacccggatggtcatgggtacctgaggggagctaattgggtcggttcgtgcccatcaggtccttgagataatttgacagctgaggagctctttgcaccttagcacctgacggagtcaggagcttagtgcgcccaaaatgctcctctttggctattgagctcctccttagccaataagctcctccatggcccatgagctcctctttggcaaatgagctcctccttggcccatgagcttctctttggccaatcagctcttccatggtccatgagctcctatttggcaaatgagttcctccttggcccatgagctcctccttggccaataagctcctccatgaccaatgagctccaccttgttagacctccatatctagagtaaaaattcatgcacaattatttt

SEQ ID NO: 248123 - DNA, 602 bp, Cannabis indica
attaagctcagggtcctatttttaccattttagaaaatatatggtccattttgtcatttaacaaaacacagggtccaatctgtaacttttgcaaaacacagggtccaaaatagtatttaccctaaattatgatatatatcgaagcctcgtcaaaacccgtaaagagtaaaaccacatgagtggataaaacctcaaaagagggaaaagagtgccacgctttaagaaaagtacaacatgagatccaacacataaaatcttcaaaagcttagacgcaacctaattcatttccttctctggaaatatgagaaattaacctgaaattaattaattaaaaacgataatgacactttagttcttgttaaagaatgatgatatttagttggaaaataaggtatttaatccttgcaatacaaatctattatatatgtatacatccccatatataaatcataaaaatacacttgtattactaaataaattaaataataacatgtattatatgtaattgtgagtagaaagtaatattaattagacgtgttatgtattaaagtcaaatcaaacttaaattatgatgctgatttattaactttaaattattttta

SEQ ID NO: 248124 - DNA, 574 bp, Cannabis indica
tatatatataaatattatattttctgaaattaatattctgcattattccagtcagtaaaataaaagttattgtatgccttaatgtgacacatcttgttaatttaagattcatacatatatgtatttaaatgcgcatgcaaaggggatcttaagctaattaataatagggtatataaatataatatgcataaaataaatatataatgcttaatttgtctacgttaagaaattaaacctgaagaaaatgataggttttaatttggagttatttgagggtgaaagaaagagaagaaaaactaggatgaagcagatgttttatttgttattatataccaaaaaagagaaagagtattaatacatccataaattatccgtttctacgcaataacacaattaagtatagtcacaccccaatacacgcataaataatggattttgtacgtattagtttttatgtttcttgtaatttcacaccaacaattagagagacgtaactccaaagatccatattaatatacttaatcaatataaatcactatccaattttaaggattattattataataataataat

SEQ ID NO: 248125 - DNA, 1375 bp, Cannabis indica
ataaatactcaaaaaaataagtttttaaagatttatagatttttttcttacaatttttatgaattttttttggggggaaatattatagattttttacttttgtaaaaaaatataaaacattattttattaattttaggattttttttatataaattatcctattaataattagtctatatagagagggaagaaaatatatttatgtatcatatatgagtaatttgaaattcaaacctttcaattgcatgagttaggagctcaagttcttcaagtgtaccatatgcatcataaatatcatcagcaattgaggccaaagctatgattttgagtaaaatatttcttgccaaacagtattggggttcataataaactcctaatatccaaaggtacaattccacaatcctatctcttgcaaatggaaatttgtgtacaaaatctgattctttccaccacctaattatatataaccaaaacattttagtaattataataaataattaattatgcttgataaatattaaatatatataaataattatacctgctgacttcactaagctcctttttgtgcatacattgtaatagattgaaatctaactttgcaagttgtaacaatactttgttatgtgaggcatctttttcatatatcgaaatgaaatgccttgcatgaagatttactagggtctttcttaagggcctctctagggctcgagatatttctttcgataatggatcatcgtcttcatggtgttcttttttcttcgccaaaaactcatttaggtgtgttgttgtgaaagcaagtgcttcatcaagtatattttctccaacacaactcaaatgtgaggcttcatataagctaagcaaaccaagggtatcacttaccaagcattttttaaagttcccatcctcatctttgaatttttcaaatatatctgcatgtgtatatatatacataattaatatatagagtagtattttcattcttaatttgtatatgtgtatatgtatactaattataaatcatatattcttatgttgtgattaaaaaattcgtgattaaaagtttagtcacaaaaattacagtttgttatgactaaatgtatttttagttacaatatacttattgtgactaaaattatattaatgataatttgtatctaaataatatgttttagtcataagtaactttttgttgtgactcaaagttacatttaatcacaaaaaaaaaagttatgttgtatgtcactaaaagattgttatgaaaagtagcttcactacaaaaatcttacttttagtcacaacaaaacttgtgactaaaagtgaaaaaaaattgtaaactaactataaatcatgattcctatgttatgactaaaa

SEQ ID NO: 248126 - DNA, 1710 bp, Cannabis indica
gccctgaaacaaagtgggccatagggaaaaaaaaattttgggcccttatgttataaaaaaagtggtatttttcaaaattggtaaaaaaaatgtataattttaaaagagaaaaaaaaaatttgggcccctggactgggtgggccctaggcacaggcctagcccgcctctacccagggccgggcctgcccctcttgtgctagtcaaacaattttgcttgatttgcctaatcatggttagtcttttctgattaatgaaattacattaaaaaaattatatcacttaataaaaaaaatacaaaaaagggatctttctaacctttgcggtcttagttccctaatttgaatatacaatagtagttattttttttttgcttaggcgggaaaataattatttttccttcaaatcttattattaatttttaaatagttaatttgaatatagatatttaattaagaactagcattatggttattgcgagaaaacgaaaagttacacgagactcagattaaaaaagaattaccccaaaccgtagctgccactacagcattttcaagactctctctggtatcgaagtgagccctttcttgtttcttaggtttctcttatcgcttctttcttgtatctttttagtttttttttctcttgattttgtttcacgacgacattcattttgatattgcggtccatattggtctgatatgtagattttatttttctttgctttgattggatatttttagatctcttgttatatatatatatatgtatacatttctcaagtattttaattttttttttgtaagtaaaattgtttatgaatcactacatagacgcacagatggtaatgatataaaataatgtgatagctctgattgttttaggatcgaaccaaacaatttgatgattgtttgatattagttgttgatttgagccaatttcattctatgggaatgttctaagatatttatgtcttatacatttcatattctctttgttttaggggagtggctcagggtgtgaacttcaatcttgaactcccatgattcctcccctttttattactattaatttttttttttcactggagtaattttaacatgtgttttttttttaatatatatatataaatttaattagataactcttttgattaccaccgagtttggactcaaaaatagtaaaatttcacattctttaatctacgactcatcgtattaaatctcaccgaaatatttaatattgtaataatttttatttgttaattttattgtcttattagtagttctgtttcataattgtggtatcattttacacaatactagtacaaagtagtgttttttttaggggagatactagtacagagttttaaagtcccactaaagcatatttctagtataatataaatattttatggtacatacaatgttttagtatgatatttagttgtcgatttagaggttagagagtaatgggtaattatagtatttttaaaagcaaaaattattctattatacactgtagttttcagttggagtaagttctcttgggatgtgtttgatttgaattatggttacctgttgtagtaatttccagaatcatctctactatgatggttaacgtataaattggctgttttttttttatcatcaccatcgatatgatctcattatcttgagaagaatattatgattagagacatacacaaaatca

SEQ ID NO: 248127 - DNA, 722 bp, Cannabis indica
ctaaagtgtataaatacaccctttggttgttgatttcctttatctctcttggtgtatgaattctaaaattacttttaaattaatttataaagagtttctttgttgtgtgaagagattcagtccaacaagttcttagtattttattattgtattatttcttgttgaaattgtgcaggttaaacaccttggatattgttcatcaagctttgggagaagtcttgttcatgagacactttttgagaggacactttttgagaggaagattgtaagtaagtcactcattttgaggaagtgtgcaagtgctatgatttgaagggagtttaaggtctaggcacttcaaaaatttgattagaaggatagattacaacagttaggggtgttcatccaattcaatccgcactattttactcatagtgcatatgatccgcagtaagtgcaaattttatattttggatccaatctaatccgcacaatagctcaaattcaatccaatccaattcgcaaaattgtagattggattggttattttgaattggttacttttcaatataaaattatttaatatttatgaaataatatttcttttcacaaaactagcaagaaaataaaataaattattgttattttatatccccagtaacaaattaaagtaaatataaaataacaaacaacaaattcaaagaagaaaaaaaaattgtaatgtacaaagaaatgtttaattt

SEQ ID NO: 248128 - DNA, 503 bp, Cannabis indica
acctaggtgttgggccctatttcaaggggtttaggtttatagttttcttcccgagttttcttgatataaaaatatccaaaacagcccatgtttacaatttgtcaactagtgttgtaagttcgtgcgtgtcgtgctcgtccaaccaatatttatttgtactttacaaaaaaggagttgtgtcgtgctgtgccaaaaaaaaatatgggtcgtgccgtgtcgtgccaacatttttaaagggtaggcccgacactgctcgtaagcctaatatttttgtgttgtggtcggattcgtgtcgtactttgctcgtgccagctcatattcttaaataggccatttcatacctgcgcttaaatttgtgctttattttttcatatatatatttttttacaaatactaaattatatgtatacttcaaagcttcaattatatttattaacatcattagaatttgaatatttacttataaatactcaatttttatatcacgccctataaataaatta

SEQ ID NO: 248129 - DNA, 716 bp, Cannabis indica
tccagtgtaatttaatttttaaggactcatttggtacatcgtgttgtatttgtgttagattgtattaaattgtagtagtattatttaatatagtacaatgtttagtatgtattgaattttattaataggttgtataaacatatactatttacataaacttgaccccaaccacgaccccgaccatgaaccggggtttggggttcgaatttgagtctaggctttggggtcgcatcagggtccgagtttggggcctagctagtctaggagtgcaagggttgggttcaggttcgaggttcatgttcgtgtttggggtctggtttggggtctgggtcagggttgaagttgggagtggggttgggtccgggtccaggtctaggtcggggttcgaatgcagattcgagactagggttcgggatctggatccgggaacgaggtttggtatgggtccgggtttggggtccgagtctgaagtctacgtttggggtttggggccgaggtctgggtttgggtctagggtttaaatattataatacaaactaatacagatcatttataatgtattaaataatgcagttgaattttgtattaaaatttatgattgtaaaaattaatacaataaaaagtttgattaaaatatagtattccttgttatttaatacaatacgaccttataagagttaccaaatgagccctaatatattataagcagacatggg

SEQ ID NO: 248130 - DNA, 739 bp, Cannabis indica
gaagttgtcacctagcgagtacaaaaaaagcctgctgccccaaagatcgaacactcttggtctaactgccccgatatgtacaatcttcattagctcgagctcactgttgtttagcctttgtcttatccttacctacacatgtaaatattatctatgagtcaccacacacagtaagaaaagtataatcataacataaacataaactgaattataactaggcgcccatacacccaattataatcctatctcgcgtcccacgcgtaccgagtctagaacattcatacgacagtactattgaccataatatcagcctatacttgatactctagtcgtactgatgtgatagagtcaatatgtattatgccaaacatatatccgtcggtattcagcgtaactttatgtacactaatactaccattgctgatatattatctaataggtatttataaacatgcacgttaaacatgtaatcacatatgatattattatactaatcttaccttgactatgaattcaggtgtgccggtcaacctgagtgaaaactgctgctcaacgatttacaggcccctatgtcacaacatatgtaaaactgataagtgatacgctaaatcacttcttgtggacttaaatttgaaactaaaagttttactattgataaatagtgtggtaatatcctaaatatcgaagaaacatcaaaactaaagctttagaaacttcctatatcagtaactagatttcc

SEQ ID NO: 248131 - DNA, 654 bp, Cannabis indica
ttttacttattataaaaaaaaaaattataattatatttgattaatgtgtaataaaaaattaaagtagttctcaacttaatatatatatatatagttatagtattaattctatagcttttagaaaattaattataaataatctacaatgttaaaaaataaaattcagacaattaattgtatgtttgtctatttatttattttttttgtataattaattattttaattatatttttgacaccagaaattatttaggattttttgaactcttatgtcctaaagtctaagatttatgaggaaaatataatgtatactttttattttctattttaatttttaatttttttattattcttaatttatatccaattttataggtcatattctcaattatgtgcattaagaattctaattttgataaattatgtgaagtttattgtagatattgtcacacattaaataaagggaaatttgcggcaaaagtccccaaaaagttcacgttgatacagattagtccccaaggtccaaaaatagcggcaatagtcctcaaggtcacactttttatttgtccgttggtctccaagttaacagatccgttaaacccaattcaaatgccacgtgtcgaaatattattggtggatattattattttaatt

SEQ ID NO: 248132 - DNA, 1457 bp, Cannabis indica
cttattcttagtaattgtgcatattaatgatgtttgagtaatggaggtgtggtgtcgtaccagtattaaaaactttagaaaaagataaagaaaggcaatctgaaaaaatcaagtgttcttagcagggaagcaagtgattcgtcccctttatcctagcctactactctctttatataagccttaggatttgtttaattaatgatcccccacatgtcgggttatcccattaataaatcttgtatcttattcccaataatgaataaacaattacaaataaataaaaatcttcttatttctaggccaaaatctcacaaatattgggaaaatagttattctcggctagagatgcaccaaattgaagtggagtgacaaggaatgtcacctctcgccttggaattcatgacattggtgagaagtattggaaatatgtgttttgggatgccactgctcgcacatgatgccacatggactgtggcatggttctccaacatcccacacttaattacactgctatcaattcccaagtaatgtgtactagcttgccttgtgagcaaattttagacccgataacttcagaattgagatattaccatgagatacacatagattcgtcttgaaaatatcattcaaataaaaattaagagagttatgaccattttactgaaggaaattttgtgctattttattctaattgcgagtactaacatggccaaatggcagctctcaggcatgcatgttcttggatccctcagggtgtgttttaacttgatatttttatggtgaataatatttcagatgtcccaggaccccaaaacctcatttcaacgtcctataatatgggagaccattaccaccaattgcggccagagagtggtaatggttggtcatggattatgggaagtcatggatggtgtttcttgcttatttcaatcatatggattctagaaaactactttagtcatattggttcttagccaattacttaggcgagcactgctacaatttttgccaaaaaatgcagtgatcgcataagggggctatggagccttgtgtgatctttttcacttttatttgatacatggatgttgaaaatacaatttggccaaagaaactcccactcctatgtggtggccgaccactgccaccacttgtaccaaaaatgtggcagtggtcggccaagtggtttccacaccatttggtagctttctcacttggttttgatatgttattgatgaaaatgtattttggcaagaaaatatcatccccattccttatggctgaccactgccacaatttgtgccataaagatggtagtggtcggataagcttgtattttggtgagaagtagtttctttcacttgtgttgcactccttagtgttgagagaacacatttggacaagttctctttggtgctttataggtggctggggcagctacagcagcaaaaacatccatg

SEQ ID NO: 248133 - DNA, 945 bp, Cannabis indica
aaaatgtatcaataatatctaataccatcttatatgtcaatatcgttattatctaaattggattttatataatttaatgtaataaattttaaaaaatttcactaaccaaaagaataattacataaagcacctttttttgtaaaatatttatatttttacgttcaaaaattatttttttacatttttacggttttccaaaaaataacacgaaaacaacataaaatcaataagaaaacaacataaaagtaacatgaaaataacatcaaaataacaacaaaaaaaaacaacaaaaaataacatacatataataaaaaattaacaacaaatgaacaaaatttcaacataaaaagactgtattttatgtaaataaaatcaaaaaaatcgtaaaaatatttaaaattccgtgaaaccgtatttttgttatttttttttgttgtttttgtgcatttgtgaaattaacccaaaaaaaaacaaaacaaaagaagcaaacatttctaaagtgtgatttcctaaattaaaaattaaaaaaaaaatagatccttaaaaaaaaaacataacagtagtttggtgcttctcacgggcttagtttggtctcctccttatctcaccattcaaacgccggaactggccaacgccgccgtcgatgccattaattaacaacttcttatttcttccaccaggtaatctccgaccccttgttgatttacctttgcaatttctgctatcattttgggtcttgttttcaccaaacaacacaatttcatttgattttagattagatggggttgatcttctcccttctccaattcttcttttgagaaaatgaagctaatacattttcatgatgatgcagctttatttgatagaattctgtttaagatcttaattcaatttctcaaattttgatttatatctagttttccataacttcatatctcagactgt

SEQ ID NO: 248134 - DNA, 953 bp, Cannabis indica
aatgaatcaatctcatcaataaaaataactgtcaatctatattcctataaataggagcagaatccatgggaaaatggatgacaaaaatggagagtaaatcctattattaaaaagattgagatttgtactctgattttccaaaaaatatctttaataagatacactcgtggagtatgtagatttaactacaaaaccacgtaaaatatatggtgtttattattattataattaaattatgtagtgtatttattgcaaaaaaggctatatatttggttaacgaaaatctgcgttaacagtttggtactttcattgagagcctttgtgataaaaactcaaaaaaaatcctcctttttaatataaattcaatcctatactaaatggctgataacactccccacgaaggcaatcgcctataggaaactacccatcgtcctggcaaagaacctatgggatctcagagaaccaacacatctgaacaccacattcagggaagaacgatggtaatttcaatactattggtgatcaaatcccaaaaagaatgagtgaggatgcctatgatcctaccagatatgtaccattggtagaattagagaataggcaacttcgacaatgcttgggtgaatcaaactgatgaaacactgagttagagcaagaagccctatcaataatctcccttttgcatcttttccttcgcgttcttcacaacaccaagtccccattgttgtatttttgacaagcaccattacctcacacatttaccaacaaagagagacccttctctattttttgtttccattagtttattgttcccaagaatattgcaaccacctcccttatcaggtttatgaatattcggtctcccatgagccttgtgttcaaaagtttcgatacagatttcgcctagagatctcattttgtactattatccatacattcttgagaacataactcta

SEQ ID NO: 248135 - DNA, 758 bp, Cannabis indica
aactgatgaaacactgagttagatcagcaagaagccctaacaataatttcccttttgcatcttttcattcgcgttcttcacaacaccaagtccccattattgtatttttgacaagcaccattacctcacacatttaccaacaaagagagaccattctctattttttgtttccattagtttattgttcccaagaatccaccacccttatcaggtttatgaatattcggtctcccatgagccttgtgttcataagtttcgatacagattttgcttagagatctcattttgtactattatccatacactcttgagaacataactttagtgtatcgaatctaattaataaaattacaatagacatagccccattatcatcacaacatgggaggtgaactactataaattactggtgtcctttttcatttattgcaattatatttagtcaaattattttatcgtagtcctcttgtttattacgatcttgttagatcagttgacgaaaaactgtgtcaacatgtatatatttatatataagaaaaatataatttaaattaaactattcaaaactttttacatataattcttttctctttcatgttttatttgtttattttaatttatagttggagatataaaaaaataataatttgttttattgaatttgttgttggatatgtgaaaatattttatattttaataaatattaaaaaagttaccaatccacaacaaatccatgagaaattaaaagggagttttaa

SEQ ID NO: 248136 - DNA, 502 bp, Cannabis indica
acaagccaagcagtacaaagaaaaatctctacatcttttttggttagagaagtgtaaatcatatcagcaacgtcatgaaacaaaatctctgaagagttagtaaaaatgtaaggataaaattgcgtacctttccagactcttctaatactccggcagtaaaataatgcatgagagaccgactcttccgatcctccacaacggtcacaacccgaggaatgaatgattttcctatgagctaggtttttggcagtgggaagggttgaatttgtggctcgaaaagaaaagtgttttaccttggcgggaagggaaaggtgccatagatttttccaccaaggcgagggagaagaggaggaggggatatccggggggggagtggaagagaggctgagatggtaacccgatttagcagaatagatgcctgattgagagtggtcccaaatgtgctcatcggggcaggggctaagggggaggggaatggtgaggatctgctcaaccacatgag

SEQ ID NO: 248137 - DNA, 568 bp, Cannabis indica
cttacataacaattgttataagttttttggggctcaaatatagtaagattaggccgtcgagatcctaattgtaaaaaaagacaaatactttacaagcatgtatattttatatgtcatacacaaatgtaagtcctatatagctagctagacacctgcctcgaccctgggcgtagggcccacctacttcagggattcaaaaaaattattcttttaaaataataaataatttttaactaattttgaaaaatatcatactaatttctaaataagagtccaattttttcgtatgacccactaaattttttaaggtcggccttagctacacataagttattatgttgttatcaaaatcttgaatttattgactttgatcttcttgtgaaagactttcatcaggctttaaacatgttgatgtaacaattaaggtttggttaggcacgtcaatcactattaaaattgcctaattttagaaaaatattacttttttctttaagcatggctatggggtactagtggtgcttaatacgtctagatatgtcaccttacgacctaatagttattacattaa

SEQ ID NO: 248138 - DNA, 1145 bp, Cannabis indica
aaaatattttttaaaattatattttataaaacggttttatttttaatttttaactattacttttaattttttaaaatattttgtttcttaatcgatattttggactctaccccgacccaaattcaaatcttgacctggatttggactttgacctggattcaaatctcaaactggaccccggatctaaaccgaacccaaaccccacatccagatccgaatctggacccctacccgaaccccaaacccagatccagaccaagactcagtctccggactagaccaggacccccttcttggtcacggcaacggacccgaacccagaccctaacttggcgctgaattcggaccttgacccagctccagtgttggacccagaccctgatctggacttggtctcaaagtcggaccccagctccaaacccgacataaataaaattaataaataaaaataaaaataaaattcacaaatcacacttttatttttttatttttaaattgaaaaaaatagttgtaaaatatatttttgtttttcaaacacaaaattagagtaatttgtgggacggacccagaatttttactttgtgggggcttatttatcattaaaaaatatttatacctatattataatcactcttactaaatttatttaattttgtgggagtttttctactattttagtctataattattaaatttaaaaaaaattacatttaattttttaaaagacaatatttttgttagcccccatatcaacattactaggtccgtccctggcggcataaatacctaagtataactctcggttgtaaataaatatcaagtttaatttttggctataataatatttaagttatatttttaaaactctgtagataactaacagttaaatgttaaatcattatttacgtgttgttttttattggtacatttaaactaattttttaaaaataataaaaatttaataacttagattaattaaaaattattacgtagtaatttatttaatacttaatagttaaatatttatttataattaaaaattaaatttaaatatttataacgtaaattactattataataaacccaattttttgttggacatactgcataccatagattgtcttttcttgataatattattaaaa

SEQ ID NO: 248139 - DNA, 666 bp, Cannabis indica
acgccttaatcggccgcccaaccctgtatgacctgaaagcagtcacttctagctttcacctcctcgtcaagtttcctaccaagggtggaattggctctttgaagggcaatcaaatagtagcacgagagtgttacaacctatccatcacaaccagggagaaagaagccaaatccctcaaagctacaaatagtagttctcagcaatgaggactcgtccaaaacgaggtcgaagacattgatccccattttggggatattgatacaggggttggtctgattgaagaattagaagaagtgccattagacctcgaacaaccatccaaattagtcaaaattggaaaagagcttcctaaggacataagatccgttttgatccagttcttaagggaaaaccaagatgtcttcgcatggtcacacgaagacatggaaggaataaaccccaccgtgataagtcacgctttaaacatcgacgtcgaaaacttcaagcgagttcaacagaaaagaaggttactcgataaagagagagccaaggcactaaaagaagaggtggaaaaactatggaacaacaattttatcaaagaggtctactacctagtttgggtctcgaaccgcgtactagttccaaagccgaacggcacctggaaggtgtgcattgactttacagact

SEQ ID NO: 248140 - DNA, 1332 bp, Cannabis indica
agagaggtttttagcttcaagtttgctaaagtatttttgcaaaaactgctcgtttagcttggcgtaacctgaatccagacgttcggtccttcagtaagttctcgatttcttctacgtttacttttcacatttattttcagaatggaactttaactttgctgtaaaagatacataggaaaccctaagtctagaaactctacaattttcctttgtaacgattcatgcgacttcatcgttcataatgcttgctttttgaactgcataaatgcttatcattcatcttgcttattctgagcttcatgaaatttttcgccctaactgacgaaaatttcaaacttctaagttttgactttttgtcgaatatctttattctttaatctgttgagtactcctggtcggcatattttcctgtttaatgttcgatatcccgaccaaacactcatcttgcgtgttgtctttcgtagatgaacctaggtgagttttagggaagcgaacaccaaatcgaccaggacctgcttcaacttttgcacgaggatcatccttgtctttgctctagtctgccctctacaagtgacaaacactttgatttaattttctcgtctagccaaagaatgatggctcgtattaaacaaacaatgcgcaaagccaatgcatctgaccctcatgtggcccatcacgccaccttgcctagcaccgaacaggatccactcgtacaggaggagggggatcatgaaggggacgctgaggtccaagagatagaggagcagggcgatgtctgtcctgatagtcctttcgaggaggaggaagaagaggaggctgcaccccaaaattttgcgagaaacaatgagggggagccaattgacgctaacggcgatgtcctggtcataggcgtggacttcgttagtgaggatttactgctgcagttcctcataggaggcagggtgcattgggcgccaggtgggtgagccctccatccaaggtcactagggcacgcttacaggacctcgatctggatggctagctgtgcgagttagactgtgacattcccgcctataacaatcaagccacaaaccctgagagggggatgtgtgcctggtcggctgctcatgctaagcaaggggcactgctgcctttgcgcccgtactttaggaaggtggcagacttcttctacccctgtctgaccaaattcactcccaagtgcattaagtatctgtctgccctgtttattctctacgcctcccagaagtgggatatgtcctctccctatgaggttagctagttttttgacttgaagtctacccccaagcaggtcaggtcggggtacttctattt

SEQ ID NO: 248141 - DNA, 538 bp, Cannabis indica
atttcttccacagtcggacatctactaatgtctgcgttttccccatccgtaacactctccaagaacagagcatcaaagtcactgccaatggttggattttgggtttcatatacttgcataaaattctccctaaagtaattcccaatctcctcgcgattaataagccactccccattcttttccactcgatctatagtatttcttcttctccggatcaccgtagacgcgtgaaaaaatttggtattaccatcaccattatagatccaattttcccttgatttttgcttccaaatcctctccaaatttgcttccatctccaagatactcaattgaaccgaagcctccttttccaaattttcctttgaaggccattgattttgaatatcacccagctccaatttaagtttctttaaatttttatcacagaagccaaacgacaattgattccatctcttcagctcacgttttgtattccccaatttcttaagcaaaacttcatcattccttcctctcgcctcaaacttccaagccccattca

SEQ ID NO: 248142 - DNA, 1004 bp, Cannabis indica
tttttaaaaaaaaaaattaagattatgatatagtgacatgctacgtgtgtagggatagatttacctagtcgcgtttggcgcgtcactataggccagcatttttttaaattaataaaaatcagaaaatttagattttactctttagtgacattccatatttttagtgacacacattacatgagactaacaccaaatatttagagactaattgtgcatgtcactaaaaattaatcgtaactctttagtgactcacacttttttgtgtgtcactaaatagtgtcactaaaagactaaattggagtagtgattacctagaaccatgggatagtacgactcatgtgggtcatagtggacaggtttacaaagtcagcacactgctgtaccaaaaagtgagtgttttaatatttatactcgcaagtgcacgaatcgtttcagaataaaatgttcatgtaagtgcaaggtcgaacccatgggagttgactaacatcaaaagaaacttttttaaacaaagcaaggatattctaacctagttccaaatatttgatgggattttggttttgaaaaataaaataaaagacaagtaactaaaatacttaagattaaagatgagtgagtatgaaaatgattttcaaataagatgtgtaaaataagattattaagatattagaatccacaaaatgcaagttcaatagtatttataagtatattgatttccaagttcatatatgtagttgaaataaatcacactatattttccaaaatatattttccttttaagcacaaatttctttcaaaaaggtaggatttttcttcacttataaaatgtataatttctaagcattaaatgtgttacaatttaatgaaactacacaaaatcaaagaaactatgtttaggtaaaatataacacttatattttaaaaattagatgtaaacaatttaatgaaagacatttaatcaaatagtattatatttttgcatgatgaagatctaagtggaaatatgc

SEQ ID NO: 248143 - DNA, 676 bp, Cannabis indica
aaggaggttgatataagaagggtgaagcagatgatggaagaggggaaaatcgggggtggaatgattcctaaggtgaattgttgtgtgtgttctttggcgcaaggagtgaggacggcgagtatcatcgatggaagattgccacactcgttattgctcgagattttgactaatgaaggaggtgggacaatgatcaccgggtaatgtttcatgattcaaaagaaaaatacaaggaataagagtttaatttagtagcggtgacctatttgttttttgtttattttatgctaatattatgagttattagtgatgtttctgaatttttaaagtattaatttttaaaatatttttattttatttgggacaagtttgtacattaaaaattattaacctaatctactattatgcttattaagcaatggagaatatgtgggatgatggcacgaattacccattccgtttccactttgattaggctaactaaaaattatgcaaactcttgaaatttgcccaagagatatgatatgtgttgtttgatttagttttttggtattacatttttgagttggattggtcttgtgatccatagagcccttagaatttggcattcctatgaaaattatgccagtaagtattaagaagtagaggtgattgttaattccatttttggcatatttaa

SEQ ID NO: 248144 - DNA, 2103 bp, Cannabis indica
ctctctctctctcctttaaactcgtgatggaacccaccaccaataccacaaatcccaccaccaccactataaagttctctctttctctctctcattcagcgtgatagtagatcttgagggttggtggcccctccttttttcaatgaccgtaggtttacaaaataattagtctccattattttcattttggaatttatgtaattttgagatttttgtatttcatagatcgtcgggtatctcagggttgttgtttcagtaaagtcgtggctcaaattttacttccatttggagtgctcgtcaaataagatgaagatctaaagattttttcctatgcatgtaatgatatatccgactgtgcaaaatcatcggcaataatagtatagtcgaaggttttaaacaatcacctatactataggcgatgatgcaaaatcgtcacctataatgctcactatccctaacaattttgcacaatcgcctattctacccacttttctaactgtcgaataggcaacagtcttacagacctacgggattactttaaccaactgtttaaaatagcctagaaaacttagttttttagttgtgagatgggtgatttaaggccactttctttgtgtaacgtggtttataagattttttctaaggttatggccaactatttttaggtggtgctaccacatgtaatttgtgacacaaagtgcatttatatcgggttagttgatttttgataatatcatggtttcattgagattatgccctacttgaagcataagatttttataaaggagggggtcatggcatcaaagcttaatatgagtaaagcatataagagggtggagtggaattatcttagatttctgcttcaaaaacatggtttttcacaacattgggtgcaccacggtgagatatcatgttgttcatggtggtcataagattggacctattgttccttctcgagagattagaaaggagactatttgcctccttacttattttttatttgtgctgaagattttttggtgttacttttacggtatgagggaaatcagttaataaaggggtgtcgtgtagctaggggtgttccatcaatctctcatatgttgtttggtgatgatagctatctttttgtccaagctaatacaagagacgctcaaagagtgatggagattctttatagatttgagaggatgttaatacaaaaggttaatttgactaaatctactactttctttagctaaaatgtgagtagtgctatttgggaggttgtttgtgctattttaaatataaatgaagttgaacagaatagcatgtacttgggacttccaagtacaatgggtaggaacaagtctactgtattgggttttttgaaagagaagatgagaaaacgtatacaaagttggaataataaactcttcccaattatgctaccagaattttccttttgattgtgggaacatgtcatgagttggaacaagtcatgtctaatttttcgtagaagtcatccacgaagtcctatcaaagaattttatggatgagccgggagaggatggggcatagtaaggaggttggtgattaggttttctctcttcatgatttcaatttggttatgttgggtaacaagcctggaggtttctgactaagcctgattctttagtttctagagtctacaaagctcgatactttaaaaaggagaacttcctttcggtagatttgagtggtaattgttaggttataattaacctatatttcgggtctttaaagttagcattatctcgtctattggtgtcttttggagcagttttacgcttgattttctttatttcaggttcccggggtgttaaagttcgaattcagtcaaatggcgaaaaactgggtcaaacttggaaaaattggaaaatttggttccagaagtgtcagtagtcgcgacctccagagagccaggtcgcgaccctttttcctggtcgcgaccctggtcgcgacttcgtgagtttggcagaaactcagtttttcgagttttgcctgtagtcgcgaccagcttaaatgctagtcgcgactatgtacggaaattgcagatttgacctaattttgatttttcactcaatt

SEQ ID NO: 248145 - DNA, 537 bp, Cannabis indica
ggtgcttgcttcttaatatttcatacaaccatacagttgccaacaacaggttgttctactggcaccacaggaaccacggttgcagttggttgtagaggaggctcaacaggagcatcccgctgtctaagccttcgaatttcttcttcttgctgagtaattctagcttgcatctcagcaaacctctgctcccagtcaaaaggagtctggggtgggttctcttggccacctctaagtgcacgaccgcggcctctacggcgtctacgggggttttggggatttctaccaccccgaccacctccggtcttaaccatttcactatttcctctaatgttttgctcggcgtccattatctaggacttagcctacgaacccacaaggcatgtaggttcgacagtggtcaagtattctcaagactacattagaatttgtgtaacatttcacgcatatatgcaatacatcttaaatagtttgctaaaaagtaaagcttacggagccgcgagttgagctcaacactggctttgattgtacatatcttga

SEQ ID NO: 248146 - DNA, 1260 bp, Cannabis indica
tttcattgttttagaattcatattaggatgttaatgaaacatacatggtagtaaatctagatcctggtaaaatatttccaacaatttccagtttcgaatttaataattacggttcaaactgcaccgcactatatattacaaagtcacaaatttttacaatatgatttttattcttttttcatataagaataaatatatataatatatgtgtatattactttattatttagaggcaatttaatataatgacttgatgattgttgtacatgttatgatgttaaaactctaataagatttttttggttttgtattgttaaagctttattagtttgatttttaaatttttattataatatttgattatgatgataatgtaaactgctcaaactgtaccgcaccacaatgtatttttgtggtgtgaattttgtggttttaagatctcgcggttgcagtttgagaaattataaaaatcacatatgcggtttggtttaaaataatggctacaatccgcattacccgcactacgaacactcctaataaaaaacgttaattaaagaaaaataaaaaccctcatcacttcttctccttctctcctctcgagcaagccaaaccaccaacataaacttttttttatttcaatttcttatgttctaaattagtttcccaagccttagtagcagctaggagtaagctaccttgaagaggaagcctgaggtaagagtttggttctcttttatttgaaaagcttaggttttgaaagttgagttttggttttgtagtgattggggtacaagtaagcttatggttttgtttttggggtgttttgggattggttttgatgttcatttgatagttttgttgctgctttgaggtgagagtcaagtttgaatttttaagctcaaagctgaagctctcatggcaagttttgatttagggcacattttgattactgccatgtagagattgttgtatgattgttctgggaagtttagaatcgattaattagcttttggtggggtttggagaagttgaaactcgggatttcacgtttcctataaaaaatagtagactatttttggaaaaacggtataccattttccccgccaagaaaccccaaaaatggcttaccattttggtgatgtttagaactcccgtttttcatgttttctagatatttagggtattagtaacctaaggactgttggaaattataggatctagatttactaacaagtatattggattaacaacctaatatga

SEQ ID NO: 248147 - DNA, 629 bp, Cannabis indica
ttgaattatagaatgccatatatcaaatcatcgtacaaatagagttgctcccaaatttccacaaaaattaactaaagaaaagttatagataaggtaataaaaataacaaataatggaagttcaaataatattatatattttatcaatttagaaaaactcagtcggctccttatattcctcatgaatatccaagagtaggttgaagtaaactgaggtggtagaaagtaggtacggtacgagttcagggctaaggtctgagtccaaagtcaaagtgttagtgtgggtcggggttcggggtcaagtccaaggttggggtttggggtcaggtccaaggttggggtcgggttcgaggtctaaatttgggttcgggggttgaagtttaagtataggttcggggtgtgagtcaaagtctgagtacgggtatgggttcgagtttggagttcaggaccgggtccaaggtcagggtctaggtacgagtatggggtccgaggtcaaaatttaggattgagatcggggttcgaggtccaaggttcgcatctaggtctgggtataaggttgggttccgacatttgctcggggtctatgtttgggtccgggtttcgattcgtgttcgtgtccaagtccgggtt

SEQ ID NO: 248148 - DNA, 1214 bp, Cannabis indica
ctattccacagtttgttccataaggctggggcaacctcacaagaactcgcgcgatctgcagcttgggccctataggctgatttgctagaaaagtagccattagattctaaggtccagcaccaattgtcctctcctatgcctgaaggactaccttctttcaagatagccgaaatagtctcattatcaaataagctgttaagcttttggatatcccaacccccatccggtagcaggagatcagcgactcttaaatcctccttcagtaaggggcctcttggccggggtaaaaagcctttcaaatggcctatccaagggtcatgccaaaccttagtatccttgccatcctttattcgcttacaggcccctttgcgaataatagatcttgctttagtcacattcttccaaaaccacgagtccgaagctttcggcttacagtccaaaaagtgtcggcccttaagatatttggcttccaaaatccgacaacataaggattggtttcctgtcagaaggttccacccccatttagccaggaaagcctggttcatttcttttgatttccggaaccccagcccccctaaagacttggggaggcacagtttgtcccaagctttcaggtatagcccatgattacccttctcagagccccaccagaagtcacggaccaaactgtcaatcttcgtagctagacggttggaaagcttagtagtttgcatagcatacataggaagagaaaggcctaccgatttgataagcgtcgctcttcccgcttttgaaagagtcttagctttccaaccatgtaattttgaagtcaggttatccagaatgaagttaaaatcagcatccttttgtctcgatctgaaaagagggaggcctaaatacctgacatttccttccggagatccaatacccagcatagccttgataccttgtttcatgttgttgggggtattcttactaaagaaaatggaagtcttcattttattcaccttctgaccagaccaggagcaaaacttctcaagacaatcccaatatcctttggcctcctctagattggctttaccaaccagaatgaggtcatcagcgaagaagatatgggatatcatagggccccccctactcagcctgatgccactaatagatttcttagcttgggcatcttccagaagcctagataatatgtccgccgcccaaataaagaggtagggagaaagggg

SEQ ID NO: 248149 - DNA, 833 bp, Cannabis indica
ggaatggtttttatgcagggtctatctcatattcagcattctgcaaggattttcaagccaggggcatcatctcccctttttgctgaagctcaagccctttatgaaggactgaattggtgtgtttcttccaatttacaacctcggtttgtcttttcagattgcattaacctcatctctaaggtgaatggtaattgccatgattattccccactatcttctcttgttcatcagattagaaccttcctctccagattccctgaagctactttgctgcatgttcctcgtcagcacaatgataaagctcactcccttgcaaagttagccctcaggccgagagatgaagactaggcggttttcttaacccctttaggctgtttgcgcttttcttgtttcgttgttgtcagcctcttgttgtttacaaaaaaaaaaaaaaactactactacatttgctgcagcaaaaagttcacagaatttcagcaaaattacaacttgactaacgtactcttttcttgccattttataaacaaaagttgttaatttcttactaacagcttcaaaatacatatataagcatcaaacactaaaaatttcaccaattaaaagataaaataactgaaataaaacacaaattacataaaaaataaacttaaaatgatatcaaataactctgtacgcaagagttatcagtaaggttgctaatggtgccctaagagtgtcacacatgcttttttcagacgacatctaccattattgcaaggctattgatggcgaggcaaggagaatccaagaactactctccaaatttgagagtgcttctggccagaaagttaatt

SEQ ID NO: 248150 - DNA, 1938 bp, Cannabis indica
caatttgacgcatcaaacaacgaggccaaatctgaagccttgatcactgacttgaagatagccaaggcgttgaaggttaagaatctcttatgtcatagtgattcacaactgattgtaaattaggttgtcggagaataccaggctaagggcctgaaaatggctaagtacttagagaaggtttggaagaacttggaaaagtttgattactttaaaatcgagccaatcccaagagaacaaaactctaacgctcatgccttagccaaactggcctcgcaaagcgatttggatgaattaaacttagttcctccagaggtgctaaacgagcaaagtatatgtgaaaaggaagatgtcgagatgatagatagcttacctacttggatgactcctataatcaactatctacttgacggacaacttctaactgacaaggacaaggcacagaaactcctatatacagtaccttgctacacaataattgaaggaaaactgtacagaagaggttattccatacctctacttcggtgtgttcttcctacaaaagcaaacgagatcatcaaagaaattcatgagggcttttgcggggatcatgtaggttggcagagtctatccaaaaatatcattagacaaggatattatttgccaacaatcgcaaggacacccatgagtttgccaaaacatgtgataagtgtcaaagattttcacatacacctcgcgtaccaccaactgaactaaggatgatgacctcgccttacccattttctatatgggggtttgatctaattggggcacttcccaagggcaagggggagccaagtacgctgtggtagtcgttaatgtcttcactaaatagaccgaggctgagcctcttgtctccataacctgcaaaaaggtcttcgactttgttgtcaaaaatattgtctgcaggtttggaattcccatgaagatagtatctgataacggaactcaatttgatggtgacttgttcactgagttctgcaagagaacaaaataatttagagcttctcatcagtatccaggcctcagacgaatggacaagtggaagctgttaataaaaccttgaaggatactatcaagaaaaaggtagatgttgccaaacgcagatgggtcaacgagctacctcaagtactttaggctcacagaactactgagaaaacatcaacgggacacactcccttctcgttagcatttggctcgaaagcaatgttacttgtggaagtgaacatatcgactcatcgacgagagttttatgaacaagaggaaaaccaagaactcctaaaattatctttggatctgcttgatgaaaacaaactgagtcacaagtcactaatgtagcgtatcaacaccaatttacaagatacttcaacaaaagagtcaagaagaggctattcaacgttggagacttggtgctaaggcgagtatttgcaaatacaagagaagtgtctgtaagagtattcaacccgaactgggagggtccttatgtgattgaagcgattgtaggaactggggtttacaaattggctcggccaaatggctcgctaataaagaactactggaacgtggaatatttgcgaccctactactagtaaattaatgattgtaacttgcattgctgatgtaatattttaaacttcagttatgaataaagtgaatcatttttttgtttaagtaattacaaagtgttactctttaaaattaggtaaggggcaatgtgtatgattaatcgaaatttatctagaaatacatgatatagacgagaaagggatcaaaccatcgtaactttttaatttaacctgtctgacgagaaagaaaaatcgaaagttataaatgagatataactcataactcgcgtgcaaagctaaatattaacggctcgcatataggaaagtattaaatgagacatcaatgtgtcttgataaa

SEQ ID NO: 248151 - DNA, 986 bp, Cannabis indica
tgtatcaaaatttataggataagttaatgtgtcattatattaaaaactgctcctcccatttgaacacacccgcctctcccttccttctttctctctctcgctcagacccaagaaggtcgccttgccactgcagccacgaccacggcttctccgacccacaacaatccactaccgcggccacgaccaccacatctgtctctccaacccacgaccaacactcgaacaatcacggcatctcgcaccggcggccaccagagctcacaatgtcaaaggtaagatttcgctccctccccttttcatttatgttaattgaatttttgcatgatttaggattaaaatgaatgaaattattgataggtttattgatttatatatatggttaaatctctgtgatctgtgaatttaggttagatttaaggttgaatttggtgggatttgtgttttgggcaagaaattagttttttaagtcaggcccgatacaatcttgatgcagacccgatgtcttctctgttgttgaaaaaggattaaggttgaagacgtaggtccaatatagacttgatgtagggttcgatagtggcccgtttggctctatcgatccattttttatgttttgtgttaggcctagtgtagggtttgatagtgctacgattggggtcccattttcatgtttttgtgttaggcccaatatgaccgatgtaggatccaatagtggtctgattaggggtccaattttatgtttttgtgttaggtccaataggcccgatgtagggtccaatagtctgttcgattggtatttgtatttttatttaattgatcatttttaactgtggttgataggcccgatgtaggtctgatatttgtgtccaatggtatcttatttattttttttgtgaatttttgatattttgcctgtgtccgatggggcccgacatgttcgatatatgtctgatctctttaaacagaatgtctaacttctactttcgtgt

SEQ ID NO: 248152 - DNA, 613 bp, Cannabis indica
tttttttttttttggtttgtattctttgttccttgatggctcatcatcaaattgttgttggttgttaagaataacaaacactgtgcggttgaaggggttagtggtgcaattgtgcatcttgcataataattgattgttcaagagctaaggggttgagtgagcatgctgcaacagtttctactgttgtgtcttttgaatagtggaagcaattggatataggtgtttttaaggttaattattggctgacttgtttttctaattttaatcctagatgtgtttcaaatgtgagagatgttctgattgagttgcaagctattattttagctaattgctattgttaactcagattttagttaactaataaataagtcttgtttgacaaataaataatactgtaaaatgattgtagataatagataaataagttttacgtgattttatagttaaaaatctacgtagtttatgagcatcttatttttgggttttttatgtacagcgtatataatatcaataagccttgtttgacaattaaataatactgtaaaatgattgtagataatagataaataagttttacgtgggtttatagttaaaaatctacatagtctacgag

SEQ ID NO: 248153 - DNA, 714 bp, Cannabis indica
acaatctcgattgattgataatctacttaattattttttttatcaatctctagattgatgaagaaaatttcaacaagcaaaaatagttaactaatttttaattttataattgttattacattttaaaattattttttaatttaattttcatttttcttttaaaaattctaaataacttgaaccaatttggaactgacacattgacacttaaatatattgaaaataagatagagtgtaaaattacctctaactagaggtcattctttctgattttattaaataaagtgatgtgtgtaataattttaaatacaaagagttttgttacaaatatttcgattatttaagttcaaaaaaaaattgctaatagatttttattaggtaataaattgcataaaattaattaataattattagtaatttaattttaaaaataattaatttttattaagattttataaggatataaagtattgggttacaagttatttattatttctttttcttttaatttttaaattatcacaatcattgaataataatctaatagctaaaaatatatgtgactatgtatattattaaaatctcctccatatatataaatatatttatattctttattctattttttagatataaatatttatcttttaatacttgtcattttatatatatatagaaatatgattttgttccgagatgtactttcacggaatg

SEQ ID NO: 248154 - DNA, 933 bp, Cannabis indica
ctaggtcgcaccgccatgatgtgtacaaacaccatcttagcccagagctcactcctattcagcctccgcctttcctttacctacacatgaaagtaacaactctgagtcgacagactcagtaagaaaagcatataacaaatcatataatatcgacttgtacctaggcgcccatactcctatttacaaggcttaataaatgagtaagaacgttctttactaaggtacaaacactgtaccacatacactatgtatcaacactatacgagtgttggtagggtttgtttcgtaccttgagtaccactaagtgctataccacacacaccttgtacttttccgtacttgtgctggtaacatcgtaatgtactctttaaacattatacactataccaatgcactatgtaccactttcgtacaagtgttggtagtgtactaagcataacaagcatgcatatatatcacacatacatacattcgcttatatatataaatatatatctcatatgttctacgctattcttacctcatttccgaattcaagtgagttggccaacttgaatggaaaacttcgtgctggatggatgccctccacttgaaaacacttagatttcttgctgaattttaggaaaattgatgaagatttgcttggtcctcttggacttgtggtggtcgagcaaaggaaagaaagagaagataggtttttcttaattttttcaaaaaagataaatcccactaaattaattcttgactgatactcaaaatggccagctgtcatgtcatggagacgccacctaatcccccataataaaaacacaaaaatacccttttagcttataacttaagcaattttaagcctagtggtaaaatggtcaaaagtcataaccccgctcgaactcagtatttcatttatcgccattattaatcccactagaaaaa

SEQ ID NO: 248155 - DNA, 681 bp, Cannabis indica
taattatatagaagtacactaggaaaaaaaattaaaacaccaataaatatcaatgtaacaataataacattaaacaatccttaatactttataataatagaattattttcgagtaaatataacatttatacatgtattacaatttagaataaaactattaattctacgtaaataattttaaaaaatatatgtatattttttattaatatgtaattattgaagtatactttgttaatacgggacttaaaaaatatataactaattacaatttagaggttattcttatttataattggcccaaattgggacttgatttttttataacaaattagaggttattcttgaatagagtattcttagatatagattctactttatatacatacttttaaggaaaatttacatctaaattcctaaaatatatcttaattacacaaatgacatggcttttaaaattatcaaaattactattgtagttgtaccgttttcatactaattagttttggttcataagttgcagagtgacctcacagtacgaggtctagtgtattttttgcacttcatacgcttgacaccttattatctctttgtaatgtacatttttttttacttttgtacaatatatctcaatttatgtatcaattattttgtcctacacactcacttttttttttttttttt

SEQ ID NO: 248156 - DNA, 567 bp, Cannabis indica
tacaattttgggatacttttggatcacaatattcttaaggaattgaaaagcccatgggttcccaagcccatgacaattccattataatattttcataatggacggtgggcctggataccagaacccactagactcatatttttttaacccattgcaactttgttaatctcccgatcttcatcaaattcattcggcccatcagacaagcccgattccatccttcttctcttcgtgtccaccaccaacaaacaatcactatctttagcaatattctcaataaattcctgatcagtagcaacctccataaaatcagtctccacattaatagggatatcacgttgacccatgttatcttccacaataataggagatttcaaaaaaccaactgtacccgcaccagcaccgactaactgtgactgtcgaacctcactggcggtcatgtttacaggagcagtaggtacctcctccatagccaccatgaattatttcaaccactttgctcctatggtgtgattcttacgcataggccacactctcatccattctccataaggcttgactatcttt

SEQ ID NO: 248157 - DNA, 1557 bp, Cannabis indica
tggcgtggggtgttggtgagttgagagagagagtcggctgagagtagaattcaaatgggagggttagttttggaaaattagtaaaattggcatatattagcaattttagtaagtatgtatttaagaaaaaaataataggattttgtaagtatagaaattcaaattttccttacaaattccagccgcaaaaataacaaattattggaaaatatttatttactttcgtatataacgaccgacccgtgatttttattttagtatatattgatcacatgcataaagctaaggccgaaagcgatattaggatatataatcgagctaaaattaattgaaataataagaaaagacaaacaagaaaaaagacccctaattttatttttttattattaattgaaataataagaaaagacaaacaagaaaaaagactcctaattttatttttttattccgcaacacgtgaaaaacaaacattactgcgtttgcataggtgtcgtatgtatcaacaaatacaataacactacctcttttatctataacaaaaaaaaatatatttctttcattggattaatttgctccacatgttatcaaccatagcagctacctaactgcatatattatatatctcgaccttctgcaattccttccactacaaggaagagacattttatctcaatttttaagttaacaacaataaaaaacgagatgatacattttatctcacttttaaatttggtgccttaaatatacagctaatttcctttttagagaaggactctgtttagtagaacctttagacaaatatcaagtgaaaattaagttcaacactcaatttttatggaagaaattgcattgtatacctactttattttacttgttttaatttttactttaattttcatattctttaagatatacctacttttatagatgatatctcctttatatcctttaggttaaagaaaattgtgtgctgaatttaagtggaaggtgagagtatattagacaatccactcataaaagtgggtagattttaatgaaatataatggacggacccatattcccaagagcttggaatactgatcacctccaaaactactatcaatagttacatttaaactaagtgaacaatgatgtgtgcattatctcaattaaatttaaactaagtgacctcaaaaaattttaaggcacttagattggtactaaggcataaatatatgtaaaggcaggaaaaaaaaccaaaaactcaaggagtaatcaatacaagtgctttcttaaaataaaaagagttgttcaaaaaagaaaagcctggggaaaggctataaaaatgtccccctaacaaaaaagaaagataagaaaaactaaaattaaaaaatatatcgtcttagtgggggtagtagtaagaggaagtgtaagaagatttaattaatctactctcgagggaaggcgaggacccatctggtcagccaggaactggtcaagcttctttgcttctcccagaagcgagccaccgtagcctcaggatccgacatgaaatggaggcgaggttcaaatttgtt

SEQ ID NO: 248158 - DNA, 827 bp, Cannabis indica
gggcttcatattgctcttaacatttatgattattttgttgggttgagtaagtggttgatgatagtgagaaaagtgcttgtgaaagagcataatcaagtgtctgctacaattgttgcagacccaacaattgaaatcatctgaatgtatagaactttcaaggtgtggtgggaattgggaaatctagaaagactcatttttagatttgtagacattagttgatctattagcaattggtgtataagggaatctttcaaattttagtgctaactttgtatagacattggtagtgaatcaaaatgtgtagttgctttcatcagtacttattttgtagttttgtctgagataggcatctgtgagaatataactgttgtacctttgtttttaatacaaatagatgtaagataaggacaaagcttatatgagataataaaaattggagaaattcaagatcataataactcaaaatttcaatgttgttggccataaatttcttaattagcagataatctcatttcgtttcattctaaaaccaaagcattcacataaaagatgcaccaaccgattctgtaatcctaaacgagacgctccataaagataatggcacagttgggtcttctccttcggcaccaccagtcacaattagattctaccatgtcggagtgggtgaccggttgctgcgtcttgtcggagtgggtgaccggctggtgcatctcgtcggatccagaaccggtggtgggtggggttgtgcgtctcgtgtggctgggtgagggtcgtgaggctgggtggtgtgtctcgtgtggctgagtgggggtctggtgtgtatcgtg

SEQ ID NO: 248159 - DNA, 593 bp, Cannabis indica
tggttgttatcctctgtcgaggcctgggtatatatataccccattccttgtaattcattttattcattcaattcaataaactcagacctcggttttctctcacaaaggttctttcgtgataataatatattattccatcactgaatatgtaagcactaaaattttgaagttgtcccaccaataaagtggactgcaaacaatgcaaggttcatattcagagacataataaaaagtagctttattattttacgtacactttcaattatatgtccccacatgcaattagcttacgtcactgaatacgcacccatgcaagagttcccattctcatagaagtagtttaatatgtcccttttgtttaacttttgtttgaaagatataattatcattaattaaatcgttaaaatcatcttcaatggtataatttttaaagggctatttacaaaaatatgggaaaataaagataagttttgatatatatggcataaaaacttaattacactaaatatggcatttttttaaaaaacttacaaatatgggaaaaagtcttgagtaatgccataaaaaacttaaaatttgtatttctttttatt

SEQ ID NO: 248160 - DNA, 748 bp, Cannabis indica
aaaaaataaaaataaattttaaattagaaaaattattaaaatagcctaaattaatcttaaaattaagtaataaataattctatttaataaaaatagtaagtggatttttttattgtatgaatatttttttctcatagtttattatttatcagttttcttttaatgttttttaatcaaaaatattatttttattaaataaagtatttatttaatttttgaattagtttgagtgatctttattatattttctttaattttaatatatttataagttaaaatatatttttattaataatttcgaaattatttgggtagtgaagaagtaatactttaatactttgagtatttttgccaatttcttttaggtatttaagtggtataattaactaccataatgtatttttgcaactaaaaataaaaattaaagtatttaagtgttacattctttaaagtaatattgttagaatttaggattgtgtagttacagtgcatgaggttccatctcaaaccaattggttatgagaggagtagctcatggatcttaaggcgcccaaatagacgaattgtcaacctaggcgttggggtgcttgggtgctcaaaaataaacttacttcgaatctgattctaatgactcgaatatgtctgtggtatgcaaattttgacccatttgtactaagacgatctcgaaaactgataccctagttgggaatatcaacttgggcgctgggtgaaaccctaggtgcccagg

SEQ ID NO: 248161 - DNA, 641 bp, Cannabis indica
tgaagggacaccttgtgaatggcctgtattcttttgactcatcccaaattcagctgcatccctctagttccagccaacatccacactccacagctaaagccagtgcctacatcacaactcaaactcattctgattcccccttgagttctcctattcagtgtttgtcatgtgtcaaatgtaatgccccttcattttctaaattcgagttgtggcataacagacttggacacccctcaaaaaaggttttcaagtctgttcttcactcatgtaataagcacaatgactctaataaaaccatgtcttctttatgttctgcatgttgtttagggaaaattcacaagcttccctttcccaaacaatctctcactgaatatattgcaccactccagttggtggtatctgatttgtgggggccatcttatacaccatccacaaatggatatatgtattgtaaatgcagatttttgttaaccaaatttgagcctcacgatgataattcaacacagaaataataaaagctatataaaaataaagtatgaacaccgggtttcttacgtggttttgcagttacaattttgcatagtccacgagtcaatcttattctgatttctgagtatttttttagggcctcttgcataaga

SEQ ID NO: 248162 - DNA, 730 bp, Cannabis indica
ttttgtttgttttttttttttgctattgaaaaaaaatagatatatttcaaaaaaaatatatataattttaaaaatgaaaaaagaatatatattaaaaagtgtcatacaaaaattatattatgttcataagaatgtattaacaagtttaatgacatttacactaaattgaaatttgtgtataaatgaaaaaaaaaatgtatgaatctgaattgtatagataatgacattaaagagagtctcaaaagtagacttaattttgtagaggaaaagaagttgtctagcatagataaaattattcttataaatgtaaaagtgttgtaagtttgtcttttgaaaggaaatcatttgtggatgtaattgtctcggtttaattaatagaaaacatctttcttgataaaaaaaataatataaaaatatttcaaataaaaatattaatacataattttataaaatattcaagcaaagtaacttaacagataattatagtatatctatgtatgtaaataaataagtagcaaaagtatttaagtaattaattttgttatagtcagtcaactaatagtataaaaaagttaatagcaaatttcattagtaaaattattttttgaaaataaatacctatataaaaataattcaaattaacttttaagaaaataataattcaaattaaaaaattaataaatttttaattattaatattatttatttttaaataaatatattattaaat

SEQ ID NO: 248163 - DNA, 850 bp, Cannabis indica
attgctagaagtggatttgaaaagtacattgaccaaactcccactatcaataaggatacgagccaccatcttgttggaaattaatgtctctgtgatcaacgagtcatggtgtggaaagtggacagtctcggcatcttcttcagtgaaggttatggcttgctccatgagcttgggtcattatgctagtagttgagttgttccctaacctcatcatcatggtccaatgcttagacgtatcttttttgttctccacgagtcacttctcctatgtgaggatccgttaagatcatttctatccattcatttggcctaggaggaacattgggttgcctgaagggttatttgagaccaggtgctaatggggctacagttggcagaccttacacaattttgggagggacttgagctactagagcttgcggtaacccctagatatcccatcagggcatgtgttgtgaaagttgctcctttgggctagtcgaaccttgacccactcatggagatggtctaacctgatgaaatttcaattttgtccttcaataaactacatttattggtatcatgtccaatattattgacatactgaaatctcttgttggtatctctcttggaacaatctttgaacattagtggtggcttcgtataatgcacaacttggtgggtggctaggaagacattcccttttgtgtcaatccatttagtgtactgggtatactgagggttgtatctgggttcctttcttccttttttactattagtgtgaataatacctttgcttgatcttttactctaggaaagtttcttattgggtgttacacttatggcaagagtagtggatgcagtaggatat

SEQ ID NO: 248164 - DNA, 705 bp, Cannabis indica
acctacacagtctcagaatcataccacttgaccttccccaggcgatgtgggattgcacaacttacccggtatttccccttacaggtcatgggactactgactatcacagtaaagcctgtaatttgcatagtattatctctaaatttaatacaactaaaaggggagtagttcattacccgctaaataagggggccgattctttataaattattgtgtcacttttattattttcttttacgatttacacgtggtgattgtcaatcataaataagacttcgctgtcagttgaccagatctgaggtcaatattttagtgctttcattgagagcattatttgtcatcaagatcaatcatcatggttgtaactaggagaaccaccacctccacttcctcaggtcttcctcaagatcctatgatggctgatcccaatgttcgagttcctcccaccacgggaggtctcactgatttgaacaccgtcaattcaccgaatcctacagatccatccaataccactaatcttgttgatcctactaactcggtgaatcctaatgctgcccagaatagacattctagtagcccctcgagcagaaggtcttgtcaacacagaacaacctctacggagcgtaactaggactattcctcggtattatgcaagggagatagggtaaggaatcggtaaactggctattggtagcctcatgtgga

SEQ ID NO: 248165 - DNA, 580 bp, Cannabis indica
cccccgttaacaggatttcgccccctgaaatctcacctgaacaactcaggatgctgagtcctcatatcagactctaactcccaagtggcttcctccactttgctattccaccaaagcaccttaaccaaagctatggttttacttcgaaggactttttcttttctatccagaatttatactggtttctcatcataagataggtccggttgtaactccagtgcctcaaaacttaggatatgcattggataagacacatactttctcagcatggaaacatgaaacacattatgtacagctgacaatgatggaggtaaggctaacctataagcaacctgcccaaccttttcaagtatttcaaaaggtccaataaatctaggacttaacttgcctttctttccaaagcgcctgattcctttcattggggacactcgtagaaagacatggtctccaggttggaatgtaacatcccggcgcttagggtctacataacttttctacctactctgtgaagcaagcattcgagctttaatcttatctattgcctcatttgttttcttgaccaactcagggcctagatact

SEQ ID NO: 248166 - DNA, 620 bp, Cannabis indica
gtgtacaattaatataaggaattctgctgtactgtatatcaatttaatagcgtacgctgttatcatattcttatcatatatttttttagtgaagttaaaagaattgaggaaaaagcagagtaaatggcaaagcatctagcagaggacacaatcaactttctgcttcctttgttttccaaatttgttggagtgctgatgtaatagaatttttgtgattttatgcctttaccgttaggattgggatatgcaatattccttttgttttgctttaacaaactctgtacgcgtagaccatttattggctcttgtaatattccttccctgtgcccagtggctatataatatgcaacagcctcacttataattttgagctgagttttaccatttctattctctgttactttcttcacttggtatcagagcaaaccctaggcgtctgccatggccgatccaacttcagctccagaacaatagcaacaacatgtggaaggttcagctactgcgccctcttcagaaacttcacaccagcaccaatcgagaccatcagcccaagctatgagtccctcactagtgactacacctttcagtagcactctaagccaaccattcacaatgaagct

SEQ ID NO: 248167 - DNA, 954 bp, Cannabis indica
aaagagccattatcagctgatcatgagtcttattctgatgactcagtcaattttcacaagaccatggctcaaaataggatgttgaaagagtttgtcgtgccaaatcttgaccaatggccactgtgcatccattatccactttgggatgttaatttggaactaaagttaggccttattcacctactaccatctttccatgggtttcccagtgaagatcctgacaagcatctaaaggagttttatattgtctgttctagtatggaacttccttcagtgactgaagaacaaattaagctgcgggccttccctttctcattgaaggatgaagctaaagagtacttatactatctcccacctggtacgattgaaacattgaatgtcatgaaaattgtgttcttggagcattactttcctgcatgtaaagttggaagtatccaaaaagaaatatgtggcatcaaacaagtttcaggggagtccttgtatgaaaaatatgagcatttcaagaggttgtgtgctagttgccctcatcaccagatcaatgaataacttctaatccaatacttttatgaaggtctcttaccatttgataggagtatgatagataccgcaagtggaggagcactagttgacaagactcctacaacagctaggagcttgatttctaatatggctaccaactcacagcagtataatccttatccaaacacatataacgagggatggcgtgatcatccaaattttagttatggaaaccaataacaagccgcaccaactagaccacctgggtttaactatgaacaaaggcctcagtacaacaagcaccatcatcaaattccaagccctctgttgaagacttgattacttccttggccacaaatgcactacaatttcaacagacaactgaagccatgttgaagagtttggcgaattttatggggcaaatggctacatcta

SEQ ID NO: 248168 - DNA, 769 bp, Cannabis indica
ataagttatagttatttaaaataatttgtaattttttaaaaaatttcaaataatttacagagctgaaaacaataattatttaccacacatataagaaaaacaatcgtacgtgcaataacagaatatgtaaatcttattttcggtatagaaaccctacttaaaattttttgaaaattgaccttatataactataacgtacataatcatgaaaaaaaaatattagaataaaaagctctcatttacaataaaatagataaaaaatctactaataaaacacatctttaatgagaaagtgctctgtaaacttaccctaaatatattatatatataggtcacgtatgttttttttttggttctcaatacactaatcgtttgatgtgtagacattttgcaggctaatgatctagcggttattaaattatacaattaaataataatacactttaattttagaaatttttacaccaaaaatacaaaatactaactttattacatatatacaacaacacggttacatcaatatttttaccttctctcttaattttattacacatataccacttgcatatcaaatccatgcatctatcaaccatcaatcaactctcaatgtaatatcctgaaaaataaataatatttaaatagacatattttattaaatatgtaattattttggtaacgaagtaagattatgatcttgcttagggtaattattgagaattaattactcaatgaaataaatagcgtaatttattaattacggagtattata

SEQ ID NO: 248169 - DNA, 567 bp, Cannabis indica
aaaaatacaaaatttaacttttattacatttttaccttcacgagagtaggataactttataccttttattttgttttatgttgtgaaacaacacctcagcaagaacataaaacaacaaagaaaagatcaatgaaaccaaacaacaatcacaatgaaacagtaaagcttaaagtagaacaataatacatcaagaacataagagatttaacgaggttcgaacaagataatgataaattaccttgcctacatcctcggccagaaacagccacaacaatggctttggagagtctttattgattgagttttaagagattacagctgataccaattacacaacagggaagcttagcttctgcaattgtctactctaatggtgatgaacacaatcaatgtgtcaccccaattacaacactcaaagcaactctctttctctctcagtgtctcctgaaaactctctctctgtctatttctctatacctccaagattagcctctgcagatgagtgagaggcctcttaaatattgatgttgtagctgagttgaaatacccgaacaccaactgtcataa

SEQ ID NO: 248170 - DNA, 767 bp, Cannabis indica
aagctcaaatatataaggttaaacaacatacacgtaatattattaatggcacaatatgcatactcttaatctcgtagaagtttcttaaatttaacatttgttacataaataaataggacgctaaaatagtgacatgaactaattgtgacgcagatacaattattatactatcaaagataggtgatgaacatttcagacaataaaatggattaaccaaactaataataataagactcttattaaaaacataaagaaataaataaacaacaaaataataaaaaattcaacagatatgtgacccaaatcccaatcacattgttaacgcggattttcgttgactaaaattgaacctcataatattaatctcacacacacaaaaaaaaagggtatagaaaaataatatatgaacacaaggttttttaaatggttttgtagttaaaattctgcatagtccatgagtcaatcttatttagatttcttattgtttttttaggaactctcttgtatgagtttttcgttccatttttagtcttgtttgtcactatttatatttacatagtggacacttaattataaagttgaccggaatatgtttacagtaattatccctaaaattgtgggatttgattacatatcatgtagttaaatgcggtttatgatttgaaaatcgtatagctgtgattttctcgcttttactgggtcaaaactattgtgcattaaaacacgtctttaattattgtatctggaggtgtctcgacagaaacttg

SEQ ID NO: 248171 - DNA, 614 bp, Cannabis indica
aaatcatgtgaaccatgcaacaggaggacatctaagatcactcacaagatctatgtctaatcctgtggagacaaagaaaaatggtcaatggagcaacaaaaaatatataaaattaataatatgtatgatctgactcagatccatatttacaagggataatactcccccttaagaatcacttatgatgatcgcccgtaacgatcaacggcgttcccttggtttggattggtcggaagctcctcagccttggaatctgtcgtttctggttccaattgaggtttaaagtccttgggaaaggatggagaagaaaaatggttggtgcatcctggagttatgaatttgggggggtgaacttctgaactcagatgggacattctagcaagaaagagatgatccattctagagatggatctcaccaaggagcaagaagtttgtgaaaaatgacaagcttgagccgcccttttatacacaaagtccagtgacaagaaagataaagattggaaaatctaacagtcgggagtaggacagaatatgaagagacgattcataatgaccctcgaaatcgtacaatcgccagaatcaaaggacgcatttttccaaaaagggattttgac

SEQ ID NO: 248172 - DNA, 952 bp, Cannabis indica
gtatggcttagttgaatcacatcatagtattttagtttagcggggtggtgtagttagacattgggaatgtcgagattagtcgggaatttagaatttcccaaaaaacccttaatacccttttatgttgtgttagtgtgggaggggcaaaatggtcattttgccccattagccttttgtcattttgtgactttagataagttaattaaatcaattttctaagttatgttatgctgatattatcttgataaaacccttttattcattatttcaaaaataagaaaattttttggaaaggaagctctctttctctctttcaagctctctctcattcgaacccccctaggccagctagggtttgattgttgttcttcaatcttgcaatttttcaacagttctaagtataatccaagctaaggtaacctttgagcaactctctttttagtttccttgagttttaagaaagaaaatttatgcatgcttgtggttttgttgttgtagttgttgttagtgtttaattttgttttctaaagcttaattatgtttagataaatggattagagaaggttttagcggtttttggttggatttaagcaagtttggagttttgaactaaaacttggagctttaatggtggattttgtttctgagtatgttgtgatgttttattgctttagatatgttcattggggtctaaatagcaggtctggaatgtttcttgaagtttggggttgatttgaatgagttatgaatttttgactcattcctgcactaaatcggaatttcggttcaaaacggcctgtaggaaccggaatcttctgaaccggaattccggttggctcccaagacaccccacaaaaccggaattcctgttggggaaccggtctaccggttggggaaattttgggaaccttagttttcccatttttgtgtgtttagggtatttccatgttat

SEQ ID NO: 248173 - DNA, 919 bp, Cannabis indica
tttaacatgtactaaattgtaccttttaatttttcatccatgtccgactttttttagtaaaattacagcgtgtctctctcttcaagcatccatgatttatttataacgatagtcctaacaaaaaagtctgaaagtttagtactaaaatactaactagtgatcaggggcggagccagaactaaagagttgggggggccaatatcagacagtgcaatatacaataaatttaaatttcggtgactttaataccttttaaggatgtgtgtcaattataaaaaatactacatttttaaattttatacaataatttttttaaaaaaatgaatcaaatcattaattaaaaataaaatacgagtgttacgctaaaatttgacggagtttaatttaatattaccaaaattaataatgatatgtaatttcttaagaaaaaaatactcatattgattttaagaataatataattagttaattttactactatttattaaataatttactaaatatatttttaaattaaaacaaattaagtaagtctaataaagtagtaatataataatttactacattatataaaataaaactgcatatattttcttaataataaaattatatttaaataagtaaatactaattttagttctttaatatcttcatataattatatatatatgtttagtagtctaaactttttaaaaattgaggggggccacagcccctataggggtgtatgtggctccgatgagaagaatttatgctacaatttgtcaagaggtgaattatgatttttaatcatcattgcatttgtcattaatgttttagttagagttttatgagtttagtgtgtgttcatggtatattatttttatgagatattttatggtaattactaactagtaactaattatagtatactaaatta

SEQ ID NO: 248174 - DNA, 1073 bp, Cannabis indica
ttgctgatttatcaaaaaaaaatactatttcataatatcacatccataagactagagtatgactagcgtgccgagtataggcagatattatggtcaatagtactgtcgtttgaacgttatagatttagtactttgttggacatggggataggttattgttgggcgtatgggcatctaatcataattcgggttatagctatgatatttattatgcttttcttattgagtctgtcgtctcatagatattgttttcatgtgtaggtaagggaaaggttaaggttgagcagctatgagagcgagcgaatggagattgtccatgtcggggcggttaggcccggagcatatggtctttgtgggatagctagttgtattttgtatagtcggtaggcgaccacttttgcagtacatactttgtaacagttgtaaatattttgtactcaggatcccgattatatatatatgttattttggtgttgataagtatttaaataaagttttaattaatcacattttcaataaactcgttgattagcaacaagctacacaactaagttaaaatcacgataacatgcctaaactagtagggtgttacaatttggtatcagagctgtcaggttgtcttctgaagatcgtcacgacatgaacaatcatcatcaacaataagctcgactcacggttcagtaatcctttactactttagtagtttattttattagtatgttatcaaaaagcttgataggaagcatattagtagcctgatagctaaataagcgcacattttaatttccaaaataagcggtaattagtaaattcttcttgatcgtgaactgaccaggcaagctcttggtttcacaggttgttctaatagaatgaatgacaggcgaaacacgaggagccagtgtaacttggtcagatctagtggcggttagggagttcagattccctcgaatgtacgtggttcaagcaggtagggcatgttggaaattattttaccaggatcttagatctactcactagtatgtttattaacaccctaaatatgaactttctcaaacgatgaaataaacacatat

SEQ ID NO: 248175 - DNA, 983 bp, Cannabis indica
gcctttcagagcataaaaaggcacctcgcaacgcctccagttttggcaaaaccaatcactagagagatgttatttctgtatttagccatctcgaaagatgcgattagtgcatctatagtgcgagaagtgggcaagcaccagcaacctattactaggagtagaattcaggtatcccctctagaaaaactcgcgctatgcctagtccttgcgtctcgcaaactacggccatacttctaggctcaccccatataggtgttaaccgatcagcccttaagacaagttttatcaaaactagatgcttctgaaagattcataaaatggtcaattgaacaggagcatttcgacataacataccatcctcgaacatccatcaagggtcaagctttagttaactttttgatagaagttatacctccaaaagaaatcccacctgatcagcgacacgcagaaactggaagttatatgtggatggcgcatccaacgaacagggttcaggtgtaggggtaatattaatatcgtcgaaaggctttaagtttcactatgctatgagattccaattttacgcatcaaataatgagactgaatgtgaagccttggtcgccgacttaaagatagcaaaggccttgaaagtcaaaaatctcatttgtcatagtgattcacagctgatcgtgaacaaggtcctcggggaataccaggctaaaggcttaaaaataacgaagtatttagagaatgttcggaagaacttggaaagattcgattactttaaaatcgaacaaattccgagagaacaaaacttcaacgtcgatgcgttagcacagctggcctcgcagaatgacatggatgaaataaatctgattccagtagaaatgctgagcgagccaggtatatgtaaaactgaagatgtcgagatgatagatagctctccaacatggatgacgcctattatcaactatttactcgacgggaaacttccaaatgacaaa

SEQ ID NO: 248176 - DNA, 752 bp, Cannabis indica
gtatttatagttgggtttgggtgacacgttttagtatttggtaaggaggaagaaggaagtaagaaaggaagcttcgaatgttgatagaatagttaatggtgatggatgggatggggtggaaccagttgtgttgtatggtggggttgggtgaagtaataaagtagttttgggataaaatgggagacgcggtttgagtcttgtctctgtgatgatgaaaattgacagttgttagatttggtggggctatgcctatgtactgtcacagtcactaacactatatacctttcgctctctttcaccaatcaacacagagtcggcgcacttatttttttttttatatatatgcaattagataatttaatctcagtaaattacatatttattattttttactaatccacaaatactatattattattcaagtttgtgaaatggtatttgacttagaagtaattaaataaagtgatgtgagcaagtctttgagtcggtgttggtttcctttgttgtattttctatggaatggtgtatggttctagaatagagtaaccaagttggtcaatttgatgaaaatctacctttttgcaactttttgaagtcctgcttgcttcttttattgtcttttgttttaggagctgtttggtacgaaaaattgaattagatttcaaagattaatttgttcaatctaatatttaagcatgttgatagtctagataattaatccatttaatttaatctcatttattatgatggga

SEQ ID NO: 248177 - DNA, 954 bp, Cannabis indica
ctaaaacagtaaaataaacacataagagattaagaaatccttacattgatggcagttaatataatgactaattccattcagatttatatcccttgattcctgtctgtagcagagcattataaagatatgaacctggatcttctttccttcgatttagttagacatagtctatctcactatgctaggtattgacttgaattgtttgggcaactcctcaattcactaaggctttgaaaaaaacaaaggaagaagtagaggatttcgaaatagatgttgactcttttctattttctattttgtctgacaaaggagtttgatcattatttgaaaataagagttatacttttctatttataggatagctattagggttaggtttaaaattaaaatagaattaaaaaaagataaaaatagctttatttagtccatcatggtcgaaccctatatgggcttggtggatttcaattttgctattttattgaaacttatctttcttttcacaaatgccatattttaattctaactctataaatgtcaattctatctatttaataattatatttaattattaaataaaattttcatttaacttatttatttattaaaccttacaaagtctcttaattattaaataaaccctaaatcctcttttcttctcaaataagtccttatttagtgaaaattcaaaaacaagtcatagttttatttagaattctgattgattaattaaaatcaattaattgagtctacaagacatattatcccaattaagaggaccatggccctttgtaaacaagctcccaataaataaatttaaaattttccacgtaaattttttaacttattaatttatcctgactccactataaatttagaattgtactcctaattacatagaacgctctacataccaaaagtagatgcactttaaattatacattgtttcaatcaaaa

SEQ ID NO: 248178 - DNA, 680 bp, Cannabis indica
tattattccgcatgattgttttatgtttgctaatatccgtaccatcaccaaccaaaacccatcacatatataaagtcactttctgaagctcattaaacacaattatagtagagaagtagtatatataatataattaatagaaacaagaagaaaaaccatgggtgggaatatatttagtgatgggtcaaaattacatggccgattatgaaagggttttttgccttgatatagggtctcattcgggctgcctcagagacactataataaaattagctttcctatttaaaatgaagatatattatatatatacacatcattatatataattagttaatagttagtgtataagggcgccaccattttaaataattccctcaaattccaactgaatttgattataagggcactgcattgagaaaaatactactcaactaactcctacaaattcaatgaaggtttggttataaatgcttaagccatatatctttgatttgtcactaatcagagtacgatttttcattgcaattattatctttcccagagctcacttttgtgtgcccatgcttgttcgaaaagattgcactttatttgtgatgtcatatctaagtacctaaataatgatattgtcttgggttttgtttgtctacatttaatgtcacactgaattttcttgcaccaag

SEQ ID NO: 248179 - DNA, 1254 bp, Cannabis indica
acacgataaaataataaaataatactgtattctgtcgcgtgttcatgttaatattttgaccataacttcttcaatacaattcagaattggatgattcaagatgttccgaaaagcttagaacgagatctacaactttcatgttgaactccaagttcagttttgcccttaaagtcgtataaatttgcaattaagttttaccttataaatacgagcttgctagcttctactattttccatcaaaatgtgcttacatccctcaaaataactctaaatgcatgattagtctttaaaatagcctaacaaattataatcacgctaatcagtaatttaaagaatcaatttaagaatattaatacataaattagctatatttataagacaaaatatcgacttatcacgtttaccatgaaaagagttattcatatcacaattcacaataatgatcattagtagatctgcatgaaccttgagtacacataaaactcatatttgtgttcattgagttattgggtttgattacataccacgtaaaataaatgtggttaatatttgaaaatcacacagctgtgataggtctgcttttaccaggtcaaggtaatcgtgtattaaacatgttgtaaatcgtgacgttctgggatgtcttgataggaacacgctatcaatgaccttgatagcgagctagagcttttcccacatcttctccgaggttaataatattagccttgttgcttttgcgagcttggcgacaatgtgaacttcaacagccaacgtcatttgaatgttagcttctgcctgagagaactgactcgttgacactatgaatctcattgaaagatgtctaaagttgattagtgaaagtaccagaagcgtgccttcctatagcgagatggatgtctcgctatccgtcacttaggttcttctagctgttgtgcttagttagtataatgtgtattatacgctaagtgttttaacagtcattatatctcgccttcgtctcttcatgcgtaatgaggttgatgcctcgccttatacatctaatggcatatgacttctcgttaacgtatgagacaacagtttgtatatctttatctcgcgcaaagacgttatagtcagcaagttataaatatattctgttattttcgcattaatgagttatttcatttcaaatgtaattaccgttacactcattgattcatattcttcccaatttgacacgtattctcctttgaaatgatagtcaaattttgggtataa

SEQ ID NO: 248180 - DNA, 1444 bp, Cannabis indica
aattaaagtttaacatagtattatataaaatatgatatataattcaattcagtataatacaatacaatacgacgtttcaaacgagccctataattattaaataaatagttttgacatttatatgattgaaataggaaatatggtattattgaaagaagaataattggttgaaataaagtgacaaaattgtaactagagattggtccttaagtggtcggccactctagtgaatttttgcctaatattttattcttttttaatccatataattcaaacctaaaccctagttgaaacactataaaaggaacatgatgctctcatctcatccaacacttttcaacctgccaaatctagtttctaactctgtcagacaactagtagatgagagacactttctatacagtttttgaaccatcctttattgttcttcatccaattcgcatatagtgatagagtgccatgccaacacatagcaggtcaactactcaatcatagtgcgggaagacggtggtaatcaacccgaaggagagaaacagatctaggctcagatcttgataatactctacgacaaaaaggaacaagggttagagatcttagcggaaggaatcataatattctgttgcaatcaatttaaggttttctaaactcttatgtgtttagtttcattgttttagatatattcatatttaggatgttaatcaatatacttgtttgtaaatctagatccgggtaaaatattcctaacagaaaaatatgacaaaaattagccttgaaaaagtaaaataaaagaatggtaaaatgatcgatagatagtataaaaaatatttataattcatatatgtacatttaacaaaataagtttacgaaaagaatttctaaaaactcaatatgttataacgatatttattgtaacacaataaaatgtaattattgtattttaaaaaatatttattattaaaatttaaatttatagtactttttaaaaagatagaaaagtttataaatctattaattgaaaaaacaagccataacccacaagattaaaataaatattaatttattttaaaatatttaaatttgaaatattaattttttgaagagaagaggcattcaaaagaaaaataaaaactacacaaaaaaataaaatagtttaaccaaaaaaaatacataaaaaatataaactaaaaattacataacaaaatataaaataaatgtgagcaaaattaatatattatatactttaaattattattattttttttttttggaaaaattcatcatctttattaattgcaatctatagtgattacatgattaaaatctggaataacatcactactcctgataacacgatcagtaactaaataggatgctcgagctaagaaatgagcaacactatttgcagaacgtctaataaaattgacataaacatcttgcaagtcat

SEQ ID NO: 248181 - DNA, 550 bp, Cannabis indica
aatctttgaaatagtaaaattgaatgaaatttgacaaaagtccttaaatctaacaattacaatagttcaagagatatttttaacgatcttaaaagttcaggaggtataatctgatacatgtcaaagttcagggggcaaaaatcctaattagtctttttttaactgttaaaatacttgtgtatttcattttttaaaaaaaattaggcaagcccacgtgatctcatattcctagagattatatatgtatatatatattgctcttgagcaaataattaaacacacaccttattttatttttgagctctatctcccatgttcatcttcttcttccttttttttttctttttttccaagtctacaacattacctaaataaaagctaactctctccttttatagcaggtaaccaaaaaaaaaaagagtatgaatgaggaggaagaagaaaatttaggaaagataagattgtggttatgtgtgtgagagagatagagagcttgctctgtgatgagcttattgtagaaattttttagaaactcccactaagttcatgt

SEQ ID NO: 248182 - DNA, 829 bp, Cannabis indica
aaccatgcaacattaaatgttatttctgaactttattaactaataaatctgattatattgaaatgagttttatttagggcataaaacccaacaaccctttgctcagttcagttcttaaagctcgttactttcctcaatcttccatccttgttgctgtccctagtcacaatccctcttatacttggagaagcattttgtggggaagggacttaatggcttcagggctcatttggaaggtgggtaatgggagtagaattcgaactctggatgaccattggctccctaatcatagacataaattttttctcactaatgatcctccctcttcttcttatttattgtcatactttgtcactgactctggaacttgggatgttgggaaattcaaatcttgttttgataatgtcatgattaatgatattcttgagctacctgtttcaagatgttatggtcatgacgatctgatttgggaaagggaaagttctggcttttttactgttaaatcaacttatcatttggctttctctcacttggatctcccctcatcctcttctttttctggttctaaaaaattctggtctaaaatttggtcctctattactcctcctaaggttaaactttttgtatggagaatgttatctcatgctctccctgtagctttagtcctttttaaaaaaagtgtgattgattcacccttgtgtcctatttgtcacttggagattgaaaccaccaagcatgctctgctagattgttccaggtccagaaaagtttggcgatattccaggtttgctacttattatgataattataaacatttaaacattgatga

SEQ ID NO: 248183 - DNA, 497 bp, Cannabis indica
atacatactttttgagttctagatattttattgaaaaaattactttaagagaataatttttcaaaaaaatattaaaaaatgtatatttttacttaattttttttttactaataacttactatcatattagtttggatttaatggtaattaacaagaaataaggtcatttttataatttaagaagcccaaaataacattctctcttttatatatttatagattactaattaatttttttttactaataactcactacaatattagtttagatttaattgtaattaacaaagtaaataaagataattttgtaatttattgtaggaaacccaaaacaataatatatttaaaataaaaaatgttacccttttcttaaagaataattaaaacatgatttctaacaaatcattttgaaataattaaaaaaataaaaaaaaataaaagttaaattaaacaaaattttcaaagttaattaaacaaaattttaaaaattaaaaata

SEQ ID NO: 248184 - DNA, 908 bp, Cannabis indica
ggtagaaccattcgagtttggcatgataagtggttgccacggcctaatggaacaattatacaccgcccattggatgcaaaccccaatctcacagtgaatagcctttttagtaccgaggaagattggaatgaggctttacttaacaggtactttcataaggatgatattccttggatcttagggaccccaatagacaatcactcggaagacattctggtttggcctttctctacgaatggtcattacatagtgaagagtggctatagagttgctagggagataaaccttactcctacccgttgctctgacatggataaaacacacgcttggtgtaagatgtggtggaatctaaacttgcctccaagaatgaagctgtttggatgaaaaatttgtcgaaattggctcccggcaaagtcaaatttatgtcatagaggtatgaaaattgaccctacttgtaataattgtggcaggtttgaggagtccctatcccatgccctatggacttgtgagaaagtcaaaaaagtgtggaaacttatgccttgctacaagttaatcaaagaaagtagaggtcattccatgatggatttgctagtggaatttagacaaaagctagctagggaggagtttgaagacgtgatcaaagtactttgggccatatgggaaaatcggaataggcaatggaacaatcaaccttaaatgaacggggctcggttgctggactgggttttcagctgctacccgagagatgagtatatctgtgaaagagggattatcactactgtgcactctgctgttcccaaagatcattggccggcccctcctgttggcacatactgtgttcactgtgatgcagccatccaaccgaaccaagcaggggtggggctgggctatatttggcgtgattggtc

SEQ ID NO: 248185 - DNA, 1984 bp, Cannabis indica
ctatcagaaatgtgagatttttagtatttcgattaaaataattgtaattgctttaaaactaatttttctctcaacgtatctaatagaaaagtgatcacaatggtattggcttcgtcgttaagaaatttcacaattttttgagatgtgcaaggtgagattttgagagaatactaacaagtgtaagagtaaagaaaaaacttattaaaatttaacctgaacagaagaacatttaaaaattttaaattaactaaatttaacgcgaaaccaatttttaaattcatgtctcagtagtacgaattcattaggaaaagtggaaaaaaatattccgagaatggtccggaccacattaacatattttttctttaatttatttttaaaattttaaaccaatcacacatttgtctcaactatttaaggacaaattgggtatattcaaagggatggtggcccttacaacaattattctttaaaaataaataaatgaataaaatcatacttatttcaaaaaaaaaaaaaaaaattacttccacattgtgtccatactcattgaaatcacatgcaatttcttgtcctattgcaaactttacatttgatatattttcatccaaattttttagtactatcttatgaaaatatttgtttctatggaactcttaatatatatgaccagaatatgacaacacaaaccctaggacaaaatcttcccataattagagaaatggaagctccattcaatatttcataccatgtttatttttcttttatcaaaataaaatggaaaaattttatggtgcatctgctataaaggattcactgatgtacccctatttattctcgaatcaaagtgatttttttagtccatttcttttcataattgtgtacgttgtggttatttaagatattttacaaaataaaattcaaaaaaatttaatatactaaaaataaagtttaaacagtttgttggagtgtcacttttttttaatatgtgttttacatacactgttttaagattcttttctcaattgtaaattgttttgaattttcgaaaaatttgcagaatgcattaaataattacaatgtacagaattataaaaaaattattctggttgtcaaatcaataaaggtgcattaatggaccccttttttggggaagagggatgcaccgtaaaagtagatttcacctttagtataagtgaactaagcctctgcttagggtccacctaactcaaggatccaaaaaaaaaaatttcttttgaaaatacatatttttttacttattttccctaacgagaaagggaccactatggtactagtgagttttgtgattgtcagtaaaaaaaatgtcagagtgacatgctttgtttgttttgcttttacaactctaaaaaaccccaaaaactcatcatccttttatatggttttggtaccactattactcttttctttctttccaaccctatcaaatagaaaaaaaagttagttgtaatcatcatcaccacaaactacaccacatgaaacatgagtcacccttacaaaactaaacctttttaatttgtttacaatattttactacttattgtccattatcggttcgcggactaatatcacttgatacagcctacaaaactcggtataactaacattattgtctctaaaaaataagtgaaatataaccgacggaataaattttaattttttttttaagtttgatggatatttttcacacaaaaataataattaataagataaaattacttagtgtcgaagtttggagagtaaaaatcttatttattctatattttatttaagttttattaaaataagaataataagtacataatttcaatccatgattaataaaaaaattgttacatatttattatttatttactattactctaatatttcattttattatttaaaattttagttagaaaatatcatttattacttttttaattttagttaatttttaaaattttag

SEQ ID NO: 248186 - DNA, 1005 bp, Cannabis indica
ttttttttttagaattttatgttctaggacattgaattttaaagatatgtagaaggcacaaggagatctcattcacattttgtgcaaacttaagaggatctatcttccaacattttttaatatcatgatacacttgggtgctacattggcctgaggaagccatattacgtgggcaagttttatgagatggatgtatccatatgaaagatacatgaaaaagttaaaaaattatgttaggaataaacgcacacacacagaaggatctatcgctgaaggatatgttatagatgaagcactgacattttgttctatgtacttcaaagggtgcatacaaaatttaactgtcttgagtgcaatgaatactctcctcttctattttaatacttaacaattttcaaatctcaatgttgtccactcggaaagcaaacaataacaactctcgactctcgacgagaagactcacaaaagagctgagtggtacgtattagggaattgtatcaagattgactcttatatgacataagttaatcaaatgattacatggtgcttagtgaataaaattatattattcttttttagctaattttgtaataacttttttgtttaatagaaagcacctcgaaataattagacgaaggaacccgaacgctaaccataaccttttacatcaaaagaaatttccttcgtggtttcatacaaaggtgtgaaatttctttcgctaatatttacttattcctaatcgtcaaatctctcaaattttaagtgttatatttcttttttttagatttttgatttgtataaaatcgggtcattagaacatagtgatcaattattagctttggcatctgtgtctgatctggttgtgtattcatatctggcatgtatagttaactgtgttcgatttgttatacacagttgagataaagtttgcaatactcaaaatagtggggtgtctattatagggacaaaaagttttaactattatgggaaacttgaagaaatatt

SEQ ID NO: 248187 - DNA, 600 bp, Cannabis indica
ttattattattatgtaattattagaaataaaatttttgtaatgatcatgatgtcagactgtttttgaatctaatatatctacgcttttcttaaaaaaaaaaatatatgaaactcacctctcaccacaatctatttccaaaactagagagaaaatagatatattgttattttactataaattaatcttacaaataattataaaatttaaattatattaataaaattataactttgatgtaaaaaaaatcttattttttaccaataaaaatatttttctttatttcttttctgttttttttcaacattttaatttccaattcactagatttctttattctctaccaaaacattgtattataaaatttggtttgaaaatatgttctctttaatttttcaatttttattggatttatattattttgggttatcattttgatttattttaagtttaaatcttatattatttaaaaatttatttttgattttatattttacctaaaattacatttaagactatatagtaatttgactaatatatgctgtgcaaataatagtaatatatttttctcaaaaaaacaataataacaataaatatatata

SEQ ID NO: 248188 - DNA, 1078 bp, Cannabis indica
ccctcttttgccccttcggaagtttcgtttggtctccaaaaatagttaattcttaatattttctaaagaaggagataatgctcgaaataattttgggaaaactccattttttgtgcgcagggccctattatttgtgcctagaacttgttgtttttcctccaaaaggatctattcacctgtttttatgaagatagattcaatgcgaaagtcagatcttcgatcgaatgcttggaaggtgccgagattgacaaatcgttaacctgggcactgagtgctcggggcctcgggtgcttaaaaattaactagctctgaatcaagtcgatgtcccaatgcaacttttagtcactttgcactaagacggtcctgaaaacttaaaccctagttgaggatgtcaacataggtgccgggtgaaaaccctaggtggccaaattggcttttgggttgtagattcgtgtaatttcagctcttaaaccttgtattaggttgcttcatattttcatggtacatgatacttgaaagatagtgagttggattcaagttattgaagtccaaacttctatcttggagctcttaaagtcaacctgggtgtagggctagaatcccctcccaagttgactgttatgacttgggtctactcaactctgtgatgtcatccttcatgccatgtgtcaaatattgatgttcacgtcaccatgaaaagttatcgggttaacactatctaaatcgcactctgttttaatttttacactttcgttaaaatgatgttgttaaatgacaacagctactgctaatgtgtacacaagtgtacatgtggaaaaatttaagtggtccacatcattttaaaattattttaaaatacaaaaataatttaaaaaaaaaaataaataataaaattacaacaaaaaaaatataactcaacagaccctaatatctttctctctctcctgatacctctttatctctctctagtttccctcatgtggtgctggaaccatactggagtcgccttctccgaccccttctcaccttaagtagacctccggtcctttttctcgaaacccaaaaccttgaaaatccc

SEQ ID NO: 248189 - DNA, 592 bp, Cannabis indica
ttttttggcgactttatgcgatttgtgagcaattttgtgcaatttttctggcagtctctttataaatttgcacttgcattgttttatttttttggcgactttatgtgattcttgagcgatttttgtgcgattttgttggaagtcccgtataaattttcacttgtattgttttatattttttttggcgactttatgcgattactgtgcgatctttgtgcgatttacaatgacattagcttataacttttctactttaaagtaatagatttttagcgatatagtgcgattactatgcaattttatttattattgtgcgattaatttgcgatttatatgcgacatatttgcgatttaaagtaatattcactttttggagatggttgttcttcaaattttatatcctcggaattgggaggttgattattgaaagaccaattgtgagggtgaggtccccacagtggaaatgggcttggatgaggtcgaagaaacacaagttgcggagcaagattcgactgcattcgagacccaagcaagacgggtggcggagtatgttgaaagtgcaaatattattccaccatcctcacccaaaact

SEQ ID NO: 248190 - DNA, 515 bp, Cannabis indica
caaactaactctgtggcagtagtagataaggccctgtattctgactcagtgctcgatctagacactgctttttgtttcctggaagcccaagtaattaaattgcctcctaacataatacaaaaaccagtaaccgatttcctgtcaatgatgtcacatgcccagtcggcatcagaaaatccctccagagaaagccatttagctggtttaaaaacaagaccccgatttaatgttccatgaatatatcgtagaaccctcttgcaagcacaccagtgagctagagtaggagattgcatatactgacttaatttattaacagcaaaagacaagtcaggccgagtgagagtcaaatattgcaaagcacctacagtacttcgatagagtgtggggtctgaaaaatcatcactaggtgttgtagttaacgtgtagccaggggtcattggagtggtacacgacttggaatccaacatattagttttcctaagaatgtcatgagcatattttgcttgacacagatg

SEQ ID NO: 248191 - DNA, 847 bp, Cannabis indica
cagcaaattccatctaaagagagttgagagagcgaggaagcccgaactccaataccgaagctatcgcagggattgaagctcaaagatcaatggctggaggtacatcgatcctttcattgcatatattattgatatgattaaagtttatttttcgcatttcatatcattgcatatgctatattacatacactatatatatagtctaacatatatttccttgcatagtattacaaaaagagtaaaataacaaaggatcaattatgtaaatgtaaaacaataaaaccatataagcaaaacaattattaattttgatttataaaaacaaatacaaaacacttaaaggttttttttttttttttgagaataaagattgttgttataaattaagatgagaaattatttacaaaaataatgtttataggcggaggaatgcaatccgatcaaaagcaagccagtatatagtcatgaatatctacacatctataaaattgatagttattgggtgctatttcctcgcgtagtgtttttttttttttttgagaaaataccattatattaatattaataggaaaatattacataacagtcataagtggaggtggaaattcctccaactaagaaacatcagtatccaccgtaagagcaaacttagccaaaacatcagcataagtattagcagatcgcctaacatgcgtgacctgtgctcgtgggagaaaggatactcaatagtttacatctttcaatatcgaatgaaaagcagaattacacttatgtgccacatttaaaccttgaaccaccaataaagaatcagtctctatgaagtcaattgataatccaagattgacag

SEQ ID NO: 248192 - DNA, 938 bp, Cannabis indica
ttatgcaaaataaatggcatgatcttctagctaataattcaccttccaatcattttaagtatttcttggataaacaagctcattgtgttaaccttttaaaagattggaataagactcataatcatctttttaaatctagaatccaggaattgactcaggaaatagataattttcaaaatcaagatgttcttactcaggctgatagacttcatttgaataaattgaattcaatactagatgctcttctctataaggaagaagtctattggaaacaaagggctagggtgcggtggctaaacgctggagataaaaacacaaaaatttttcataagcaggccactcttagaaggaaaactaatactataaaatatcttaaagataatgagggtcatgtggttaatactcaagaggggatagctaacttagttgtttctcatttttctgacctttttagtacccagggttgtagtgtggatgctgctgctgaaatttttgatgttttgggtcctggattggaaacttctgatgttgaatttcttgctcaggattttactgctgatgaagttaaaaaggctgtttttcaattgtctggagataaggcagtgggattagatggttttaatgcttatttttatcaaaagaattgggctgttctaggtagtgattttactcatgctattttagactgtctgaataatgatattgatttttctaaaataaattctactcttattgttctaattcctaaaaaacaacatgctaataagctaggtgattttagacctattagtctttgtactactttttataaagttctatctaagattatatctaatagacttaagaggatttagataaaatcatttctcctttccaaagtgcttttatttcaagtcgtgttatctttgataataatattattgctaatgaactagtac

SEQ ID NO: 248193 - DNA, 595 bp, Cannabis indica
gaaaatcacaatacttaccaagttgtttgaggtccctaagcctgaaattggaaatgaagttaagaaaaaaatatattaattaccctcaaaattagtatataaaaaagaaaaactggcagtatatacatactacatacacaatgaaagacaccccatttggccatttttccattaatgggcgccacaagtacttgcctttggaactcctcagtatcaataaacttcaaaacaagctgcaaccaattcattgaaagaaattaacaatcttctgattcacattttcacaaattcacaaaatctcaaaacacacgcacatacacatagatatatataataaaatatcaaacaagccaaacttttaaacaaaaatggaaaaagagaggaggagaagtacatacagggtcaaggtaaatgttgccatggacgttgtcgtgaacgtgtttgccgagtctggtgttgttagaggatgagaaactacaaaagagagagaacgcaacgtcgccgtttcgacgggctcccattctgcttcaagactcagagaaggccaaacagtgaagtcaaaaagctttggacctcaatttcaacaatggagcac

SEQ ID NO: 248194 - DNA, 574 bp, Cannabis indica
gggccagaccgagagcacctaaaacccagtaaatcaccatttacctcagccttttgaaggagcatcgaaagcgcctcagcacaaaatagaaacaaataaggagaaagaggacacccttgtctccatcccctcgaaggcaccacacaaccccgaggcctcccatttaccaagaaagcatactcagctgaagtaacacaatccataatcaaatccacccatcggcttggaaacccgaatttagacattatggcacgcactcaactctatcataggctttactcatatccaatttcaatgccataaacccacgcactccattattcttcttaaacaaagaatgtaacaattcaatcccgaccataacattatcatgaatagcccttcctggcacaaaagcactctgcaacgaagaaatcagcggagacaaagtaccttttaaccccaaagccacagccttagccacaatcttaaacatcagactacaaaggctaataggacggtactccttcacaaacccaggcctactaactttcggaataaataccacataagccttattaaatttcttgaccga

SEQ ID NO: 248195 - DNA, 643 bp, Cannabis indica
ccaaaacccagttctccatcctgcccgatctcatgagcccaccctttctctatctcgtctttatctcttctcgtcgaacctagaaaaatcaaaacccgaaccctgacagtccaccctcgagcgcctttcctgtccgtctttctccttttctccttctcggatgtgggcgacagtggtggtgctccgatcaccgcaggccatgaatggaggccacaaatcgtggtggagctacggttgaactctcgtgtttggttgggatgatgaaaaagataaacaagaaaaaaaaatgaaaaaaaagaaaagaaaatatataataaaataaatttataattttaaaatatattttttaattttttaatttttttaattaaaattattatttggaccaataaaaaattgacacgtggcactttgtttgagtttaacggatcagttaaaaaagggaccaacggacttacagataatgtcaccttggggattaatctacatcaaatttaagtttttggaaacttttgccgcaattattcttattatttaatgggtggataatttagtaaaattatgacttttgttttgtgtaggattcaaaatgtaaacttaatataattcatttatttagtaaatttagattttcagaaactaa

SEQ ID NO: 248196 - DNA, 664 bp, Cannabis indica
attttctcatttcatctcctaacacttagtcaaaataccaagtgttactccctctccctacacttaagctaaattaccaagtgttgctccctttctcaacacttagccaaaataccaagtgttgctctcactcccaatacttagccaaattttctagcgtggctccctcattataagtataggttgtaatagaaaggatactaaagggatgtacgaccaaggacgagttcgttaaaactagcatgccttcgacaaagcctgaagagaggagatggttatacaatgggtacttattagccaaatttcctagcgtggctccctcattataagtatcagttgtaatggaaatgatactaaagggatatacaactaaggacaagtttgttaaagctagcacgtctccgacaaagcctgaggagtagttatacaacaggtacaacaagtacaagtagtggagacaccatttgtctcactctaggtacaagttgacatccgaccaacacttctccactatccatctgacacgctaaccctcatagtacaatcagacctatgtcctcttatttttgagaccacttgtattttagagccattagagttcacgtgtgaaagccctatttaaatacttgtaaaggagttgaaaaattattacttgtaagagagc

SEQ ID NO: 248197 - DNA, 846 bp, Cannabis indica
ttaagcaaaacttgataaacatgatatggtgatgaaacacctcacaaaatcacaagagcaaagtacttagtgcaatttcaagatcaaattccaaagactgatcaacatagagataaatgagcagagttgagatttttgcattatgaccataataaacagtttttgtattatttacttatcttttctttagaaaaaagacaaatgaaaaacaaaatcacaccaagtttgcgaggttcgatcaattaattgttggcagtgataattgtctactctccgagagaacaaccttaggcttgaatctttatggattgagtttttggtgctataatggtgttatacactgcaatataaaataaaaaactacaagactcacaaataggttcaagttctctactttattggtccatacaatatagaggagagggaattggaattggtgatgaatgagatcaatcaatgcactatatatagaatttttccaagatagatggagatggcccaattttcataaattttcttatagctgcctaagctcaagtcaagctagctcacttcttgaagggaatagaagtatattttaactaatttttactaactccacaaatccacctttagttgaaggtagtgttaccaaaattatttttaggctaattaggatttttttctctccgaacattgacatgtaccaaatcatgccccctaaacttttttggccattaaaaattccccctgaactattgagattgttagatttcaggacttttgtccaattttattaaaaaaattctaactaggatgaaagtttaggggcatgattcagcatatatcaaagttcgagaggcatga

SEQ ID NO: 248198 - DNA, 610 bp, Cannabis indica
aaatttatatattgtaatacagagatttattcattcaatcaatatacactttccttttcatactttgttttttgtgtgtgatagttttgtccaaaaacggaggtgtgtatagctaggaattgatattgtttgacatcgatttatggttttaatgtgatttaattttctcctaatttttaagtactctatttcattggtacttaattacttttaattgtcttatcaccaattaaatgtttatgtttttgatgcaaaatctgagaagtgagtgttaattatgcgtagtaaaatagaaacatattttgatataggacgagagtagatatgttgtttggatagcttataaagtttctgtgtttgatgccttttacttgtttagtttatcacgagagtagaaaatttgcatgtaattgagatttatatatctgagaagactcatgtcaaaaaaaaaaaatatatttgagaagactataaattatttgagtaaacatgctattgcatagaatttggtaatagaaattaaattatgttagaccttaatagatagatacaattaaaatcaaaaattctaacttttaatcatcgttaatttacatattaattacttgct

SEQ ID NO: 248199 - DNA, 673 bp, Cannabis indica
gtgttgggaatgtttatgggtttacctacactgaaccggtccaccgattcagggggacctgtaggaactggttgaccggttggtcctcaggaaaccccattgaattggaattccaattagctagggaactggtctaccggttggggcaattttgccacccctaatttttctggttttatgatatttagggtgttgccatgttatccaccgatagagatatttctagttgcggttttaaatccccagaaagtgttttggtgtgtctctcattagaattacgaatattgtgttatagtgccctataaagcgtcatgctatttttccacccaggctgatcgacacgtctgaacatggaaatggggtaagattagcattaaatatattatatatgcatgttgtgcttgtgattgtatatgtttcgagtgatatcatagcggcaaaccattgtgtcggttcagcaatacaggcaacgtactagttaagagtgatattcacctagagagtattaattggcgctatcatagcggcacaaccattatgtcgattcagcagtacgggcatagtacttgttacgagtgatatcatgacaaattgtactcttgggtgctattgatgttatcatagtcgtacaaacatagtgccggtgtaacgccctaatgctaaggcacgctac

SEQ ID NO: 248200 - DNA, 519 bp, Cannabis indica
ccctctcctccgacggagcacagcaacagctcccagttagacggagccaccatcactcacactagctggtccatctcgacatcatttctaatcgcaccacctcggcagtcaacaccgccttccagctgcaccacttcagtagttggtacaactactagtcgcaccatcatctcggtgctgcctctaactattagcgcaatcatcattcgtaaatatcattcttagataatctctcttgtctttcatttgtatttatctattgtgttgttctttgatttgaaatgtgtatgattttattattgtgactatttttgatttgagatgtagtgtagggtttctagttttgcatctggttcaaactgtcgagtatagttttcactattgatgatagttttaaatcgtcgacaggcctggccctgagctaagacgaaggaggcggctgccttaggcccccactgctcagggtcccatttcgaaaaaaaaattaaaatataaatagtaataaaataaataataata

SEQ ID NO: 248201 - DNA, 680 bp, Cannabis indica
tttttatataatactatattaaactttaatttatattaaaatattatatatttaagagttcataaaagttaataccacatataattttacataaagaatattgtataaaatacaatttaatataatacaatacaatacgacttaatacagtgttccaaacgaaccctgatagtgtttcctactacgttattgctcataataggaaaaggttactcgaaccagatagatcgagtaggacaacaatcttggaaaagattgataggtctctacttcttggttacaaaaagagtactccttgccatggacaaaaacaagtttatttttggctggaagagcctcgctaagggtatgccacggacaaaaacaagtttatttttggctggaagagcctcgctaagggtatgccacaacatcatctaattttggggtgaattgaaggcttccaaatcatctgaggtgattgagaaaatgccattgcttcacctttcatgatcaacttatcttcttgttgattggagagactttgtattttgctcatcttttctcccatattctctccaaatacttgtttaagtatactattccactcattccctgagtccgaggtcagggtccaagtctaagtatgagagcagggtctaggtttgagtttggttagagttcgggtctaggtttgagtt

SEQ ID NO: 248202 - DNA, 912 bp, Cannabis indica
aaaagattgtgtggttcatgacaactaatgcgatcctacaccatctaagcatcctacctagtaataaaatcatcgacaggatgacattgcatgtatggatcttagtattaattataattgatacagaaaaaactattaacatgaatcacaatttttgataattgacatatgaaaacttacgacaagtaagtataacacattcaataaataattttaatctcgtaattatcaaataaagccaattgcgcatttttaaaatttctaacatcgaaaataaatgcagataataaattctataatatatgcgctaactataattaatatgcgctaactatattttattacacgttatccatagtgtatgccgaaaaagaatttataataataaaattcacaaaattacgaaaggaatactgctgcctcagatttttcccaaaatacgtggcagcggctgcgtgcaacacgtagatctcaagagcatccactcacaacaattggttaagtcatagatagagaagtgcacctcacggagtgagcctcccggggaggagcataaagcacgcctttactcttcgggagctggaaatataacaatgcatctccgggaggaaaaaagcttgttcgagcagtcatttcgcatttaatgctgcatgggggaaacgtatcagaacctccataagaggatttgactgatggcgtacgcctcttttacagcgattacacgataatcaacgagtctagtgacgactccattatgaaaacttacatcaatcaaggaaggataaaagattctattcacctaatccttaagatacctacgacataggtcatgtatgtcctattttgtatctgctaggaatttgtgcccctaaggggttgacactttaagacaagtgatccctttctagtgat

SEQ ID NO: 248203 - DNA, 588 bp, Cannabis indica
ttactatattgactttcctacaagaaaaaataaacataatcaataaaattttagtatatgaacttacaataaatgttcactaaaacaatagtatccgctacaaaaaatataaattgaaaatactttatctcaaattacttaacaaagagaatattagaagatgtgaacaaagactatatacataccaagatggagatgcatttagtctttcaaggagggtctatagccaaagcttgaaacaattgaaaaaaatattttaaaatgaaaagtattgctataaaagaaaagatatatacagaatattgttggttaaaatccacttataaccagtccctttacagtatatatccacatcagcaaaagaaaataaaatacaagtaaacaaaacagtcctagggtggcttcgcctctagtggatcaaatcttagtagttagttacaactgaaagtgtaactaactcctaagatcttgatcaaccgactatactactctatataagaacagaatcaaagcaaataacctaagatctaatacagaaaaccagatcagaaaatatacagagagagaaagaagaataaaccctagttt

SEQ ID NO: 248204 - DNA, 2407 bp, Cannabis indica
agagctcatctagctcatttttcatattcagaaaactacctacaaggtcaaagcatctctctctagtttctctctttagaaaccagagcttaaacacttagcctctttctgtaattaccatcttgtgagaaataaaaagtcgaagtagacgtatctccattaccatcgcggcatggggagtgaactactataaattgtgtgtgtatctaattttttttacttaaactcattatttatctcgccaatctagcgagctagtattggctacttttcagcgtcaatattttggtagtttcattgagagccacaattcgagttccccaacgacaatttgaattctctgctaggaactttatcttgaaaggaattcataagttcaaagaaataatcatccatgaacatgcaaagccacactaccactactcaacaagcgacaaggattaagattccccataaggaagtgtactatgagcaagcgttcgaaaggattcaaactcaagaacgtggatttatgggatctctgcctgatatggagcggtcgtctattagggaaatgagctacaagtgagcgtctaaaaagacttagactcgagatcgcagacctacatgtccaccacacgcagctaataggaccaactacaattctactcaaagtaattcaaataatgcgagaaaccaatctcatatgtggggttctcttcataagtccaatgactctagatcaccccatgaccctagaaagggaaagggacttgcattcaggcataggggaagaaccgataagctctaccatgaaagtgaagagtatatgagattcagagggtgaagatgaataaactactccacactcaaaaatacttatgtgatgaacaaggtggttggtgtaggtacttcgcccgagtacctaatgaccaacagtacgaatacttcccacaggtgcatggagacgtgttaaacttgagaaatctgtccaactccctccacacatgtcacaaagcaaacactcgagagacgactctatcgtcttacgagatgaatccccagagtgtaaacccctaccgccgaccaactcccatgagaagaccctatggctggccaggttttgagcaagacccctatggtcgaccagggtgtgttacaaatcaaaatgtgtgttttttaagaactcaaacatgttctttgtgttctttgtgactcaaagagtcaaaaatcacaacaaatgtcaaaatcaaatctttttttgtctggacatcacacattatacatcctaaaactatcatgcagatcaaaataccaaaaagattaaaatctaatgtgggaattagaaaatgttcaaaacaaagaaaacctttgaaacaaccatggcaaaattaaataaacaagtgaagaacgagatttgaaagcttacccactactaaaaatcgttgatgaataagatgggaagcttgaattgtcagaatgacacgaaaatctcaagagatggagcactatggggcgtcggcctctagatagaaggaggagccttctaaagttgcttttttgtagagagagattgaaatatgagaaatgagaagtgagttcccccatgagcttatatagctactgtgggaccccttctcacttgccatgcaacatgtaacaagaaacatgcagaagattaatgtttttaacttactgctaaggaatgtgatcagacaatcaagatcaaatatttcaaaggctaaatatactgcaagatctgcccggttaaggctacatcaatccccactaagctagaaagtccctatccgcacagacgtctacacaaggacttgggggtaaatattatcctgattttttctcaccagatgtggcatgtccacgtggccaatatcaatacctcgtgagagtacaactctccaacaagaaagccaacccatctactagcacttcaactaacgaggagtccgagtatttaggagggacgatgaaatgataaactagccacttcaaaggggctatctggccctattgccagcataggctggccagtttccactatatggctggccagcatatcaccctggcaggtgcatggctgacgagctttgtgcttggcgggtttttggtgcgtagctttcatccatggacaacaattcaagcaacaaattgggccttaacagcttacgaaaatagagggaaaatatcaacaacttccttatttttaagggggaattaagtcatttgaactttattaatttattatgtaaataatagctttatttacctatttgtaagggacattagggatgtaagctctactatataaagggcattagtcaaaccttaaatctctaagtctcaatccctaagtctgatactcatctcatctctctctccctcacacacacagtctctctctctctct

SEQ ID NO: 248205 - DNA, 2405 bp, Cannabis indica
gttaaacagttaaatcttttgtaaatgatttttttttaatcgggatcccgagtcttttgtaatattattttatgagtttaattaaaaaggaaaaattttaattaatcatgtttttccataaacctcgttgattagaaaaaagagagcaaaacaaggttaaaaaatcacgtaatacgcctatgttagttagggtgttacaagaaaggcgagtggattttttggtttcttcaagcaaagaggccatggttgttggctgtacacgcagagatagatatagggatgaggagaaggagaaatgatgaagagagagataatgtagctactagggttttctaaagctactagggttacaaaatagaaaaaagatttaaatattccattaaataaaagaaattaaaaaattataaaaaaaaattaaattaatatataatgttggaaatagcgccagtttttttttaatatattcagccctaattattgttgggaatatattcttagtattcccaacagtttataattatttagtattgcccacagttctccactgttgcatatgttttttcgaacagttttcttgcttcagttttaaacgattgcgaaaaacctccacttactttttccaacggtttttataattgaccctcttattaaccgttgggaaaagccaattttgtagtagtgctacttcactatggttaaatattgagatattcaaactctactaatcattgataattaatctataacaaaagttacctcgggtgttacaattgggtattgttcatcatgactaattaacattaatcaaaggaaaagctacctataacttacattatgtatggctgaatctctgtattatttttcatcacgactaattgagcttgatctagttcaaacttggacactgttaccgttgttcctttcctcttaatcctctatcaacctcatcttggtcagttcttggtttggtaattccaattacctcaactccagccatgtattgtgaataaaatttcacagcctctttagatatgtagcactcaaccatagatgcttttgttcgatagtggttacgcacataccttataagtaccttcatatttctttcaaatggatacatctatctcgccctaaccggcccacacaacattacttctctcactagatgaaccattaaatgtatcatgatgttgaaaaaagatggcagaaaaaacatttcgaggttacacaatgttttgactacatgttcatgtaatgcttctaatttatccatttaaaattccatcccacataacttattaaagaaaatgcaaacatgtgtcaaacactctcgaatattttttggcaagagttacctaattgaaattagaagcagatgttgcattaacgcatatgacaatcttgtgatttcatacccattagtttcaataaagcttcatttaccaagtttttgatgttagacgagtaaccatcaggtactttcatatttgaaaatgatttgcaaaccatttgtttttccttttcggacaaattgaaacaagcaggaggcaaatataattgatcacctttctttttcaggtgccaaagattgtcggatacccatttcaacgagatctaactgactatttaaaccatccttagtttttccaagaatatcaggtaaggtagtgataatactctcacacacatttttcacaatatgcatgacatccaaataattcaatcctaaccctaagagaattagtataaaaagaagagaaaggtctcactatccaactaatacttctatagctttaaacatagttttcattatgtcagacaactagtgttttgagacttcttcttctttcttttctctctattaattttgaaattcttagtgttcttcaccatcaaaattcgagccttagtgatagagtacatgcccacgcatatcaagttggtactcaatcatagtgtgtaagactttgaagaatccagtcaactgaagtagaatcgggctcagatcttagtgatactctgctacagaaaggatacaaaggtgagagatctgagtggaaggagtcctttgattctactgcaaccaatgtaaggtttcttcaactttatatgtgtttaaattctattgttttagaaattcatatttaggatgctcaacaacatacatggtagtaaatctagatcctaataaaataatccctagtagttatctcattgttatatatttttttcattatttacttttcttattgagtatttgtgacttacgggtattttgtggtgtaggtaaggtgaagggaaaattagggtagccatgagatgataatcttctctggcaaatgtacatatcgacttattcggcttctgtagtcgagttgtaggagttttttttgagttgcacctaa

SEQ ID NO: 248206 - DNA, 1244 bp, Cannabis indica
cttctctctctagtttctgtctcaagaaattggagctttaacacttagcctatttctgtaataccatctcgtgagaaataaaaactcaaagtagacatatttcaattattgttgcgatacaaggagtgaactactataaatttattctgtctctcttataatcacttacattatcgcaaatctagtgagtgggtgtggcttaaaagtctagtccagatttttaaatcaatatttcggtgttttcattgagagcgacaactagagaaagttactaataagatggtttcaacaaactctacaagtgttggcaaaagaattccaacatcttaccaaacaactgggggctcgccaattgatgaacttggaactggagctactcttgtgacctaggtgccaagagcaggcctcaaaactggctccacaactcatcctccaaggccaccaaacactcctagaattggcaccaatgactaaatcccacctagggagctttatgtggagaatgatgaccctgaggaggccaatccttgggtccccagcttagccaaactatggctgacttacagcaacaactgtaagactctctccataatcaacacaaatagtttcaacactagctcgtggaaaactagaggaatattagaagccaacgcactgagcaggaacatcaaagagctaacctatctcagtggattagagaagcttatcgttctggtcacaaaactattctccgtaggggtctttctcagtgggtgagagaatccatgtcaaccaactagtcacatgggaacaagtgcttaaggagaaacttttaatgcttagaatgccactacgacacttggtaactgagcgagaactatacaaagaccaggcatggagacctcttggagggaaagcacctttgaacaagagcctacaataggctttacaacaccgagagaaccaataggactcctctaccaagtcctcctcaatactctcatgacaccaggccatgagaccctacaaggggaaatggacctacaactcaaaatgatggaggcagtagaagacattgatttaaaactggaggctacgagatttgacaggtaaggccaatgaactgattcatactcgaaagtcttccgagatgaaaggggtgaattgtgttgttaactttgttcatggccgcaatggcgagcagtatgagtacttccctcgagtacacggagaggagttgaacttgagcagctaattcaattctc

SEQ ID NO: 248207 - DNA, 864 bp, Cannabis indica
ccaccccaagagtgaaaaccaacgcatatgtagacttcttttcatcaagaaaagcctaaaaatctgagtcgttatagcctaagggattgtgggtgcaagtgtatggcccgcttagggagtaggcagcaaccttaggcatggcctcgtgtggatattcgctcgagagcgtggatcatgaggtaaggagaggtgcagcgaggcaaggaatttcatgggtcattaggtgttgggaggtacagtgagttaaggcctcacatagctggcgagggaaaggagcatgtccctcaggtggtgctcgaggtgaggggaggtgaccccttgctggggtcgcgtggtgatgatggggtccttgccttgtgagcgaatgagctattgtctccttcgatgacttccctcaatcaatcgcttcttgatttaggatgacttcagaattaagcttgataaatttagaggtctacacttatcgtaaataggtttcttctaaaaatcaacttcctaaggtgtatgtcttccatattgtataaaaatatatactacatatttcacaagtcacataaatagtatagggagcttctacagtgcacctatgcatcaatgcactccctactatttcggcatgtaggaaaattgaaaaactgagtttttgtaaatatcaataattattacagacatataattaatatacgactggaatagtctacagcagcagaatgtaattctgttactgcagaaaacagttttcagaatcaaacagaatcagctatttattaaaaataattgcagaaaataaaatcaacttgacacaagagatttgtacgtggtatcaatgttctttcgtaacactccctagtccacgggggccac

SEQ ID NO: 248208 - DNA, 639 bp, Cannabis indica
caccattgttcctcttcacctctctgtcttctcctccatcttcactcctttcattctcaggtgaaggttcttctaaaactcatttttccttctttgaatatcattaatttcacacatgtatagcattgatgtgggtcattggtagcaagtaacatggttattggtagcaagtaacaaatgacccatgtccaaataaacctgaagaggaggcattgatttacgccgtcgaagcgaaaagaggagcctataaaacatcgtgaggtccccgtcgtccttgtacgtcctctgaccccttttcttcggacagccacctctgccctctcctctggttagttttcttgcttctagttttcatggaactcttcaactattactcaatgctctgcaagtgtttgataaaatgttttaaaagacctcaagaaaactaatatgcttctgcattgaatatcccttcttctctactcaaagttgactcaagccatcactatcgtgtctttgcatttaaattgcattttgtacctaacatttcataagcataaaaataaccccaacacatagcatagactagttaggaggtacgcatatcttagcttcaccataatccccaattagtgcccaacaatatataaaacatatatt

SEQ ID NO: 248209 - DNA, 1164 bp, Cannabis indica
ctggtaaaatatattccaatataggccctggccacccgtgattccctagttggctggtgcagtaggtgtgttgacatggggtagattgcaccagttgctagagttaggtggatccaaatagctgaagtgattaaaatcacttctcaagttattattttgggtgtttccacgcattctcgcacctatccagttgaagattgacctctaggtcactcgctcccagatgcctcgggaagggagttcacttccctggccaaccagaggtgcaccactagagggttggttgttcaagggttggccagtgggaggagttgttaagcctaagatcccttgtcgaccccctagaccattagttgtcgagatttggttattctcgccatcagaccttcgtggcaaggcatatactccttcaagtaggggaaggtttgtcctagttcgtgaggaacctggttggatagtttgttgatagacgctccccaatttgttgactagtcttccttagagtggatctctaataaaagcttggcctctcccaatagttcgttcattgaactgtcttatcaggttgttgacttctctgttgcggtggtgtagctcttcctagtgagatcggaggatgtactcttggtcatccatcaatctcaggaatttacatctctattgagcaaatacattgcagtcaacagcgtgtggttcttcagtttggccggtttagtaaataatctctctaagtctggctaactcgagaactttttccatgtctagaaggggctcgccaatcgcgggcttgcaaattcctggccccatctctccaacattatatcgtagatgaggtctgatttttatgcttagggttgttccctacgggtccttccttcagtgggctagtggagggtcttccgtcgaaggcaagggctgattgatcagatccactgagatggcaggattgaccacatctgtagtctttatggaaattccagtcatgacgggacatgaacattaggatctacagtcaaaggatcttgagggagccccgaggtggcagaggatgtagctggagttctcctcgtgttaaccatgacattttatcagataaaatattatctctctctctatgaaagcacctaattcttgacctctaatttggccaaccaacagcggagt

SEQ ID NO: 248210 - DNA, 491 bp, Cannabis indica
attaggttgttgacttctctgttgcgatggtgtagctcttcctagtgagatcggaggatgtactcttggtcatccatcaatctcaggaatttacatctctattgagcaaatacattgcagtcaacagcgtgtggttcttcagtttggccggtttagtaaacaatctctctaagtctggctaactcgagaactttttccatgtctagaaggggctcgccaatcgcgggcttgcaaattcctggccccatctctccaacattatatcgtagatgaggtctgatttttatgcttagggttgttccctacgggtccttccttcagtgggaggcgctagtggagggtcttccgtcgaaggcaagggctgattgatcagatccactgagatggcaggattgaccacatttgtagtccttatggaaattccagtcgttacgggacatgaacattaggatctacagtaaaaggattttgagggagccccgaggtggcag

SEQ ID NO: 248211 - DNA, 710 bp, Cannabis indica
atatccgaatggggtttacagtgtgctggatccatcctcacgagcttgcccgaatcggccttcttcaccggctgccttattggcggattcgttctcgccactatcgcagactcgtggcttggccgaaagaaaatgctttgcttcacctgtctagccatggctatctccactctcctcactgctttcgctaataacttgtggacttactcagctttgcggcttatctgtggcttcagccgctccacgatcagcacgtcggctcttgtcctgtcaaccgagctagtcgggaaacaatggcgggccaagtgggtgtcatcggttacttctgctacaccttaggatttctctctttaccagccattgcttacgtaaacattggctctacatggagaaatctctacctatatacatctattcccacaatagcatactccataattgtttacttctttgttttcgagtctccaagatggctattcatcaaaggcgaaatagaagaaggtattgatatccttaagaaaatggctaataaagcaaactatgaaagcttaatgagtagtaccataagcatttcgtacttatcttttaaggaagaaaaatggaatgtaaatctatactcatcaatcaaaatcttgatagagaaaaaatgggctttacaacgattatcaacaattatggcaataggattcggcgtgggattggtttactat

SEQ ID NO: 248212 - DNA, 587 bp, Cannabis indica
attagttgaattattttttacatcgaaataaattaatgtatataatttgtatgtgcatacatacaaaattgtttaacatgacaatatctcatattataatcattggacatgattatagtgcggacgttgtttttgtttttattagtaaggatattatatttatgttgtggttattttgaaaaatttataatctaatttttttatttgatagttaatattatagttataacagaaattctattcgtttttttattttttaaataatttataatgtcaaaaataaaatttaaacattcagttttacgcttgcttgtttctttttgcaccagtacaactgaatagttgaatcccgtttttaatattataaattattcaaaaaataaaatcgaaaataaatagagtacctctcataattacaaaatcataatttttataagtgctaaaattatgtcaataaagagaaaagtgatgtttctattatagaattttgaatattagtatttaatcatatttctttaactaattattttggtgaaaaagaaaaattgtgtgcattttatgttgataagatattgaaaaggactgta

SEQ ID NO: 248213 - DNA, 1428 bp, Cannabis indica
gatgttaatgaaacatacttgttagtaaatctagatcttggtaaaatatatccaacagcaagtgtcctactcctccttgttcttttgtgtcgtgggagaggtgttaaacttcccctttttcccactgttcctcctagagctattgggatagtgcttgtttctagtgttttgccactagtggtttggccagagttattggtgtctgcctgtgcgcctagtaggttatgagactataggatgtcttgtgactgcgtgttgttgacatgccccgccagggcctattaatggcttctttgagtttttaaagccaacagctctatcaaggaactccttcgtgttgttggttgagatcctttggatgtctttccaaaagtcactcaatgagagtatgccccccagtatggtcgtatatcggccttcttctatgaggcctttgacttttgtagcctcgaccatgaacctctagatgtagtccttcaaaggctctccttgtcattgcttgactttgacaaggtcttctagctatgatggtacaagtctcgaagatgagaattgtgtgaaaaattcttgagagaactcggcccaagagttgaatctccctggggtgagtttggagtaccattattgagttgtttctaacaaagtggttgggaataagtgaaatcgcacatcaccagtaaccttttggagatcgagttacatctcaaagtatttaatgtgagccaacgggttttctcgcccggtatacatcttccataccggcatcttgaacttgggaaagggtaaggcatttttatatgccaagaatggtgattcccttgatcaatcaagttcaaggtctaaaggtttcagaccacctatgccttgaatcatgcccttgagttggtccaactgtgcttgcacagaaagatctgttgctgtggggacttgactgactggctcttcttggaggacttgaagattctggtgggataggggctggctagccataccctgggagagtgtatggtgaaggtcgtccagacctgtgttgaactgtagaccctgtcgaccattcttgggtacaagtgttggctttggccgactaggcctatgtgtggctactctccttggctggccaaacctacattgggtagggtctggtcgcccatagctccttcatggccagaaaaacctacaaacggcaaggtctggccacctataatgcctccatggcatgctagacctgtaaagggtagggtctggccgcctacgactcctcgattgactagcgtcagctatgtgttgatgcaagttagatcacaccagttgctagagttttggggaaccaagtgtctaaagtgattaatttcacttctcgaatcaccattttgggtgtttccacctgctcccagtccttgtcagttgaagattgtgttggaaatattt

SEQ ID NO: 248214 - DNA, 771 bp, Cannabis indica
ggcccatccctctgagtggaaccttggagttagtcccaagttgcgacatggcttttgcatgccgcagcccgcctcgagtttctgggcaaattcgagtgttaactttgaaaatttataactttgtgatccaaactctgttttgggagttctatatactgttggaaagctcgttctgagctctatgtgattatctatattttgaataccacgtatataatttataaatgttgaatcaggagttaaccttatttgtgtaaatcccagaaatgtgattaggattacttgcacctggtcagaagcacccggggatttggaatctctatttttgcgggacatcaggtaagacagtagttagcactagagttatgcgcggtggtgcttatattggatatgatatatgtgattaattagtaatcgggattagggttatcacccgaacatgagcggtttactagcttagggttattaacctagtgatatatgttgtgtaaatgctatgcaatgctgagtatatgagtatattaagatttagggttatgtgttcaaggcataaccaggttggactcagtaactagaaccgacatgaaccgttctaaggccttattggatttagacgtttgagcgcaacacgtaggtctacgttacgtagacataaataggcatgtgagcgtaacatgcaaatttgtgtcatacaggcatatgagaatggcattaatatttatatagtgtgataaatatgacattaatttattgtactatcttgctgggctt

SEQ ID NO: 248215 - DNA, 1462 bp, Cannabis indica
aatgcatatgaagaaatgtttgcgcaatgggagtacatgactaagcagatccgtggtctaaaaagctccctagagcaagtggagactgaaaaaggaaagttagaggacacggtcaaaacctcaattgacttcttgatgaaaaggagaatgagatctataaactcactgctaatctgcatagaaccaagcaagctctgcaattcattcccccaggcacaacaactattaatcaaaccctacagctcaagaagccttatggtgatcgaacctccttaggctataagatgttgtctaaacaaggtaatgacttgtcagttgagaattcactaccctcaaatgtcaatccaacaaagaaagaagattggttaccagacatcccaaccaccattaacgaatcagactcatatgagaagagacaagttccaactggacccactaaactcaagttcgaaggaagaaggattgatgtaggaaatctgccacagaatgacaatttcattccaacatgtcatttctgtaataggagaggtcacattcgtcctaagtgctataaatttcagatttacttgaaagcaatgattagtcaaccaaatagtttccctcaaccaaataagtctcatgggcccaaacctcgtcgagaatggaaaatgaagtctaaaccaaatccaaatgttggattggttacaaagctatctctgtctgcttttgttgaagggcagtggtattttgacagtggatgctctcgccacatgactgggaataaaaaattgctagttaactacaaagaagaaaaagagggatctgtgacatttggcaatggtaacaaagggcagattgctggtaaaggtgatgtaaacgtgaatggagtggctcagttaacgaacgtcctgtatgttaaaggaatcaaagccaacctcatcagcatcgatcaattgtgttacgacaacctctctgtaagttttactaaaactcagtgcttagtttcatctaatgggtgtgttgtcttaacaggaaacagcactatagacagtgctatgcagtatgcaataccatcgtgtgcaacaggactttcttggacaaacctgacttatggcactataggttagggaacttgaactacagagacattcaaagacttatgaagcttccagcagtaaggggaattcctgacatgaaggtatccaaggagagaattcgtggaccatgtcagcttggaaaacagcataaggcatctcatcctcccatcaatagacttctcacttcacgcgtgttggaactaatgcatgtggacttgatggggccaatgcagaatgaaagtcttagtggaaaaagatatgtaatggtcttggtggatgactactcttggtttacctgggtcgaatttcttagagagaagtctgagacatttggattattctctgccttgatattgaaactacaaactgagaagactccaaagttg

SEQ ID NO: 248216 - DNA, 1512 bp, Cannabis indica
atttttgaaaatgactgaaaacttaatcagttaagcataaaaaagattgaaaactaatctcgtaaaaatataatatatatagatatttttatgtaaaatatatataataaaaaaaaaaaacaagaagtaaataataaatcttcttttattcaataataattataataataatatttgacatttctttgtacgcctcaatgtctgatgacatttggcaatgaaatggtaagagttttatctattcgattaagagtgtgtatcggcctcttcaagagcttaaaggtgagttagttggaattgataactcagtattttagaaagagttgtgagatttgagagtgctcttaaagttaaggatttagttaggagggttgctttcaattatcttcctacccgtgtccaactaaacgtgaaacatattcctcttccctcattgttgtgtctaaggtgcttgcgagttaaagaatctatttatcattctcttgtgggatattcgtttgcttttgcttgttgacagatgacgagtattttagtgatagagattggtgacaaatcttttggggatggcttcatgatagattttattgttgggattctaagatgacacatagaattgttacgctttgctgggcgttgtggtctgtgcacaatgataatgtgtggaatgataagagtatgattgttaaagatgtggtattgttggctaaaggtagttttgatcaatggagttgtgtcaagttaaattttttggattgcaccgattgataatacgatcaaaattaatgtcgatgcaactatttttagcaatcagaataagtatgagtatagttgggtggcgcgaaactcttctggtcagattattatggctcggacagtaagtcgaatgtaggtggttgatcatgttcttgttaaagctattggggttaaggaggtgttgagttggttgaaagaaacaaggcgatgtgatgtggtggtggagtcggacagtgtgatcacgatccaagctatcagaagttcgttagatatgacttttatttttggatttttcatattagagtgcagacagattctttctagtttaaataatatctttttaatttttgtcaagcaatttactattcgtgttgctcagtatttagctagagcttcgtagttaaatgctagttgtacctatttaggttctatgatttcaagtagtttacctgatgttcttttaaaagatttgagttaataaaattgcatttctattattaataataataataataatccttattctcttcctctttttgctattgatcaaaattctccccacaaaaattgtatgatcttttcgtagcccaataaaggcccatcctcagccttacaagaagatgaggcccaatcacattacctccacgatagagacgtttacaatgacatcctatggtacacttttattttctttataagagttttaacacaaattctttaaaggaaacttacaaaaatactggaatttgggttaacttt

SEQ ID NO: 248217 - DNA, 1225 bp, Cannabis indica
tatacaattgtgaccccaataaatttctaacaggagtttgtctcacagcctctcggtaagttttccttatatatccttatttgctcacttctttttttttttacatctttcaaaatactcatgcatttttgttgttggtttctagacttctttcctctcctttgtcacccagcagcgaggctcggaaaagataaagtatctggaaggcatggtccagaacctcataggcaagctcgaggttataaccaagcaatggactgatgccaccgtaaaatactcgtttaccaaagaattcgagaaggtgaagagaaacctcgatgtcgagcttgaagctaccaagaaggaggcaaaggacaaggctgatgcatgcaaaaaactccaaagaggaacttgatgcagccaaggtaacgcttgatgcagccaaggtaacgcttgatgcgaaagaggccaaaatcattgaatgatgcaacgttgttgcccttcgtaccatctatcaagcctggatggcaaatccagggatggacaagagcttcttgggagaatctgaggaggaaatccttgccttctacgaaaagattaagaaggaggaagaagatgacaaggcagcaacagaagaagaactgtccaagtctcctactatgtaggcttggttttatttattttgattttatttaggcaaacggtcttcagaacgagacaatggtttgccccttgaggcacttttttgtaaagacaaatttgcaaggttggatagccaactttgcttttattttatctttcttgaatgcttcgtaattatatatttgaacttaatttatctgtttgtttgcgttttaatttacaacttaaacaattatattttgatcaaatttaaattacgttagggaatttcattgctcatattttccttcgatattatttgagtagttaacgatctactatgtgcacgagcagttattatctgctacgcttttgatttgcgagctgtcatcaattcttcctcgcatgaacagttataatatgttttaagcaaacttgaatatactatttatgatttatcactttgtatatttttaattgcttatatgaatagttaagtcgtttattcatatactaggtttaagtattttttcaaggcatcttggtgtctcatttaattcttttctataaaatgcaagccgttagtattcagcttcgcatgtagcctatgagttatatctcattt

SEQ ID NO: 248218 - DNA, 1094 bp, Cannabis indica
atactattttaatctggatattacaattgatgactcatgatgcgaaaactgaattccctgagtgttggttgctctgcgcggatcgctgaatatcttgctttgagcatgccagcgaggcatcttgctcggcctatattctggagtagatgttccaagtggactccacgtgtcaccattctcgtgatgccacgtcagagtgcaaaaattgggataacattatgtatttatatgtaaaagtgataattttatatgaatttttattgtcttgtttagcagaagaattagtaattacataaaaaaaattatgtaataattaatatttaacatagaatttttttaataattaaaataaatttttaaaatatttttcaatatacattagtaattaattagtcaaaattcttttcccttttaaagttttcgagttattatatttttttttctagataaaaaagattttgactattcttttctttaaggagatcaaaatattatttttttgtagctgtagataatagaaattataaaataatatttccttaaaagaaaaaatgctattgaatctgaaatacaaaataatacataatttaagtgacacattttttatttaataaattacaaattttaattatatgtctccaaaaaattcaaaataacagtatctttaaaggttttttttaataaattaataatatcatcaaagtaattaaatatttgttgagattcagagggggccatggccaccccaactcaagcaatacctccgcccctatcgtgaagattatgcaaacatgttatataattgattgaaatatagtaaaagagataaatacagatattcatatatatatatatgtatatgtatgttcttatattctttgatgacaataaaaaacaatctaatatcgttatagatttgagtagacatttcctgaagtaaatgttttagatttgtcaaaaaaaaaatcgtatttatatgaatacaactaaagaatcattgaaatgattattattgatgcaatttaatagtaggttttgaataccaaaagagaatgttaagaaaattgcattaaaacatcaaagtataagaataa

SEQ ID NO: 248219 - DNA, 2579 bp, Cannabis indica
aaaaaaaatattttgaagtataaaaataaaaccctaaaaaattatagatttttttaaaaagatatatttttaatttgagcccctaaaatagatagacgttagacgcaagcctaacgtgccttaaccgccaatcctgtgaccaatactacaagtgaccacattcctttttactttttcttcttgagtttatatatgtaaatatgcatatttttattatataattatgaaatttgagaataacccaattgaaatttatggttggatttgaaaacggatgatatattatgatatgttttcaggtgaaacttggctaagcatagattgtggagcaaggacaccttctgtggatgctctcacttttactcaatgggtaactgatgacaaatacataaaaacaggtgaaaataagcttctctcaacacccactaacctttttgagatgtctacacttagaagtttcccaaaattaggtaattccaacaacaacagcaatagtaataaatattgttacaatttgccactaaaatcccaatccaagtaccttgttcgagctggattttactatggaaactatgacaaccttaaaaagccaccaacattcaatcttcagctaaggtcaggaagtgtaaatgttaaggttacaacctctcttgatttggatccaatttaccatgaatttattattttcacaacagaaagtagtgagtttgatgtgtgtttagttgaaacacaagaagatgaggttcctttcatttcaacacttgaagctaccatcattcatgagcaagaggtatataggttgatgaataagaacatggcattgtaccttgaatctaggatcaactatggtgtcgatcaaagtgtcccgtaagtatatatatatacatattttcatttattacatatatacttaatcaatctaacacattgaggaatatgtacttaaatttacagagatcgttttgtgtcattggttgagaagtacaacagaatatggaaaccacaagaagatccaagatacctaagctctcaatttggaccaaatataccaatatcatattcggtagaggagaacaatccaccagatgttgtaattaattccttaatcgaagcacacaatgcctctcaatcaatcgtcttaccaatcaattttcgccaaaaatctcaagtattagcctatttcatattgtatttcgatgtaacagcggcttacaagccgttggaagaacctagaagagtttccatttctatcgatggtaaaataatgaacacaactcagctcccaggatttctgagaggtgaagttgtgtccatatttccaattaaagtgaatggtggtgtggcttctttgagcattgcttcggttggggcaacgacgtctacgtcgctgccaccaccggctattctcaacgccatggaagtgttttctgtgcttgatgtttctgatgttggaagatcatcagttgttggatcttcctttagtcttgttatgcttcttcttatgctttattgcactgagtggattgatttctaatcaattagtactcctcgtcaaatttatgatcattgtagaattttgcttaaaaaaaattttagtaaaaataaaatactccaaattataaaattaattccaaataaattatagctttatgtcgtaagtttaaatttttataaaaaaaataaataaaaaaacaaaaggcaaatgaacaaacacagttatagagcatgcaactcattgacctacatactcgtaagtatgttgaaaagttaaggtgtaaataatctcataatctcaaaagattagtccaagagttaccgtgaaaggctatagtgaggacaaatatcttaactagtgtctcgcaaaataggaccaactatccctaaatatcgtcgaataataccagccatagctggagtgtgtcatcttgataaaggtaaattacttttggataagaataaaaagcaattatcggcaattatttcattttatccacatattgtaagtatgaaatttatggattgtccatgttttatgaacgaatacttagataagatcaaatgagaataacggttatttctagagcccctataaatagggacagaacctaaggggaaggggatcaatttttttttttttgagaagaagagaccatgtgagattaaataaagtttcatagttattcctttgtattctaagtatattttcaagaaatagtcaaaaaaataataatgacttgtggagtatataaattttaactataaaatcatgtaaaaagtgtttatatatttattaattataaatattaattttttattctaacactttatttattattaatgaaaatttgagtcatcggaacttcttctagtgtggagattcggcttgataaagctcttgtttcccatctttggcttcaatcttttccccaagctactcttaccaatggagacttctcttcatctgaccacacccctatcttccttgaaccaaaacctctgtggctgcctaagaaaacataccattttcggtatgaaaactgttggagccgtgagcccctttgctccaagttggtagaaga

SEQ ID NO: 248220 - DNA, 844 bp, Cannabis indica
tttattatagattaatattattataaggttagttttctaaatattatatcgtttgaataaactgaattggaatttaaaaaaaatgtaacaattgataaatctagaaaatttatcatatatgatttcaaaactgttgtccttatatcattttaaagtacaattgataaatctataaggaaaaaaaaaactcatattatatcattttaaaattgttgtcatcgccgtatctcacttatagatgacactatatttaaaatcgttatgttataactatatcttacttatagttgtcattatattctcaataagtttgccctatatacatagagtataattataataatgaaatagagatgaagagaaagtatgaacgaataaatataatttgatggtcccaaattgaaattttgaaatcaaaaaggaaaatttgacatatgaaagtaaaaaaaaaagaataagatggagaaaaaaaaaaatatgtacataacaaacatatgtatagttatgatagttagatggagatgcatggagagagtgtgtgaataaatggagaaaaaatttttgtaaaaaacttattataaatatcatagaataataaaaataagatattaacttatgattttctaaaaaaaaatataataatatacataacttaataatttgttgcaaaaataataaaacagaagaattatactatgtacaaaaatcactttaatcaaatagggtttatatattaaattattttttattaatgggattaatcaatatatgaacaataatttaaataaatcttacaatcttaactctttaattcaattaataattatttgttcacgtaattatt

SEQ ID NO: 248221 - DNA, 1360 bp, Cannabis indica
caaatgactccaaatggatgattagcgttcaagataacctaataaattataattacactaatcaataatttaaagaatcaatttaagaatattaatacataaattagctatatttataaggaaaaatatcaaattatcatccttattctatgcgatttgataaaaaggaaaattgtgctaggattctaagaacacgttctctggccttccaaaaatgcaatacttggtctgctttcatgtacaagctgtccttggcagaagctcgtttgagcgaggaacgtagatgccttctatgaaggtcttgctggacttggacttagcccaagccatctctttgggcccactggtgggctttgggtgcttacatggagtccatgtgtcccttgccgaaaatgcggataatatttactcctaagctttttaaaatattgtctattgtggaaactttccccaatccatatgagtggacatgtaaaggttaaaagtaatatttttattactttctaggtgctagttgattgtgaaaggtgaacttccatctttggctttgggaagcagattttggcagtcatctagtggtggaggagtgtgtttaccgaaaagactttttggaaaagcttttatttcaacgagtatttattattggtgcaaaaattaagaaaagtactttcatcattgatttgtgcctcagttcctggggcattaaatgcttgacatgcatgtctgctagacttccgagtcgtaggatgtgtttgtacttttagaaagacaatttggatcgttcattttttcttcacgcgaataactattttgagtataaatacttctaaaagctactatgtaccacttttttcccatttcacattttcgttcacctgagttcaagctttcttgagagtaaagttcagtgagagattctagtagtgaatgaactcaaactttgacgatctcctccaaattgctctttgactgagaaatcatcttctaccaaaccatccacccccagtgatcgattgttttcaaaggagtaacctggtgaatctcgattttaactttgaaatcgatttgttgattgccttagccaaccgtcttcgtgaaaggcgtgctcgcttgcgcttcccagaaccggcaaagttcagttgggagccttcgtcttctttgccaggtatgggtttgtttggtttctcgcctttaattgtgtttatgaattcactataaaaagttagggtttgcatatttttctttgagtgaaattaggatttcttaggcctgttgttgtgaaaattgtatacgcaagtgcacgcaatcgttaacaagtaataaagtgataaatcgagtatcgtctccacagggattgaaa

SEQ ID NO: 248222 - DNA, 491 bp, Cannabis indica
tgttgtatacacattattttcctttatgtcttcccttgcccgcataagaggtttgaatttagtagaaacttcaaattcagatacaggagtattattagaggacctggccgactactactagttcctggtgtttgacaattcttactacggggggtcttatttgtcactctacttggtgcttggagttagttccatcctcaatggaggtacctctgtagtcatcattcccacccaattcaaccacatgatcattgttgtaaaagggagcatcgaactcatctgaatgatcaaatgcaatacccactctctcatcatctatattagtgccaagttgctcattcctctgccagttgctggagatctgtttcattgtattcatctggttctgacctttcctactcagggcatcaactacaacattggccttcccaaggtgataaagaatttcatagtcataatcctttaccagctcactgttggaaattatttta

SEQ ID NO: 248223 - DNA, 504 bp, Cannabis indica
attgcagtggaccctcctaatgtcaacgggtaacataatcagttcacgtcattagttattctcatcattgtcattacgcgattaaatctcgataagtgatcactaggatctgagtctgcatcatataagttcattttgggcattttaaaattctttgggagctccgcttcaagtatgtttctggcacagctttctagtcctaacaatcagactcaaaataatcccccctttgccttaggaagactttggctatatcttttcgggggatggcaagttcagctaggatgcccttattcaatgcactatttgagactagtacaacattcttttttccctctaagtgatttctaagatcactgtgcttggcgttaagtttttgtctcaagttgataggaggatccttgtgacccttcccctatttctccctcgactctaggtgcacagatacgcttttttggtctccccgatcttaaggaccagtattttgctttggaaacctgtccc

SEQ ID NO: 248224 - DNA, 882 bp, Cannabis indica
taaaaagcggttattagcagttatttttatttatcacacatgttgtaaatatgaaatgtggagattgtctacgttccatagacagttacctagataagatcaagatggaataattgtcgtttcaaagaatcctataaatagggacaaagtcctaacgaagaaagatttactaccattttttttaaggaaaaactatgagagattaaggaaatatccagagatgttctcttgtattcagaaacattatagaaatataatcagaaataatattgactcgtgaagtatgtagatttaattacaaaatcacgtaaaatttctttatattttatttatattcgatcataattaatattttagttttatttaaaaggctttattgttgtaacaaattttttgtgttaatagttagaatgacaaatttgaacttatttatttatttgttatttatgtgggtaaaatatgttttaatagataaaaaatattaatatgtcaagtaagattaagatgatataaatatgacatatttaaatgttatatcagttgtgttctatcatctgtttacctatttataaccatatcgtattcttataaagtatgccactctctgcgggttcactatgattagcatctataggtgtgagggttaacccaattgtcgagttcaactactttagtaatcctgttgatgtggatcagtgtgtgaatgacacccgcaagattggtgatgtattgaggagttgttctatggaggttttcaaattcagggaatgtcttgggggtcgagatttcaaatacgtggggcctgcatagtccgttgatcaatcaaatgatcggttgatgggagagttcttgcacagtgagtactatatggcactaccatgg

SEQ ID NO: 248225 - DNA, 609 bp, Cannabis indica
ggttgaagaaattctacactgctgtggaagtagtttccataagtagaaaaaattacaggtgctctactgtgacaacaatggagcggtggccaactctaaggaaccaaggagccacaagagaggcaagcacattgagaggaagtaccatataataaggagtatagtagagagaggtgatgtgacggtcttgaagatcgcttcagaacataacctcgtagatctattcacaaaggcgctactaggaaaatcttttatgggttatattgctaacacgagattaagggagatgtcccatttacttttagggcaagtgggagattatcagggtttatgccctaaaaaatttgtaaagacacttttgattattaaataaagaattaaatatttaatatacgtgtgaatgttaaattgttaatatttattattgaataatttatatcaaatattaaaaaattccgtattcatatatgaggctgcgacttgtagctgtacagagaactaagggccagtttggcacagctttttaaaaagctaaaaaatgcttttaaagaaaactgtgataaaaagatggttggtaagcagttaaaaaaagcttattgaagaatttat

SEQ ID NO: 248226 - DNA, 597 bp, Cannabis indica
tcatgaaaactacatgtaaaccttaatgatttctaatcttttattcatagtaaataagattatattaaaatgagttttatttagggtataaaatcccaacaaactccctctaatataaaactagaagtgcatttcaattaatctattgtctcgatattcatatcaagtttagtgtgtttaacattaccaaacaacaggatctgtaaggtcgtatcaagcaataattttctccaccattacttacttttgtgttcacaacacattgtggaatttcatttttctatatgcattactcctcttgcgatactgaattctttactgccagataagtgcatctgaatgtacaaaagactcaactttcaccctatccaaaaaatggaatagagataaaatagtcaagaactttcgtcagtttgaataactttctagtgcttttcaaaaacaactaagtcatttagtttcactggtggaactaagatagtataaatggctttctacacccctctagaataatttctccaccgcagagtaatcactatctcaaatattaaattttctagttgatgcactattagtacgttactaaaaatacgtcta

SEQ ID NO: 248227 - DNA, 664 bp, Cannabis indica
ttccatgacccaattgatgtcacagaattaattcacccctgcccccaaccccgtaaaagaaaagcaagcttgaccttgatcccttatgtccaacatactgaggaaaatactaaagaattttctcaagaaatcccagaactcccagtattctcccctgcccccaactcgtcttttaagatgggttcaggtccttcatcttcttcccttaagaatgataagcgtagaaggaagggctctcgttctaaagtggcttcgaaggaaaacaatggcagtgcggcatcttctagtgccactgaagattctcaacgtaaccttattgattcccttaatttggtggaagttcaagttgaaagcttagttgatatccaagatggaaattctcaactttttcccatgggcgaggaggcggcccttatcaagccccccccatcctcatgaagtgcttatcgtggaactgtcggggcctcgcgagagacccgacaacccaagctatcaaggcctgggttagtaagtttaaggtggattgtgtgtttttgatggaaactaaagttaatcgaaataacatggaagttttagctcggaagttgggatttgtgaatattgttagtgtggatgcaatcggtctggcaggaggttcgtgtttgatgtggaataacaatattaa

SEQ ID NO: 248228 - DNA, 503 bp, Cannabis indica
cataaaacccaacaaaaaagtcatcaataattataaatgcatggtatttaccaccaagactagcaattcttgaaggtctaaataaatcaatatgaagaaattgcaaatgtctagtagttgaaatctctttcttggaatgaaaagatattttaatttgttttctaaattgtcatgcatcacaaagtttatcttgacaaaaggaatagatggcaaatcaataacaagatattttctaaccaattttgagataaaatccatactagcatgttttaatcttctatgccacaaccaaaaattatcattcataacggataaatatttatttttactatcaaatgaatcaacatcaataacgtacacattagcgttcttttctctaagaaaaataaattcattggttgaagcattttcaatagaacatttcgaggattcaaacacaacacgaaaacctatatcacataattgactaatactaagcaagttatgtttaagattattaacaa

SEQ ID NO: 248229 - DNA, 562 bp, Cannabis indica
atctgtctccttacatcaattattgttagactcactcaaatttgtttgcaggtgtttgtgcttatttcgatgtagagaatgcaatagacccttttcttgtagagtcaatgggtgtagacacacaaagtcttcttatttcacatcccaattctgctgaaaatttacttagtgcagttgacactcttacgaaaagtggagccgtagatgtcattgtggtcgatagtgtgagtgatttgttcttatcaatattttaacttgcttttcggtacctgaaaaagtttacagctaatgaaatatacattttagctaagaacttgtgcatgtaccgatatgtgatcaattaaaatctctgataaattttcctgtttttagtttgagtgcttagaatcaaagctctagactctttctttcactagctcaatcaatagtaattttccagttgaggagatgttaattgattcaacttgcatgttcatatttttcaggtagcagcccttgtaccccaatgcgaaatcaatgtttcacttggtagtgtgagaaaagatgaacaatcacgaataat

SEQ ID NO: 248230 - DNA, 1267 bp, Cannabis indica
ctttcactagctcaatcaatagtgattttcctgttgaggagatgttaattgattcaagttgcttgttcatatttttcaggtagcagcccttgtaccccaatgtgaaatcaatgtttcacttggtggtgtgaggaaagatgaacaatcacgaataatgacccaagcccttcgaaaaatacattattcattatgcaattctcaaactcttattgttcttgttaatcaggttgaaattaagctacaaagaactttgtttcttcttgagtatgttgtgtctcaatgaaatttactatcttatggtttcttcactgtccaggttcgatttggttcaaaatcaagcgacggttctgaatctatagacgaatacacttgtggtgggaatgccttgaaattctatgcggctattcggttgagactaaaaaagactggacttcttgagaatgaaaataaggtaagcatgcatattctttttagtatgtgtttttactgttaatataatcataatttagaccgagaccgcaacgacctttgtttcatgcttgcaaacttataattcaggagtttctatctagtacagagtacctgagcatttaatgttgcttcaaggccttttcgtttgattgtgatttttgatgaaaatgttactttgctgtaacttggagaactgttaaagctctttacacgagtttgatttttgcatgggaactgttgttagtgaagatatattttcagtgaatgtgcttatacaaaactttcgttgatcttcttattttaccgcttcgttgttcactaattgttttgtgtttataaatatatgtttcaaggaggttactggtctggggatcagtgttcaagtggtgaaaaataaacttgcgccggcaatgaaaaaagctgaattgggattgcagttcggaaaaggctttcggtgcgaatctgaggtgttggaattggcttgtaatcatggagttattgtgaaagaaggaaatagttacctgatagaaggggaagtttttagtaacaaacatgcagctgagaaacatcttgctgaaaatgaaatgatttatgacaatttagtgagtattttaagaaaattgctgttcgagaccagaagagagcgtcggtgagccttggatgaccgagcttcaagctcgattttgaattcatttcagcacggaaggacacaagctgcattcagttttataatgtccaaatctataaatcgacatagagctgattgtgtaaccgacgaagctgtctgattggtgtg

SEQ ID NO: 248231 - DNA, 1614 bp, Cannabis indica
agtaaatatattctcatttttgactgttctgtgactgttaattaattttgtcaccattaattaagccaaaagaaaattagaaaaacaaaaagatattatccatttgtgctaaaattaaacaccgtgatctttccccctctgtgtctatatatatgctattttttttttctcttttttctgtgtatatatattgtataaggatttggttggtgtggttattatttatcaaataaatgaatgatataatcacatcacataataataaaaatatataaaaaaaaaagttagactctttaatcatcttttttcgtacgtacgtgaggtgagctttaacagatgatacacacagatatatatttatataaatatatacagtactactccagttattaagggtcatgtctgaaagtgaaaaatcttccgtagaaaatttgagagtgaccatgcattgcactactagtacagttatataaacggtgtgctattaatcttaacccaaaattagaataattttttaagtttttttttttatattggctatagatataatattatcttaataaatttttgaaaatttctgatgaaaagtgtaccgaaaataaaatttttaatattttaatttaccttacttgtgtttaaaaaaatttaaatttattttcgacactacaaattataaaaaaaaattaaaaatttaaaagtttgatattataattatattgaagaatattgccataaaaaataaattttaatatgtattttcaaatataaaaattaattaagaaattataataaaaagttaatattgacacactatcactcctaattatataaatatatataatgaaataatcgaaatccaactaaacattaaacattgaaggaaaaaatattaaccaaaaaattaaggaattaggtgattgtatttttatatatagggtagtactggtactactaccactccctactttcatagcttcataaatccaggtgtcggactctgctgagaatcttgagctacgtgtcatggtctcatggggcgtagagttttcttatatgatatatatatatatattggttaattatatgtaattgattttagaacctagtatatgtttttgtgtgtattaaggttggtagtgcacacgggccggggaggggaaatctctaatgttatatgtttaattgaaagtgctgcaatatcaaagatatttgaacaaaagaaaatagtcaaattaattatatatataattaagttgatatttgttaagatttccacttacttattacatctatatacggtcattatgttaaataatattataatttatcttccaactatttataagtttaagactttaatcacgtttgcttttggcaccatcaattattgcatggataagggttcgttacatctacattttcaagctagctcgttaggtttttacactcatttgattaattaaggtatatcaacgaaaggaaatatataattacggacacgattttgtcccgtaatgtacttttacggaatgtattctgtggtacattaaatgggtctcagggtacattaaatgagtgtcagagtacgtttttactttttaaccctaattaccc

SEQ ID NO: 248232 - DNA, 843 bp, Cannabis indica
cttttatcctgcaattaaaaggggaaaaataataattacgaaattaaatatcaaagacaaactattttgaataaggactaataagccaaaacccgtattccattgattattattttttgaagaaaaaaaagagagcctgttgattaaatgcttagcgataggaactttttgggtattggcttcttgattttgtggaattgctggtaacaacacagcttctaatcatgagggaaagctcaattttaggggtgctctttcacaaagtggcattgtgcatttgtttttgtttgaaaaatcgcaatattattggagaagaaaagtctgggccagagaaatctcgattggcaaatagcgactgaaaacctaaatcgttcttgcaaggaaagctcgttctttgactgaaaaccaaagccattctcaaatagctcgccgacaaccaaaacctcgaccccacagatgtcgtcgccctctcaggcggccacaccatcagaatttcccaatgcggatccttcgacaaccgtctctacccccaagaccgaatcatggaccaaactttcactaagaatctcaaatccatatgcccaaccaaagacttcgacgccttcaccttccaagatcttcgaacacctaacatcttcgacaatacatactacatcgatctcatgaatcgtcagggaattttcacctccgatcaaaatcttcaaaattctgcgattggaaactctgatgtagggagtgttgaaagggtatatcaattgatgtggaatgggtaaaagttgtttgggattgagattgggatttagagtgagattctggctagctttagggccatttgaaaagaat

SEQ ID NO: 248233 - DNA, 1550 bp, Cannabis indica
ttacaattgttgatgaaacgtgggcattccccatgtttcacttatttgcacatggaataatatctaataactactcaactgctccttctctttatcctttaaacggttatgctgactaagaaagtcgcatctcatcaaatatgagttatccttcttatccgtcttaatagaaaaaaaaaattctaagtgtagatatgcttcatcttgcagtactcttctatttgtagtgatgatgcgagatgaccactacgtcgtgtagaacgcgagacggttgagtgttagttatttaccctgcttgtatacgtgagtcatcgattcataagaccttgaatatcttgtcttatacatttttaatactctgtttcatctagagctgaacatattgtctcatttactaaatgagttagtagttattattcttatctcgaatctacctatgtagttagcgagtttgaatatttctatcaacttcacttcattggaatgagttatttaaattgtatttaatgatggactatcattattatactccttgagttgattcatattccttctgtaggatacatgtcaatttctggtgcatagccaaatttcgggtataataattgtcccttaaaaagtacttttaaaatgatcctaagggtatatcgcatgtaacccttttgaaaaattgcatgctttgagttttggcggttcagaactttgaggcacatccttgagcatttaatgccctgactgttcctatttttcaaagttcccatccgttagatcagattttctttgatcaaatggtgatcacttatcaggtataaattcgttagatcagatttttgttcttcaatccttcgagcatttttccaaaaaattttgactttcttctttccaaatttgtatgtactcattgtcccttacatttttcgtacgtattacatctgatcacatttccagttctaggaaacatcacgatccagcttctcaaccttcgagagttcacttgcaaagttctcttttgcctagaaattcacaacaagacagtaagtggcacactctcttttcttagtgattttttcttctgtttggataattttaattctgtttgtctggataactctagggctagaagattttaattatacgattcgtaaatttttggatttcatttctgctatgttattccgaaaattgggatattattagttttaactatgtcccaatttgtctcaaaaatcacaatcccagaatccttagaatcagtttgtcctcaaatttatgccataaaatttagaccttaaattcatatacccaaaattattcttgaggcagatgatgagaaaattagggatcacctcatgaaaactagcaaagattaaacttctattcgtttttggcagttttcgcaagagataattgagggtaagcatcactatttgcgagaagcagcttggcttgagccttctaaattaattgatattcccttagcaagaccactattttttgttggatatattttaccacgatctagatttacaaacaagtatgtttcattaaca

SEQ ID NO: 248234 - DNA, 679 bp, Cannabis indica
gagcttgttggtaaacctctccccgaggaggggttatagctgcttgctatccgagaatgaccagctaaccttggtctaccctttgtcttggataaatgattggaattctcacccactcatggagacgcccattcttgatgagattcttaatcccgtctttcaaattatcacattcatctgtcgtgtgctcgacatcaccatggtactcgcacctcttactaggatcccttttatatttttacccttgtacatcgatggtggccttttgtaacgagctgtattgcacagagccatgtggacattctctcaagggtctataaaattagtatactagtatactgggcttcatatcctttctttactttcttcagagactcactccatctctgactctttccattccacttatttagggactgacttacttttgcctctgaaacttctgtttgttggttcaactgcgtttgtccgagagcagcattgtattcggtctgttatgctctgaaaccacaaaaatttgtttatggaagtgaatactctgatttagtgggtctgtaaataattggagttatgtattgggttctaggagggacaatagacggaatcgacagttgtggtgtatgttggattatgttttaccaggatctagatttactaacaagtatgtttcattaacatc

SEQ ID NO: 248235 - DNA, 5919 bp, Cannabis indica
ttgctttcttgcttcactttcacttctacaggtcagtgccccccaatatccagatccttcttctctttacgctcctcatatacttggttttcttgactggttttttcctttcccacttctgggtattgcttaagttctccagattccttctgggattcaagtaaaaagtcgttattttcttataatcattgcctggtgtacaagacttttcgagtctttggaaaccggtggtttaatttccgagtataggtagagttcattgaataattgagttgtgaaactttggattcggttatttcccatggttcatggaattgaattttgtttgttattaatttatttttatctttttcgggaaacgtttgaaatcaatgattactagagagttaagttgaatcaaaatggattgatttaccttcgtctattattggaatagagttattggtttcagaatatagtagaagcctactttggttcttatgccaagttgtagtacgacatatacagatctagtaaaagcagagtataatctgttgcgtgttgattggttttactacttttgctaaataattattatgattttgtactgttttacatattgttgatttgtgttgagtcttgagatcgacgtttctgactcaatatttccttgttggattttggattaatttatttattttgcagatgcgtatgatgctcttgatccaaatgggaacatcacactcaaatgggatattatgagttggactccagatggctatgttgtaagttatagtaaacaaaagcttttgaaagataaagctaaacatgaaagattttggtatctggcaatggattagtgctattacattgtattagacgttttggcctccctatgcactgaaaatttataaaatggaagaatcaatttgaatgtacatatatacttttgcttgtggattaacaaattagtgggtgttccaagatttctgttgcagtaaactagttattgaagaattcaatcctacataatgggtgaactattcaaccaagaggggtagctcaaatggttagacctgtggtttgctcccacaaggtctgaggttcgagtccctcctgggtacttacatagcaattgctataagtttctggttcccaaattttgtagggttaggcgggggtcctagtttcaaaataatctttgaactgttccattaaattcatatttttttctagcataatttgataatacctttcgtgcgagtttctaatgtgacataaaataattgaattgggcaggccgttgttacaatgtttaacttccagcaatatcgccatatacaagctccaggttggtcattaggttggacatgggcgaaaaaggaagtaatctggagcatgatgggagcgcagacaactgatcaaggagactgttcaagattcaaaggaaatgttccacattgctgtagaaaggacccattagttgtggatttgttgccaggaactccttacaaccaacagattgcaaattgctgcaaaggtggagtacttaactcttgggcccaagatccgggtgcagctagttcattccaggtcagtgttggtgctgcagggacaactaacaaaactgtcaaattgccgaagaacttcacattgagagcaccagggccgggatatacttgtgggcctgctaagattgtaagaccaactaagtttgtcacttcagataaaaggagagtcacccaagctctgagtaagttccaaatcattccccaaaattgttttataaactctaaacagcaatctagctaaaagtacatgacctatttatcattctgattaaagctattcgtgggggtacatcatatgcacatttatcatatgtggcatacattaactccatatactaatatgtaaaaaatctttgcttagaggaaagctgttttgttatttaatcattataacctttatgtttaattcttctttaactctacatcaaataggccaaaatttgaacagaaatagcacaattgtgtatttttttcaaaaatgtgtgtgaaacttttttattgtttcttaagctatgaatcttttgtggcagtgacttggaatgttacttgcacgtactcacaatttctggctcaaaagacacctacatgttgtgtttccctctcttccttctacaatgacactatagtaaactgtccaacttgcacctgtggctgtcagaacaataggaccgatcctggcagctgtgtagagtaagttttctaatctatcttttggatatcttttattctactgttttacaatagttacactcatttaaaaaatatcattatgtttatacttttatttttattgatattgattgcagcccaaactctccttacttggcttcagctgtatcaaatccaggcaaaggcaacaacctcaatacacctcttgtccagtgtactagccatatgtgtccaattcgagtccattggcatgttaagatcaattacaaggagtattggagggtgaaagtctcaataacaaatttcaattacagaatgaactactcgctttggaatcttgttgtccaacaccctaacttcgacaatttgaccacaagtttcagctttaattacaaatctttgactccatatgcaggattaagtaagttcaatttgtgccgacaataatcatattttgctaatgtgtttaacataactctttattgtcttgttttgagtcgtaggtctaccatattttgagaagaattctgatttcatttgcaattattttgcagatgatactgccatgttatatggagtcaagttttacaatgattttcttagtcaagctggtccccttggtaatgttcaatcagagcttctcttcagaaaagattcatcaacatttacttttgaaaaaggatgggctttcccacgaagaatctatttcaatggtgataattgtgtcatgccacctccagattcctacccatggttgccaaatagcagtcacaagccaatgccatctctctttcatctagccatgactgtgatagcatcttttgtattcttagttacttattcttaaatgagttaaaacttgcagaagcatcaaaagaaagaagcattttctggacgttctaatctgtgaactccatctggttaacaaagcttgtcattccagatgttctgaagaaatttactagtgctgcagcttcatattaaacaagtaatcaggtgcactatggtttgtcactacaaaattcagctttgtaatttgttgtgtatgaagatttaacttttactgcatttttttttctttctagatttagttcttgcttcttttttttttttttaaaatttatacaatttttgaatctgtagaatatccacagtgaatttgttcttcttagtattgtaagagatttcacgaagtcagttgttgaactattgtgttaagacttttatactagcacttgttttctctgtctcttctcttctctttcaatacttaaataagtataataaggtatagaaaatggctgaacttgagaaaaatttgcaggcaacagatattctcataccgatgatgacattgttgaatgtcgacagatcaatatgaattcagattaaatgtagtactagttattgcatcagatcaatatgaattcagataaattgtagtactagttattgtattttctacagctaattaattgaagcatcccaaagtagattgtgcttctactgctagtataatacgatgcataataacctctcatatcttgtcactggtagataaaaacgttgttctgtttctgggaaaaattgatcaccatatccaccgaagtatcaaaagtgcagaagctgcaactttcaaaattccaaaagaatataaacatgcagagtttggtagaaatgggtattgatcaggtgggggtagcatgcattcctccccgttgaagtaaactcgccggggaaatccccatccctgcttgagtgtgaattcagacttgtctttctgcaggagcatctcagattgaacatttccataaggtccagcttccattaagtagtcattaaagaacttcatcccgtaaaacatcccagtgtcgtctgcacataccattaaaatgttactgttagtagtctaaatggtgactttccccccaattcatgtatatgggttgctttttttcttcattattatcagtataaattattcatattaggatgcatattctgtctcttatgttaggcactcactgatagcttgataaggaagaagagacttgtagttaaagctaaacacttgggttacattgttgagatttggatgctgaacaactagtgtccactgactgtagttccttctgaagttgaaatttgttattgcaatcttcaccctccaatatgactcgtagttcagcttcagatgccaatgcaccctaacagggcacatatgttttgtgcattgtaacaatggggtattgtctttccttggtgtgttgattcctggcttctgtaatagtgttgagttgctcctgttcaaacaagctagttagtctacgaaccgaattgcatcaaatctaggttcacgtattaacattaggaccacaaaaatcatatgatagggccaaccaattatctatggaaataaatgtaggaatgtcaattatgatcacatgtaatgtttctgttggatccctcaatttgtgttcacttgctagaataatgtcatgccattcatgattactcaaatttgttgtataaataggtgcctggataaaataagtagggggttacatgatgcaagtgttgttgctctggcaaccacaggcacaagcggggcaaggaacaatttttgtgctgtagaaagatgagaaagaaacacaacagcttgggttctttgaagcaagaaactttgagtaggtgcaagtcacattccaagtcactgcaaacaaaagcaaacatggaaatgagcactactactaagttcacatcaataacatgttacattgtgagagtatcacgggatctattcgagataaacagtatgcatttattaggtgaatgacacaaggagaaagagttagattcttactaagagcttgagctttccgccttccatcagccgagaggaagtgtgaggacggcacaaacttagcagggccacaagtgtaacctggtccaggaccaagcaaggtgaaatttttcggcagctttactgtcttattggacctgccagagagcccaactgagatctgaaatgctgccactgcagccgttgggtcctgcccccaggaggccaacacaccacccttgcagcagttggtgaattgttggttgaaaggagcatcagggagcaaatcaactactgaggggtttctcttgcagctgtgtggaatggctattttgaatttggaacagtctccctgctctgtggcctgagctcccaacatagaccaaattatttccttctttgcccatgtccaacccagagtccagccggggctcatgaagtgccgaaacagttgaagattgtttatagttacggaagccttgtgtcatttagttaaaaaaaagaaaagattttataataattatttgatgcttccccatatctagaaaaattgactcttgagttaagtagtaataagctaaaacgttaatatcttaccacataaccatctgttgtccaagacatgacatcccatcttattgaaacatttccatttggatctaacggatcatatgcggctgaaattatgtagtaaaaacaaaattagaattcaaataataagaacatgaaaatcaaacaattgcgtacaatattatatagaaatattattcgacagtgattgttttgagaggctcgctttccaagtaacagtgtacaatatagttttttgagattttatacatatttttcaaaattttt

SEQ ID NO: 248236 - DNA, 775 bp, Cannabis indica
gaactcatggactggcttagaaaatttcttccctaactttaaattataagaactggatgattaattaaaattcctacagaaacttagttatgcaaaacaatcaaattaacaattttcacacaaaaaataatatgagtaaatacatcacagtaaatacattaataaatataaattaatatgagtaaaaaaatacctgatattcaaatggagagtacgacacaaataatctaaaccgacattaaatggcagcaacctacaagaagaacgacattgtaaataaaaaatgacaatgaccatacaaacgctccacatccaattctattcaaaatgtatatttatttaatacaacaaataaattccaattcaaattgcagagacttctcaaacaccaaagaaataaaaaagccaataggacttaggaaatagtaaaacatctaaagaacatcattgattgcattaagaaaaaatagaaaatagtaatgtagtacacagtaataaaatagaaaataataatttgaaatgttagtatagacagacaaggatatataccaagttttggtcttcaaataagagctttgctgaggaagaaggatggccaattgtgtaacattaggattgcagactttactgagaaataacagaagtttacttgtgtcaactgatagaggcaaaaataaataagaatgcgtataaaagcttgtacgcataaaactgcttcctaaattcatggtgatatttataggcctaactaaaaatatctagctgcttcaaaaaa

SEQ ID NO: 248237 - DNA, 525 bp, Cannabis indica
atcaatcaaagagagataccagttatgtgtgatagtcaaagtgctctccatctcagcagaaaccaagtgttccatgagagaacaaagcatattgatgtgaggatgcactttattcgagatgtaatctcaggaggaaaaatcaaactactcaaggtttcaactgatgacaatgcagctgatgtactcactaaatcactgcctactgctaagttctcaaagtgcctgcaaatactgaatgtttccagcaccaataataactaagtgtctaaggattctttcctgaatatattacaggtcaaggtggagaattgttgtaatttgtgtgtcctgtaatatagttagttaagttggttaatgtcataactgtcttgacagttatgacagttggttacagttagccttttgtccacttaggactattataaataccatgtacaggttgtaattcaggttaagttttttagagcatagacttgtatgattctaatagttcaatagcaataaagatcaattcattctactctc

SEQ ID NO: 248238 - DNA, 732 bp, Cannabis indica
acaataaggattttctttttctcacagataagagtattttaattttagcatttaaaaaatattttatgcaatatatattataattatttaaaacacctaaataatttaaaagtgtgaaaaactactcacatatgaaatattcaaaccaaggtattatatgcatgttttgactacattataaattattttagaaaattatgtaatactaaaataatacaatgtacatagtcatataaatcttgtcgaaaatacaaaataagctctcatgaagtttgttttatatgtgtgtcaaataaaatattttaaaatttattttttatattctgtgtgacagtcagtagtctcgtgatctataaggagaaatactgggtaagttgtgcaatcctacattgcttggaaaaggtcaagtggaatgattctaagactgtgtaggtatataattacacaattgaagagggcttaaatagattgattgataccacatatatcaacaaggtgcatcttattttctagtagcccatcacgaacgaactccacagttaagcatgcttgatctagggtaattccatgtgacctactgggaagtattcccaggagtgtgtgagtgaggacaaagcacactggaaacactcgtgttggtttgtaggattagtcatcagtttaggaagcacccagagtgacatactcgtgtataagagcgagccatcattttgtgggtgtaaggacccaatg

SEQ ID NO: 248239 - DNA, 505 bp, Cannabis indica
agctttcactgtctactacctacttagtaccaaccacttgcatttttccagtgttaatattttctttttttttagaattcacacaacaaagatctgtttctttgttgactttaattaatagcatcattaacaacattcatacaaacatatatccacaacacacacaccctgcattaacaaggtatattcttaatattgtgtttgcataagttgttgaagttatttaaacataacacttctgcactttctttctatatatattgatctggtttcaacttgatcattctgtggttctgtttttatcagtctaagacaagttatttgaacataacacttctgcactttctttctatatatattgaatctttctatatttctgttttggctattgaaattcatgttcttgttcttactcagattgaagttattccctttctctggtatgatgtttttaggcattatgatcacttgaagcagagaaaataaatggttcatatcatcataa

SEQ ID NO: 248240 - DNA, 822 bp, Cannabis indica
tttttttaaaaaaaaatttctatttagatcgttggatttgttcgtttcctattgaaattcgacgggatttacagttgttttacgttcgatctggtttcattctagttgcgtagtcgactgcatcgatggagcttcattcatcctctccgtttgtgacgtgcggctgaaggtaagggcaagtggtatttttgtaatattttcattttgggctgtacaaatgttcattggcccggcccacagtattgttgtaatatttttccctttttagaatattcctatttttttcccttttatttatagcattaagtgaacttatgatttttaataaaatgaaatgggttactctctagttttatacaatatttgtggtatagtttatccgaataaaaaaatttccaaaagttgttttagttatgaaaagttaaatgtcatccagaagggtgttctcagaagtctaacttgtccacccgaaaggagtctcatagaaagatagatgtcatccaaaaaggaattcccagaagtctatcttgtccactctagaagattcttcaggaaagctagtcttcctccgtaaatgagttccgaatggctagctgttccctcttggaagggagttccggataatcgactctagttgttgcttttcctatccagaaagtcccttcagcgtaagctttggtctttcttctcggaagcgcaagtctcatccagaagcactttaacttaagctaacgtggagatattgttacgaggagtttgttatgtttcttaaatcgtaactaacttaatagctttaaattcgcaaccaccgactttgagatc

SEQ ID NO: 248241 - DNA, 1539 bp, Cannabis indica
tttttttttttttttttttttgagaataaacaatgttattataaattaaacagagtcatttacaataacagagtaaaaggaaggaggaaaattctctaaccaagagcaaatctcatccaaccctaaggcaaattttgccaaactatctgcagctgaattagcattacgcttaacatgagttacaaaagtgttaaggaaaaaggaaaggaggtaagtaatatctctaattaaatcactaaaagctgaaatgcctgatgtcggagtcttcaaagcattggaaagcaagagggcatcagtttcaacaaaggtaactgatagctgctgctgaagaacccaattaaggccgtgaaacatagccttagcttccatctagtgggaggcgcagttaccaattagaggcatagagatagcaaccacaacttgtcccactgaatttcgtacaacagcacctacaccaattttattacaatgtttatccaaggcagcatcgatgttcaatttcagagatcccattggaggcggctgccaaggtgcatgagcagcagaagaagatggtggcatttgaagtgaaattgcaggctgtcgatatttgagctgagccgcacgatagttatccaggtactgagtggagaaaacagcaagaacagatggcaacctcgactttttaccatgtagaacttgattacgctcataccatagacaccataaagtgcaaatgatgtgctcaaagtcagctttggagtgaatcgaagctaaatatctcagataatctcctttgtacatggcagttgcttctccaatcaaaggaataatgtgttaaacgccaaacatctcgtgcataatgacagccaaaaaagacatgtcctattgattcccaagcttggcgacaaaccgagcaagtggcgtcagttataactttccttttaactagagaagtagctaccggcaaggcatcatggataacacgccaagcaaagatttttacctttttgggcagttgtaaggaccagaaggatttccaccaaatagaatcagaattggagcttgaggaatgagtttgttcagctaaggaggaagccaaatgttaacccgactggactgtgtaaatgccattgttggtatggtgccaaatcaaacagtcgttgctagggaaatagctaagcggaatggtaagaatgcgctcaacatcagctggaatgaagaattgatttaagagagcaacattccattgtcgatcatcggtaatgagattagctaccacagcattatcaggatccttataaagaaaaggcaagaaataattattcccagggatccaagggtctgttccacattgaatgtgccttccttctcctactttccaccttaatccttgtaaaagtaactctctaccatagagaatcccctgccaagacaatgagggagaatgaccatgtgaggcttcttgaaaggagtttaaaggaaaatatcggctcttaagcaatcggctcaatatcgacgaagggtgatcaattagtctccaagcttgtttagctagga

SEQ ID NO: 248242 - DNA, 735 bp, Cannabis indica
ttaagattttgcttttactcctacttttgttttctacatctgccagactgccttccccaactacctttgactttagagttagaagagaggataactttctacaaatccttcttgtcaaaagagatgcaagtggagaagcttgtaaccactaagaacctctaggaagtaggtcttatcgccccacactaggacatggctcaccttttcgtgaaggacactgtctaggatgctcttcgaggggatctggacgaggttaaagaggctatcgcagttattactgctaaagaggctctgaaggcaatgaaagctgatgagtagtggctggcagattggaggagacaattcccagaaagcctaagcgaggccaaagaactcactattaaattcaaggaggtagtgtagaatgggggtgctccgagaatgagcacctctagtagtggtgagacacccttccatataattagggctccaactctaactgatttcaagactgtcagtcaatgttgatttgatccatatttcttaaatttagaccatcgtggatatccattcagtaagtatatagataaattagagtgcatcattaggagtcccaaccacttcgttccacctgtgcaccatcatgtcagagtggacgcatttagtaaaatttactttctaggcttcttccaagacgagactaacttatgttgagaagacattgcctttttgatagggggaaagtcaattatacta

SEQ ID NO: 248243 - DNA, 1184 bp, Cannabis indica
ccattttacatcttggccctttagtttacttacgtattatttaaaaaaaaaaaaggattatttcacaaaaacataaaaataacaaaaaaaattacagaaatacggtttcccggaattttaaacatttttacaatttttttgattttatttacagaaaatacggtctttttatgttgtaatcttgttaatttgttgttgagtttttgttacatgtatgttattttttgctgttattttgatgttacttttatgtagttttcttgttgattttatgttattttcgtgttagtttttgaaaaaccgtaaaaatgtaaaaaaaaaatgttctttgaacgtaaaaatgtaaatattttataaaaaatagtgcattacgtaattattccaacaaaaaaaatacatgaaaataaaaaataaaaaataaaaataacaacaaaataacattaaaacaacataaaaaataatatataaataacaaaataataagaatacaacataaaaatacaataaaagatcgtattttatgtaaatgaaatctaaaaaactgtaaaactattaaaaactttgtacagacggtatctttgtaatttttttttttttgtatttttttttaaaccctttacaaaacatcatgacattatttacctttcctaatggggaatttcatgcttaaaaaataccttatgttaaaatttagaccattaactaatgtataccaaatagttcctttgattaccttttatttctttttttactccttgtttaattaaaaaaatagtcaaaatctagaagaaaaaaaaagtaaataccattttggaccctctgttttacaaaagttaccaattggaccctgtgttttgttaaatgacaaaatggaccctgaattgattttttgtcaaaataaagtttaattataatccgatctaaaagtgctatgacaaaactgtttatattttttgtatctgttcgtattaagcattgtcttcatcaagttggttgtattaaaaaataagttgtcaaaaattaagctcagggtcctacttttactattttagaaaatacagggtctattttgtcatttaacaaaacacagggtccaatctgtaacttttgcaaaacacagggtccaaaatgatatttaccaaaaaaaaaaatacactcactccctctaccactctcgctctctt

SEQ ID NO: 248244 - DNA, 645 bp, Cannabis indica
attggagttactttattaataccaacttactaaatcgcacaccctctactttacttaaccttaaattttcttttgagttgttgtataacaggttgccctcttatgattatcttcgcacttttggttgccttgcatatgcttctattttggacagctcaagtcataaattttccccaagatctcgcgcttgtgcattcattggatacccagttggtatgaaagcttatactgtacttgatcttgaaacacatagaatatttcactctagagatgtcatttcttatgaacatatttttcctcttcaaaatacatgttctaatgataatattgatgagtttttttccaaccctaatggttcacctagtggtctttcacaggctcctttaaaggctgcagcccctgggcctataaaccctccaccgccgctcgaacatgtggccactcctgccactattcctgctgaattaccacaaccaccagtggctattccagcccctaccaagtgactccaacatcaccacaacgtctggtcggacggtcattcgtccatcccatctctaaaactacatttgtgagtattctactcacatccacttcctaacttactatctcctactgacaaactttacttcctaacgtttacgt

SEQ ID NO: 248245 - DNA, 973 bp, Cannabis indica
gcttagaagtctagtccagatttctgaataaacatctatggacacttcagtaaaactcagtaaatattattctataattactaacatttcgattccatatttatagtggagtactcatggaactaataaacaagattatttgattaatgagattcaatcaataatttaatttattggagctaagaattataggcccatggtcccctaatcaccattgtgaaacactgtcaagggtaggaatagaagttgtatatttaattatttgaataaataatttatttttcaaatttattaattaaataaataggtggaaagacaaaagttgtgtggacaaagacaccaccaatgtcttgttgaggcatagagggtgccactatcactgtgtccgaacacagtgataggcgcctatgatatagggttgtccccactagatttgttgttggattaattagttaattaattaatttaaaagataaatattatttaaattagaatttgaaaagtagttatagatatttctatttgttgaaatattttctcaaggtagttaatatattccctcaatttgctataggaaataaatatatatcacagaattcaattatattatttattcaaataattaaatatgatttaataaatgattttaatttaaaaaattaactaaataaatcgtttattggttttaatttaaatataccatattaactaaaaactaattttcaacagcttaccaagttgacagggctcacatttaccaacactttctcttcccaatttgggtagaccacgaacaacgcctgcattggacaaccttttcaaatttttatattaatatttccatgttttgcatgccacaaatcagtggtgttataaatagcagaatgacaagtgaaaacatgagtcagggtataaaaattatcatgtgaaatagcagaatgaaaaccttctaaaatacattgactaaccctcg

SEQ ID NO: 248246 - DNA, 1126 bp, Cannabis indica
tttaatgaaagggaagctgatgttattttgggaattcctttagctattggtgatgctagtgattcttggtattggttgaaggagaaacttggatgctattcggttaaatcagcttatcaattgctcattaaccgtgactctagtgttgaagggagggatgggggttcaaagttttggaaggatttgtggaacttgagagtgccgcctactgttaaagatgttctttggagggcagcggccaattatctcccaactaggaagagactttttgagaggaaggtgcctttggattacatctgtcctttttgtttagtttccagcaaaaccatctcccattgtctaattaactgtgactttgctgctgcgtgttgggcgaagcttgctgtgagtgatgggggtcgggtttgggattcgtttagggactggttgcaggatttaatggacaaagctgatgatgttaaagttgctcaggctgatactttgtgttgggcaatatggaaggctccgaacgaattggtttgggatcagaaaagtcggagtgttgatgacgttgttcagtttgcattaagatctcttgatcaatggagaaaagctcaaatgggtgagaactacccttcgttgaatctgttatttctcaataaaggggatgagctttggactaaacctgttactaatgggatcaaacttaatgtggacgctgcaatttttgacagcaacagccgatatgggattggtttcgtggtgagggactgcaaggcggagcttttggtggctgtggggttgtctcggccgggaaaacctgctccaactgatgctgaagctatgagtataagggaggctttgagttggttgaaggacaagtcgtaccaacatgtttgtgtggagagtgatagcttagttactgtgcaagctatcaatagtctggttgagatgttttcggcgtttggtttaattgtgaaagattgtaagtctttgttagactctatgaataatgtttcgttaaggtttgttaaacgttctgctaatcgagctgcacatgttgttgcacgtcagtctcggttgtttgctgatcgtatgttcacaaaggatgatgttccttcggaacttaaagttgtacttttgagcg

SEQ ID NO: 248247 - DNA, 503 bp, Cannabis indica
taaaaaaaaaaactagcataaatatattaaacaataataataaaacttcatggtcattacataagatattatttagtatagatgaataatcaaccataccaattacattattagcgaatacacatttagtcacattatgagccgcaaaattatacagtcttgaaataaacgaaaaattacagctaataaataaattagggagttgtttacattgaaatacatatttaccaataccccaaatagaacatactcccttcaacgcattgataaccgtcttataatcactctcgaccaacataaaagaatgcttccagtagaccgttgattccatagctaatagacaggctgcgacttctccaataagggggtcagagaagttgagcatgctggtagctacccagaaaactgacttctttgggtccctagccaaagccaccacacacattgaatcacaaccaactttaacatcatagttgattttgagccaatcttccaggcggaga

SEQ ID NO: 248248 - DNA, 1794 bp, Cannabis indica
taatgtccattttataaaaatagagtccacaataaatataatcatatacaataacacaatagtaataattaatgttaatttccttactaatctataatataatcatgcagtcattacagaagcagagcataaacaacatctctaaatggttctacaatgactcagagatcataagttgtaagcaaagtttaagaagtgtgaattctggttatgacaagtatcctcctagggcatatcgtcaaaaaagaaggaattatggtcaattcagggaaagttaaattagttaaaaattggctgaggccaaggacaattactgaagctcaaagttttcttagaccggtagtgtaatactgatgttttgtggaggtattttctaagatttcaatgccaatgaaagaattgactaagaaaaactaacagttcgtatggtctgataaatgtgaaacaaatttctaagagttgaagcagcgattgattacgacaccagtgttattttgccatcagattaagaaaagtttgtggtatattgtgatgcatccagacagaatttggggtgcattcttatgcaacctgatagtttcattgctcatgattttttccagttgaaggagtatgatacctaacacttgattttgaacttgctgctgttatgtttgctttaaaaatttggcaacattatctgtatggagaaaaatatgagatctatattgaccacaagagtctcaagtacttctttacgcaaaaagatttaaatatgagacagaggtagtggttagaactagtcaaggattatgagtagatgattttgtatccccccagaaaagccaatgtagtggcagatgctttgagaagaaaaggtctcgggcatgtttgtagtaccataatgatctctcctcagttagctttagatatggttagggctggtattaaatttgcgtttggaaaacttcataacctaacactccagtcagacttattagacagaattagaggggtacaattagaagattctgagttagtcaaggtttgagaggaagtactagctggttaggctatagacttctcaattttgagcaacggaatgttactttaaaaaatggggcccacaacatatataatcataaaataaaaataatttatgctaattgtgctactaacccatattctactcatgcggttattacagctggaattgaggcatttttttatgataaacattcgcctcgtcaacatcgttggcatggattagccatcatcacaatatcctaatcatcacacgttttcctaatgcgtgtagagttcataaagctaaaaggtaatgcctcatgtacaaagttagttataatccaaaagtcccccaccctccacatttggaaatatagaaggcgaaagatctcttccattttaagattatccatgtgtccatggtaatctagaaagaagattgcaagctttcgccactattgagtcctcgaagcttgaagtgtaaatgttattcgtattttcaaaagggtaacacatggcgtctccaaaggaggattaatccaaaatgacttagactacaacctttccataaggggaggcctcgtccaggctaaagatgtgctcgagcccatccaaaacctagaaggctcacctctgagacgaggcttgcccggaccttaaaaggcctctagccttcttgagatggaataaatgaagccttctggatgaacattgggtcgcatccagagagggtactccaaaaggctccttgaaagcctagtatagggtgacgtggttgccctttaacac

SEQ ID NO: 248249 - DNA, 528 bp, Cannabis indica
atatcccatacacagcttcatcacttggctttcagttcaaaactgattgaagaccaaaggtagattgcacaagctccatatagcagctgatgccacttgcagcttatgctctcaccatgaagaatcggtaaggcattattaggattgttaatccttctgttcatgcttgaaaatcatagcagtagcaaagtgagagaaaggaagaaagatcagagaaagagagagaaagagagagaaagaaggaaatagatctgtttgtattattgccttaatgaacttagtacaagaacagagtcaatttatatagagtacatatcagaacagattgaattgaaagcaaacataatctaactgaaaataacaacctctgaacagtaataactaactgctaacagactctgacaacagatcccttaatacctccccgcaaactcagaattggtaggactatcaattgtgagtttggatcgaaaaccaggaaagctttgactagaaactggtttagtaaggccatcagcaagttgatcc

SEQ ID NO: 248250 - DNA, 2177 bp, Cannabis indica
aagtctgcaaattcattgaaagtaaaacttaagcactattcatagacacactccactaaagcacacacataaggacaaaaaatcagatgaagtacaccacaattatcagaattacaacactaagttcgataaatccaaaaattgttattaagacagagcaaaactgtaacaagatataaggtaggtaaaatgggtaatacttcattctggattatgctgaagacatagcatacactagctattttcttactgattaatcaaggcaaaacgtaaacatgttatggtctatttcatgatgacaaacataagccaaacttagtgttctcttattcaatctgtacctgcaaaacatcaactgtcctttcaagttcagcaatatactggagctttcgaatccttgaacgctgcccagggtgcctacaatcaagccaataagctggtaatccactaatgtctatagatagctacagagtacaataaacacaagcaaaaataacattaacaaatgagcttagatccgaaccgtttcgctgtttttgcatccacattgagtgaaccatctgtgttcatgtcaaacagattagaactgctcctagcaccaggaacgcaaacaccactatctatatactcccgagaatcatgagaaacatattcagacaatgctgacactatggcattctctgaaaacgaagaactgcttcttagccgaggagaattaggaccatacatagaagaagctgactccaacccaccattagttgggttaccaactgaattcccttcatcataatggggagccaaaatggaaaaggaatctgcaacactgtccaaaagggtaacagagtcactcactgaacgacgaagtgatcctcctttagaatttgaatcagggtcattcaacaagtcatcaagccatgctggatgatcttccacaaagggatgattagagaaagagttgtggtttcgaattgaggcactggtgggtctcttttgaattgggcatcgaggaggcaggtgggcttgaacttgagcttgtgatggccttgttgtcatggtgaactatatcacatggcggttttttatcagcttctcaatgcttttcttttcttaccattttatacaaaagaagtactaaaaatcataacaataatgccatgtttaatgtcattttctctaacctatcttagtgaagcaatatgttttaccaagataaaggaagaaaggaaaaggaactgaaaacttcaaaatatacaaattaattctacagtttacaagtttttacttagggttattgcataagggaatttaactactcattctgtgaactaaagttaatagttcaaatactttctaagcaatccaagaaaggagtcaaatataactggataccaaaatgggtgatttaagtaattgagtgtgaatgcacagaaaaagaaaacctttggtcaatggtcaaccccagtgaaaattcaaacatatcagacacgaatatcacgaaaaagcatctcaatgcaacagtggaatccaagttctacaagaaacacccaaaagaaagggtaatttcatggaaattcaaccaatctacaccaacagaatttaataaaaaccatgtaagctccacccagattgaagcaaaacgaaaaaccctgaacagaaagacagtgtataactagtatttaaaaaagaagaaaaaaaaaagtcccttagaaaaatgaggattaacagagctggggcttaccttcctttttatgtttattttaatttaaaaagattgttttgccctctactgtgtgaagaagaagaagaaaggaagcatgatgagagagggagggaaaagaagaagagtgggcgaaggataagtaaaggtgcgcagggaaagggggttggaatggggaagtaaatatttattacagcagagttgtcagtgtcagtgtccactcatttactcccacttgctggattacaccgtacgacccctactccttcctttctttgccaatctttcactttttctcctcgttttattattgccaatataatttgaattttttactcatcaattacaatgaattatgattgtaaatattttttaagatttctactcatttgtcgttttgtattttatctaacgtttggtgcgtcatctaatttagcggttccatacttttgttcataaa

SEQ ID NO: 248251 - DNA, 896 bp, Cannabis indica
taagtattttaaaatgtggacctgccatccaagatacaaagagattgtaggtgaggtttggaagcagaaggtggtaggctctaagatgttccaagtcacttcaaagttaaagaaattaaaagtggctctcaaagagttgaataggaggagcttttcaaacattcaagaagcgacagaagaagccagaaagggcctaacagagactcaaaggaaattgcaagaagatccgttatgtcatgagttaattgaacaagaattggcagcaagtcaaaaatatgggcaattactcaaaggtttgcactgctttcttcgtcaaaaatccaagattagttggattaaggaaggagatgaaaactcagccttatttcatgctagtatcaaggagaggagaaaaatgaatagcatactgtccattgaagataatcagggggtgagaacagatgaccaaaagaagatatctgaagcctttatttcattttatcaccaattgctcggttctaaaatggaattcaggaagaaggttaattcaaaagtcatgaagcttggtcctttagtaaccaatttacaagcagaatacttactaaaagagttctctaaggaggaagtcaagaaagctgtatttgatattcctggaatcaaagctccggggccagatggtttttctagttgtttctttcaagacaattgggaattactgggagatgacatcagtgaagcagtactttcattcctacattcagggcagatgctcaaggagatcaacactactgttcttacactcatacctaaatgtaagtgccctaatacagttagtgaatttagacccattgcttgttgtaatgttttatacaaggtggctactaaactcatctgttcgaggcttaaagttatcttac

SEQ ID NO: 248252 - DNA, 975 bp, Cannabis indica
aaaatatatatataaaaaaacatctgttaaattttggtcggtacattagtagttatttattttagaatgtacccacgtattttttttcttcctttactttcttctttttatttttttttatttttttactattcacattgaaagttctaatttctttgatagctaagtgatagatctaaattggttattattatggattgaaatagaaatcataatcaaagaacaccaaatttacaagtttcctctgcattggaaacacattccaaccgagtagtgcttgggttcccatgaactgggtaaaagtaacatccactataaaatcaaatcaattacaaacaccagttccgattttacaaattaaacaatgtaatctgaaaatgatttttacacgatgttactaacacttgaacacactcaagttaagagatctaaacacatttagatccaagaacacaaggtctccttgcatccacacagctaaagtacctccaacagttcactctgaactctcctcaccaagcagattcaaactcctcttcaacctcttgaagatttactgaatttccatctgcataaaaaccaaaaaaatacaaaagaatattttgccctagcatagcaagaatcaagaaaacgattgtaatagaagatagttagttagacaaagggacaaccgaatgttatatatcctgttgagagagaattaactcgactaactaactgcccagcaaaagacagctggcactaacagaaaaactcaaaccgaaataacaagaaagttgacatagcaactataacaaatataaagacaacagatgaaactaaaagcatcttagatgacatattaaatatactaaggttgtaaaatgaacacaaagtattcatataatttgtcagacaaaaataataatgacacttacacacatctattttttttttatttttatttttactttttacgtaaataattttttttta

SEQ ID NO: 248253 - DNA, 695 bp, Cannabis indica
atatattatgttgattatttttatatcaaacaaataatgtagcattttctcaaatagtaataataataatgtaccaaccaatttccggcagagttacatagcacaactctctcttatttctaagactgagagtcctcccaaagctatcgactaccaacctattgcctgctgcacaaccttgtacaaatgtgtttctaagttgatttgttctcggcttgctaatgttctgcctaacttagtgagccagaacgagagagcgtttgttaaggatcgttccattgcttacaattatttttattattttgaagaactatagaaggaagaattgctccccaagatgcacaatcaaaattgacataagtaaagcttacgatacggtcaactgggatttccttgagaagattctggtggcgtattgctttcctgaaaagtttgttaagtggatcatgaactctgtgagaagcacgccgtattctttactcatgaatggaacagtttaggggtctttcaaaggcgaacaagggcttagacaaggggaccctatctcgcccctcctctatgtcctagttatggaatacctgactcgaagcatccaaaaagcagcgagagataagaatttcaggtaccatcccttatgcaaaaaaatgaaactcgctaatctttgttttgcatatgatttagtgatcttttgtaaa

SEQ ID NO: 248254 - DNA, 820 bp, Cannabis indica
aaggatatggtcggctctcctactcgtggaaaatttgggcttcctttcttccacgaccaggataacttcttcttgttcgcactattcgggcatacttctcccaagctttgctcgaatctccaacaatatgagggcctccaataatcacttgcagatgtccatctactggtggaggtagcaagtctaggttgttttatttcgggcatacttctgcaggtgtggattgtttttccttatcagaaattcaatttcccgcttcaagttatagcattcgttagtgtcgtggtcgtagtctccgtggaaccgacaaaactttgtcatgtcccttttgttggcgtctttcttcatgggctcgggtttcttgtacggggccagcgactgagttgacatgtatacactttttatatcttcagtcagaatagtgaatgtagtgtacttggcatgattctcttggggagtctgttcggattttccggtgaactttcctttcttcctgttcccttgattgtggttgttgatggaatgcttgccacttgagcttgaattatttgggtagttgggaagttgggcagatgttccagtggaagaagcgtttaatttgcccaacttttgttcacctttcgctcgttgaatggcttcttcgagcttgatgaagcctttggctcggtcaaggaaatctcattgagtctaccgacccgttcttccttatatccttccaaagttcaccaaggactttgatgccccccagtatcgcagataactttccatccacggttaccggtgaaactttggttgcctccgtcatgaatctattgatgta

SEQ ID NO: 248255 - DNA, 1024 bp, Cannabis indica
ttttagagagtatcgctagccaatcgcaacgcgacatgtcgagaaggtactaggcaccactggtgtctaatagcaatgctcaatttaataactgttgtggaatatagctaattatttattaggtggtgttaggtgctactggagcatgatctatgttaatattaatttattttatggtatcgttttatgagtagttagcgataaaattatttattttaggacatgatattaaattaactttattggtgctcaagccactaaaactaactcaataatgaaagaatagtaggagaaagggagaaagcatagttcgaataaagacccttaagttattagtggataggttatataattatgttatactaagaaaaattacaagcatatgatttttcaactcggagaaattagaatttatttttttataattaggatttttgaagcctaatgtatatgaaagtttagatgtaagatttagtacatgttaaaattgaaagacactaattttgtaggtatttgagtttaaatggtatgatttggtacatagatagtatttagttaaataaatttaataaaatttgacaaaaatctataaatccaataatatcgatagtttgaaaaatatttaactacctaaaaaaaagtaaaaatccttattaatctttttttatataaggatatttatagttgttatagcaaatattttaatattttttttattaattttaaatattttacagccctaaaaataaaatttagaccatcaattatacagtatatgtgtattttttttatacacgtgtaactatattaaattttattttgagcataataaattatttatacttttttgaaatataatgccaaaattatttatttatagtttctataaatgagaaaaaaaatcatatgatgtttcctatgtaataaaaagaaaaataacaaaacttaaaataataataataaataaataaataacaaaacaaccaaaacttcttttttttttttttttttattttttgttaag

SEQ ID NO: 248256 - DNA, 578 bp, Cannabis indica
tgctggattggtttcacacgttgctcttcctcttagttatgtggagtctgattgtttagctttggtttctgcttttcaaaagcgctctttcttttgtattgagctatatttttttagatttttcgtaatgagctaggtttttcaatttttttgctagtttgctttccagatttcctgaggcatccatattcgtgcctgtttcacatgaattagttgtgcatgcacttagggtggatggtgaattagctttgatttagaatttttcatcttttcttattgatttgtattaaactctggttcttgttaataagagtttaaatttcaaaaaaaaaaaaaaaaactacatatgtttggtgaatttttaatcgttttcgtcttgtattgtgaaaattattaaatttggtactcctcaaaatttaattattataaaatattataatttagacaaagaaaataaagcataaatgaaaattttcttagtatcttatttcaatgagtaatttcatatttatacacatatgatgatatgagagtcaaaaattagaaaactaagaaaaaaaatattaattacaattaat

SEQ ID NO: 248257 - DNA, 951 bp, Cannabis indica
agcttaaggaattttggcagagcttcgactattttttttcgattcccccttatgaagaaatgaaggggtttatataggctaaagtttgtgtccgggcatgctcgtgacccgtttagagttttgtcaaaaggctgcctacttttgggataaaatacattatatgcatgaatattgggccccttagaaggtttcttctcgtggagcgacgatttcgtacaactgggaccattgttgttgcaggacacgtgtcggataaagatcacgcctgatagacaaagtgctcagaggagctgtcggacaaaatgggggtgttcagaagaggtgcgcgcacacaagagacaagatctgatcctgtgccagaaaggtaaacacaccgagagagacgtctgatttccatttcgtagtaggcttccggcattcctcttagactctttagatagctcccaggtatcttcctggagacttaatggatttaatcttcttcgagtctcggaaggcaaggctgagaaaattttcgggtcgtggacggttgctttgtctagttgcaaggtgataaaccttcccttgacctaggcctctactaagctagctaagtatttccgcaacctcccgcgaccaaagagacttagacgattattgcttggatcatcatctcctatcttttgccacatgtctttacttcgaaaatacggataacaggaatatcagtctagaatgtcatgaagtctatgtgcagaatttgtgttacttgggagaaagtagtagagtaaagaatacgtacatcttttaataatttaagaatggatcatcgaatcgcatggaaaaaggagtctcttgtacaaacgagactcatttataggagtttatttttgtctctcttgaacacacaccaaaaaatacataaaatattaaattggttgaagaggaagaagaaacaaacacacgcgcata

SEQ ID NO: 248258 - DNA, 564 bp, Cannabis indica
tcagctactggattccaggtagaggccaggatggtggccgcctctactcagtcaactgggaaaaaaaaaaagaataaataaaatataaatatattatatttatactgaaattgagtgtatattaatattttttatattttaagtagttacaattctaattttctttacattacgtaatgaaaatgaagtcacgcgataaataacatcaaaagaattaaaatatcattagagtatctatggacacgattcttccaaggaccttatactgttcagtcaaggtcaactttttataataaaaagtgtaaatagtgtgataaatattcgaatttttgagtttgtaagcattataaatctaatgatttttttttaacgtataagtactatatatttataaaactgtaattttcttttaattttatcagtacaaattctgttattatactaaaaaaaacagtgaaaaattataattttacaaacattaattatttataccacttaaaaaatcattaatttaattacttatccgcccatttacgcaaataaaaataccaatagttcaacaga

SEQ ID NO: 248259 - DNA, 500 bp, Cannabis indica
tttggagattcgaatttttgagtgtttgtctacactttggttacacttcctttgacactcttcaacaattggaggttaaagttctcttactatggtggtcgactattttttacgtgagtgaacctcattttctcagagacaatgagaatttcttgacatcttggagattatagtgaatggtttaagaactaacatagctagagcttatcgttcccacagacggtgctaaattattaatggtactcaccaacgaaatattaagagccaaaagtgatattcaaagatcttaatatatgaacattcgaagaaaaaatttagactcttaaactttcctccaaaaaaattattgtttcattaatattttttccaaaagaagtccctttacaatgacctcaaaagccctatctatagtgagttctctacaattttgaacttcatcagattcttaagtcatagaatgttaggtcactttcacactaggtaacctagtacttcaggta

SEQ ID NO: 248260 - DNA, 1271 bp, Cannabis indica
aaatagcattactctaatttattttataatagcttaaagataatatgtacaataatgtacagatacacatatatatatgtgggcatatctcactaatatatatatatttgtgcatttgctacatatataattaaataaatttatataattgtttttttagaggaaatatttatatatattgtttgagcttgaaatgaatgtatattatatactaaatatgaatgatcagtaatctctagcttgtattatcattctaatgttcaccttaattaattaaagagctaagtagagcggttggactgttgctcaggttgagcttggactaggctaagtctgcttttagaatccacaaaagccaacgcccaaataaaaaataaatcactttgaaaatatgcattaattatttttagtatttattttaaaaatgtcatattttcttttgtaaatgattcaataattttgttgagacccaataagtctgcccaaggtcttttagctcaagaggtctcccagtttctttttcttcgtattttttttaacattatatattaatgctaaaaaaaattgttagaaaaattgtttaaaaaccttttgaattttattttatttctcaaataaaaatgcacattttcttattttaatttttcgatgcggacctgatataacgtattagtgatgcccaattctattttggaattggtttgtacaatatggtacatgcattttggaacaaattaaaacgaagaaaatggcagccattaactataagtttggtttaaaagtgatgagattatttgagaattgggataagacaatgttcgaatctttgatgtgttggtattgattgatgagaatctttatttcaacatcaagtgtgctaattcatgacagaaatcatgtaatataaattgtatctatattgcttttgttttaagtttatagaatgtgataaattgtgtctctatatatatttttatatatcatttatgttgaaactaaaataattattataacaggtacttaatctagtatttttggtataagtgtgtataatgttgttgaaagaaatcttccacaaattttgaataattcaggatatattaaaatcattaattgtacttgtaattgtgtataaatatcaaaagaaacacccaacgtaaaataaattaatagagttgcaaattatgatgtaactaataaaaatactaaaattatatctacaaatttgaaaagaggtagaataattgatcacctggattatctgccctgaa

SEQ ID NO: 248261 - DNA, 971 bp, Cannabis indica
ttttttttttttttgttacctccaagttattatccaactagagatgattgtatgtatatatatttctataataatgatgacaaaaccacttgattataatttgtttgtgttccaatttgatgtgattaattttttcactaatcatcataagtgagctcatttatttgtttttatttcattaaattttgaaactagtaaatgataaaaagtttgagatacacaaagaaagctgtaaaaaaaaaggttgtgtgcggtggtcgtaatttacatcatatttaactttgccagttttactaattgattataatcatgcaaaaagtaagaagttcaagcttcaaatatttatttaaaacgacatgacgttttttattcaggaatgaaaaaacgacatgacgttcattgttcagaagcttcttccattagtctcttctgtattaatattgacatggttgagtagttttgttatatggcttgtttgtctttaggtttttctgatttgttcgatgatattaacgaggagggggatgggagggtattagatgcacaattgtgtttggtgaggagattgatatccgatactcatgctgattttgatgctttttgcagatggtcatggcgtcactatggaagcctggtattgcgctagctgtattgaaagaaatagaaccaaatttgtacatttttcatttctaccatgcatgaatgggacattaagcgtgccattgaagggagtctatatatggaggtttgatataattcaatttattattgaaaagttgaagccacaggaagaactgaacaacctcgtgaagtgttattgaataagcctgggttttgtttggaatgtgtgcacactaacatttttatacttaaattctggtttcgtatgctgatgatcatatgttgtcttatattatattgtgttagattgtattatattatattagtattgaaaaattgaatttttgcaa

SEQ ID NO: 248262 - DNA, 630 bp, Cannabis indica
tttcccctttttgaaataatacatacagatgttttggggtccttctttttacacttctcgagatggatataagtactaccttagttgtgttgatgattacacaagatttgtttggatctatcctatgcaatctaagtctgaggttactatcttgtttacacacttcacaaactttgttgaaagaatgtttgaaactaagataaaaagtgtgcaaactgatttaggcaaagaatacttaccattatacaacctgttttctactcttggtatcaaactgagacaatcttgtgcacacacacatcaacaacaaggtcgtgttgaaagaaaacaccgacatgttgttgatatgggtctcacattattggctcaagctcaaatgcctttgagtttttggtgggaagcctacacttcggctgcctatcttattaatagactccccactcctctgcttaataatgtgtctccttttgaaaaactgtacaatcgaaaacctgattatactctccttaaagtattcggttgtgcatgttttcctttgttaacaccttacaactcacacaaagtggcattcagatctagcaaatgtctatttttgggttacaacaatactcaaaaaggatatcgatgctt

SEQ ID NO: 248263 - DNA, 627 bp, Cannabis indica
tatcttttagaccatcaattatcattgacatatctgtttttgataatattataaaacaaattaagctaatagatgatagttactttattaaacatggtcaaccttgcagattaactatagaatcatcacatgaagtagttacaaagggatatattatcagtacagattctatagatacaattcattgtctaaaggttctcaaatctctacgagtttgcatatttgaagttattgatgccgatgcgaagttaccatgtaaagatcgcttagttttaatttagaaattagctgataattaggatttaattatggaaattatttattaattttgaattattaatttatgatgattcatttgaattcagaatgcattttataggttatatatagaaaattcataattttgcatgttttgtgcctgcaacaatggaacgtggtgttgggctattagaatcacatcctagtatttttagtatagcgagacaatatagttagacattgagaatgtcgggaatagtcaggattttagaatttaccaaaaatacccctaagtgattttatgatggtttagtgtgggcaagggcaatttggtctttttgctcatttgtgttttgtcctttagtggac

SEQ ID NO: 248264 - DNA, 615 bp, Cannabis indica
aaatgtgacctgaaacataggctgaaaatatcttaacagtagcttacggtcgtatcaatctcaaatatcaaagttttggcccagttataaaccgaatctcaaccctcaagctcccaaacaccattatatataacaaaagtaacaacagttgaacctatcacagttaaaaaaaacccactattaacaatttagtataaaaatctaacaaaaagtgatacaaattcttgaaaatgccttaaatctgtaatgcatcagacacaacatcagaacactatcggcacccatcgggcccatcacaaaatagagtgtcaataccacaatcgaaccacaccgttaggccacaattgcacccatccaaaatcaaagttcccaaacctatatcggaccaccatcgggccccaatcgggcccatatcgagcttttatccctgtcctaataccaagtaaagtatcgaactaccatcggggccacatcggaccccatcggactagatgaaaaaaattgcagaacccaagaaaaatacaatgttcatagacaacaaccatttgatcacacaaaataataaaataacagtaacaaaccacagatcaactatcaaaacaacattctaaacta

SEQ ID NO: 248265 - DNA, 578 bp, Cannabis indica
aataatattttttaaaattaaaatagaagttgtcttttcatattcttcatgtaaccagtgtacctatttttcttttactattttattgttctcttaattgatataatttcaggtataatatgtgctattctctatttttaggtttttttttatctctcttcttattttttctttgctattccttttctatatacgcctcctccatcttctttttccccttatttttcttcttcttcttagtgaatcgttgctggctttttttcttcttcttgcccagcgtcgacattgttctgagaggttatcggctgcaactcattctattttggattgtgttctgattttgaggtgctctaaggtgcgtgttattattactgtttttttattattttttttaatagctaaggtgaatagttggttttgcggtatttttagtcggtcgagggttagatgattgatgattttatttgaaccttttttctttgacattggtattcatgaaaagagttcttttgttgtatataaatatatatatatgtatatgtatattattgcatttaagttttttttacaaaaaaaaa

SEQ ID NO: 248266 - DNA, 922 bp, Cannabis indica
cactcatttgaaagttgaaggaggagtgggatttaagagtttcattcatttcaatcaagtgcttttggaaaaataagcatggctaatattctccaatccaaattctctactaagccgagttctcaagccaaggtactttaagaactcgtcttttttggatgcggacttaggttcttacccttccttaacttggagaggtattgtttggggtaaagaactgctgtcaaaaggtcttcgatggaaagtgggtaatggtgccaatatttttggtgcaacggatccatggctgccaagaatcacatcttttaaaccagtggtttttaagggccacaactcagcaatgagagtctcagatcttcttttagataatcgacagtggaatcatgagctgctatcaaatctatttttggattcttatgttacaaagattcaaagcataccttaactctctttgaacaccaagatgaattaatatggcatcatgaatcgaatggtatttactttatcaaaactggttattcccttgcaacaaaatttgatgaacaacaatctgctgccagcgatatacaattgttacaatggtggaaaaaattctagactttaaaacttccatcaaaaatttgaattttcatgtggcgtgctatccatgcttgtctaccagtcgccaatattcttcaaacaagctatatttttgattctgctcgatgctccttatgcaacacagataaagagactaaatcatgctctctttttctgaaaacatgcaaaaaaaggtgtgactgtcctctggttttgatattcatgagctttcaacttatcacatgaatcttaaggaattcttacttcatgtatctcatatatggtcatctttacatcttgaacaatttgcaacaatactttggagcatttggacagaaaggaa

SEQ ID NO: 248267 - DNA, 1900 bp, Cannabis indica
actggcggaccataagcggcgggacccaccggtatttaatgcatcacattaaatatctgacacattaatagcggtgggtaccccgctcgtaatgtggttaaaataaaaaaaaataatattaattatatttataaatacatattttccaataataataatcagatttatttttttaaataataataatcagattttatttctcacataatttataaatatataatttacaataatattaataataaatattaaaattaatattagtaataaatattaaaattaaattaacaataaagtaattactacacacattatgaattaaaaattgtccaacataaaaattaaatagttatcatccacacataattaaaaaacttaaataaatccaaacataattaaaaacttaaattaatccacacataactaaaattagcataaactatttattattttcatcaagcacattatctaaaaaatctgaaccggtagtgttgaagtttagatgaattgtttgtgcattgtcctgagcttgcgatactggcggtgaagggtaatatggttgttgggaagataaaatctccacaaattatcgagtctgtggttgttgtggtaaattcagagattgttgttgttgcgaaacatttggagattgttgctgtggcaaaaaattcggtcattgttgctgaaactgaccagggaaaatatatggattttgtgcaccgaaaaattgatccggagaaggttgctgcattgaaccccccaaaaaacatcggttgctgagatgaactcccaaattgaccaaacatcggctattgagactgtgatcctccaaaaaaaaatcagagtagaaaaattgaggagactgggaggagcgtccaaacatgttcggaataagaggagattgggaggaacttccctgcacattaggagagaattgttgactctgctgaaaaaagttgttgttccggccttggacatgttgcactaccctgaggttgggttggtaaatattgttggaggaaactctcaaatcgcgggtcatacatatcagaagtgtcgtgtcctggtggaaagcgttcacgcaatctctaaaacattttagccataataccaacatcttgagaaagagtagaccttacttaagattaagtttgaatttggcttgaagagctagatgctgatttttccctttctttactatgttgtaaccgactccttgaatatagtcactcttctcaccaaaaaccttgctcatgaccttgtattggatgtcaggcggcacctctgaggatccagaatcactgccagattggctttgaagtctacttctcgccacctcttcctccatttcatgggtaagttcatcataaccatagataaaaaaattgttatatattcaattgtgtgataattttaagaaaaaaaatgaaatattagtgtaactcacctatttctctttagcagcgtcattgacccaagatttatcctttttcctaagatctgtctttccaagtttcgaagacatatttttctggctccttctgtattgttatcagtgttagattctgtaaaatataattttattaaatgaattaaaaatatatttacaaattcatgaggctgagctgccattgattttgtgccttgagttgaggggtacttcatttgttttctgtttttcttgttttgattggaacgctctataaattttaggctcaaaaataaatcagtaatctgtttccaatgatctcttgttacatagtactcaggcttagcattgatagccacctctagattatcagggtttccttcttaatatttttaaaaataagtatgcctaatgttttttctttctgaatatcttttgccatctcaagataaagagtcctcgtcacttttt

SEQ ID NO: 248268 - DNA, 922 bp, Cannabis indica
tatatattcatttcctattatttaatattttgatttaatgtatacacatttggaaatctattgagactgtggtacaattataatcattaatatgaattcttccgatgcgtatctaatttagtactaaaaaatcaacactcagggtcgggcttcacattggtttcactcgagatctggcattagaaggtcggtgccatccgtagttgttgagagggggtttcgttagttatgggcttcaacgacaactgtctagggttgaagaaaggagaacttaatgagaagaaaggggagagaaagagagatctggtggagaggcaattttcttctagggttttcaacttttcaatatatgccctattttaaaattctgatatattatacaatatatattttgtttactaaaaataaaacacatacaatacaatacacgttctctaatgatgtatactttttattatttttaaataggatcacgtctagtattgtaggacatgacatctataaccatctataacgtgtttaactatgctagacgtgaaaatgaaacatgttttttttttttgaaaaaaaaaatatattaataattatatagaacgtccttctacattttttatgtctagtaattttgcacatgataaaatatttttcatgtccgacaatactagacatgaaaaatgtctgcaactttatcaatatatcttgcaccaattatgcttgacatgaaaaatcttctcaactctttcatatgattatgaaaatgacattttatagtagtattgaaagaccaccctacaatgaaaataagcagttgagcacaaataacatttcccaactaaagcagtgtctgagcctaaagaatgaggttgggtcttaaaaaaaaaattacacgataatccttaaaggttaaagaagaaacccgtag

SEQ ID NO: 248269 - DNA, 1717 bp, Cannabis indica
tttatattagatttagatcatgtaaaaatggaatttattcaataaaaaaattagaaatatatttttgtaaataaacaacccaaaagcgtatctctttctctctctctgccatctccggcctcactccgtcgtcggcccatcattcaaagaagccttcgttcagtgaaacagcgccgccgaaaattccagggaggagccaccgtctcttcttccttctcaccacgtccggtaaggtttcgtagtcttagccttttatttttggttttaatacgatatgaacccctagtgatgaatctccaaaaaatgggagcaactcttagtcttagtcttgttttttgattaataaatttatgtgattctgaatttctgagacctgtactttgttgataaatataatccctatgtttcgattttttttttttttgaaactgaagtaatttacgaggttggtcttcttttgatttgtttatatgtagttgttgatttcgttgattgaatgaaatttttgtttgagaattctcttaatcaaattatgttcttgatcttgtatgccatttatacgaatatctcttaattagtgaagcttctcagctgagatggagaactcttgttctcctaattcatggatggtttccttttcttcataccctaaaacccataactctcaggtctatagaggacaatgacaaacttgtttactttataattaagataacaaacattctatgcacatatttggttaatagagaaagacccttttcattgtttggtatatatgttggcctcaagaatggataatccaactggaattccaattttctcgaggaagtgaatgatatttcctaaaattctactttcatcagttgttaaatatatcagaattgttattattattattattattatctttaatttttaagtgttagattatagtgagacaaacaaacgttaatctttctatccaaccattaacattttattgattgtacagtgtactctcagatcattttcttctatatacttctgcagtatattcttactgttgactgatcaaacatcaaataagttttttccccccttaattattacctgatttgtttatgttttctaatgagaactaaaacgaggatgggattattctatcatatttaattttgatcgtcatattaggtgtgtttcttgcttattgagaatatttctcttaaagagctggcctatttggtatggtagttcttgagacacatgtgtgctgctaactaaggtactttcatggctatcttcttctccttcaattgatgaatctcaacatctgcaaaacttcttggtcagaataatcccagaggaaaagcttcttcagcaggtaaattttcaaatttatccccacaaacaaatgaaattatttcattttcttatataaagcaaagagctaataaaatagaaatctaaatattttctttaatataccatattacaaaacatatataccaacaaatccataaaaatccccaaaacattaccataactttaagaatattcaagttataggtttctagataagtaaaaaaataaattagacatttaaaagtatgagaaataagagaattttatgtggcaggaataattaattaatagtattaaattgtcatttttctgccaattataaaatggggacattaggttacaaggtgacatatttttgagccatttactctaattt

SEQ ID NO: 248270 - DNA, 1487 bp, Cannabis indica
catgtgtacatttgtgtatacatgggcagtccactgtggcacttatgtgaagtttttgaatgaaagtgtaatgagcaaaacaaagcatgaattcaataggttttaccgtgaaaattttgatttttattgttaagtattaaaaatatgaagttcgggtggttctcacttctactgttaatattcctttaattttaaattaattttttttcttattaatataaatttcatctgggtattctatatacaattaggcggacaaagcaagttcttgtttgaagttaaaacgattaaaagaatgaagcttttggtgctatcaactcttaaactgaagatgaatcgtgtttcccaattcatttctaatgctaatcagacatctaagaagcaagataggggtccgaaatctaaattgctttgtagtcttgtagatatggagaagaggtgtgcttatacagctcacacaacacacttccttgatcttcatcatcatcgtctagggattgaaatccatgggcttggtcttctattaatcaattcaaatacaagtcgagcaatttcaagccatcatcattatcgtgcaaccttacgagctcaaactctgtcttccctcaattcctttccaagaattaatttatagtagaagaaaaaaatgaaacaaatgtttcccgtggatttcaaatttggcgacttctaccaatggagctataataagaattttcttacctcgaaagtctagctccgccatggagcaccttgatttagaggagaggcatttgtttatctttttgcaagtatactagacaatatagaagaaaaagaatcaatttgttgtgtttttagaaattagtatacttgctttattaaatttcacttattaatgagaaggaagaagagagaaaatctattattttgtagtttttttttttttttttcattttagaaaatacgagccatgggtgtgctcttaatgggtattacccataaatgggtatttaaatattgaccattggatttaatcaaatggatgatatttatagttattaattatttttcaaaaattaatattttttattttaacctattacctgatgacatggcaattattttatttttcaaacccatttttttttatgtgtgaaccccattctttgtattcctaaatgaatgaaataactaaaaaaattaatttctaaattaatttgtaatgttcaagatcttgaaagggcaggagaattttcatcttcatcgttcttaaccatgtcaagtgtatttttttcacagcatcaacatattcaatcttcttcttctttcttttttcacaacatcagcgttagattgggccatttgttcatactacaagaatgaatcaatacttttctagacacatttcacattaattaaaaggcgcgaaaatatagaggttttctaaaaatttattttacttatttttttgctaaatatttttaagaaatactaaaatttaggtttat

SEQ ID NO: 248271 - DNA, 653 bp, Cannabis indica
agcttttggtgctgtcaactcttaaactgaagatgaatcttgtttcccaattcatttctaatgctaatcaaacatctaagaagcaagataagggtccgaaatttaaattgctttgtagatatggagaagaggtgtgcttgtacagctcacacaacacacttccttgatcttcatcatcattgtctagggattgaaatccatgggcttggtctgctattaatcaattcaaatacaagtcgggcaatttcattatttcaagccatcatcattatcgtgcaaccttacgagctcaaactctgtcttccctcaattcctttccaataattaatttatagtagaagaaaaaaaaatgaaacaaatgtttcccgtggatttcaaatttggcgacttctaccaatggagctataataaggattttcgtacctcgaaagtctagctctgccatggagcagcttgatttagagcagaggcatttgtttatctttttgcaagtacactatatggaagaaaaagaatcaatttgttagtgcatgtttggcatcataactaaaaaactgttttttgtttttaataactattaaaattgttttttgaaaataatttggcttgtttggtcttgttttttgaaaacagttttcagaaaacaaagttac

SEQ ID NO: 248272 - DNA, 658 bp, Cannabis indica
aaataataacttgtaattaataaactttacaaaacatcaaaaagttcacattttatttcgggatcccgtgaaaactttttcaaaatattacaagtcattagttcacgctaacctaagcagtaaaagtggaaattacaactttttttcccatggtagacccaacccatgtggtctagcttggcctgaacatgtacaatacaccctaaaaatcctcgacctcatggctgatcaataactgacttaccctttcctacacaatagagcacccgttagccaaagcccaacaagatagtataaacaacaatatgaatatcaattaaaatcacttaagtattgatgccactgcacctactgtctatttgacatagacctacgtgtgacgctcacacgtctatttataataaggccttagaatagtttgtctcagttttgattaccgagtctaacctaattatgccttaaccgcataattatttatatcaatatatacaatataataatgcattcatactcacttaaattctagagtaataattgttggaatttattttaccaggacatagatttactaacaaatatgtttttaacatcctaaatatgaacttctaaaacgatataaaataaacaaataaaaggcatgagaaaccttacattggtt

SEQ ID NO: 248273 - DNA, 620 bp, Cannabis indica
aaacaccaccaccaccattgtcttctcatctcatcgtctcattcatcatcctcaacaaaaaaaaaaaaatctgattcatgaataaaaaaaattacagaaatttttaaggagtcatgctcttcacaaactcatcaaacacatctaaaataatcctcaaactttttattcaaagtagaaaaaaaaaaactccagaaatttgttacctatttgcccagataacccactcgatccaaactcaagagagcttcctcgccttcagataaccctcggagccaccacactgtcgtctttcagagattctgaaaccccaaagccccatctcacactctcaagagcttttctctctctttctctcattcttgaagcttttcttttcgacttctatgtccaatctcttttgtcgacattaatgacagataggggtagaccttgtcgacgttaatggcagatttcgactaacaatgaaccaaacaccatacaactcctcctcctacaagtagctttctcgacgttgatggctcaccaccatgggaggtcatccttcctgaccaccgatctgttagatctcaccacatgagctcttgatttatttttaaggttatttgattatttaattattt

SEQ ID NO: 248274 - DNA, 1173 bp, Cannabis indica
ccagtttgaatcttgagtattgggattctgagctagattagcttgaggttgagtctgttgtgtggaactggaagtcacacctgtgaagctcttgtcaaagcgatagtaacagtctataactgtgtgaccaaggcgatgacacaactgacattgaactctcgaaggtggagcaaggaaccttccacctctgcctgtgaaaggtggtccacgattgtgttgattctgatgagactgagctgcgagttcacgagtgtaatttccagtacatcatcctcttgtgttactgaagttgttgcgatttggtgcttgatatcgcgagttgcgattatactgagctatattcgcctcagagttcagatttggatcaatagagtaatcaacttcaattttggccatgcttgcactgatttcatgttcttgatcagtcttttcaattcttgattcagatgcaagaagtaaagcttcgatctcggcgactgtgtagccttctattcttgtgttggaggagatgatgaacgtgtcatattcgctgggcaatcctttgaaaatggcagagatatgatcacggtcattaagcgtctctccaacactagccaatagatctacagtctgcttcactttgagtaagtactcgttcaacaacatggatccttttcgaagattttgtaatctggtgcgaaattccaggatcttggaggaaactcaaagagtgaaatacttttcaagtgagctccagatctgtcttgcaatgttgcatcccaccattctggtgagtaggctttctgtcatggaagatagaagccaagaaacaagaagctgatcctgtacatcccattcgacaaaagctggattgtacacactgttggcttcatctgtatcattgaggaattgaggaggaggtgccacattttgaatgaacttcaacagacgatttccacggatgacagctaacacctgttgtttccaaagaaggaaattgtgatcagtaagtttaatggaaatcgaatgattaaaataaactggtgtactttcatctggatctctgtttcgatttcggttttggttgttgacttgatttccaccattaacggttgttcctcctccatttgtagctgctccaggaccaacgttggacatattagtgacgagaggaggccacggctctgataccat

SEQ ID NO: 248275 - DNA, 510 bp, Cannabis indica
tataggaattaaatgaaggaaaataaaatacataataaaatagatataaacttttttattattattattatttctaattgttctttttggtcttttaagggtcaaaagagaaaagaagtcttttgccacaatagaaaagtgtgttactacttactactatgactatatatctagctagtataccattcattgcagctaaacaaagactaggtaaagtgaaattaataccctttttgctcatggctaatataattgtagtgaaagtgtagttttactcttcaatttatgtgaaaccaccactatattttaagtgaaattttattaccccataaaatattgaaaataattaacttaaattaattttaaaaatcacttttaatataatttttttcgcattttttattttaatatttaaaatatattttattttatttttattttataagtatattttgtaagaatagacaaaaaggaaaaaactttaaaaaaaaatagtataaattaaagata

SEQ ID NO: 248276 - DNA, 993 bp, Cannabis indica
ccctatcactgctctgatgatgaggacagtctggtccacgatttcgatcacatttccatccattctcctactgatgcgaattcgttttgcttgttcttcaaactttttatctcccaaatctgctaagtcctcttggattgaaaaagccatgtctgaagcttggaccctccgtttccttgccaaatctctgaatatcattctgggttattcttggcttcctttcaatgtgatggagataggcgtcgtgttcttgaagaacaaccatggcattttgataagtttttgatggtcttcactcaccctgatgtgtcgccaacccctactcctgaatctattcggtatgtcgctttctggattcaagttcatcaaatcccgtttggacgtaaaagtccccaacttgcccagttcattgctgacgaaattggtgatctccttgaaatttatcctctctccttaatggaaaactttggtccttacctgcgaattcgtgtcctacttgacaacactaagcctcttcgcagaggtatgaccatacgcttccggggcatctcggagccacgatgggtcagcttcaaatatgagagccttccgaatttctgctatttctgtggccttgttgaccatacctacaacaaatgttccaaatacctccttcgttgtgacaatttccctcaccctcctctcttggaatacaaagacatcctccgtgctaccccttcatcccctcataaaaagaacccttttgagttgtctaactctaccccttttgaggagtttttccctcgtattcatcctacaaccgatgctcaagatttgcaacaagctgttgatcagttcctccatgttgactctcctcaatccagcccaaatcctcgtgtttcaatccaatcccctcagcctgctttatctatctcccctttgccagccactcaatccagttcaggccctgctataccatctctctcaatcccaatctctgctcctatcataact

SEQ ID NO: 248277 - DNA, 1030 bp, Cannabis indica
atagattctgagtagcagcagcagtttgagaactggtgacagattgctcaggaagatgaggaagaaggggtattgcagcttgaggtgctgatgctgtaggtgatgtagtagcagctggaatttctggtatctcaggaattcttgttggtggaactggaacctgcataggcacagaacaacttgccatatttggcacattatggtcagatggtacaggtctggtgttggatgcaacaggaggaggttgagtgattgtaggaataacagcagaagtgtaaaaatcagagtatgagtaagaatcagtgctgtgtttgggattagtggagaaagggaaagaggtttcatcaaagagcacatcacgagatatatacatacggccagatgtgtcaagacatttatagcctttatggttgaggctataccctaagaatgtacagggtgatgacctgaattgtagcttatgtttattgtagggtcgaatgtttggaaaacatttgcatccaaatgtcttgagtttggtgtaatcgggttggatagaaaacaatttctctataggagagacattgtgcaacacagcagtgggaagtctatttgtcaaatagacagaggttcgaaaagcctcatcccagaatttgagaggcattgaagcttgggcaagtaaggttaagccattctccacaacatgtctatgttttctttcgactaagccgttttgttcatgagtggttgggcaaggatgtctgtgtatgattccaaactgtttgaggagatcagtgaagggtctaaactcacctccccaatcagtttgtaaacatttaataggcttgcctaattgaagttcagattcagccttgaattgtgtaaaagttttcaaggcatcagacttttgtttgagcatgtatatccatgtaaatcttgagtaagcatcaacaaattggatataatatttatatccattagttgaagtatgtatagcaggcccccatagatcagcaacaacaagttgcaggggttcggtatagacagtaag

SEQ ID NO: 248278 - DNA, 909 bp, Cannabis indica
tacaagcacaaagagaaaaataaagttagatcgagtagttaaaaagagaagaaaaagcaaaaattgtgaaagtgaagcaatctagccttacctgatcaaatcttgtgacaggatgctccacaagttgtaaatcaccattgttgatagtggatctcaagccaaatttctgagataagtttgacagagatgtagccctaatttttggggtgaactctaatataattctggtgttttctctccttttctctctttgattttcattctattaatttctgtgtgtgtgtgtgtgagtaagatactaggattctaacataggatcgagcaggatcttctcaagaacttgctctgctagggtttcgactctctgtgcgaatgtgtttgtgtgtgttgtgtttgctgaattttttctagacttttcttgaaagtctctttgctcttgcattaaacgacacttgtattgtggtcgtattgtacttgtattaccatttttgttctagaaacatttagacaaaggaaaggtcaagattgaacttggataatgataattagtgttttgttggtgtagggttaaaacaataaaaattcctacaaagctgtatgtaggagtggaatctaaatagattacttaatttgaatgttctaattctactcctagtatctgtattttcagatcatgagttttttctataattgttttattcaatgagtatattctttattatgatttatcatttcatttttgacatattaaaatcatttttgtatacatgtcatgtgacattatgaagaaaatagagtctacacagtcaagagtggatattccctagaatgaactctatccccagtctaaattcttcttcgtcaatttctttagcaaagaggtgacatgctttgtggtctctaaaaatt

SEQ ID NO: 248279 - DNA, 692 bp, Cannabis indica
ggattggattggatcggtactttttgaggtcaaacaacatccaatccacacaagtgcggattttggatttttcaatccaatcaaatccgcacaagtgcggatatccgcattttgcagattggattggattggatcgtgcggattggattggatcggatactttgtgaacacccctagtactaattctagaatcttccaacaaaattaaagggataagttgataactacccatttttattatatattaactaaatatagcaacaaaataattttaattgataaataatctcttttataattaaagtatcaaatataatttcacaaaacttatcaaaattagagtttctaatacacataatagggatatgacctataaaactgggcataaatttaaaaatagtagaataaaagtaaaatttaaaataaaaaataaaatttcctcaaaatcaaaattaaaagaccaaacccaaaaccatttgagaaaaccaagagcaggcccaagtgttttgggccttgggaaaaaatctaacatgatatatttcttgaaaaaaaaaactaagtttatattaagaatagtctaactaaaattaaaatgaaatcaaaataaattaaacaaaaacaataaatatacatatatatatactagtagatgttacctgtcaaagccacgccacgtattgttagttttattt

SEQ ID NO: 248280 - DNA, 1246 bp, Cannabis indica
gaatttaatattctaaattaatattttactatgtgcatatgtgaaattttgataaatttggagtcaaaatttggtgataataatttaagaagggaatttaatttaaaattaaaatttgtatatttgagacgtgattagtgtcttaaataaagtgtaactttgacatgtttggtgtctaaagttaagtgtgtaatttagacatgttttgtgtctaaattagtgtttaatttttatatgcttgatatcaaaattattgaggatttgagttgtgtgaaaattaatcttttatgattgaatttttaaagcttaagtacttaaggagaatagtggtcatcttaaaggtggacactatatttggctagcatgattcgtttggaatcaaaagtgtgaggttaacaaatctattaatcttcatacaagattaaaacatgaattatgagggataggacctaagctctcttagtgttttgatcattgatggaaacctatcttaacactagtaaaaatctagtcttaagttcaataggtaataacaagtcaatagagtgaatgtggtactcaattgtcccatctatggatgagtacatgtggtgaaaattggagggttaaaaccgaaaaggttttttaatagagcttaagcttaaaaaaactcacttaagcttaagaaagtatataaagtgttgtgagacactaaaactccacgtatatggactaggggtggtgccgcctcttatgagaattgggagttattctgtagaaagtccatcaattggatttgtacacatggccattaacggtgcaaaaacaatccataaggttcttcagtgaacatggcaaaggtatgtgtgttatcaccggttgtttgctatggcaacaaaaattttgataaactttgtggtaattatagtaaggtaaaatgtaagtcgaaagacattttacactacgcacaaatacaatagtttctattagagtggagttatttaatcaagtggggaaatattatattattctacaatataatatttgagtgaaataaaatattgtgttacaaaattattttctataaatgagatattatttaagctagtgggggaatattttattattttacataatataatgtttagattaagtaattaagtgtgacaaattattaattttgtcaaattataacatacattacagagtgacaaagtgtatgtagaatgatcacaaaataggaattgtaaatcctttaatttgatga

SEQ ID NO: 248281 - DNA, 1316 bp, Cannabis indica
gtgtcaactgctcttttggagacagatagtatcaagcaaccaagtggtgtgtctcatacttatcaagctctagtgataaggtcagaatcaagtcatggtaggagtacatcgagaggaagatatgatgataaatagacaatcacactcattcatgctcttcgaggaaagtggagtgctactattatcatagaaaggggcatgttaggcggaattgtgaagagttgaccaagcttcttgaagcaatgaggaatcaagaatgcaaagacacatcaaattccacaaatattgctggtgaaggctttgaaaatgactttgatgttctctctgtcatagctgatgaaaatttttcttactcttggattttggattctggttgttcgtcccacatgtgcccgtataaggagtgttttgacactttaaggcatatgatggttgtactattttgatgggcaatgattctagctctaaagttgttggaataggcactgttaaggtgaaaatgtttgatggtgttgtgaggacactaactgatgtgagaaatgtttcaacattgaggaggagtttaatttatttgggagctttggatactcaaggttgtgtctacttcgcaaaagatggtgaaataactatcaagaaaggtgacttgctagttgtgaagggtaagaaagagcacaatttgtataaattagtcggtaagaatattttaggtggagctgtgaaggtgtagtcaagtcacaaaaggcatttagttagtgcgaaggaatgtgacaaggtggagaagactccaatttaaataaaagttgtttgaagaaagaagatatcagtgaaagattgaagaatgtgaagacaagtgctcaagtaaagttcaatgagagtatgaattcagtggatacatactcttattgatggtttgagttgtgagtttagagaatttgagtcaatgtggagattgttggagtttgactcaaattatttatttctttatttgtttatctatatttttaaagttgtaatttctttttggatagttattaattgtgggaaaaggaaagtcttggtgaccaagttttgatgagtcttcttaaggaagatttggaatgtcttggtccccaagttgtattgatgcccaagttttgtaactttataaatacacagggtcggccctgaaacaaagtgggccacaggtaaaaaaattatttttgggcccttatgttagaaaaaatgtggtattttaatcaataaaaaaaaatatataattttaaaaagagaaaaaaaatttgggcccctgggctaggtgggccctaggcacaggccta

SEQ ID NO: 248282 - DNA, 1679 bp, Cannabis indica
ttatgggcctaccggaccaccataaggaccacaaccggatactcctcattctcaattgtgtacgaatgtgaagccatggtacaattataaaccttgatcccgtccacagagaggaccacgtatgatccagtaacgaaccaacccttgttgccagaggtgttggatcaaatagacgagctctgagaggaatctcaaatacggatggcagcgtaccaaagaaaggtagcaaaatacttcaattccaaagtcaaagataagaaatttgccattggggacctagtcctaggaagggtcttcccggccacccaagagccaggagtgcgggtacttgggcaaaattgggaaggagcatacaattgaagatgaaataggctctaggacctataagctaaaaaggatggacggatccacagtacctcgggcctggaatgctaaccacctctgcaagtactatcaatagttaggagaatgttagtttatattctataaaataatctgtgccagacaaatatatgcgatatcctatgcgacttcaagctaagtgatccaaaatacacttttatgtcacttaggggggtagtgaggcataacatacacgcaaaaataggacgaatatataaaaaagaaataaaatagatataaacttatataagtggtctagaatgtaaatagaaaaaggcctggggccgggccattaaaaatctcccctcacttaaaacacaaaaataaatagaattgtcttaaaagtggggggaaaggcaaaacaaaagaaccaaaagataagaacttaattaatcaatcaatctaaggaggaagacggggacccctacgctcatccaggacaacatccagcttcttgttcttctcccgaaacttagctagaacaaccttgggattggaatagaagggaagacggggctcgaaattgttagctttcgagcacatgaacaccctgtcatcaaaacgcttttcgtaatgctggcaagtgattgaggccagaagggcatccctcttggcctcggtaccctctttatgagtctgatcccagaattcacgaagctcttttagttcaacagtcaaaatggttgttgcctccaaattggtttggtgcagctcctctaaagacttaagcttcgcaataagttcctggatctactccttggagtctcaaagatccctcctagccgaagctatgatgtcatccctggccttcagcacctcctgatggttccgctccatgagggcctctttctcttgggcttcatttcgaatcgcctccttctattcctctgattctcagagcttcttcatcacctcctccatgccatcaaattcagacatggtaaacacatggtcgatcaaagtcttggaaagacaatcgacctcggcaataatcgtgcaaccaacaggaaaaagttagaactgcgaaagtgaaaacgtaaaagaaacttagaagattgtaacttactacggtaagggcgacactcatatcttgaatctagtacacggggttggaagaagcgcaggccgcataccacttggtgggaagttgggttagatcagcggcaaaatggcttaccatttctgaggcaaaaggagccaaaatacgtggccgctgctatgtatgacacgtcgataaagaagacacttcacccggagatcagttaagggttgtatag

SEQ ID NO: 248283 - DNA, 624 bp, Cannabis indica
ataacagtgggccaatataggccaactaagattggtcactaaattttgccagcccgcctatatatttctttctctctttttctcttcccccctttcttcttcttccccaattcattttctaaaaccagccctcctccgaaaatggcagccatttggtttgaaatttcttcaagcaaaaattaatatatactattgattaattttttttttaatatttttatcctaatagtttttaatttattttagtttaaaaagttagtaaaataatgaaatgttagcttgtatttagatgttttaggtagttggtactggaggaagattgtagctctaaaaggcttgctattgaatctagttgatcctacaacctttactctaaagaaatacaatgttgcagatggctacaaatggctatggcccacggtttcgagagtcaaagggagtaaagaagtttggaatcgcttgaatacccccaagcacagctttgtcttctggcttgccattcaaaacagattaaagaccagagataggctgctcagatttcagatcacaacagatccttcatgtttgctttgctcggggaatgctgaaacttgtgagcacttgttttttcactgccctttctct

SEQ ID NO: 248284 - DNA, 943 bp, Cannabis indica
cggcttaaggatgccaaccaatgagccatccacctaatattgaacgacctcgcaacaatgagagaaccaacatgactcctccaccaagtctttctcaacattctcatgaaaccaggccttgagaccctacaaggagaaagggatctactactcaaactgaagaaagtagtaggagatgctactttgaattgaaggcgacgatatctggtaggtaaagtccaatgagccacttcatgctcgaaagtacgtacttctgagatgaaaggggtgagttttgccgttactttgcccgtggctccaatggccaatagtatgaatacttccctcaagtacatggagagaaactgaacctgagcaactaattcaattctcttcacacttatgatccagcttaagactactttgagggaagtaatcactaccatgctttgaatgaacactcctatagtgggtcatcttgagacgatctagacttcattctggatgcctcaccagagtgccttcgtgaccccgcggtttggagatgagctaagagctcgattccttcttccacttcaaattcactctttcttgcttgcattttcgatgctctaacgactttttgcaactgtctcctccattattggaaactccaacaatgtgtataatgtaatatgatgaataaggtggctggtaccttttctttcttctattcccctagggtacacctcatttacactaattagaaagcccaacaactcccctctggcccactagttctctatatcccattctcacattagccaggtagcatagatttaagtgactgccacctccgcgctaactcggctgaaaaaaattctcactgcactttgtccacgttacttctcagaatgctaaatttattgcaacaatttcttcagcaatttattccagttttagcttcaatatccattttagccta

SEQ ID NO: 248285 - DNA, 745 bp, Cannabis indica
atttactgtaaatttgtgtgatagttctgtttgtttagtttaaatgacgtaagttatgtgttgttgttatgtgtgtttttgtttaaatcatttgtttttattgttgtcttagttgtttgtgtagtaacattgtgtagttaaagtcgtgttagtaatgttatgttcgcatgtttgtgctatgttgtgttagcttgtaactaagaagtatatgtcattttgctttagcttggcttagcgtaccgctcgatgatgaaaaatatccattttctttcatttgtgatgtgcactgatttttgtgtgttaaaaatgccaagtttaaatgctattttgtctaaatgctagtttaagagtaattcctcaaaatagatgtgacttatgatatcccattatgctttgatttcttaaaacgattaacaccttgagagagtttaaggttctagaattggttagtgtaattcttgaagcaaaatccgggctagctttacaacttggaaatgatttaggccatttttggacgattgagcctttcaagctaaccattctctatagtcacccctcattgagccaaaagcctagtttttcctaacacccatcaaagttaatagacccacacacacacataaatttgatccttcacaacccgaacctaatcgctgaaatatcaaagcaaaccaaaattttgggtgatcattgtatgttgagaatgaatgtttgggtgagcattgagaggaaaagaagagtcctt

SEQ ID NO: 248286 - DNA, 759 bp, Cannabis indica
acttacttcacctactaaataaaatagcaaatcagtaggaatacctctaaattgatctgataattatgaatcactaatttagtagatcctttaacaaaagagatataaatattttttaaaaaagtaaacaaaaatgtacaatcttgaataattaaaccaaacaaataaattattttcaataactttgtaaaggtttgatcgcgcaaaaataatccaattccacataaacatactgccatcgtatttctttgatccaactaaaggcttctttcaagcctatagcttcaacaaggaatggatcgaccaaactataagaaagggaagttctaccctcaattagcatcattggaatctcaagccataaggccaatgccataacttcgacatccattgaacaataccacaatatttatttttgttaattctacaacaaattagtaattaaacaattatttaatagattctacgggcttcaccatcctttgtgcagtattcaatccgcactatcattcaatccaatatatcatattttacatataatgcattcaattcatattgagtatccatattgatattttatattttaaatccaattcaatctacacaataattcaaatttattaatccaatcctcaaaagtatagattagatcagttattttgatcttggttactttttaatattgaattatttaatacttataaaaaaatatatttttgatttttatatttagaggtttataaaataatttttaaataa

SEQ ID NO: 248287 - DNA, 677 bp, Cannabis indica
acttacttcacctactaaataaagtagcaaataagtaggaatacctccaaattgatatgacaactatgaatctaatttagtatatcctttaacaaaagagatataaacacttcctaagaaagtagacaaaaatttacaatcttgaataattaaaccaaacaaataaattattttcaataactttgtaaaggtttgattgcccaaaaacaatccaattctacataaacatactgccatcgtatttctttgatccaactaaaggcttcttccaagcctatagtttcaacaacgaatggatcgaccaaactataagaaagggtagttctaccctcaattagcatcattggaatctcaagccataaggccaatgccataacttcacatccattgaacaatgccacaatatttatttttgttaattctacaacaaattagtaattaaacaattttacgggcttcaccatcctttgggcagtattcaatccgcactatcattcaatccaatatgtaatattttacatataatgcattcaattcatattaagtatgtatattttcagggccgtctcgaggtgttgagaggcctatggcgaaatttaaaacgggacttttttttatataaaaattaaaataaatatatttttttttatttttgctctgagatattatttattatt

SEQ ID NO: 248288 - DNA, 561 bp, Cannabis indica
aggagattcattgcttcctcagcatgaatctcagactgtgaagcccaagccgaaacagattcccaaacaagtggctaggaaatctgtgcgaccccacaaattctacacttaatcttcatcgacaaaggggtctcctcctcgtgctactgcatcgcctcctgctccatcaagtaagggtgttgctgcatccactccaacaggcccatcctctcacacccgtgcccagcaagcttcactcgagaaggagcttcgcacaaaatgaagccatgatagacctaatcctactgccatgttctaaagaaaaagaaccaatggaggtctcctttgatgattccgagaccaaatccgtgtctattccgtctaaaaaagagcttctagaagattttgctgtctcctctgacagtgatgaaactgatctcacacctaagcctctattgaccaaattgctccagtaccccctcatgcttcttctgcagccaaagtcactactgctgccaaaggcaagcagcctatgcaaagttcatgtcctggtaatatttctccatctcaagctataaattc

SEQ ID NO: 248289 - DNA, 731 bp, Cannabis indica
acaaagtttctctctccaatcaacaccctttctttgatatatattcagtcaaagtaagagtcaaaatatgactctcccttcttcacaatattggttcggcccagcaaggatatcagcccacttaaaatgcaaccctaatatctaatataaaaatattatctcaaaccctaaatctacttcttcacttattcggcagccacaaagaattcaaaatctttcaaaactcttctcactctcttatggcagaacacaaagcaagattttagggttagggttttatatttctttttttcttcttcttctttacagccgcacctaatattagggtttctttaagctctcatcttcttcatctcactctcatggcagctagggttatggggttctaatgggttctcttatcttctccttctacagaacacgaattgggtttctagggttcttatattttcttttcttcttttaaacttgctacagccgaaatattctagggttagggttcttatggttctaatcttttcaagcttcttccttttctcttttaatggcagcaactaaaatggtgttctaggattttctaggtttttcttatttcttcttgctataggttctacccgaaaatacaaacccaaaaaaccacacaaccactctttaactttcggccaaaacaatacacacccgaaaactcaagaacataaacacatacacaaatactgttggaaattatttta

SEQ ID NO: 248290 - DNA, 386 bp, Cannabis indica
aatttcatctcaaaattaattggggtaatgagaagagtagtccattctcttatatataaccgtttattttcacacattagtaatgtgagattaactctaatagattttaatcaaaatatcactgttttgttgtgtaaatgttttagagtgtgtatcaattgatttaatctaattataactaactattgaacattaagtacatttatttatttatttatttaaatacattaactaatttaagtattattattaccgtcaaaaattaacaattgtagaaacataaaagttgaagaacttccatgatagctatgggatcactatatatgctcactagtgatcatgcctaacacttgttattagatgtgtctcttgtaattgattagcga

SEQ ID NO: 248291 - DNA, 1160 bp, Cannabis indica
gcgagagtcaaagctaccataataattgtctttttgatgtaactaagtgtattgatagcattcgctcttcttttgcagttcaccatgattttttgttcccttgctctcctccgtgcctaacggttgactagcgtcctcccccgcaagactggataaagctgaattgtaatgttaaagtggagttggacactacacgtactgctgttgttgtaagggatcatctcggcaaggtgatatgggtttatacttccagaatggtatttgttgatgctctatgtggagaagcggcggcttgctgctctgcgctggatgttgcgaagaatcttggctcgaagtttattatagttgagagtgattcgagggtagttatcaatgctcttaacatgactgagtccaggtgggagcttgagaattatgtctccttttgtattaagtcctctccctctttttttagttgtactttttttctaatattagtagaaactataattgtgttgcccataatgtggttaagtgggcgttttcccaccagaggttcagagatattcctattacctcgatttctgaacaccttttttgtaatgaccgcgagagcgagatctaactatcttttatctaatatatgaacacttttcttcaaaaataaataaataaataaataagcaactcttattacttttttttttaagttcgtagaggggtatttcctctcaagtatcttggggttcctttgagacaaattaagtgaaaagtggggtgttcataaaaatcaaaaaatcaaaaccgaccatcagaccgactagaccgtaattgaatttttagtttcacatcatcaccgaatctggcagtcaatttcgttacgatttttttgatatggcggtcggtttcggtttttgaaataaaaaaatagttaaaccaaaaactatcaaaatgctataaaccgtccaaaattgcccaaaactacctaaaactgctaaaaactattcaaaaccgccaaatcgaaagtagtatttttttttcaatcacaaaaatgaaagtagaatttttgtttttaaaatttttgtttttgaaaaataaaaatgtgttctataaccacttttgtctttcaattttaaaaacaaaaaaataaaagtgtgttctgtaaagtttatctttatttt

SEQ ID NO: 248292 - DNA, 999 bp, Cannabis indica
agcttaaaatgacaaccccaacaatgatccccgtaatcagactagttctgctcttcttattgttactgacagtaggtgtgaaatctgtatatcaaaaagatattcaactacattatcgtaattgattgttgaaatgattccagcagtcaaactagttcgactatgttattaccttgagtagcactgattgctgaaatggaaggtccataattaccatttgttggtatgcaacaagttccttttccagcccaaaacaaatggatttcaaggtagttctgtgagaccacagccttaaattccttctggacagccttgaaagagattccacctgcctcttttctaatatcaaaattttgcattacacagtttccctgtcataaatttgcactacaaatagtcatgaaccaatagttgataaaacattaatttaagttcaaaagaaaattaagagagacatcttaggaaaactaagcactcattacttggatataaatatcaaatatacgtttgccaagacttttccaggtgcgataattttcaaaagcagtttctgcaaagtggagtttgacagtgtagttgccattctgaagccccagaccatagtatctcaatgataaaggagaaagccttgcagtctcgaataattccgagcctaaagtacttatgaattgagatgatgaagtacttataaaggtagcactgtcattccaaaggaaacgtccaacattgcttactgcccatcttttagagcgggtaacaaaatgagtagctggaccaagagtctcatcatctttctcatacacaacaccatcagaagatgtaatttgttcaccaccacagttgatcgcaaagttagagtctgcagaatcaagaaacacataaaaaatatagttaagaaagtgctaagtaatattgcttaagaaaagtagaaaaaaaataacagactgtgaaacctctacttacagagcgatcgatgtcgattacatggaaaatttctct

SEQ ID NO: 248293 - DNA, 1018 bp, Cannabis indica
tggagtttgacagtgtagttaccattctgaagccccagaccatagtatctcaatgatgaagcagaaatccttgcagtctggaatagttctgagtctaaagtatttgtgatttgagatgatgaagtacttgtatagctaagattgtcattccatgcgaaacgtccaacattgcttactgcccatcttttagagcgggtaacaaaatgagtagctggaccaagagtctcatcatctttctcatacacaacaccatcagaagatgtaatttgttcaccaccacagttgatcgcaaagttagaatctgcagaatcaagaaacacataaaaaataaagttaagaaagtgttaagtaagtaatattgcttaatataagtagaaaaaaaaaaataaacagactgtgtaacctctacttacagagggatcgatctcgattacatggaaaatttctttgaaggcagtccaaacctaaaagaaaattactaaaaacaaactaagcataaattagaccaataatggaagttaattacccaacaacataatctagaaactttatatttgcttagctatgaccaagagcaataatgtgagtgggaagttattctagatagcttcacaagaaaaataaaaaatacctgttgtttgaattatctatagtaaaattgttgccaaccaagttactgcatcaaagaggtgaagtataaatactagtcttgtcttcatgtaagtcgtttttttgtgcagtaaaacaaacatcaacataacacaaaagtactaaatcatatgggtgtcactttatggatgaaagtgaatcaagaaccaaaaattaaagtgaaaaaagtgttggacaccacaacacgtgaaaaacgtaattactttaattattgaaaaaagtaattacactaagacttgaacacttttgtctagaccataatataccaaacactcacacttttattttaatactagacacctttacaacacttttgtgcataactaacacttttgaaacactttatctt

SEQ ID NO: 248294 - DNA, 575 bp, Cannabis indica
atttaagttattaatgtgaaaaatggacaaaaaataaagattttgagcacaaaaaaaaaaaaaaagaaaagaaaatacaaaaataaagagcataaaggagagagcatacctaaaaaatgggtattgtcgtatgagaaggagatgaacaccaatgtcttttacgtatagggttcgcgagcaggctaagttttatttacttactgaagacttttatttatctcggtaggattgctcctaagtcttgtttggcgtggagaagaggtaaatgatgaaaaatttatttttttagcaccagccaaagaaggcccttgttttaaaggtcaatacctcagccatcaggagcttgtttggttggtcattaaaaaactcatcttgaactcatttttgttatgtaatttttttaaggccgaacgcaacacatcccttgtccttaaatgtacctatttttatctcttaagtgccaaaaagtgggataaaatgttccaacatattttttaatgtaattttttatttttcactaagtatataaagtggaataaaagtactcatttcttgtagtgcttgatcattgattc

SEQ ID NO: 248295 - DNA, 1478 bp, Cannabis indica
tttcttggattagctttcttctaactccattggataggtacatgatgatggtgtagtatgccatctcctccatctctgcaatttcctctggcttcttctcagccaacaacttttcatctccaagtacctttgccaccttttggtgtacaagtatacccttcaaactttctcgccatagtgtgaaatccgttgatccatcgaacttctctagttcgaaccttgccatcgacattctccttcaatctgtgttcttgtagaattccttgatgaatcattgatgagttcttgatgagttcttggtgagggagcaagtgatctttgaatctcctttaatgatcgaagaaccaaaatctgatttgtaggaaatttaactctgatacatacgaattaacctatgtaattccaacttcaagatcacacttaaacaaacaaaagttaaatcaaaacaaacaaatcaagaacaataaaccagctaacacattaaaacagaaaaatataaaacacatgaatctaaatggctgtcagacacaataacatagagatttatattggtttcgatcctaagttcaatgtgaacttggtcatactctagtttgaaagtattgccaccaatctttattgataatgagaataagagatatcaatctcaggagctacaaggaaataatcacagcaagtcatccatggcgtaatccctcaacactcattgactcaatagttatgagccaacataatcaacaatgttgctcaatacaatttcctaatcccagctctctctctctctttctcagatatctctctccatatctcactaacttctctctactatattgtgtctttctactttcttcttcttgtgtttgacttatttttcacttatgaaatgggagtagttcactttatataggccaatggacccaataatgcttgctgtcatattgacagttaagttagctaaagactaactaactaaccgaatcttggttgggagtttaaggaataataccacatttacttttgtgggtgcaactatatggattattaaaaaaatagaacctaaagataataaacgctattcatcacagtaatttatgttatatttggtaaaaagtagttttataatatttttccattaatttttacttttgtacttcaatataattataaatttttatacaaaattttatatattatctaatgcttacttaataatttattaaaaaaatgtaaaataataataataataataatacaaagatcaataaaatttgataagaaataataataataatgttaggctatttttagcctatattttggatcgattttatgttcgcttttcactattttagggcggaattacgcttgttttctatgttttcaggttcttaggaataatagaggtctcgggatgcaaaagtccagcaaaagatgagctgagccaagaaaaacaccaatttgaggcgtgatgcacttct

SEQ ID NO: 248296 - DNA, 764 bp, Cannabis indica
aagtatacatgcataatatagttataattgtacaaaaaattagtaaataaatatatgtttaaaatacgaacattagtataattttctcaattaaaataaagtaaatactactacaaattggttgtatcatcatcaatatcatcattgtcatgcccatcattattttccacctctgttattatagatgtcagttataaactgagactaagaagtttgggtggtatttagtgtcattttttttaaaaaaaattgtctcttaaactaacactaaaagcctattttgtagtagtaaatttaaattttgaatcataaaaaaactaatatagcttttacatcgacttttatattgtagttatgataaaaaaacatacttaatagatgagattaacgaagtgcattaatgactctcctacttacataagtttatgtcatgatatggattaaaatttattaactgtaagactaattatacttattgtcaaatttttaacgcgtatttacaaaatgtattgtgatataagaccttttttttttttaagaaattgtgatatataagactttgttatactaagagatgccttatatatatctatttaatgtataaaaaaatattttacaaatgatatttaaattgtaaatttatctatataatcaatataataggagagggaatctaaaaaaaatatttctcccacaacagtagattatctcacggtctattaaaaagccatcaagattgactaatgtgaagactcggtttgacc

SEQ ID NO: 248297 - DNA, 962 bp, Cannabis indica
ctttttcttcttcatctttcttcatcttcgtttttttttaaaatcaaacctcccaaaaaaggagaaaacctagaaatcagatctgggttgactcaagaactcctctaagtattaaataaacctagatctgtgatattgcctacatttaagcaatcctcttaccaataaataaacacgaaacttggatactaaaatgaaagtacagtaccctaatatgaatgcatataagatagaacaacagagaaacgacatcataggtctattgtattgaatttccgtaatcgacctcaaagaattgtggagagtcagtaaagattttgtgaacgaatggtggaataaatgggaaggcctttgatttatgagattttggaaaagccagccacaagctgtatcataaaactatgcagtgcaatctggttctacattcagaagaaaaacattgggtattcccatgtgggcttgagttatgaaaacgccattgaagggcaccattggaggattataactttggcctttttgcatataagcattcttcatcttgtatttaatatgagtgcactttaaagcatagaaacttaaatttacctttggtagttatactgtggtcccatactcccattaggtttttcgttaatttaaccagcattgctctctataaatatatggtcctttgttttgtcgtcctcacagtttcgcgtctcagtaaaaagttttgctatggcgagcaaagtattgttggacgacatggagccttggctggaccttcaagggaaggtggtgatggtgaccggcgcctcctctggtctaagtcgcgacttttgtgtcgatctcgctatagtcggttgccgcgtcgtagctgccgctcgtcgcgttgatcgccttaagtccttgtgtgacgaaattaaaagccttgctctatcaacttcgtcctcttcttcgagtagcgtcagagctatggcagt

SEQ ID NO: 248298 - DNA, 824 bp, Cannabis indica
aactaaatttggaagactttgatattattttgggcatgggttggccttctaaatacaacgccactattgattgtaaaagaatgatggtaactttttcagcccgagggcgaggacccctttgcatttgtgggtaagatgcagggatcccaaattcccttaatttcagtgcttaaggcaaaagatttgttgtgtgaggggtgcatcggtttcttagcaaatgtagttgttacaaccagggaaccaccatcgcgaccggagcatgtcccaatagttcgagaatttttggatgtttttcgagaggagttactggggttaccaccgaaacgtgaaattgattttgagattgatctaataccaggggcagagcctatatcaagagctccctaaaggatggcacctgcagagctgaaagagttgaaagttcagttacaggagatgttggatttaaaatttacaacaccaagtacctcaccttggggtgcacaagttttgttcgtaaaaaagaaggatggaactttacaaatgtgcattgattgccaggagttgaatatgttaacattgaagaataagtatcctctgccaaggatagatgacttattttatcagctacagggaaagaggatatcactagttgaggattcaagaagaggatattcccaagactttctggatccggtatggacactatgaatttctggtaatgtccttcggattaacaaatacccttgcagcatttatacacttgatgaaccaagcgttcaaagacttcatggatgattttgttatcatcttcgaatggtgttactgttggatattattttacc

SEQ ID NO: 248299 - DNA, 904 bp, Cannabis indica
agacttagttgatagtattgcactatcgaattgaaataattgctatatggatcaaattgaggtaattgctatggattaatcaggtacgcatacctaattattatatattattattgtgttcaatgttatatacaaattgatcttgagtttattattaatttttctaacatgtggtatcagattgcctattgtatatgatttagaacctataatttatataacaattaatatgtatatgttaattttcttcaattacatattaatttcgttattattttatgttgaattttttatttttcaatcttaaaagtttaggggttttattcctcattaaattctctttcttttgatatattacttgcataaaattattgagtaaattaggagaattttaagattaaacttttagggtttatatatatttctttatgagattaattttgtgttttttaattctattgattatgatctgaaattaatagtgcaaatctcattaccgattaatttacaatatttctacataatttaatttttaattcggctgagtcaaaatcaaaatcgggctcctttgtttgttcttagttttcggattgaacacaatcccatcgacatccttttcgtcatttatacacgaaattaataccatagattgataagagattttgtcccgaacaaaacccatcacaaaccgcgtcttttcatcgtgattttggccgatttttcgcctcgacccggctggtaagaatcgggttcacgggacccgtttttcagacccgcccaaggtagaagatgaactccagcctgcgaagcccactctcggcagcggcgcgtgggggcgcgtgcggccacttccaatgtcaattttcgacgtttctcttttccagcgtgcttagaatttaatttc

SEQ ID NO: 248300 - DNA, 680 bp, Cannabis indica
gtattgctttattggttattgtttattagatttttacggattttatgccaatggcgtttaaatataatgttgaatctgattgcaagtgttttatatacatacacacataaacactatatgctttcctgtttcgtgtttgtggatacttagtacttgaatacatggttttgtctttgctgagaaacctttgtctcttaacatggttttattctcaacagatgtttgctgcttactgaacttgaatatgaaagtaattggtgcagaagaataaatgtggtaaatattttgttataatgtcatttttgatctcgtttcaatgatttcataactcgcttagaaataagaagttgaaagaatttaggcatgtgaagatgatagctgaatgaatctaacatcaaaagtaccacgtgtaattattggtgttttgttttgtggggaaatgacaaatgcttaagattgtgagatcaagacttgttattcctttccttttgaaatgtcttaaatacatacattttactaagctttgtgagttcaatatgtaccatctaggtaagcccagtacatcatttaaggttcttcatatttcattctcagtctgatatgttacaattgctagcaaggagtttggcgacaaagcaatgacacttattggaaaggtttcttttaagaacaattcaggt

SEQ ID NO: 248301 - DNA, 815 bp, Cannabis indica
ctaacaagagtgtaatattaaaatacatcaaaaaatcgtatttttctgtaaatgaaatcgtaaaaatatttaaaattccacacaactttattttttataatttttttattgtttttgtatatttgtgaaataattcctattttttcagcctacattgttattgatttaaataaacacaaataggatcctgagttcaattttctacaatttttttaaatgtaaccgaattcctaacacgaacaaatgtaaaaaattaaactagttttatcataacaactctaagtcggattattattaagttttattttgacaaaaaatcagttcagagtcctatttgtactattttaaaaaatacaggatacattttgttatttaataaataaatggccaaatttgtaacttttgtagaacacaatgtccgaaatgatatttattcttgttttataacatactgtaaaattgtaattgaaaaataaaaaacttgtaaaattctaaaaagaagttgtaaaattgtaaatatatttatgactgtaaaagtgttagaattttgcaaaaaataataatttgtgtaaatttctttttaaatttattcattcattacaaacttttatttttttcaaaattaatattaaaaaatatgtgaagtaacattttttctaatatttttgttccctctatttttttgggatataattaagcttaaaactatggttcattgaaagagacttttcaacactaatatctttttattttattttattaatttttttttttgtcaaaaagttcctcaaggattatatcaagaatatatttgg

SEQ ID NO: 248302 - DNA, 1023 bp, Cannabis indica
atttatcctgctcttagttgcaaacttattaacatttcagggtagcatttcatgcatgatatgtagagatataaatagaaatacatattttgagtccatgcatgatttttgagaaaagctcacagtcttatgaattgcttgataagattttattctaagcaccataggtgaaagataagatataagaaatcaaagaagggttgaagtgccactgtttcgggaagcaatagagaaaagttgtagtttcagacggaggtctttatggctcatagtggcagcccaatagagtgggccatgtcagtgttgtccatgagataacatgccatgttcccgtctttctctcctccatttatatgagtattatagcgttacagttaggggcaaccttaattcttgagctcgacggggcaatgaaggaacaaggttagtatgtgccctgctgtgacgagagatggctagccagaggagagcccatgggattttatagctcagcaagccctgcaggctcaggcttaaccgaacagtgtgtaccagtttagaggtcaaagagataaaagaaaataaatgttctaaattcacgatcatactctgaatcgtattttcataatgtcacatacatgcagaactttacttactgagctgtagctcacaacttgtcttgtgttgcaggtaaagctataaataagtagatggctgggtgagttggagcacagtcctaaccctggtggtgtacatatggatattttgaccgcgtgggagggtctaaccctatacttttgattcgtctatgtgctcttagtagttaagtgtaatagtagacacttgtttgtatatgcttcgatgtaaccaatagtaggaactctatctaaaggtattttattactttaaattaaaaagtttaaattagcaataatttcataagtagttaatcaataaactaatcaaataatacttcaaattgcgatagtctagaatactgttgttattagtaagccaaagaaaaaccaaaaaaggggtgttaca

SEQ ID NO: 248303 - DNA, 620 bp, Cannabis indica
ccctttctagcttttcaaagatgcatgaaacaaagctgagtttttcatctccatatttcagccatgccatttttgctttttgcgaaaggaaaagaacataggccttgtgaacctcagatatttcctgcaagcttcctgctctgctagctttttttcctcattaagcggatctgtactcaactgatgctgtgcttcttctaatgcctccttcgaaattttttcagctttatgaatctctgaaaagccttccctgtttatgcctttaaacacctgctttagccttcttaacttggtgacaattcagaacattttggatccctctaccatctgattccaactaccagccactttatcttcataaccaggtgccattttccacatattgaagtatctaaagggttttttcccaagatgcctttccatgtaaatggagaccagaatcgggctgtgatcaaacacaccttcaggcagaaacactgcttcagattcctcaaatgattctatccaatctgaattcaccaatgccctatcaattttggagaatactctgtcatctggtttttgtttattattccaggtataaaaattacctgagaatttcaaatcactcaagccacaaa

SEQ ID NO: 248304 - DNA, 573 bp, Cannabis indica
tcttaataagtatacacacacccttacaaagtacataactgtaagttgaaatgtcttcatttcataattaaaatattttaaaagctaacaacactccaactgttaagtgaaataaaataaacatcaatgactattatttaagcggaaacatattctttggtttccaccacttgagctacttgaggctagctcaagtggctataggagagtgcgtgtgtgttggaggtcttaggttcgagccccaagttatatattgtgtaatatataaaacgcttgaatcaaaaaaaaaatatatatattctttggttttctaagaggggatgacatccttcaccatgtgtgaatatgtatatgtgtatatgtatatatgtttatgtgtatgtgtaagaacaagacgaaagagcttttaacattctttaaaacatcaaataagttaagggtaaatatcattttggatttacaaaagttacccattggaccctgtgttttgttaaatgacaaaatggaccctgtattttttaaaatagtacaaataggaccttgaattgattttttgtcaaaataaagtttaat

SEQ ID NO: 248305 - DNA, 553 bp, Cannabis indica
tgttctcatttctaaaaacaattttttgaaaagaaaaaacaaaaaaacaataccaaacatgctctaagagattaagaaatccttacaatgatggcagcagaatataatgactccttccattcagatctctagcctttgattcttgtctgtagcagagcattatcaagatctaaacctggatcttctctccttcaatttggtttgatatagtcttcctcactatgctaggtattgctttgagatgagtgggcgggcatactctcaatttaccaaggcttcagaggaagaagaggaattcgaaattagatggtgactcttttctactttctattttgtctgacaaaaggagactaatgtcaaattcaattaagaaaataagagcgatcttattctttatatagggagatactagggttagatttagaatttaaatagaatttaaaaagatataattaatggctttattggacccttatggtcgaaccctatatgtgcctattgggttttaattttgccaattaatttaactcatctttcatttcacaaatgtcat

SEQ ID NO: 248306 - DNA, 599 bp, Cannabis indica
gggtttcaaattgagacgtaagatatatggccatataatatatccatttttgtgcgaggacgtgaaaaattaatcacatgattaatagatttcataaataaaaaatgaggtatatgtataaaatggaaaactaaacacactaaaataaagaagaaaattgtagttatcgctagttggactaagtacaaattctctgctataatcataaacttaattatatatatcaactagcttatagaaatttcctggaataaaaaatctttacaaaacttatcatcagattattcattggctgtccagatatatttaatcagagctgcagcaacacctattgatcaaagttgaagagaaatatctaaatacatgttttattcttttcaataatccatatttatagtaatgaaatattattgggcctaccccatatgataaccaattgattacaaatagtataatatagcctttataaaggaccgaaaataccttacttacgtattattaggaagtgcattaatataaatacgacagtaagaagaggtaatacaaaagtgtgtaaactataaacacgagtaatgataaaaaagtcatttatctcgatt

SEQ ID NO: 248307 - DNA, 705 bp, Cannabis indica
ctctctacctcttaatcttttctatctctatctctcaatctcaatttgaatcatattctgaaaagataagtgatggtggtatttataggatcaagatcctagggttcggtggcagcaagaaacgatgttattaagttagttaagcaataaccgacttaaccaactctcctttgagtgaggtctccaaatcaacataagtctaagtgcatcccagagcgagtatgagggcttctggaatcacagaccaaggtactcgctgaggtgacttcccaaataggaaagaactagctggagtcaactagccgggactttcttccaggaggaataactagccatctggaactctcttccagaggaggactagctttcctgaagcctacaccttgagtggacataacagtcattcgggaactcccttccggatggcaactatcattccacgagactcttttcgggctggactagttagctatccaggaacatacttccaggagataactaagcttccattactatgactgtcaaatcaaaattgtttatttaaaggaactataccacaaattccaccttgttactttaacattaaaagaataataatgatgaaaaaagaatacagccatcatggttggtataccaaaaatctagtatactagcttttaagattgatggaattcaagcaatacttgaacttgtttactgtcaaga

SEQ ID NO: 248308 - DNA, 762 bp, Cannabis indica
aaaggtagctgttttttgtagtgtacgtactaatataaaattgtcatgtgtacaagagtgtacacataagcagtctatggtggcagttataaccaggtgatactttaaatttgttaacaattcagtaattttgaagattttactgttaaattttaaacttaggagaatttagtgcaagtgaaacgataggatagtttataaaataaatagcactgtcctcaacaccacacaaaggcccacataattatgtcaattatacttaccaaaaagagaaagttattaaaaaaggacacaactttaatcaatcaagtacttgtatcaaaattggactctaactagatagacacacactactatgaattaattaagaaatttttacatatctatcatatcttcataaaatcttattggagaatattgtcccacatggattaaatatgaaaatattgagtcatatataagaaacatgggctactccactcattgccaaatctaaataagaagtgagaagaattaaaatgagtaaaatcacaacaacaaaaacaacacatcatgtagaacgacaaagtaaaatagtaattaaatataaaggtaaacataataaagggatatcttttgaccattattgttattacctacttgaagatattgaacactatatcgatatagcgcgttatgagagttcttcacttttttcctacttgcctgaacccgaagcaccactactataaaaacatccttaatgctcctttttcatatcca

SEQ ID NO: 248309 - DNA, 1148 bp, Cannabis indica
tgaatcttgttttgttctttttatattcaagcttaaatcaagataaaatcaatctaactatgaaaaggataggttagacaagaacttggggcttacagaagtaaacatctcgactcatagatgagaattttataatcaagaaggaaaccaagaactcttaaaactgtccttggatctacttgatggaaaaagtacttagttgcaagttactaatgcagcgtatcaacaccgagtaacaagacatttcaacaaaagggtcaaaaaaaggctattcaatgttggagacttggtgctaaggcatgtctttgcaaatacgagggatacatctgcaggagtattcaacccaaactgggagggtccttatgtgattgaagcaatagtaggaatcgggatttacaaattggctcggctgaacagctcgctgataaagaactactggaacgtggaacatttgccaccctactactagtaaattaatgattgtaactcatatttttgatgtaatgttttgaacttcagttatgaataaagttaattatttattttttcaagtaattacaaagtgttactccttaaaattacttgatgagcatatgtgtatgattaaccggaatttatctgaaaatacatggtatagtgcaaacccacaactttaaatttttttgaattatttttaaagtttttgatcagacctttctaacgagaaagggatcaaacaatcataactttttgattaaaaacctgtctgacgagaaaggaaaatcaaaagttataaatgagacataactcataactcgcgtgtgaagttgaatattaacggctcgcacagtataggaaagtattaaataaaggtgtcttgataaaagtacttaaacctagtatatgaatagacgacctaactattcatataagtaatcaaaaatatacaaactgataaatcattaatagtatattcaagtttgcttaagatagattataactgttactgcgagacacaattgataactgctcataaatcaaaagcttggcagataataaactgctcgcgtgcatagtagagtattaactacttgaataggaaaatatgagaaatggaaagaccaagggtattctgcatttgattaaaatataattgtttacattgtgaa

SEQ ID NO: 248310 - DNA, 589 bp, Cannabis indica
ttggaggtttggtaagcgaaagacattttctggaaatttcccttgcaatccacagtcccagagataaagaagctccaaagaagatgatatattggtgaaagaagtaactagttcaacattagacatgttgacgaaacaaagagaaagctgcttgagattggtgaagttttgaagcattcttttcaacacataagtctccacaataatatcatcacagagggtgagatgagtgagtttagagagatgagataattcgacagggatgtaaccgctaaaattattgaagtcaaggattaaagtttggagatgttgaagtgagaaaagggtggtgttggagtgaagagggcctttaagataggtatcacttaaatcaaggccaatgacatgaccagattgttgatcacaagacactccatcccaaaaacaacaatcagttccattcttccaagagagaatcttcgacttcaactctgctctattgtagaaattttgaggaatttcaatggaaaatgagttgatgaattggagcaaagcagagctgtcgtaagtattacacaagtgaaagtgaggatgattattagaaggtgaa

SEQ ID NO: 248311 - DNA, 1793 bp, Cannabis indica
aaagggctggaagcattaatggagttcaatttgggagagatagaatcaaagtctcgcatttattctttgccgatgatagttttatttttcttaatgcaaaagacaatgaatgcaatactatgaagcggatcctacagcaatattcaaacactatcgggtcaacaaataaacctcaagaaatctgaagttagcatgggtaagaggatctccaccgttcagggacaggctttagcacagagattgggggttcggcttgtctctcaccatgctaagtacttggggcttccgagttttgtgggaagaaggaaacaagaggtctttgaagtagttaaagagaaagtttggaacaagcttaaaggggggaaagcttcaatgttctctcaagctggtaagaaaatactaatcaaagttgttgtgcaagctatcccgagttataccatgagttgcttccgtcttccaaagaagctcattaaaaatcttcactccttggctgccaatttctagtggggagatacaacggaacataagaaactccattggagttcgtgggataaattatgtagacctaaggaggagggaggccttggatttcgtagtctaaccgagttcaaccaagctcttttggctaaacaagggtggaggcttcttcataatcctcactctcttcttacccgaattttgaagaatagctactatcctaccacttcctttatggaagcgggttttcctaatggtgcttcatgtgttcggaaagggatttgttggggaaggaaaatcctcaaagaaggggctaggtggagagttggaaatggtagaaagataaaggtgtgggaagataaatggcttcctagacctcatgaatctaccctttctaaatttcccgatattccacctcaaaccaagcttcataagtttataacttgggatggagagtggaatagagaagagatgactaaacactttcacgaagatgacatcccttggatacaaggcattccaatagatttatacatggaagatgatctcatttggcctttcacccctaatggtcaagataatgttaaaagtgggtattgggttggcagggaattaaatcttaatcctactagatgttctaacatggctgagattcagaagtggtggaaaatgctatggagtctacaactttctcctcggatgaagctctttggttggagagtttgccacaactggttgcctgccaaaactaatctgaagcacagaggtattgatatcaatactcgctgtgacatgtgtggcaggtatgagtaaactcttacacatgccttatggagttgtgatagagttagaaacatttggaaactcttttcttggtacaaaaactgttcaaatttgggggaaggaactatgtttgatgttttaatggccattgagtagacaactaccaggtgtgagtttgaagatactatcaaagtgatgtgggctatatgggaaaatcgaaacaggaaatggaagcaactcccaagtatgaatggtcagcaactgataaactggatcttctctgcctatccgaatgttctcaaagctgaaaatgatgttgttcaccaagaggctggtctcaccatcaatcagaagcagtggatcccgcctgctaatggctgcatttgtgtcaactatgatgcagctgttatcgacaaagttgcaggtgtgggtctcggcttcatctggcgcaaggctgatggccaaatcctttctgctggtcagatttacatgaagagtatctgctcagccaagatggctgaggcttgggcgat

SEQ ID NO: 248312 - DNA, 575 bp, Cannabis indica
gttgaccaatgaggtctattctcgacacatcaaagggccaaggagattgcatcagtgtgagtttgtttggtggagctctcaggatctttgagaatatttggcatatgtgacattttttgacatagtccattgaatcctcaatcatggtagactaaaatatccttgtcaaagtatctttttgaataggattttcccccagcatgattaccgtagaagcctcacgcacttctgttaataaccactttgcttcggtcttagtgacacacggtaggtgtggcattgagaagcctcgtctgtacattactccatctaggattaggtacctagtacctcttcttctcatttttcttgccttgtttttgtcaggcaaggctccaattttgagatatgctgctttgagtgtcatccaggttggactgtcatccaacatctcaacctcatccaggatggtaatgcttggttcttttaataaatgtatgggcactaaatttgccttgttgactatggtgcaacttgctagacgattgattaaatgcatcagctgttgcactctcttctttggggacttgccttat

SEQ ID NO: 248313 - DNA, 1256 bp, Cannabis indica
ggttattccaatcgaaaatgacttaactggaagcattttctttgaaacaaattttatgtacaggttattatcgattaactttatttttttttctttattattatcattttttaatcatgctgcatatatatgtcttcttcacggttcagattatattaacctacctattaacttgcgtaaaccacttggactggtttttgtatggttcataatcgtggaatgtctttcaagttatagaccctttctaccttagggcctttccttgaagtgtacttaccaggacaatccagaggcgatgtatcactattattctgtcaatgacaatatatttattaaatttcagtaattaaaatacaactgttacactttgaaaatttgttaatgcagtatacaaatttgcaaaggcaaaacagaaacagaaataattagtgtagaatttaaaaacttgaattatgtgtagtattagtgttcttttaaacaattctagtccatggatcacacacagagaataaaattattagtaaagtatcaaagattatcaaaacaattgatttaaaataaatttagactctctctagtgatttgaggtaaccatttgtaatctaccttgctaatctgatctctgaaacgcactaagtagtgaactctcttccactcttgatgtgtggttactttctcctaaaataagactcaaacaaatcttctcccgaagatatatgttcactttcttccaaaatgagacttggaaaagtcttctcccgaagacccatgcttgttcaaacaagttcttcaaccaattctacgaatagtataagaacaaaacaaacactaaaacctagccgaacactctaggttttacaaaagaaactctcctcacaaagatgaaaatatgaaaaaatgaagctagtagaggttagaatcatttcgttgctctctaagtccaatttatagaacataacaactctggaaacatttacaatatcaaaattgcatcagatcaggaacagaaaagaaactttccaaaaactttccaaaaatgaccaagattataattgggtctccaatacttgccaaataaagattatttgatatgctaaaatcatgacaaaaccgaaataatcaattagaaaaaggaaaagtcaagatttagaaaaataggcaactttccataaagagaattttttctcttgcaagaaaagattgccaaacaaatgcaactagcttagaaaagagctttccataaaagaaaggagcaa

SEQ ID NO: 248314 - DNA, 812 bp, Cannabis indica
ttcaataaacaacatcattttttgttagaaaatatttaatcgaagtgttaatttaaaaaaaaacatgatagtatttataaaaaaatgaaaatattgtataaagttttaagcaaattaaattagatacaaaatgttaccaagatatataaaaaagtaataatattaaaatttataaattaaaagaaaatactaataaaatttttaagttttttttttaaataatgttaaaagtattgaaaaaaagagaaaaactaatacaaagtttaagaatattcaatgtgaatatatataatagttaaagtaaaatttttataggagatttgtttctttaagaacctgctaattaataaaactaagaaatttagtaaaattattttattcatttgacctaaaatagatagatgttttaataaagagaaataaagaataaacacatgcacaaccttaagttctaaaatagatatttatattttttaaattacattacagtgattaaattgtttaaattatacagtggatcataaattaaaacatgcaagatattaataatttttctagaatgtctattctatataaaatgtggctatgtaacaaaatttttagtttaacgatacttttttggattctacgttaattttaacaaaatatcctatgaatattctttattaattttatgatattattatatatatttaaaaataaaaattatacagatattttatataaataaatttttattataatttaaaatacctaaaatattattgatattcttaatattatttttaaatttattggtttaactttaaatt

SEQ ID NO: 248315 - DNA, 559 bp, Cannabis indica
tttttgttttaataattattttttgtgtggggatgtgtgtacatattaatattatatatttgaaaataaataaaatataataaaaatttaaaaaagtaggattttggtgatatattttaaagaagtcgatatataatgtagtgtaaaagtgtactgtaaaataaaaaaaaaatagaattttgtgatgtattctttagaatagagtagagatgttgttcggaatgctctaaggggcatatattatttgactgtagataatattaatggatttaaaatgcaagagaggcttacttcaaaaaaaaagaaaaaagttttttatttttatattttaaagtagtttttttttatatatatttttatagaaatttatgtagtaacacacataataactaattgagtaatttaaatcataactcaaatctatatagcaattgataggagaattttcataaatatagaaattgagggtatagtttactttttttttatgacataaataattaatacaaaaaaaaatatgggattaaaaaataattaaagattaaaatatgagaaaaaa

SEQ ID NO: 248316 - DNA, 945 bp, Cannabis indica
aatacacgtgtcctttaaagaggagtctggtcttgagtttctaggtgagagaaatctcactataaaacctagtaatctttcatatgcttttcaccaatgatagttgtttatattgtaaggctactacatttgtgataaaattacttagtgtttttgagttgcttcagtccactcaattttgccaaatcttccatattttttgtacaaatatagatacgactaaatgaaatggatttttctcattgatggatattaaagagtttggtgagaacaacaactatttaagattgctatgtatgttaggaagaaagaagagtgagttattgggtatttttaaggaaatggtgagaaagtgaatacaaaaatgggattgatagctattgtcttgagatggtaaagaaagactcattaagaaggtagttcaggctttatcgaatgaagcaatgaatgtatttcttctttcataggatatgtgtcatgattaacaacaaatgatgagttaattttgctggggaagctctaattcaaagaggatactattcattggatgagttcacataaaatgactatttataaaagtcaagggggcatggggtttagaaatctttgagatcttaatttttttttattaagcaaagaagcttggtgccttattcaaaatagtgagagcatggtagggaagttatttagagctagatactatcctaccggttttttatgacaacaaaatttggtgataatcatagttatgtctagagatctattttagaatctcagccattacttagacaaggtggggaaaaattaatagggttaggttttgaagtggatatattgataaacctctcgttacaaaatgatgttgatccatatgtgcatactcaacatccaatgctacttaagcaaccagtatagagcctaagaagtttgacaatcgtgagtggg

SEQ ID NO: 248317 - DNA, 509 bp, Cannabis indica
aacattaaatgttatttctgatctatattaataagtaaacctgattatattgaaatgagttttatttagggcataaaacccaacagtagcgacaatgccgccaacagcggcaagaactggctccctaaaaaaatgttcaggtgggtgtcgtgggggacgaggaagtgttgaaggtaataccatcactacaaagagctcgtccccgatatcccatcgacgaggatgactaggaaggtcacaaagatgagctgaaggatgatcacaacaaaaatcacaacaaggattatgaagaagagtactacgagcaagaccttgaagtagtacgactacagtatgagcttggaaatacctaaaggaggttagccgatctagattaagtctcatgttagatgcaagaagcgatcagaaggacgccaaaaaatgttacaatgtcttggccaaattggtgttcatggtaggaaaataagttgaagaggcttccagagcgactgtctagcctaaacaagagg

SEQ ID NO: 248318 - DNA, 1951 bp, Cannabis indica
gaatgggactttcttttggccattcttaataaatttaagtttcccataaaattcatcagtttaatccatcaatgcatctcctctgccacaattcgcttcagtattaatggtcatattacaagttccattcatccttctcgtggtattcgtcaagggaatcccttatcgccatacattttcctcctttgttcagaaggccttactgctgctcttcgtcttcaggaactgaatggttctttcaggggcatctcagttgctcgcaatgcccctcccgtttctcatttgctttttgcagacgacactcttctgttcacggtagcgtccccctcatcttgtaatgctcttaaggaggcccttaacgcctatcacttagccatggtcaaaaagtcaactacactaaatcttccattcttttttcgcccaatactcctacgaatatttctacttactttttgattccttagggcttgaaccgcggcctttcatcagtaagtaccttggagttcctcaatgttttgggcgttcaaagaaatctaatttcgatttccttcttcagaaagtcagctcccaactctctatctggaatggcaagttgttttccaaagctggtaaggaagtgctcttaaaagctgtcatacaggccattccctcttatacaatgtcttgtttcaaactcccggcctcaatctgtcacaaaatcgaaagattaatggctcaattttggtggggatcaatggggaaaggatctaaaatacactggaaaaattggcgaactctttgctcttctaaattctttggtggtctaggtttcagatcccttatttcccataatcaggccatgcttgctaaacaaacttggcgtgttttctcaaatccaaattccctcctggccaacattttaaaagcaaaatattttagactaaatggttttcttgaggctaagttaggtcactctccctcatatacttggtctagtctcctttggggaagagaccttcttattaggggtttgctgtggaaggttggcaatggctgctctatcagaactcttcaggatccttggattccaggtataaaatttccatgcttaagaagtaatgctctgcctcctattgataaggtaagttttttcatagacaataaagggttttgggacaaaaagaaattgtaccagtattttgacgattattctgtgttgtctattctcaaagtcccaattgggggccttcaaaaggccgattctctcatctggaaccaagaaaagtcaggaattttctctgtaaaatcagcttatcatattgccaataatacatcccttcctccttcctcttctaactcttctttctctaatgcctggtggaaaaccctttggactttaaatattcaacctaagattaaaaatttctcttggagagttttccaccacattctccccgttggccttaatttgtttgttagaaaaaccattcctcaaccctcttgttctttctgtaccaaccccactgaaactgttacacatgccctgctagattgtcctagagcttcaaaaatttggaaggcctcgcctctccgaagttttatttttctaacaggcatgttgatgttaaagatttcatgatgaatggtttcgaacagttgcataaagatcaattaatcttattgcttacaacattatgggctatttggcactcaagaaacaaaaagttatttgcaaatttggatttgacccctactgatattattgcttggattgacacattcatttcagattaccaagcagccatatctaatactaacagatgtagtggagctcacaaattgcaggtttcgggcggggaaaaagtcgttccccaaaatcaatacctacttcgaactgatgcagcgattaacacgacacaaagtaggatgggttttggagctgttgttcatgactggcaaggtaatttggtag

SEQ ID NO: 248319 - DNA, 564 bp, Cannabis indica
agaagcgatcttcaaaccaactcaccatcgagcctgcataatatctagaaaaggctacacctaccgtggcgagcgccagtgaacagccccttgggtctgtacaccaggtgaaattctctggttctcgcccaaaaatggtctttcttaagccctcctaccccttgcccattgaagctggtacagaaggctcacaactctgctcgttacaaactacaaacaattggcggcactatcaatcctttgagtccagcgactggaattactcaataaaggaggtttagaaaacttggtgtagagaagttacgatcttatgcagcatgttagtcttttttctgtcctgttttctttcaatcccattgtttttatactctcttacgttcgggtttcattcctcgcaagcatctcttttgtcctttgccgctcaacatagggggcttcaacgagttgagatgctcgagacagagctttgccagaccaaagagcatcgtgatgccatgaccaagaagtggaatgacttagagtctgagctctctcgagtaaagaaggaagatgagaagcaatgaa

SEQ ID NO: 248320 - DNA, 722 bp, Cannabis indica
tgagaaccatccttcttgtgaacaaacgctggtgcggggacactgtttaaatcctcaatttccatatctgaatcactgccaatcaaattcttttcaggagttaattctagaagctcattaccattttcacaatgaacatcattcttgtgccccgcctctgcattgtttaatttatctgcttcatccttggaactagtttgttgagaatcaatctcactaggaccattctcattctcatgggcagattcaccggaagcatggagggcaatcaaattttcattatccatatagtgcaattatgattattcgaagagcttctaaacaaactaccaaaatcaatctgaagaaaatgaagccccatatcagccacaaagccatataataaggaattactttatgtgtcatgtgaatattacaaaattcgatgcaaatgcaacaatgttggaaatgggggaaggcctctataatatattcacctccaaagcatatataaaacgcaaaagactacattaacttagtgttacttccaagatatgcaatccttatagacaagtcaacttaaatgataaacccatttgagtgcagattataggaactctaaccataaaccatacttaagtaaacagaacatgtgaacttgaatgaagaagaactaaatcacaaacactcgaaatcgacacaacatcacagaaagatagctactttacttatttgatagcaat

SEQ ID NO: 248321 - DNA, 1110 bp, Cannabis indica
agaattttcagcatgtgcatttttctatttttttagtccctcaaagggctatataaggagtgaacttcatttgatttcgttaagcaatccagaaggagataaacaaccgaaaaaggagtacgaatttcagagaccgaagtcaatactagaggcattctttagaaggagataaacaaccgaaaaaggagtacgaatttcaaagcaatatgtttcttttgaaaaaaatttcaaattaccagaataatttgttttgtacaaattttgcatggtgaaacatttaggacgaatatgcccctcaataccacaaaaatgacagattggaacaaaccttacctaagatcttatcctttttgaacttactggagactttgcttctgcaaacgatatttttgtagcggcatatcttaaatttgtagcagcaggtaaatttgctggaacactagattttacaaattttgtttttccataacttttagtaccatttaatccaagaccagtaaagcctctttgacctgcatgatctgaacttcctcaaaaatagaagatccagggttaagcatttgaatatatttttttaaaaattttcaagttccttcttcaatagaataatttcctcatcttttaaacaaaaattagtctcatataattttcaattcaagagattcagtttgatgagacaattgtttatttatttttgacaatgatctattttcagaagtaataacctgtaaccacttttcatacataatcttgtaagactcagacaatgactcctcacagattttagattcatcagaatcagaattttctttttcaatggtattattcaaacataccaatctttctttcacttgtgaatcacaaataaacttagaagaaactcagttagtgcaatatttttagaaatatcttcatcactatcaatttcatcttcactccatgtgaaattgaaacttttcttattcttttttagtgtatttgcacattcagattgaatatgtccaaaaccttcacattctctgcatcaaattctcttttgattgttagtaattgaaagttttgaaaaagtattaccttttttctcttattttttcatgtatttttgaaagt

SEQ ID NO: 248322 - DNA, 517 bp, Cannabis indica
tcaaaaggaagttaggacagagcaagtggaagagaatggaactattctaaacgattatcagaagaaagttttgtacaataactattaaaagaaattatcataggggaaatgaaaaacagaattttgaatgtatttcctaaaaacattagcaagaatgatagagaatgttttaaggagttgtataaagataggacgatgataggtatgtagtatggaatgtatagaaagttgttatatctaggacttttcttttaatattggtgatgtcatatgtaatagattaaagtaggctaattaggatttttgccatccgaactttgatatgtaccaaattatgttctttgaacttttaaggtcgttaaaaatatttcttgaacttgtatttaattctctacgtttgaattttgacttagtaaaaccctctaaattattgaactcttagcaaatttaaggtgctatctaattaactgcctacatagattgtttatttggatactcttatacacgcgattcgttt

SEQ ID NO: 248323 - DNA, 981 bp, Cannabis indica
ctaagctttatggagtgagcaacctcctgggctataataatattatcagagatgaggcggccaggtagaaaagcactttgattgggggagattaggttgttaagaaccaacttgagtttattggcaatggattttgaaatgatcttgtaaacaatgctgcaaaggctgatgggtctgtattccgtgaggatagtgggatttttaaccttagggatgagggtgatgagggtggtgtttaggggtgctatatccccatcaccattgagaaagctgagagcagcattaatgacatcatttctgagaaaagaccaattatccttataaaactgggagttgaagccgtcgataccaggggctttatcaagggggagctggtggaaagctttctcaatttcagtgtgggtaaaaggagcttccaaaaagtgaatgtcatatagtagctatatattattagctaatggggttcggctcagacttcatatgtatatgagtttgtgagtgtttataaccgacacgagttttgcttaaaacatataaaactatatataaatattatattgatgatgttgtatttattaattcaatgcattccaggtgctctctattaatctttgctgtatgacgaagaaaaaaagtaaaaagataatgaaaggaagaaaaataaagggtgtggtaacacttttttttaattatttttcttttttttattaaaaagtaaaaatattaatatatctatatatataggagaagtatgaaacggtaacgctagtataaagagcactgctcagaactgtgcaagcagactatcaagttcgtcgtctccattataaaattgcccagtcaaatactctcactactacaaaaacaccttttagaggcggttttcaaggcatttcagcgtcggttttaacaaaatttgctaccgacgctaatttgggcaacgctataggattaaaaacaatcgatgctaaatggtaccct

SEQ ID NO: 248324 - DNA, 792 bp, Cannabis indica
ttttttttgacgcgttgattaaaattacacatattttttatggatttgattatgaatgtttaaatggagattgttagttaaacttcaatttaggaattttattggagattgtttgaaacttcctagggattaatgctattttgatttctttcttctattgatgtaatttatttatatttgtgcttattattatatgtgtttgattgaccatattatgtttgatttatgatttcaatacaaaatttaaaaagcgagtattgagaatattgtaattaaataaacatatgtttcgacacaaaacgagagtatttgtgtggcttgtgtagcttttgaattaatgcttaatgctgattatatgcgtgttatgcctcaaaaatgtaaaatagtgtcgtgtaatttagatgtcttaattagaatatagattaaatataatctgctatcatagttgatagaacaagaatatattagtttgtattattgaaataggaagtagaagtaattgaaattaattttttttatatttcagattaaatcttgtttattgctttgttattaaattttttacttagattatgtagttttaaaatttatttttcaattgtcaaataaagataagaattcagttaattggtacttaactatgagaacaatctcaaaaataaaatatttttaaaaaaaaatttacccatttaatataaaaattccaagaaaaaaatacccttacaatgaacaaaaataattttcctacctacaactactaaaatattagcctttagaggcagttttttcaac

SEQ ID NO: 248325 - DNA, 662 bp, Cannabis indica
ctaatctaattatgccttgaacggataattttttaattcaacatgtataccatggcattgcatttaaaattatttaatcactagagtaataaccctaggtcatataaccgctcactttagggtaataaccctaatcccagtttctaatttaatcgtaatcgcaatatcaaacatgagcgccattatgcgtaaatttacgtgctaactactgtcttacttggtattcttagtatgaggagattctaaatccccgggtgctcctaaacaagggtaatcctagtcacaaattcttgggatttcacaaatagggtttatcccaaaattcactttcacataatcatataatttgcatttcaattacagataggcatatagagctcggaacgagtttttcaacgatatacgaaacgttccaaacggagttcagattcaaaagttataaacaaaatgagtttaattaacacaatctacacagaaaacccctagcgggctgcgacactcacaagccatactgcgacatttgggtagcaaacctagaaattccaacctagcgggccgctgcatgcaaaacccatgccgtgacacctcggttaaaaacctaggaaatacaaattttcaacctacttgaatgtgcacccgaaaaccaaaccaagccacaacaa

SEQ ID NO: 248326 - DNA, 782 bp, Cannabis indica
atctccaacactctgactaaggaaagatttcaaatcaaaataagaagatttcatcttcttgataaaattttgaatagataaaaggtttagggttttcaacaaacaaacaaaaaaaatctaaaagttcctaaagtgactttattaaaccaacaaaaaagcctccaagagactaagtgcatcaaaggacagagtcaagatactccctagcattcgacattataatattatggtcaagtaaatgaagattcaataatcaaaaaacgaagaacatttaagcattttcgcataacacaatttaaatttatacaaaaatttatgcaaagagaaatttagaggacttactcactgtttggcataaagattgaagataaaattaccaaagaaatggtccgtacaatgcttgattgaagaagaaaactcaataatttagaagttctttctcgcttcttgctctgaaaactcacaaagtgtaaagtttcaaatggagtttgatggaggaatttgtaggcaaagtggaagtgaaatgaaaggttttggaaatttaattttgaaatgattaatttttttcaaaaacaatccaacaaaatcaattctcattaagactgcgtgggggcatgtaactatccgacatgatccccaagatacagttcttaagaaaaaagtaatcatgaaaaagatttaaaaggatgggctggaaatttgcttcagctcgacagactaccttggaagacagctcatgaagaggtggacatctgtcacatgcccgagcaaagtatgaagct

SEQ ID NO: 248327 - DNA, 718 bp, Cannabis indica
gtttacaattcggcagaatttctaaaaatatgaattttctcccctctttcctttgagtgaatccatatatgtagaaatatgatggtagttacttaatctgatcttagtgaaaaggtacaactaatgggtgcttaatgctcacatttcacgtacaactgaaaatttggataagtatatttatctgtttatatttaaaatacatcttttatttggtcagaccatgttatttgtgagcaggtgaatagccaggtgtgtaatatgaggaggtacattgctgagcaagtattacaaggagatacattactcattgtgtattacgaagagatacattgttgagcatttattacgaggagatgcattgttgactgtgtaatacaaggagatgcattgttgagcatgtattacgaggagatacattgctgactatgtattacaaggagatacgttgttggtgttaaatatgacctatttcaatataatcagatttactaattaataaaagattaaaaatcggttttcaatataacaagatggagccgttgtacgaaaggttccggaaggaggcacctccaatgtttctgggaggtcctgatgtgatgaaggtcaagcagtgactttcagtgattgattgtatcctcaattttatgggagtagttggtaatgaccaggtgacctgcgccactttttcagtttcaggaagacgctctcgtgtggtggg

SEQ ID NO: 248328 - DNA, 634 bp, Cannabis indica
gaaatgaagcaaacaacgatgcagaagagattaaaatagacgaagattcagtaatcaacaacaaaaaccatcaagaaatagctccgtctcagatttacaaagataaagagaccttgaagactgtgttgagccactatgcaattagaaaacatttttcagtaccgcgtgaaaaaatcttgcaaaagacagttcctagcggagtgctttgacaaaaattgcagctggaagttaagggcatcaaggaatggaaacacaatgcaatttataattatgacttttgaggacaatcatagctgcgatatgaagataagattgaaagatcaacgtcaagcaacctcaaccatcattccagacatgatcaagtacaaattcacaaacatcaagactaaaaccacggttgcagatgttataaatgagttgaaaattcgtggattgagagtcaaatacagcaaagcttggagatcaatacagaaggaaaaagaaaaaagaggaaatgtaattaagtcttactctgagatagccaagtatctttacttgttgcatcatacaaatccagactcttttgtggagctcaaaacagaggaagatggctttttattcctttttgtagcattgaatgcttcaagaaaaggat

SEQ ID NO: 248329 - DNA, 874 bp, Cannabis indica
agaggggacggtggaccgaagctgggcttgattgtggagggaggtgctggcgatctgagagagagaaaatatctagagagtgggggtttgacggtggcatagcgctgggctcgggtctgacagcgtaggagtgtccgattgtgacaatggttgggctgactacagttaaggttggcgatagaatagggggaaagatatccagagagaggagggtctgatattgtcattatctaggctcggctctgatggagacatcttggctaaaaaaaaattgaggtcagcggctgcaaaagagaaaaggatctggtaatggcagaagaagaagggttgggggcacaaggatctttcgagaagaaagagcaagcaagaaaaaaaagaaaaaattatttttattatatttgaaattaaaattacatggaccactttaattttgacacatatactcttgtgtacacagagacagtccaccgtgacaattaattgagacttttgaatggaaagggtaaataactaacagaaatggggtttgggtagttttctcaccaaaaaaatgatttaggtggttaattgttaaaaaagagatatttgtagcgaaatccccttaacatttataattgttacacatatgatcctaatcaaaagaaaaagttgcgacaagagtacattatcttacgatttttttgcagtcatacctttttttggccattaagtgtcaactcaaaaatatgtggtgacatattattggactatgtattaaataagctaaagaaatatgtcgccacttgtttttgagctaacacttaatgggcttaattggtacttaacaaccaaaaaggtgttcacctcaaaaagtggccaaccaactgcggggtcg

SEQ ID NO: 248330 - DNA, 726 bp, Cannabis indica
cacgatcatatggaacaatttatctattttttcagattgaagaggattgtggctgttagagttggtgattggggctgtttggagtggtgggcaattgatgattctagaacattttggttttgataatttttctgattttttgttcttcttttcttcataagtttttttgggtttgtagtcactttactactatgtatttttctatctttttcattatcattattggttatttttctcatagctaaaatttgtatgttgtaaataaatattattatttgagtttaattttgtaaatagattgtattgttaattattgtgtattgtgtttgttaataatctgaatgtatttatattggttaaatcaatttgtgtattattataatttatatttatcaaaagtaatatttatattcatttaaattatataaatggaatatttaaaaaaagaatattaggaaaataatttattttaaaaataaaaatagatatagtgacactttgagagagtagttgctattatttttagagtctgacaacttgagagtctaaaagtctatagtgacgtgcaatgagaatctctataaagttttagtgacacgtgttgatgtgtcactaaatattacctttccaaaaacccacattagtgacacgtagtgaagtgtcactaaaactctatagagtcactcaagataggtcactgaagctcatttttgtagtagtgtactt

SEQ ID NO: 248331 - DNA, 827 bp, Cannabis indica
attctaagtagtaatggttgaatcttaatttcttaaaagaagaaaaaagaagaagaagaagaatcattgcaggaaaccaaatcaacgaaataaagaaattatacaattaataattaaagaagacataaagaaaaatacaatcaagaaaattaataagaatttaatatgtatgaaatatttattatgggtgttagcaaaatttgagctttataagtttgatctaaacattaatcaaaatcatttctaaccaaaagaataaagcaagaaaagaagaagaagaagaagatagaatcgttgatacttacttgaccatagagagtgaagagattcttcaaaattacattaacaaacaatgaaagacaataaaatctccaactcaaaatggaattgacaagaacagaaaaagaataatggttaagaatgaagttgaatagagggggaaaaaggcaccttgtttagctttcttcttcataagaatgaatattgctattgaagtccttcttcgttctctaaattaaatccttcaattttaaaattttgtagaaagacaaacctgttagtggttgagatacgattgaagcttcatagtatgatccgacaaacccattcctcgccaccattgtcgtgatcttttgggaagaaggagggtttggggagtcgaaacccagtctgcaccatcgacaagattcgatctttcctcaattgagatacgattgaagcgatccgccaaacaactttctttactgcaaacttcgaccaaatcacctctgctatacatttctctctcttttttatttttttttttttttttacgttttagttagtat

SEQ ID NO: 248332 - DNA, 644 bp, Cannabis indica
ataaattaacattaaaattttactttttttgattgaatgtatccaatccaatcccatacataatggaactaaaatattggatggatacgattcgatccaaaaaatactaggtctaaaatgttaaataaacttaaattaaaccaataaatatatatgaaatacatttaacagatagaacagatccaatctaacatccaataaatgttagattaattggataaataaaattaattaaattaaatcaaataataaaatttaacataaaaacattaaataattaaataatcaaacatccaaaagtatgcttggttgtcaatatatcattaaataattttaaattctataattaataaaataataacatgtcaaacctaaataataatcaatgaatattaataaatgcattataaaatattttcatattttgtcatcaatttttttttagatctaaattaccattccgaataataagaaaccattaacttgtcttatatatagcttattgatatattttcctctacaaaaaaaggttccaaagtcctaattttatatatctatctcaatgtcaaaatattttttttttcaaaatgagaatatttattcataagttttaaaaggcctaaaccttataagtctagtaaaaa

SEQ ID NO: 248333 - DNA, 541 bp, Cannabis indica
gtctcaaaattaaactaaaattattaaaattaaacataaactgattattccataaaatctttcattaaggtctctgtaatgaccgcataagtttaatatgttggattattaaataatttgggtttaattatgagattgaattattaattatgatttacacatttgtagaggtttattataattcagtatgtattaattatgctatgtatgagtttcttattttctgtatttgtacttggtagcagtggaatgcgacgttggctattagagaatcacattttcatatggttcaaaattttattgacagtggggcatcattgttagacattggaaatatcaggaaattagcgggatttgaaaatgaccaaattacccttggaggcccttaaacctttgaattgtgtcaaggagcaaaatagtctttttgcttagaaattcttgtcttttgtgggctttataactctaaaattgaattaggtttaataaataattaagttattatttatttagaaaagttgagaaataacctagaaagatcacc

SEQ ID NO: 248334 - DNA, 671 bp, Cannabis indica
ttttcattatataacaattttaactatatctcaatattaatcaatccataacaatactaattgtattgcatacaacgtactatacagtacaatatacttttcttacctttaattcaggttcatacatttcgaccaacctaagtggagaactatcatcgataatctcagcccttaagctttccctctttaaggatttactatcctgctactaccggagcttagattgctaagttttgaattgaaaatcgaagaaaatggatctaacgggagaaggctttatcgaaggagggagaacgagagtttctttcttcgttcactgttatatcttaaaacttaattcatatatatatatgaaacgaacgaaacttatcagtttcgttttacatatattaaaaatataatattaataataatataataatattaataaaaactttattattaatagttatcttattattttttagccactaagaaatatttatttataaggtatttagccaacttcgagtatcctaaaatactccaatatttctaaaatcaacttatcacaataatctcatcaatatttctaactaaaactgttgtgatatttttggcctccaatcgggtctccaaggtcgcgaacttaaaaatatttttatttcacaaataactcatattatatccac

SEQ ID NO: 248335 - DNA, 504 bp, Cannabis indica
acgaatcaacgaatgtaatgatatttgaagagggaataactcataaaatgtggaaattgatagagtatatttacaacttgctgactgtatggtcttacgcgagataaatatataaaaactgttgattcgagcatttacaagaaatcatacgacttcagatgtacaaagcgaggtatcaacctcgctacgcattaagagacaaaacataatggccggtaagacacttagtttacaatacacattatactaactaagtataacagtcaagtaaatccaaacaattgatagtgaggcacccatctcactataggaaaggcgcgcccatggtaccttcactaatcagctccaaacatcttccaatagggtttatagctccgtcaagacatctctctcaaatagaagctgacatacaaatgatgttgactgctgaagttcaccttgtcgccaaaaactgcaaccttcagatggagcattatgtcttcaagtgcagcaacgacgagtctt

SEQ ID NO: 248336 - DNA, 572 bp, Cannabis indica
atgatattttttacgggaaaaaatgaaaaatgaaaaactataaggtaaatggtacattttttaatgttcagtcaagatgtttcactctcatatcatttctctctttttgctatgtttttttatatttatcatatttttcattctcaggatttgtgtttttctttttttcttcataaacattggtttttgatttctgggtttccgaagaagcaatacaaggtttcagttagagccgcaatctctgtatcttcactatgtttggatctctgacccgcacatgcttttatatggtgtctttcttatttatttcaagaggaactacatattgttacacatcattattttgaatatttaatccttttgtttgaacaggttttggcatcgttcaggccccttacatattcagaaattctgaagatgcttcagttatggggccttttggattttgatgtgaaaatattcttcccccatgattttcatagtcttcctctaggctaccataaacaaaaaagtaaggaatatgaattcactcacatgtattgacatgacaagtactattatacaaatcatat

SEQ ID NO: 248337 - DNA, 640 bp, Cannabis indica
catattcatgcatccggcactaccaagatgtaccaatttttaaagaaaataactttatgtataagttcctaatcatgggtatattttaaaaaagaaaagaaacatcagtctttttctgcttaaccaaaatcgtcagagtttattttttttggggctgaatcatcagagttggttaatcacattgagcactaggttcatttatcataagatttcttaaatgtgcatctatggctacgagttggtgcaactcttgggtaagaacatttacttataaatgttgggcctcaattgccaaagagcccaaaaactagcgcacaaattgaggttcttgtttctgctatcataaccaatttgattgggattatttcacaaacacacaaaaacaacaaaaaaaattaaaaaaatacagttgtataaaattttaaatatttttattgcttttgattttatttacaaaaaatacagtcttttaatgtatttttatccgtattcacgtttaatttgttgttcaatttttcgttatataagttgtttttttgttattatttttgatattatttggaagtttattttttttttattctttggatttttatagaacaccaaaaaagtaaaaaaatgaaatatttaaaaataacac

SEQ ID NO: 248338 - DNA, 775 bp, Cannabis indica
aaaatcatgaatgatgaacatgaatgaacatggaaacaaaaactaaaagtgttaaaataaattgtgactaaaaattcaaagtccatactccatagtctatccatacattccgtactagttattgtttaccatagttcatacatataatatatcgatatctataaaaatttctaaattaaaaaaaaagtatttataaattggaaatttgattaattatgcttacattagggaaaaattaattccctaaacttatacttatcactattaaaaataaataggtatacaaatatttgaatacccaaaatgccccttatacacacataatccatcccacccttctctcttcactctctttctttcaacctcattttctctcctcctctttaacaattcaaactaaaattttatttttagttgtaaataaaactctctaagctactacaaagtgttagaagctaaaggctttggtgtgagattctattttgaggcaaccaacaatttttggcaaaaatcaatgagtaagtgattttttttttgtttttggttcttatatttagtttagaatattgctttcataattaatttgtagattgttgctatttttctattgttttgtgtttaaatggttgttttctagtttgttctggtttttttgcattctttttgtctagtctgatggggcccgatagagtcccgatactagctcgatgagattattagatctaaggtcagggggtgcccgatggtagtctgatagttcttagagactaagatc

SEQ ID NO: 248339 - DNA, 1540 bp, Cannabis indica
tttttaatttagggttttattttttttaaatttttctttattttataatatgtttttaaattaataaatttagtattcaaaatgataatgtcaagtcaatgaagaatcttttcttaaagggtaaatggcggcgaaacccccaatactttcgttttggtttcactaaatccccacaacccaaatttctgcgggtaaacccccaaaaccactattctgttagcagtttactacttccgtccaaatttagttgttaactgccatgctgaattgtccacgtgtatacaatatacacgtggcacaattttattggcccgcgtaattacattattaaaaaaaataaaaataatattttaaaatgaaaaaaaataaaaataaataatatatataattaaaaattaaaaaaaattacataattaatttttttcttctccctcctcgtaactccctctctctcccaaaaccactcccaccataaccaacatttctctcttcccaaaaaccacttctctctctacagtaacttccgctctcccataaccaccaccaccaccacaacaaacacaaccttaattcctctctcccataaccacaccaccatcaatacaccatactgaagccacccccacccaactcctaaccagatttatacccaaaagcataaaaaaaaaattggaaaaacccatccacaccaagttgtgatttggaaaaaaaaaaatccaatggaggacgatgaagatctctacggataacgactaagatctcgattttgtggagtgagtttgtcattgaagccgagagaagaagggcaagggaacccaacctatattcgacttttcccagatctgaccggactcaagaagccagatctgaacgcatctcctagatccgataacgacctgcaagaagaagaaaatatggtgagagaatctgagtaagatgaagaagaagctctgccattgtctcctttgctaagctccgccattgtcccataagaagctcactgctcacgcgaccttggagtcctgttggtgaagaagaagaaagaccaaccaaaaggactaaaaaggaccaaggcaagttttgatgggcttgctcatggcggcgacgtccggtggggtttagcatgaggtgtgtccggtggagttccatcgccggcgacgtctggttccagagggggatggagagagatggctgagagagagagagggggatcgagagagatggtggtggtcttgggctgccacctgcgagagagagaaagagaagagggttttgcaaaatgaaaaaaaaaaaaacaaaggaaaagaaaaaaaatgttttggagttttaaaaaattaaatatgtgattggttgagaatctcaaaataaaaaaaaaaaataagagaataattggagagtttttgaatttcaagatttgaaaacataaaaaatataaaaattgtgtttttattttttaacctacaatttaaaataatattcatttttttttttttgaaaatactcaatcaatcaataattcttatgtgaacctctaccattt

SEQ ID NO: 248340 - DNA, 1229 bp, Cannabis indica
gaagctttgcacaagtttgaattcttcaggtcagaaggttaatttcacaaaatcatcaatttttttcagtgctaatactcatgaaattttgagaaaccgcctttgtacagtgttgggaatggcacctgctttggagggtagtctttatctgggtctgccaagctctatgagccgcaataaagtttcggctttgggttatttgaaagaaaaagtgaggaaaaggttggaagggtggggatcaaagttcatttctagagcgggaaaggagattcttatcaagtctgttgctcaatcacttcccagttatgctatgaatgtcttcttattacctatggaggttgttagagatatggagagtctcatgtcaaaatactggtggaggacctcggctaatagtaactccggcatccattggatgtcctgggagagactttgtcatcacaaaaccgaaggaggtatgggtttcaggaacctaagggattttaatctggcaatgttagggaagcaaggttggcgcttactaaccaaacccaattctttggtagctcgaattttcaaagctcgttacttctcgaatggtacgtttcttacggctgaattggttctaatcctagttttgtgtggagaagcatacttgaggcacaacatctggttgctagtggagtaagatgggcagttggtgatggtaagaacattgatgttttaggagacccttggttgccggataaagctaatccttgggtcatttcctcacatccggggcttcataatgctaaagtggccaatcttttgactattgaggggcttagttgggatatggaagtgttgaatgacttgtttgatcctcgagacagggagttaattgtgcaaattcctcttaatatcactaccagtcaagaccatttaatttggattggggagttgtcgggtttatacactgttaagagtgcttataaacgtctccaagaactgaaaggtttggtgaattttgaggaatcacaagtcaaacttttttggataaaattctggaatctcaaaaagcctccaaagatgaaaaacttagtgtggagggcatgcacaaactgccttcccacaatggttcaacttagaattaaacatgcagtaccccattcacaatgtcctgtgtgttcccttgaagaagagttgttgctgaaaattattaattactacgcaagtatacgcaatcaagtagtaaactcacacaggtg

SEQ ID NO: 248341 - DNA, 778 bp, Cannabis indica
aaagcagcttgattgggagagatgattttttgaataactccccgaagtcttgaagcaattatcttagaaatcaccttataagcgacattgcaaagcgtaatggggcgatagtccttggtgtaggctgggttgtcttccttgggattagaacaattgaagtgtcattaataaattgaggcaagtcggtgtggttgaaaaaatgagttaccatatcaataaaatctgaattgatggtatcctaatgatgattgtagaaacttggtggtagcccctctggaccgggccttgtcttttcccatttcgttgattgtcaactttacttcctctataccaggtatggcattaagtagtgcattatcgtgaccatcaatctgtttgtggaatacaccgttcatgagaggtgataagtagatgggatgtttcttgaacagctccctgaagctatccaaaaataatcagcaatatcttgttggtcccggatccaactgtcatcctccgagctcttgatacattgaatatagttcttccgtcttctaatgataatggaggccatgaaaatttttgagcacttgtcgccttcctgcaaccattgtacacgtgatttttgtttcaagtgtatttcttccctaagtagggcctcggagagtttcttttttgtcgattcaatgacgatgtggtctttaggagagttcctttttgtttcttcaagagtggcagtagcttcttgcacttgttaattagcttttgaaagagagttttacccaagtagttgtaacaa

SEQ ID NO: 248342 - DNA, 749 bp, Cannabis indica
aaattagactaaatttttttcttgatagggaatcagatagggaatctactatataaatttctaataatattttggaatttgtgatttgtaatctattaaaattctttacattttaaaatgataaaataaaatttgtattttacaaaataataccccaaagttagtttttaacatgaacaaatgtaaaaaaaaaaaatataaccatcttagtcatgacacatccacgtcagaccactttgataaaaaataagtttatagtattattttatataattttaaaatattagatttgattagtcatttaataaaataaaaaaatttaattaataatttttagtgcaaaatacaatccctaaaatggtatttacactttttaatactatgcctttgaccacctattttttttttttaggtagaattgaccacctatccttatgtttgttctcttgttttttttttctttttttttttgtttttgtttttaatatttgtaattgacttcttgttgtaaaaaaagaaaattatagtttttttcttttgttttttgaaaaaataaataaataaaaagaaagaaacaaataggtaataattgttattttgttaattgaaattgaaaatgcttgagtatttgtaatattttgtgtgtgtgtgtgtggcagttcaagtaattacaactttcttttctttttaatgaaacaattatctagaagagattttatttttatgatttactaaattttgattgagag

SEQ ID NO: 248343 - DNA, 640 bp, Cannabis indica
tcaactaatcaaaacttttatgcatagaaatagtatgtgacgtgccaattaagcatgtatgcataagagaaagaacaagaaggatcaaaagcacgccaattatacactttaaatttcattttcttttgatctaggcatcttagtctcatcaaaataagtaaatgtataggtttgatataatggatttccaaacttgttcatttaggttttcttcatgaattgatacattccttttctatgccttttgagacttgttgatgatgtaggaacttggccttcttctttaagcatcaacacccaagagccaactttggttcctctttattgatacctacaaaaaaacttagatctttctttttggtacccacataactttgggtcgtttgatgttagtctttgaagcctttggtacccaaatagccttatcaaaatagacattcttttttacatagcaataggatttagtgtggtcatcttagttaaaataagtgcaagttaagttcaaattgctagatgatataacaaataaattcttaagaatttttttttcacgctagtgttgtatcctatactagtttctgaaaaagcacatttttaactcccaagcatcatttcaaaattctcttttccttttgtaaaa

SEQ ID NO: 248344 - DNA, 747 bp, Cannabis indica
tttctggcatgcctcgatcttatgcctcacctcctccttagaagcttcaagctcggcctggtgggtcctcttcacttactcaacttctttggttaagcgagtgacctcagccttggagtcgttccattccttggttacatcctcgtgatgacctattaaattctggatctcactgtccatttacttcgttctttccataccttgttgttgggcgacaaaggataggaaggtttgctgaaagtaaataaagaatgtgtaatcaagtctgaatgatgttaaaaagggaagtacgaggagaaggatataggagtttatcgagaggccatgggcgacactcctttcaagcatctcttaaaggctcccattgttgatgaagtcccattcattgggaaggaaggacttgaagtgatgccaacaagccgcaccaaattccccagtgtactttaagccagtactcccaagctccacaagcagagtctcgagtgcttggcttgaattggtagaagcttgattcactttggaaataggctcattagtatgtgtgggggccagaggatgggtcgtagcctgagtctcaatctcggggacctcaagatgaacagcctgggaggctggcttcctgttgggagttgctttcatgggccttttgacggactccacgttgaaatctaatgaagtctccgaggcagtcaaccttttctttcccttcttgcctgaagattgaaagaggtcttcgagattcatttc

SEQ ID NO: 248345 - DNA, 1290 bp, Cannabis indica
ttatcaagtatagggtcgggccagcatttgtttattgtggttggcgactccatgagccaccattgtcacagtggccatgaatggcatgaagaagaccacggacataggcaataggcgaagatagggttgaaagacccatatcgggtctcagttcgttgaatgacaatagggccatgaccatcacatggcgtcttctccaaccacgacacaaatagggaccaccgtcccttctcccatttgtaaaggcaaataggaattgaattcccaatttgctccgtgaggagctgcgatccgtgccatgaagctcaagtaaaggacaaagtggtccatttgaccacggtttgcctcgccggccatgatacgattgtacctcgatttatgtatttactttgtaataaattatttatttttcaaatcaattaaatggagacaagacaaaagttatttggataaaaaacaccaccaatttcttaattaagacgagtggcgccacctacactgtgtcctaacacaatgatgaaaaagcacatctagtctgtaagaagagaagaccattgaatgtagttcaatcagaagtaatgaaagtgaaagtggataacctaacaaatattgagttcctttaagaaaccttgtatccagtttagtagatcaagaatatactagctttaagactgagaaaggcatatactgttacaagatcatgcattttggattaaagaatgttggagtcatatatcaagaacatgaggtatatgttgaaaagacatataccaagatgttcttgatcttggtaatgtcttgaaaagaacatgatgaaggcatatgttgataaccagtggcggacccagaatttaaagtgaggggggcgtaaataaatttaaaaagaaaatataaagtgtagttagtgggatttgaacctttatcctctaacctatttaccaactaccttaaccattacaccaaggttactattatgtctataaatatcatcttttaatacaaatatatgttgtaactaattaaaatacatatacatttttttctcgattttttttttcagggggggcgactgccccccctcgctacaatgtgggtccgccccagttgataacatgttggttaagtcaaaaacttttatggaacatagtgaagattttgaaaaaagctttttctatcatttggaagtacaaaatgaagttgaatctaaagaaacgcacctttagagttttctcagggaaatttctcggcaatttggttttggagctatttttcacaatcctgatggtgaac

SEQ ID NO: 248346 - DNA, 1481 bp, Cannabis indica
tttttttttttttgaacaaaatggatgatacttttattcaaatgacaaacaatttacaagcaaaaagcaagctgaaactagccgccccaaccaaagaacagcaaccagctgtgaattacattaataatgtacaaatccctccctttcaagtgttgaaaactacaactcataattctatatttaacagcattttttatctctctgctcaccaattcaggagcgtgacagcacctattaaaccagcagccatttctgttcagccaaaggaaataaactgcagtagccaggacagtgttcatcaccctgtctagcaagttcttcagcttcttcgaataccaatccttccatagcttgaagtccctcggccaattagtcagcccaaaccaggtacctatatcagacatcaccaatttggcaaaataacactcaaagaaaacatggttgttggactacgggtgcatctcacaaacagggcagttcatattagcaatctccattactctactaaggtgatccctagtcaatagtcgatcatttatagcttgccaacaaataaacttatgcttaggcacgcacatcttatgccaaatagtaggcgcatactcagagttatcagcagtgatgagagaattatagaacagtctagtcttgaatttcccattcttacccgcccccaggagagcatctcggttaatggtctctctgagtctcaagattttcttgaaataccaactgctatcctgtttaaaagtcagaagccagaagtcttgaccctttagatagatggaattaatccacttaacccaaaggttatcttgtttctccgagataacaaaaatgtttttggttatatcaaagcaatatttcacttctttccctctcggaagccaattcctccaagcttttgcaggagacaaattttttcccaagaaggtaaatggaacttacttcgatttccattgaccccccataggaaatccctgcaacctttgtcaatggcagccgtcactttcttgggaagaatgaaaagggtcatccaaaaattcgttatccggccccaaaagaaccgaatgaattaaatgcgccctccccgcaaaagaaagatttctgctagcccaattattaagcttcaaattcaccttatccaaaatgcaaccacaatccgatgtcttccatttagtaggacgaagattcactcccaaatatttgagagggaaagagcctttttccataacgtgctatgttatttgtcgccatttactaagcaattaattcaagtagtgcatcctatttatttattacaaatcacacacatatacatatatggaacaccttttaatgggtattactcgttgatgattactaaataaatttaactataaatattaattttaaaaatattaaattattaagttttgatccatgaataataaaagagaaattttcatatatatgcttagttcagctacttaattaaaaaa

SEQ ID NO: 248347 - DNA, 1588 bp, Cannabis indica
ggagatggccgaataggtgaaataggctctcttatgcaaattgcatgttcaacaggcttgggcgtggccgggagtttcttcttcctcttcagtggggtcaactcctcatccttagcctcatcttcaggatccaaaggctcctaaggatactgcttggccctggcacctcctttcaacttaacctcgcgcttaagttgaataagctcattctccttatgagctcgttcaggccagccagaatcagacttcctcttcttccccgccacggacttaggagaaaagtcctcaggatagagctcgtacttcaccagattatcatcggaggtcaactggatgatattcctgtcttcccccagcaaccggacaagtttttgagctctatccctaagagcaagagtgaggagaggacgattatatgtcggaatctactgaaattgagtccaagtaatgctcggatccttcaccatgaagtactcatcagcaaaatgccctattttgttgatggcctttgcatccgtgccggttaaccacttgaagcctggctgcaagaaatagaagtaccccgacctgccttgtttgggggtagacttcaaatcaaagaatcaggcaacctcgtggggagaaggagcaccccatccttgggaagcatagaggacgaagagggtggataaatacttaatgcccttaggagtgatctgggtcgggctgagaccaaagaagtccgccacatccttgaagtacttgtgcaagggcatcagcgccccttgcttgccgtgggcccccaaccaggcccacatccccttgtcaaggtttgtggcacgattatcgtgggcgggaatgtagtagtccagctcgcccaggtacccgtcctggtaaagagtttgaaggcgcgcctccgtaatctaggacggaggacttagccacctcgcgcccaacgcaccctgcctcctatgaggaaccgccgcagcaagctcctcaccgacgtagtccacgccctcaaccaggacgtctccgtcagcatcgactggctgcccagcctcgttgtactccccgtaatttaggggttcaacctcttcctctccctccacctcggaaggacttcccgaacgcacatcgtccagctcctcaacttcctggacctaagcgtctccctcacgatcctcctcgatcaggacggccgaatcctgttcgacgctgggcagagtggcaagctgagccaattgaggatctgtagcatcgaccagacgcgtggttttctttgtacgagccatcatcttatggctgggtacaaggtcagaagaatgtcctgctagaaggaggactagaacgaagatgaggatgatcctcgtgcagaagttgaagcaaatcctggtcgatctgatgcccgagttcccaagactcacctgagttcatctacaaaagacaacacacaagatgagtgttggacggaatatcaaatgatgaataagcaaatatgccgaccaggagtgctcaacagattaaagaacggctatgtctaaagaaagtcagaactcaagaagtcaaaaaaattacttgagttagggcaaaaaagttcatgaagcttaga

SEQ ID NO: 248348 - DNA, 668 bp, Cannabis indica
atggtccgaccatcggacctggggtgtgggattcttgggaccggccgagatagagagagaaagagagatgctgtgagagtttgggggtatttttggggttttgaaaaaaaaaggtatagtttttttagggtttaaattattggtttaggaatcaaattttttgattttctaagtataaaaaatcaaatttcccttttaaaaaatactattttttttttatattttatttacacgtttgcaacttaaaagcttttatttataaaaatatatttgtaaaattttaaaattataaaaatatactttatttaacaaaaagtaaaaaaaaaacaagattcttacaacaactataaattaacaataaataaactataaaataatcaaaaaaaaaaaaaataatcatcacaactataatgcaatgataaagcaaccatactaaaaaaaaatgtattttttgtaaatataaaaatttaaaacataaaaataatttttttaatttgttttttaaaaattttagttcatttatgtaagttttatatacttaattctcaacaacttttttttttttatttactaagccaatcacctttatacatcaattccgaaaataacttggtacattatttctatacatctttcccactccccaaaaaaactagaaaaaagaaaaa

SEQ ID NO: 248349 - DNA, 735 bp, Cannabis indica
aaaatatttcccactaagaaataaggttctaaacttaccatgtgatcaaactagccatccattgcattttccgttgtcgccgagcaaaaattacaaaaataacatatttcacatagaagtcaaataatacccctagatgtttaataaaatctccgaaattgagaaattataactctaatactcatttccaaatattggggttcacaaataaacaaattcataaataattataaaattaacagaaattagtgctaatttcctttactaagccaaattactaaagcggtcattacaatgtcagtatggtggtgttggtggtggcgggtagaatccacatcttgcatccatgagagcctttgtgccaaacgaagaaaactgacctccaatgttgcaatttttaaagctttccttagattgagagtcacgttcataattcccacacaacagtcttttcatacgtcgtcaaaaagttcgaaagcgttctttagacttccctttcttcttgttggtagttacttttcgatcatcctttacaacttccacacgacagcaagtaggaatttcagctgcggcaaataccttgaaagtctcttcttctttttgaaacgcaactttaactgccccttctgtacatcaattaatgctcttcccgttgctaggaatggtcttccaaagatgataggaatattctcatcttcccccatgtccaagtgttaagaatcagcagggaagatg

SEQ ID NO: 248350 - DNA, 1237 bp, Cannabis indica
ccagtctgatccaaatacatactggataactaaaatattagataggatccaatccgataccaaaaaatattaggttaaaatattggataaaacccaaattaaataaataaataaatatgaaatacatccaatggatagaaccgatccaatccaacatccaatggatgttggatcgattggatgatgaaattaattggatcggatcggatggtaaaatctaacatccaatatatgattggatcggatctggataggcctaaaaacattggatgtgatccaatgaacacccctatgtgtgacacctctatggtaattataacatcttataattagttagtagttttttataatttttattaaattgaaataagtaaaatttaatattaaattatattaagtggcctttaacatatagcaaatttcatataacttaagaaaataaaattttaaaaatatggatcactaatcataaattaatacttatagtaatgactgctctctaccttgtctattgtgtcatgtgtttggttcaaagatggtgtcggcagcacgtcatggtaacgttttaatatttctgaaaaaatatctagaatttggaattaaaaagatggatgattatcgttcctatctaccaagtagcatttctcaaattccacagtaaattctagtatttttctaattattattatgtatgtaattataatgattttagttattgttaaaaaaattaagataatttgcggttaaaccttcaaaatcgtttattaatccacttaatatgaataatataaattttaaaaaaaataattaaaataaaaaaaaaatcaaaattaaaaaaaaattaaaaaatattttttcctcattctctttttctttctttctttctttccaaaaattaaaatccaaaacccaaacctattactcgcgcgaagccgaagatacaaacaagcgaagaccttgctatcgtggtgaaaattttggtgcgattcattggatttgaaggagaacgacaagagagatcaagagggtgggagaggatagatcgagatggtgagatctcaaagagagggagagatcgaaacggtgggtagtgggtttttgctggctggttgacaggcaggagtcagcgtggtggtttcgtcgagattggagtctcgtcagggtggttttgggttttggggtgggggttggtaggtgcactataaatttttttacttttagtcgtaattaaatttgt

SEQ ID NO: 248351 - DNA, 759 bp, Cannabis indica
tgttttatatggtttttttttttgaaactcgttggcatgatacaaggttgattgggtagtccatactgtacgcttggtacactaggccgagtttgcctaagtgacatcgtaagccgcaggaggcgcttttgttgaaaatgaagcttgttggcagggttgtggaagtactgcagggaccgtcagatctttgttagtcactgcagtggtcgagagttaatgactgggatggttcaaagtgggatagacacggaatgcttcagttgctacattgtgtatcaagaggggcgcacatggagaccaagggggggcatatgtcgcaattgtcagaggatgattgtacttggaggtgttcgcatgtgactcttatttgatccatatggtagcgctgagacagttgagtgggatgtgtcggcttgtaaaagcgccagtgggcgtaagtcacacaaaggcatcgatagagatgcgcagttgtggaatgaatgcatcaaagaagccaacagggatgagaagaccgagcgtaagcattgagatggtgctagagttaagtggaggccagagggctgtgccagtgagacttagtagtcatgtgagcctacgaaggtcaagaagggtgctagagtttgcatgatggccagacggttgaatcattggaacttagtacatcgtgggagctagaaggacgtgatgcaagtgtgaatcagttggatggttgagcggacattgcatgttgggttttgtgccctaaataaaacccattac

SEQ ID NO: 248352 - DNA, 980 bp, Cannabis indica
gctttaatggggtgcgggttgattatctttttaacaagctgggcacgattaacatctatgctccagcttgagggagagtgttagatattagatgtatattagctgtaaaagaattagatatttagttgatatttagtctcctagctttgtatataaatatgtattattctatgaaatcgatacacaattcgaatcactattttctacaccaatgaagaagagacccacttttaagttttcctttaaaagaaatactttaatttaggattagcaataaatttgattaaactttctatacgtgcaaagtttgatgtttcaaaattttgtatgtataattgtaaactgcaatcgacattgataataagcaacaacaatatccaaactccaattcaaaccacacagtgattctcttagcaaaaaaatgaaaataaaatcacactgattggtagttggagagagagtactagtgtagtattagtgtgtagttgcattaaggtgtagttatttaaaatattgacgttttcaatttcatatataatagcttgcaaaataaataacgaagttacatatgtacacaaattgtatatatatttaaatttaatcaaaatatggggtcttttataattgaaaatacttttcctaatcttaagtcggcatcaaaaaataggattatgaggatagttttaatcttatctctaattctacccaccaaatttatagggtagtgagtttggtgggtgggagaaaggatgtggttaggatatattagtcagtacttaatttggctgtgtcttggagttgattgttttttcaataggtgaagttagatagcaaaattctacttggggtaagtgcaatagagagttccagcatcgaaagctgtaaacaacttccaatattttctagttaatctatttggtattgtctttctttgaagtaaaatagtaagttttctagtagagggggtgactcataggtga

SEQ ID NO: 248353 - DNA, 504 bp, Cannabis indica
tttttttttatttattattagataacacctattttttatcattgttgtttgtaattgtagcaaaatgcatgaaatttattatatgctttatgtataaatttaaaattttagcttgaatttagatgaaacgaaattagtttttttaatagtataacttctctatctctgaatgtttctcttagttttgtgaagaaccattctcaagagcagtcattttctgagtctcctatcccaaatgctagaatgaatgtgttgttgtttgcatccatggtagaagcagtgaataaagttcctccaaatgatgtttttaaaaacgttccgtcgattacaatgactaacctgcaatgtttctaaccttctattgagtttgaaaatgctagatacaaatatttgaaacgatccttcttatccatttccaattgtgcaattgttccaggatttggttcttttagcatgtttaggtattttggtagttgctgataagattcatcttgccttcctctt

SEQ ID NO: 248354 - DNA, 558 bp, Cannabis indica
gagaagataggcccattgggcctatttttaatgggccaagtagagaaatcgagaagttcaagtttttaaggaaaatttagacaaatatctaaaatcacacttttatttatatttttacggatttattttcggagtatattgaaaaatacctcttttatttatcaattaaccaaatctacatttaattttatatttaattgaaacatacctctttttatatgtaatgtacccaaaatatcctgatataattgaggtgataggggtaaaatcctgtttaaaaaaagaggtaaaaatgataagttttaaaaaagagagtaagaataaaagaagacagtataaaaaaggtatagagactaattttctctctcttttttctttacttttgtacgaatttgtaattttttagagggaaaataacattattttcatgttgttacaacgttatattatatttccacaacgtaattaagaacaacctaaaaacaataatctgtagaaaaaaagtccttaaaaatgtaaaaaaatcagaattccgtaaaaaaatgttttttttttttt

SEQ ID NO: 248355 - DNA, 561 bp, Cannabis indica
atcatgattatattccactgtgctaacaacactataatcaagaacaaatacatatgttctggacttaatagaatttatacattaaatataatcatgaaacaaatcatgtgaaccatgcaacatagaatgttatttctgatctttattaattagtaaatctgattatattgaaatgagttttatttagggcacaaaacccaacactttcttctttataaacaataatggagcaccccaaggagagtagctcggtctaattaatcctaacttcaataactcctgtaattggatcttcaattctttcaatttcgatggagccattcgatacggtgcttttgatactggttccgctcccgaaactagctcaattacaaattcaatctctcaggtaagtggaaatcctagtaaatcttttggaaagacgtcaaggaactctcatacaaaccttgtattcttaggtctagatgtcacaggttgggtggtatccaatgcagtgactatgaatcccaaacaacctctgctcatcaaatctttaccctttaaaagtgttattcttggtat

SEQ ID NO: 248356 - DNA, 675 bp, Cannabis indica
aattataattggaacaaaaacaaaagcatcactaaaatttattacacaggttacatagaaaacgtcaaaatggtattatattacattagatgatcaaccgttagttttgaaataaagataaaaaaaagggttgctaatgtaaatttccctaaaaataaatgatattttttaaaaattattaaaaaaatatgtattttttgaaagataattttttatttgggtccccaaaatgagtgggccctaggcgcgggcctaacccgcctatgcctagggcctgctctgaccatatctcaaacttaaactactattctacattttttctttctttcattcttcatataccatcccatataaaaataatatactataatatattttgtctttcattcttcatatactatcccacataaaaataatataccacattattaaagtaatatacttaaatatgaatatattgtaatataatgtcttttgtttttcatataccaccctacatagaaacaaggaaaacttacaaaaatactagaatttgggttaacttttacaaaaatactgtcacacggaaatcttttaaaaaatactgtgtttttataaaacactagtaaaatacaaagcagaacaactcaaaacaatagtagaacactagtaaaacactagtgaaaacttaacaca

SEQ ID NO: 248357 - DNA, 1819 bp, Cannabis indica
ataatttttttttttcaatttaatattaactattaatactaagcaattaaaagaaaatagtaacattcatccattttgtatttaagtatatattttttttttaaaatattttgtatttctatacattaagtgtaaatatcatccattttatatttgaatatatttcttatatattttgtatttctatgtattgtgtgtaaataataataaattttaaatttattttttagaacaataattaaataaatactcaatatttacgtatatataattgagaaaacaatagagatgaggtaaggtgacttctaatcttcttttagtttatatcatgatctattttttttttcaataatttttactcataaaaatattcagttacaaaagtaatgtattattaataaaatttatgattaattcattcattattaataaatgcaatgatgtatatttgatatcaaatatttacatagtgcacactctttcatcttcctatttaaataatataataattattatttataatcaatattaacaattgtacattactcttgaaaattcaaaagatttcacgttactatatataacatttatgttttggtgtttgtgaagactataaaattcctaaaaattatatacttatatatagatatttaagtttagaagctccaaacgctaaatcatcccatttctagaaaactacatgataaaaagccatttttatgtatttagtttggaaaaaccaaagctccaaatgctaaatcatttcatctctagaattacacgttaaaaaaccacttttatgtattcagtttagagaaatcaactgaatttagtttattattatttaatttattatgatttttacggttaatattgtttcgtttctctctctctctctctttgttgggttgatttatttgtgtagtttttacatgatatttttgcagggttggtgaataaaagagagaaagaaaaatgtcttcaaagaaataggtatattctaattgctatggtggtaagaaaaataaaataaataggtcaatcatttttttttatctctaatatatctcataattctattcttataccatctattaaaaaatattcgagcacgatgtatttgtctttatttgttcatttaatttatcagtgttatagttcttacataatattttgcaagatttgtgaacaaaagagagaaagaaaaatgtctttaaatgacaatatgtattatgattgctaaggaagaaaaacaattagatatttctattctatttttattttaatttatttttaataaattcttttacaatcttattcaaatgacttcatattttcttattacaaaataaaacaaaagtactacaattctctctatctatgtatatatttatatatttatataatttctttttgttagggtaaataaggtggccgcttagataaattttcaaatatttttttttattttctcaatttctcaattttgttaatttttctcacttaatattaatgtaacatttaaaataaataaataaataaacccttcaaattcttcttattagattcacttatatttatatactagtaaaaagttacgtgcgaggcacgtatactaaattttatgctagtttttttctatgttattaaaaagtgatacaattaaaaattttaaaaaatattattagttattaggttcaacatcattaccctgtgttcatttttaaggaaaaaaaaatatttatgaaataataatttgttgcaacgcgagtacaggcaaaattcagaaattatagcatttattagtagagtattgaca

SEQ ID NO: 248358 - DNA, 543 bp, Cannabis indica
atgacataaatgtaaatgaaaaagtagtgcacttattgtggtgtaaattttacatcatagcaaatattatgccaaatttagcacaaaatttgttatatgccaaatttacgtcattttttggcacaccattggagaacactctttgttaaatgagttatgttttagcttttcaccacttatttacacctccattagagatgctctaatactttaaaatataactaaataaataaatgaaatacaatttatttcattttcattttattccgtttcattatctccaattaaataccaccttaaaataaaaatatcataaaatgatcatgcatcaaaagcataaagaaagtaaaattcaatgacaaattacaatcagtcttaaaacaaaaaatgtagacctaaaaaggctgcaaataaaaaacgatatacagaaatggtcaatgtatatatattaacatgatatattaagtatagatttggctatattaacatgatatacaaaaatatatcattatataagttccaattttggttatgaaatggtaa

SEQ ID NO: 248359 - DNA, 600 bp, Cannabis indica
gattgttggaacttcagttcaactttttaaaattcgtattttatgaatttgaaaattgaagtcaagacattagctttatgcaacttaaaccagatttatggttgaattttacttttgtagtaattttctgtattttttttcttcatgaaatcaaaacaacccttgttttgattgattccggtcgtcttctcaagtgaagtcatcagaattaatggtggttctcttctggttgtgtttcgttttatttatgttgggttgttaggttgatcgatcaaaagttgcgtacatgaagttgcttcattccgtacagctgaagtagtagaaaaagtcatattttagtaatatttaatttatgggttgtactaatattcataggaccactcatataaataaaaaaaaattcctacaaatatattattaaaaggcacaccttttatttatgatcacaccttttttttccctcaaagtactgatcacacatcttaaattgataaattaacgactttgcgaaaaaaaaaaaattgataaattaatcattataacaaaccaattacccaagggttccaaatagaagaagacaaaagagcgagatagagatcg

SEQ ID NO: 248360 - DNA, 911 bp, Cannabis indica
aagaacaaaactatgggtcgtaaaggtgttgtctctctgaaattggatatgagcaaagctttcgaccgtgtcaaatggaactttctcgaagctgtcatgtgtaaaatgggttttgctagtggctggatcactcttgttatgacatgcttacgcacaaacagtttctcttttctattaaatggagaagtgttgggttcacttactccaacaagaggtcttggacaaggctgtccactatcaccatacctattcctaatctgttctgagggactatcaagactgctccaacatgaagaaaacaatggtcatctccaaggttttaaattaacttggcatgctccttccatttctcacttgttttttgctgatgacagcctctttttttgtcaagctaatgagtcttcatgccttgctatcaaaagatctttagatttatacgaaagagcattgggacaagttcttaattaggataaatctgctatgtctttctctccaaacacaacgctagttgcccaagttttctttcatagacaactatcaatgccaatttgtgagtgtcatgaacgatacttaggcttgccatcttactctggcagagataaaaaaagaatgtttagtgatattaaagagaagattcggaagcttatgcacacttggagtgaaaaaatcttctcagctggggggcgggaagttcttctcaaagccgtggtccaatccattccaactgatgcaatgagctgcttccgtttgcctgtttatttttgcaatcaacttgagcctatgatggccaatttttggtggggtttgaatgaaaatggtagcaagattcgttggcgctcttggaaacttttatgtcaaaggaaagaaaatggtggtatgggttttcattcttttgtacattttaatcaagc

SEQ ID NO: 248361 - DNA, 1179 bp, Cannabis indica
agatgcggactgttcagtccgtagttttgaaaaaaaaaaactttgaatttctttttttgtttaattttccttttcaagctaaaaatgtaaaatttgggcctaaaatatcccttatacaaaaaagtccttatttttatgtaagttgtgtcttattttgtaccatgtgtagtagttgtttatgtgttatgcttgtttggtatactcatttgtgtaagctatgttttgggttaattttaaaaatgacgtgaggtagcagtgatacctttcgatttaacgatattaatgataatttattctttagaatatttttcaacattaaaataaaaattcttattttaatataatattatcattaagtaatgtgttatttgaattttatatatttatttcatacgagtcttttaacttcactcatttagttattcgaagatttaaaaaattttatgaaataagttttaattacgattcgttttcttaaaattactttatgatgtgtgaaatttttcatatattccttaagttttgttattaatttaattttatttatattttttttagataattttttttttggtacggttaaacaaacaagatgaatgtcttttcaactcactttaaagttttattatctcattatcttagagcatctttgcatgcctttataatgttatattatttgttataatgtaatatagattaaaatatttaaatgtgacatattatatattaatatgagattaatataaattatgtgttggaggttgtattatatcatatatagtataaaaatacacataaatgttgtaacatatgagaagttacaaatctaaaaatatattgtaacttaaggatcacatgtaattaagtgagttattacatatgaaagttattgaatcaatgggataagtttctaactgttagaaattgttttaatactcaattatatcctttaaatgagtattgagacgttggaggaagatttcactctaagaggagttacaaaaactcaaatttgagttttctgaaaacaattatttaatggttatttttatggattttatggttgttttacgaacacctagaaccagtttttgaaaacgtccataaacgtacatgaattgattgagcatgtttccagctctcttgtccaacgtttttatctcattaaataacaattaa

SEQ ID NO: 248362 - DNA, 960 bp, Cannabis indica
tgtttcttgcaatattgtctctatctatttcaagaattttaggtgtatgtgtcgttaaggacaatgagccatattacctgttgatccagaaatctagaagacttgtaggagaaacagaagcaacaggaggcaagagagagtttcagcaactgctgaaacaacagaaatcatggctgataccgctaatgctgctaatagtggaggtaacaacggtaataatggaggtgccgtcgaagatcaagcaaatggcctcagcttgagagattatattctcccaactctttcgagggttccgtcatgcatcagaccaccagcagtggatactaataacttcgaaataaagcctgccatactccaaatggtgcagtcttcggtccagtttggtggactcccttccgtagaccccaatctgcacttgtcaaacttcatagagttatgtgagactttcaaagtcaatggagttagtgatgatgccatttgtttgagactgtttccatttttgctgagagaacgagccaagagttggttgatctccttgccacaaaattctatagccacatggactgacttggtaacaaaatttctgtctaagttctttcctccagcaaagtctgctaacctgcgaggagaaatcaacaacttttgtcagctggataatgaatctctccatgagtcttgggagaggttcaaggatctcatcagaaagtgccctcatcatggtattgagaagtggatgctggttcacaatttttacaacgggctggtgggtaacactagaacacttataaatgttgcagctggcggggcatttatgagaaaaagtgcgaatgaggcttatgatttgctggaggagatggccctaaataatcagtagtggccaactgaaagaagccaaacaaataaggtggctggtatgcttgaggtggattccattaccaagttgatagcccaggtagaggc

SEQ ID NO: 248363 - DNA, 588 bp, Cannabis indica
agtaccaatcaatccatttaagctctttttaactttatagtcctatacatacacagtctcagaattattccacttgacctttctaaggcgatgtgggattgcacagctaacccggtattttcccttacggatcatgggactactgactctcacaagtttaaataaaaaatttaaatattataaaattaaaataaataataaaattcaacactaaaaaccaaaaactgaaaacggctaaaacaagaattaaaaatcccaatataactaaataataataataataataataataataataatattttgttaatgtaatgcttaattgaaataaaaataaaaataatccatgtataaaaataaaagatataaataaacaaataaaattttattagatgcatatattctatcatatatatggtggaatttattttctttatcacatgaatagtttgttttactaccctatgctatacagacaaaatagagtgtcctactataaatgttctctatatatagaatatctacagtagggccttgatttttttcctatagtataggataataaattgagattatttcacaaacaca

SEQ ID NO: 248364 - DNA, 666 bp, Cannabis indica
aaaattatagagaaataagtaaaattatgtagaataaatacaaaattacgtggtataatatgaaaaatataaaatttataggaatagaaataaaaatatgtaaggatataaataaaaaagtataaatttaatgtataaagtttcatttatagaaaattgagagacaggtaaatgattccaaaagtccctcttgtttttgtttctgttgcctagtactcttgtgaagtatccttattagtttaatttaatattaaatcctacttattttattttgatatgaaagggaatatccttatttagcacttagtattttcatgaaaaatatattttgtactctgtattgtcaataatacttaattggtacctcatattttcaaattgtacatatttaatatcttaaagtaaaatttaattaatacaattttatcaatttaaccaacaaatcttagttatatgtaatcaaataattacatttaaatttaaaatttataaaactttagacaatttaattgtattgataaaattttatcaatttttttttaaatttagggtaccaaatatgtatgattgggaatgcataaaggatcgcatgtgccatcctaaaacgttcctagtcattatagaaatagacttgcaacgatgattgatacccgatagtgatgattt

SEQ ID NO: 248365 - DNA, 734 bp, Cannabis indica
ttgtcaaaataaagtttaattataatccgatctaaaagtgttatgacaaaactgtttatatttttttgtatctgttcgtcttaagcattgtcttcaagttagttgtattaaaaaattagttgttaaaaattaagcccagtgtcctatttttactattttagaaaatacagggtccattatgtcatttaacaaaacacagggtccaatctagaacttttgtaaaacacagggtccaaaatggtatttaccctttataggtagaagtttaagataagaataagttttgacttatttttactctttggataactattatatgaagatcttttttaatgaaaagtgcttttcaaagtgtttgaatatcattaaaaaaaagatcgtaaattatgaatgatgtaaattattttaatttttaaaataggttctcaaaagtacttttgaaaaaagttataaatcctagcttcttttaaaaggacttttaatttttttttttttaaaaaaaaacttttcattttttatccaaatactcttaagacatttttaattctaaaagttaaaaaagagcttataaaagctaagccaagggggccttaagatttgatgttaaatttagtgcaacatattgtttattattctttgacctacaaagtattttgacaaacaaaatacctgcaaagtgggataattaacctttaatataagggaaattttactttttgcccctaataaaaccc

SEQ ID NO: 248366 - DNA, 563 bp, Cannabis indica
cataaatagggaaattttcgttaaaataatcatttttagttttatttgctcggtttttttatttttgtcagagtttatgggtatgggttagggttttatcttctttagtagatactctagagtttattttaagttttagtgtgtgctattgaataaaagtgtttttagtgtatcattttagtttctggttcttttggtggtttggtattgtttaatttttgagtcttcttatctctgtatacttaaagaaatagttaaaactcgctcttcaatttctggtttcctattctataaaattagctactaataagaaaaaaaaatgaaaaatgtatctgaggatgaaaaaggtagtgattctagtcgttctgctggatttggtggatcctttaatagtagtcgtggatttactttgcaaactaaaaggaaataagtggttgagaaagttaagaaggaagatgttcgaaatttgaaaaagatgaagtaagttgtataaaatttgcctgaggattatgatagtgaaaatatggaggttgaagttcagaatgatttgaagatatttttat

SEQ ID NO: 248367 - DNA, 720 bp, Cannabis indica
tcatggactgacgactgaccctacaaaacaacacaagtattttcagcatgctttgtcctcactcgcacgcttcctgagaaaacttcctaggaggtcacccatcttgaaattaccccaggtcaagcacacttaaccgtggagttctttcgtgatgggctactgaaaaataaaatgcaccttgttgatataagtagtatcaatcaatccatttaagctctttcaactgtgtagtcccatacctacacagtctcagaatcatcacacttgaccttccccaggtgatgtgggattgtacaattttcttagtatttctctttatggatcacaggactactgactgtcacactttcataccatgttagaattgtaagatgtataagatttcacttcaaaattaattaataataagaagaatagcttataaatcttatttctacaaattaacaatttgagattttcaaacggataattaataattattactagtttgattgataataattaaattttagagttgaaccctcaatgattttaattatatttgaatgagtcctactctatgtagagtaattttttttcttttccttcacaaaattataatcttttctattaattattattgttatgttttgggatgtgtgtgttctatgtagaattgagagataaaaaaacatttctgtttttttttttttttttaaataaatgatttgagtgtttgta

SEQ ID NO: 248368 - DNA, 924 bp, Cannabis indica
aacggaggtacatctggctaacaggattacttaacatggacatcacaaatctatgctaaatccttgaatttttgcttaactctgatttcaggaatttaacaagaaatcaaactcgttgtacacaatattgcggagtagcaggcttgttgggagtcagagagccccatttctgcgacgttttcttatgcgtttgaacttcaattcattctttgaggtaatgcgaggaaaagggggcattactgtaatactcaaaacctttcttccatgtacttttttaacagagctcatcttcatatctactcttaccaggcaactgccagaggtgtactgaatgttgtcagacctcgtcctgtttcggttttgaatcagcagtagcatcatttcatgccttaatatattgcaacaccgtgccatgtaaatagagtagagttactgaagaagttaggaaagactacttgatttgtttgtgctctatgaaatcgatttcgtacttgtccatacgaaagttgggtggtacaaggttgatggagcatttttcgtagctaacttgataaaggtgaggtagtcattctatatttgtttgttctcgttgttagtattcccatgcatatttcggttggtggcgtaggttggtttgtgaccggatcccacgcgagtcttcaagccatctttcttttttcttcggagagagagaggagttttcaaggcatcttgtactcggaagattgctggtaaaatttcttttaccactgctttgaagaaaaattgaatcttagaagttttttgcgtcatcatgttttgtaggcaacttgtgtgatatatatatacaaaatactgttttgcttttttgatgtgtgaaatgttaagaagaaaaacgacagaatattcctaccatattcatgagtgctaatagttttttttttt

SEQ ID NO: 248369 - DNA, 551 bp, Cannabis indica
gaaccaggactcaaaccccagcactgggcctgtgtcttgaccctgactccagacccaaacgtcagccctagactgttggaaacttcttttactaggatcttatttactattcatgtatgttaagttaagactaatctaacatcctaacatggattcctaaaataacaaaataaacacataaagcgattaagaattctttacagtggttgcaacaaaaattattgactcttttcattcagttctctaactcttgttcctttctgtcgtagagtattaccaagtattgaacttggatcttctcctccttcgattgtattcaccacagtcttctataaaggcttgagtatcaccttgaatagtgtggactgatactcaaagtacctttggaacaaatatttgagagtgagaatttgaatttcatggtgtatggtatttcgaaatatgtgaatggaagagaagagcaagatcagacattagctttttcaattctcttctctttctttatacatgcattcatatagggttaggtttaaataagatggactaaaata

SEQ ID NO: 248370 - DNA, 591 bp, Cannabis indica
aaaaaccacccacagtgggagccattcgcctggaaatcacaccgttaccacccttcgacgccgaggaggccaggccgggaagtcgatgtggggggaaggtcgacaaaaagccacggcttggcacgaaagtattggcccccgagaaaacatctagataagacgaggatattgagagccacggaccaaaaagtggaaacggaattccatttcctttctccaccgtgacggggaggagagggagcacccccgtcgttgatgacccaggcatccacagttgtagcagaaaatgccaatcctttcaaatttgaattgaagccaaatcttgaccccagaagccaagtcgaaaaaacacccagaaaacaatggttcggcaatgtcaatcactacccaaaccttgagaaagttactccaggaagccggtttgtcttcatctaaatccacttccaacacttcaccagccaagctacccaagaacttaccatcgtctacagagaagtactcatgagggaggttgtgtatctggatacacagtttcagatgactaaagtgtagttttccatcctcccgcggagaccaagcttgtaggaccag

SEQ ID NO: 248371 - DNA, 811 bp, Cannabis indica
ttttttttttttctcttcttttttgagttagtgatagttaaaataaaaatttatattttagaaattaaatgaatgcttatatgaataattaaaataataaaatcttataattttgaaacgggacatataatgtataattaaaaaataaaaaattaactagataacaatataattttaatatggtaatatctactagtgcacattgtgtcaattaaaaaacgaaataaaaacttatcattgtatttaaaaaaaaaatagtgtcaaaaaagtaaactaaatatatgtatcaacatctacaaagaaacacacatacaacaaaaaattataagaaataaactaaacaccataacaaatgcacataaaaaaaaaaaataaatcaaaaaaactaaaatgtaacaacaaaaaatagtttgaaaaactacttaaaagataattaaaatacaacataaaaatgacaaaataaatgcacatatatacatcaaaaaaattatcaagaataaactaaataaatacacaataacaaatgcacataaataaaaaaacaattgtacaacaacaaacaatacataaaaataaatgaaaaacaactacaacacaactatagaacacataaacaacaacatgaaagcaactataaaataacaagaagacagctataaagtaacagaaaaatagcaagacatcaatctcgttgcaatgtgcatatcattcatagatcaactccgaataaactacaaaacatctaaaaaaagtattacttttattagccaaatattaattactctatacaaaaataaagaacaaataaaat

SEQ ID NO: 248372 - DNA, 647 bp, Cannabis indica
tatatattaatttttaaaaaataataatagtaatagatacaatattcttaatttatagttaggagaatgtacttataataaagtgtacaaattattagaaacatatatattattaattatttttaaaataaaaattgtcgtagtttaaatatatattttatatataaatgtgattatagatagatgtaatttttatttttaaatataaaatatctgcataatttttatttttaaatacatataataatattataaaattaataaagaatattatatatagtaattaaaatattctgttaaagttaataaaaaaaactaaaaaaatacgttaaaccaaaaattttgttacatagcgacatagaataacttcactttcaagggcttatctttgtgcgctaaaccaactgcatgcatatataccaatgaaggatcctgtcgagacaaacaaatttgatgaacttagcaaacaaatatgtgtctctgatcatttggccaccaaacaaacaaatcaagtgctttcatgttcatttttcattattttattaagtgttgaattattattgccgacaaataaccctaatattattggtatataatattataaggtctcttggagtattcaaatcgcacaagtagtttcatttaaa

SEQ ID NO: 248373 - DNA, 851 bp, Cannabis indica
tatcacaaatctggctctaatattacttgcagataaagctttgatatcacctgcctcatctctcacgactactaatggctgttaaatctcctgtaaaagcaacatcgacattaactcgaacatggtcaagcctcttagacaaaattctgctatgattagaattctcctaagagacatttctgagtcaccttcccatgttccacgaaggttttctcaaaatgtttcaccacctcaagaatagtcagcaacagtgcattatgaaaattatcatgtctaagccaccatatataaggagaagtagttgccgcagaagctgataattcaaggctttccaaagagtcctccatatcaaaggcgcccttgaagtgaaatgaaggctctgcatttctaatcgaccatttgctagagaaccagatgcaggaagaaaaagtatacttttagaacacacgcagtgacgaatcttcaccattctcccacacagagtgatctggttctcttccaaagactattggtaaacgctaccctattggaagaacatctttgtaaattttccgcgagcagtttttttttttccataaatttcaatcgcgaacatttattcaattatcataattttatcatggagtcatatgaacagttttagtttctacggagcctagagttccacatcttcttgtatacaagttctaccacattgaatatagcttcactcaaatttcaataggctgacttcaaagtggagtcgtcaatgttagaatttgggataaggtgaatggagtttcatctcaaaattaattggcaatgagaggagtagccaatccctcttacatattctattatctttccacaca

SEQ ID NO: 248374 - DNA, 532 bp, Cannabis indica
ttcttagaccagatgaaccatttgacgcttaataacgaactgtttaagataaccaaacctagaaactacaaaaagtaaaagatcgataatgaaacaaaatatatctatggcacttccatcttggtcatataggctgatagacttcacaggttaaccaaatgtgctccattaaaaaatgtcactttaggtgaattaccactttgtgagtcttgcctagaagaaaaaaggacaaaacattctttctacgtaaagggagaatgtgccaaaggaccactaggaatagtgcattcaaatttttgtggaccactgaatatcaaagctagaggtggttgtgagtattttctcactttcattgacgattactctagatatggtcatatttaccttatgcataagaaattagaaacatttgagaagtctcgggaatttctagcattggctcaaaactaattgggtaaaactttaaagatcttgcgaactaataggggtggagaatatatagatatgcagttcaaagatcatttaattgaac

SEQ ID NO: 248375 - DNA, 739 bp, Cannabis indica
tctctctctctattctgtgcagagatctcgttccaccatttttggagaagtcgcggtgtttggagttgatgatggtcaaccttttttaataatcgttatgttgaagaggctgagaggttctctcaaccagcaggctcagtggctcagaagagagcttttttcaaagctcattacaagaatttagcagctagaaaggcaggaaacactgctgctcttgatatataaacctcctcaaccaacccatgattcaaaagtttccaactttgaagctgttattgatgaactgggacaacgaaatcttgtactggttaatggaaatgggcattgtccaaagatcgaaacttttgacagtagaaaagtagtggttgaagtttcaagcaataactctttcttcttcaaaatcttcaaccaaatcttcaactttcacaataagattatcgaccaaatctgtagcttctactactactgccactccattggactagtaattgagcaggctgataagaagagatcatcatcaactccgaaatcccttcacaaagctataaatttcacacccattaattattagagagcttaatagaataacatcatccatgctttcgattctagttcatccgtcgttagtttcagttcgtgattgacggggtgaatctgaatattttttggccttttttttcttatgttttgttcataatgtagtattgtttgtgtaatttttgtttattaaaatttatgc

SEQ ID NO: 248376 - DNA, 717 bp, Cannabis indica
tctaattttctttcttacagctctataaacttataatattttattggttgccgaaaacctcggtcaacacaaccgttcatttagtttttcataataactaaaagccataaagtcattgaagtcaaatttacaacttcgcatttctcatttccaacatgggaaacccacttggaaataaagagttctgagtctctcatttctgcagaacaacaacatctttgggaactggtgaccagcttcgccagaatactgaaacagaataagtgatgtcaaaatatcactttggcatcaaaaagtacatccctaggatgttttcttacttacccagtgtccaagttgacatcatatgtcaaccttggcgttgggatgtcaacttgggtgttgggttatcaactgccttaagtgaaatggctataactcactcaatattaatctaattgatgcgatttaacttaccttttgaacctatttaaatgctctatcatgtcatgtctcacacttcaatcacacttcctaggacgttttcttacttacctagagttcaggttgacgtcatatgtcaaccttggcgttggaatgtcaaccttggtgttggattatgaacaaccttaagtaaaatggccataactcacttaatattaatctaattgatgcgatttaacttgccttttgaaccttatttaaatgctctatcatgtcatgtctcacacttcaatc

SEQ ID NO: 248377 - DNA, 589 bp, Cannabis indica
gttagtgaaaaagggtttaaaagattgttatgagaagtgttacctcttggaggttttcgaagattctctttatttccaatagatctcatgtatgtttgaaaattcttttgcaacaaggcaatttcatgatcattttcatcatgagaaccgtcaattttagaaactttaatagcaatacctttgtttttctcactcaagaacctttgcttatcctttttcttgatttattgatttaactcaaatgttcttaatgaacccatgagctcttcaactttcatttttccaaaatcttttgcctctttcattgctaccaattttgtgtcaaacttgttaggaagcacacgaacaattttctgaaccaagacagattcatctaattttctctcaaggcaaaaaactcaatagaaatatcagataatctttcataaaattcagataaaatttctattaatgagattctcaattcatcaaatctagtttgaaacatcgtaaaacgtgatcttgttacatcatcggtaccttcaaactgagtttgaaggatttcccacgtgtccgttacaaccaaataataaagccttcacaaccacca

SEQ ID NO: 248378 - DNA, 1334 bp, Cannabis indica
aaaataataaatcgttttttagttgttttatagtttacttatagttttcatgagattagtttttagatattttatagtttatttttataattaatttatagttgtcgtgaggttgatttttggttactttttagttattttcttacttgttacaacaaagtgtatttttgtaatttaaaactttgaaagtgtatttttgtaactaaaaactttaggtcgtaaaatataaataaaacataaaagaaaatataattttgaaaatttcccaaataaaaaaaattacacgtgcaacaaactctttaaaccctatttttgatgtgttaaaattttcctaatttctcaagcatctgtttaatcaagcattggttgctaagcaagtgtggcaacttttgcaaaatttggggagttcgccggctcagattcttaagcataaatactttcctcgctctgatcttttggcggctaggaaagttgggggtgttcttttctctggtctagttttatgtggggtaaagaccttttaaagaaggggttgcgattttcggttggtgatggtaggcatattcgagtgtttagggatccctggctcccaaggcctactcattttatgtcgatttctcctgagcccaatgagtatctctttgtagattctttgattggcgatgggggtcagtgggatcttccaaaattgcagcagattttgttactagatgatgtagagttaattttgagtattcccttatcttctcgtgttgtggaggatcgtcttggatggcattatgatcgggatgattgttttactataagttcggcttactagttggctctgcagctcgctcgtggaagtgatgttgggtgttcttcaaagttggttggttggtggaatgggatttggaatttagagttctcgccaaaggtcaaagtgttcttatggcggttatatcatgatgcggtacctgttgcgacgaatcttattagacgaaaaattgttatggactgtggtgtttggcttgtggaggtgttgtgccggaaacaactgctcatgccatggttttctatccacgattacagatggtttgggaggaaatcggggtttgggaggaggtttcctcgtgtgtccatggtactcttgctgacttgttggaggtgttttttgatgtgttacaaccggagctgtttcaagaggtggttatggtattgtggtggatttggtttgatcgtaatgcatgcctctttggtggagcgcaatcccggttggcagttctggtgtcattggctcggaacgcattagcggaatcatagggaatcagaaacgagtgtgtgtcctgacttgt

SEQ ID NO: 248379 - DNA, 1061 bp, Cannabis indica
aaagagttttatttagggcataaaacctaacatttcagactcagtgtttttgttgcaagtgggaatgggtccttcaccggtcttcctctttttcttgatgttgtctccttaggcttcgtagcatgacttgtatactttctcagtcttcctctctttcgattactctgtcacttttcataagatcctggcaaaaatcctccctcaatctctgacatgggagagtccaaatttccttcaatgttagaattgacagtttgttcttttgaagagaaaccattgtgttccctcttcttgggtagaatgtagaaaccatcagtcaatttctttttcctcggaccatgctcagcctcatagcacctaatctctccaatgtcaagtatggggttgaacagagtaggttcacagtgatattaatttatcaattcttcttgctcccaacaattgatcaaaggctaattcccatcactcttttgatggccattcaataaggtgggcctaggatccaagaaggctttgatgaccagggcccaattcatttgatttaattctcacacctgggcctctcgaacaagggccagatctctcgtgggccttcaccccctttgacccatgtggagtggaattgtctgcataagccatttgtattccaacagctatattagttggctcatctatttttgttccatttctagtgtcgtccaccaagagcctgttgtctttagtcacaaaagggaaatttgagatagcaagcttgctcccagccttcgcatgcatgggcttcataccactactgcttggtacatcttctttctactgcctagttcccatcatcttcaaagtaggaaactctggaattaccttttcaactatcagatttgtagtgttctcaaaatggagtaacttcaccaatccttggcaaatggagcgctggataccggttcaacaccacctcgctagtttcctctctggtttccaccaccgtctcaacttgtcgtctctttcctaggtattatgtctgatgttctctcgaatccgcgacttcaatctacaagtttattctc

SEQ ID NO: 248380 - DNA, 548 bp, Cannabis indica
ataaattacatattaagaatacatagatagtgagattcggacaacttcccatatccctttgatacgatcccttaattttagggattgttttcttgcttcacgatgccaatcttagaattgccaagtgttgatacgctgcttgaaccatctacccttactctgctcggtcgggtagattctatctgtgcaagtgtatgctgaagtctatttagaatatcttttcagctagatgtaagaagtaggagccaagtgtcaccagcatgtgctgccacgttatagtgtaaaaaaatgggataacattttctcccaggtctgcacgggacttccaaagtcacgcgtggacttcacctagattgacattgcgtctgagcgggtgacacgtgttcgatgcgcctgttcgtgatccgatatgattatgactaagagtcccttcgatttttgagtaattaatgctttgattgaatcgtgcctcgagatgcgccatttacttgcatgcttttggcggttactctcctcgatgcactcaattgcttttaatttcccaatat

SEQ ID NO: 248381 - DNA, 623 bp, Cannabis indica
tcggcgaattataggctcccaaaatcacatcgacaacaacacgcataagtgactcgctaaatcacaattgggacttaggttttaaaccaaaaacctatctactgcaacttataatggtaatactctaaactagcagggagccaaccaactagaaacctgaaactgacacgaaacgacaagctgaaaaatgagtttcccctgctgcaaaatccgggtaaccggttttacaagcagtgtaaaaccggttaaccggttttacccagaaaaccaacaaaattcaaacccctaaccaaatcgtttccaaacccaaccaaactttccagacctgcataatacaccccaataaacattttccaagtgatagaacaactacctatatacagaattcaaaatcaccattgatgagccaagcttgagttaaaaaactcaaagcttgctcatccaacaaactacctatcaaaaccatctcaaatcactctataaaaacataatttacctactgaaacataacccaacaacaacaacaagaacagcaagcaaaacatccaaacatgcataattcactttcttaaaaaatcaagaaactaaaagaaagttgcttgagaccaccgatttcttacaaa

SEQ ID NO: 248382 - DNA, 598 bp, Cannabis indica
gattggtgttgtatatgcaaaatttgatattttttataaaatactaggttatgcatgtgcctaattctctttgttctattttatttatgcttttgttttattaatttttatttcataaataactctaacaaaaatttatataatttaaattttacattttagttgtgcaaattataaatacctatttattactatattggagacacacaaattttaaattgaatagtatagaattttttttaacactaatttttatattgtaaattattttgaatttttcaaaattttatcaaatatcttaaataacaacgtacacaatcataaaaaaaattaaatgaatttttttttagatgtcgaacagtatgaggtacattggtgcatcttttttaggggtaagggacggagggactttagtccatatgtaggcttaaggcttcactcaagtatatacatcaaaattttcacatgtagatatatacatatattaattcatttcacttaatttattaaagcccaatattcacaaaagccctcattcaatatcttaatcatgattcatgagcctaccctcattctaatcaagcccattttaaaagta

SEQ ID NO: 248383 - DNA, 1200 bp, Cannabis indica
gcttgttttctttggtttcaggtctcacacttagaatatataaattgatcaaatttcaaaaaacaacaatctatagaatagagaaaattttgcaagaaaataaagcgtaaatttgactatgtgctgatcagattttgaaaaagtcaaaacatagaagctttagatctctttttcatctttccaatgcatcttgaatcaactcatttgcagttcgtatgtgaaagttatgcatattttactgaaagatgcttaagctgtcaattttacttcagtaattgagaccaccattttctatggtcgcgactcttttgatgctcgcgaggatagttgcgactatggagtttgggcataaaacttgtttttcaagattagcctatggtcgcgactaggctttaggtagtcgtgactatgtgctaaaaacgaggtttttgggtaattttgtaattttaccattcaaagatatctgtagtattttttatataagggttgcatgttttagaagtatgggactaaaaaattaaaccctagaaccgaagaaggaggcaaaggaagaaattgtggcgatccggggcaagatcaccaactagttctttcttctcctttttatgtttttatgttaatttcttctccaatttttatggatgtgaacatgagtttcttctaactaattcccaatctcggaatatgatgaatgttagatgatgtttctttaatttatttaatgtagctattagtttttcttccctatattgtgtgatttgtacttatttgttttaattacatattttagattggccatcttaaatgtgatttatgatcctaatataaaatctgagaagtgaatattaggaaagctctaataggacaaacataagttttgatgtaaaacaaaagtatttacatagcttatgtgatttttagattctaaatttaatgcaagttgtatgttagtttactttagagatgtaagtagataatatatgatttaggaccttaatgatctgagaagagttagggttaatttaataatctatcatcaccaaaagggagagaattaatcattaacattagcaactggaaaactgaactaacgggattcatattcctaaatattcatccatatttaattatatttcttttattgttattttcttgcttttcaatttttagttatttaattattcaaccttattatcgatt

SEQ ID NO: 248384 - DNA, 660 bp, Cannabis indica
ttgcgtgttatgaggcatccaaccatggtatgaggctgaggaatttttttaccgggctgcacattatggatggaagtgaaaaaccagttaagttgtattatgataataagtcagatgtattgtattccaatagcaataggagctcgacgaagtcaacacatattgacaccaagttccttattgtaaaaggaagggtacagagtgcacaaatttgtgtaaaacactttggtacaaaattcatgattccagacccccttactaagggcttgccacccaagctctttcatgagcacactcctcgtatgggtaattagattatgagaatatctagatacagtgggagtttgtctttattatccttagtgtgttttagttgtttcaggaaacatgtgtatctggatatatttttttatccaaaattatgttattcagtttatttcactttgtacatttaagctaaagttttgatctccatatataaagtaaagtaggaccaattgaaaattgagatgaatagagcaccatgcatgtaattttcataccacactattatgattgatctttgttatttggctatattgatgtatgtgaccattgatgggtttagttgagattgatacaacgaaaatcgctttgatgctatgttgatatagttaatgg

SEQ ID NO: 248385 - DNA, 705 bp, Cannabis indica
aactgatatagaggtacttaacatgctctgaggatcactttgcctagaagaatgtgaatcccaattggttaagcatgagtttttcgacaagactagctaatttagaaaaattggtccaactctaccaattcaaacctttaacaaagagactagacttttaagcatgaaaaagaaaatccagaaagaataaaatgaaaaatggaaatatcaacaaaaaccttacaaaccccccatttttttttcttcccctttggcttaccagtacaggtagatgggatagtaaatgaaagaaaaaacacaaaattgtgttaacactacctcaaaattctgaaacccagataagtcaaggtactcaacttaaaaaactagatgagtattatcccaaaagaagcaaaaacaaacaagctctgtcagaataaacccaatatttcttgtcctaaataccaagtaattcactttccactattaggttaacaaccactataaaacagagttcatatatatttcattaaacactcagaaaataaaactcaagaggaaatagctccaaattcaagtcaaaaaggaaagggatataaaaaaaaatatataaatatttataatatcagataatccaaatggaaagcagttacgcgttttcgttgatcagtgaatagatattccaagacaaggacagagagaagagaaacaaatgtgaaatatttg

SEQ ID NO: 248386 - DNA, 741 bp, Cannabis indica
taagaaaagaaaaggaatttgtctatttttcggggtctcgacattatgtaaagttattggtcaaactcaagggttagtgtctaatggtgaggaggaatgttggctagccaggcaatgttccaaggtttggggccactagcacaggcgggtctcctggttgaacccatttttacttgttttttgtgattatagctcaagttgtagagatggttaaatggaagtttaatgtgctatattttcttaatgttaaatatgaactgaattctttttaatttatgtttatgcagaaaagggaggccccagctggtgagaagccagaaccagttagaactcacctccgaaacatgattattgtaccagagatgattggaagcatcatcggtgtgtacaatggcaagaccttcaaccaggtcgagatcaagcctgaaatgattggacactaccttgccgagttttccatctcgtacaagcctgtcaagcacggtagaccaggtatcggtgctacccattcatctaggttcattcctctcaagtgaaggctgctagtgccagtttgcaatattatattcggtatttttgtttccaagacttcgatgaatttttgtttccttcggttgtttaaaagattttgaatactgtttagttttctctttagactgttgtttaatgaaaattatatttttcctagaatactgattgcaactgattattataaaaatgcattacttgattaaaattgtc

SEQ ID NO: 248387 - DNA, 783 bp, Cannabis indica
gcaccacaaagcatggtatggctaagattatctcagcacactttgaggaacttttttcaacttcaggcaatgatgagacaactctggtggatattatctcaacaatacctacaactgtaacggaagatatgaacaataccttgttgcaacctttcacaagccacaaagtttactcagctctgtccttaatgagtccagataagagccctagttgtgatggtatgtcaaccatgttttatcaacacaattggcaattggtttgtacaaaagtaaccaaagttgttctgggagttttgaatgatgagctagatatgaaactgttaaaaaaaatcactcattacccttattccaaaagttaaagtgccgcaagggatgggtgatgaccggctgataagtttatgcattgtgatttacaagctcatctcaaaggtcttggtttttcaatttaaaaaggtgctagctaacataattttagaaacagaaagtgcttttgtttcaaatcgtcttattatcgacaacattctggtagcttttgaacttgttcatcatctcaagcataagactcaaggaataaatagatttttttctcttaaacttgacatgagcaaagcatttgatagagtttaatggccatatttttcagtgattatgggaaagatggggtttcaccacaaatagattactttaatcatgaattgtttatcatgtacaagtttctcctttttgcttaatggagagctaataggtaatgtcactccatcaagaggtttacgtcaaggagat

SEQ ID NO: 248388 - DNA, 1012 bp, Cannabis indica
agtttttgatatttcagtttactgcgagtaaattcatgatatatttttcaaatttatttttgctattgtaaattgttacgaaattttttaaaaaattattattaggattatgttgtggtaattataataaataccgtcataaaaaaaataaaactttttcctagatatatatttttgattacggatgttgattaagaagttataatataaaattgacgataattcttctcttatttatattttatttattttctttgaaataattcattaatgctacaattttaaaaatagatttttaatttgggcaatccttttcaagagttaacttctcaaactataggtctagtttgacagaaaatttaatgattgctgaataagagtgtcacatcgtcagttaattttttttttttttgtttctatgagccaaaaaaattcagtaaataaaaattacaaaataagataaattaatctaccactagtaataattaataaaaatagaagtataataattattaattttttttttgagtaatttacgtcataacctccataactatttagtttattgtaactaatcttcaattttaaaattttagtggtaaaactctctaaattcgtgttttgttagcagtttaatatttttatctatttttagctgttaactatcatggtggaatgtctacgtgtatacagtgtacacatagcacaattttattgatacatgtaaataaatatttaaaaaaaaaaaaaaataaaaaatattattttaaaattaaataaaaaattctttaaaaatgaaaaaaattaaaattaaaataatttaaataatttaaataattaataacatatgtttagaacaatgaatagtattctataaatatagagcataaataatatattttaaagaaattttaagatgaaagaatttaaaacatctactgtatcgtatttttagtactttctattttagagaaactcttgtgagtgttgtaagttatacaaattttattat

SEQ ID NO: 248389 - DNA, 554 bp, Cannabis indica
aaatgtggcgagaagtagataaaattttattgggcccttataggcgacgatataggcaccagttttaaaccgttaggtataaggtcccaataaattttacgaattccaattaaagttgttgcctattcttgtaattactgttataaactgtcgggaatactattttttcccgactgttttaaacaattacttaatttttttagcgacggtcttccaagaaaaatatttttaggaccgtcgcgaattttgatttttgtagtagtgtaaacttgagcacatgcgattcagaattttaaaataatgtacttgatgaagacaataataattagtttaattttttaattatgtatgaacaatgattaatagtttaatttttaattatgtgtggacaataattatttgtttaagtttttaattatatgtggatgataattatttgttttgtatgttagataattattaattaattatgtgtgtaataattatttaaattgagtggtttataaaaatttatgtacaacccttactatcagtgccagcaagaacaatatttt

SEQ ID NO: 248390 - DNA, 1877 bp, Cannabis indica
ccagttgcaggttcaacagcagtctgaacctggtttgcagatgcctctttccctttgtcatttttgtgaaaaccaggagggtatccatggattttataacacttctcaacagtgtgtccaaggatgttgcagtgagtacaaaaaggtcggtttcttttaggttgattagatttgttcccttgagagttgttcttgttgctgttgcttttgtctccttggaaggcaaatgccatgttcgaattcggatcagcagtggaatcaatgttccctttctgattttcttcttgtgtgaccaagtgaaatactctattcacttcaggcagggggtccatgatgagaatgttgcttcgaacctgtgaaaaagaatctgacagacccatcaagaaggacattatgtattccatatgatggtgttcttgtaatttcttaacacccccacatgtacaaccattgcagacacaatttggcctgtaattagacaattgttcccaaactgttttgagcttagtgaagtacatgctcacagtttggttttcctgttttaagttcatcagatttcttcttaagttgtatatgtgtggcccatttttctggtgaaatctcaccttaaggtcagtccagatagcagctgcagattcatcatataagagactagaagaaatttctttagatactgagtttagaatccaagaaataacaatgttattgtttctataccaagcattgtacataaccgaattagaagaatgaggcttaggaatggtaccatccaagaatccaatcttgtttttgacagaaatagccaattgcatggctctactccaggacatataattgtcctgcccagtaagaggttgagacacaagtatgttacctgggttgtctccatggtgcaaatagtatggattcgaaggatcttctaggggattcctttgctgcgtatgattgctttgattatgtggtccagtaacttcttcgatagtggcggaaacaccatcgttatcagctccttggatctcagcttgattatcagtttacatggcagaaacgagacagatcaggaagaaacactgatcgaagaatagagacgaaattcaaaacagaatttcagggaagaagacagaactctcgctggagaaaacgacacagcgaagagaagaaagacagatcaagatcgaggggaagctcctcttccccgctctgataccataacacgaaaacacattgggtaaaaatgaaatcttgtattgactgagataaaagatacagaggtatatatacaaggctcaaacagagcaagaaagaaatcaacaactcagcctgtaattactaaactgcccttaactaatttaactacctaaccaactaaataacagactccagctgaagataaacagaaggcgaaaatataggaaggtaaatcttgttagttccaacaaattcattgtgtatatttatttatttcacggttcaatggatattacacttaggcttttaaaattctttttaaacaattttaattgttatatattaattaatatttaatattttaaataaattaattaattaattaataaataaaaattttgagaacatatataattttttttttttggaaaaattaaataaagttgtttgagtattctcaaaattatattgaactttcactaatttaataattagaggcttgtgacaatagatgactaaaagataatattaacatacttatattaatttattttaatttcgtaatttacattaaatattttatataaataatatgtattaaatcttattattattttaatggtatctaaaaattaataaaattacgttatattacatgcaacccaactagtataatatatgtataattt

SEQ ID NO: 248391 - DNA, 1073 bp, Cannabis indica
atttttttcctttcttttttttggtaatcattaataatgtttagcttaaactaatatttctattgagattaagagaaaaaggagtattttataggaataagttgataattaccactttttattttacgttcaccaataatagctgcaaaataaatttaattaaaatatatccttttttataattgaactgtctaatgtaccccacgactttgagtaatggaattgcaggcgactccgactcctccatagaaattaaactcacgaaagctctaccacgagtctaccattgccagcgattcctccaattactctaccattgattacaaccacaatcgctataatcataactataataagaaataaagcaagcaaattcaagcattaagaaaaacataattcctactatcataatgaattttcttatctttgtcattccaatcatcatcacattacatttatatttatccattaccacatccttcaaataagtaccttgctttacttttataactaatatggcgaaactcttcttcgggcaccttatcgaccatacatggaggattgggttgagctgccgactgagggatgaacgtgaaaatgtgcgcccacaaaagacggaatactgggccagaatcgtcgattgttcgaaaaaagaaggaggtgacagaagttatcgtgttatttagagatgtaattgaattttatttctttttactaacctaaggctataacgggaacaaaacttagaaaagtgggtataaatcaaagaatattaaaaggaaggtaaaaattaaaacaggtacaatgaaatagttatagagtataatttcctctattttatatgctaaatgatttttggattggcacttagaattagaggaaattacactctataccctttttatattgtcctattttatttttaccatcttttttaaagtttatcatgtttacttctttttttaaatattgtactaattttgcccctgttactttaagatactctatgtgactctcttatgtcagagtattttaggtacaatacatataaaaagaggtatgtttcaattaaa

SEQ ID NO: 248392 - DNA, 962 bp, Cannabis indica
tgttaataaacatacttgtaagtagatctaagatcctggtaaaataatttccaacactcagtgcctacgttgacacctggagttgggcccagtgccgaggttgacattctgttaacttgggttgtttccaatccagttcagcaaaaagtgtttcaaatatttttaccatcatcagaattaacgaagattcaagtaaacttggggagaaaaaaactaacccgagtccctggaaatagggcccaacgctcaggttgacaatcaacatgggatgctacattcaattgctcaaatgttaaattcaaagcaaccattgaatttggcatgcttagaaaaatggaaggagaccccgttctcaagtttagaaaccttagaagtatcaaaattagaatctcgaaagctcggtttaaagggaatagggcccaagtcaacatatggcctggtttgtttggttctgcttattcgaatatgatgtcattttgaccatccatttagtttttcacaagtgcattgatacatgaatttagaaaaatcaaattgagaactttaattttttggaaaattaactctcaaaaatcggaagttttgagtctttcgttttcgtagacagctccatctcccaaaattggtgaacgtcttcgctagaacatataatggactaagtggcgtcaaactatcacttaggcatctcaaaggataccactttgacgtttctacacttatacaacgtccaaattgacatcaaatgtcaaccagggcgctggaatgtcaagctaggcgctggatgtcaacctgggtgttgggacgtgaactgacttcaagaaaatagccataagtcactcaatttttatttgattgacgcgatttaactttcattttgaagctattcaagcgttctataaagtcatgtctcccactatagacgtaattttgaagatatcattgtcgaaattcacccccaaggg

SEQ ID NO: 248393 - DNA, 1231 bp, Cannabis indica
agataattataaaaaatataagaaattagtgctaattgcctttactaatctaaattactaaagcagtcattacaatggacctcaatttcttgggtccaactgtcgagaagatgttggcttatttcaaataaacagaactagaagagtgaggaagcattgaggaaggggaaggagctgaagtagtcgagggagaagaagatgaagttacctctaagtctcccactatgtagacttagtttaattttctttaatttttgaacaatggtgttttggccaagaatatatcttgcattttgtgggattcttatttatgtagttaggtttatcttgctttgttggacgaccaacttagcttttaatcatatttataatttatgctactttaagatatatttccttcactttttgtgagaaaatatttccaaatttgaattatcacaaattaattatgaaccattatttataggtagactcaatttaatgattacataacattttgtttaatttttcttcctctcctcgttgatatcatctccacttcatataattctaaatatcgtattttttatttctaatttgcctgagacactatttttttctttcattctatcgatcgttgtactatcaggaaatatgattcgtttacttccaagggcgtatacgttgaagttaggacatttaatatacgagccaagtcatattgccaaatgtcaatacacatgtcaagccctactctcccatattggctgctcaaaatatgagggataacaaataccctagctgatttttgtgtgtgtgtgcattctttgcgtttacaagttgacacttagtttaaaaagaacaaaaacttttgtggaagactttggttttaagttttctaccactgaagatcgaggtcaatcacttattaatgctttgcaacaacaagaaacaaaggctagagtgatttatggaaggagttataaatgtattgcataattagtataattactaaactttgtatttgtattatttctattaaaatatgtttaggtttttcttactttatttgtaggtaaattaaagaaaattcttgaataaattacgatccagtgtagtattctaaaactttacccctgacatcttgtccatgttgttctgcttgagtcacattggtgtgtccgtttccatggtaggtattataagatctttaaggatttggcattggtagctgtcttgcttgctctacatg

SEQ ID NO: 248394 - DNA, 662 bp, Cannabis indica
ttgtgtaggttggggtttctcagtgttgggtggatctaattgcccgtgtgtgacaattgttaactatatggtcatgcttggggcgcatgagatgggaccttttattcctactcgaggtttgcgacaaggtgacccaatatcaccctatctatttattatttgtgtggaatgattattggctatgatttataggtattaatcaagcaagaggatggttgaggtgttgtagagtggctagacaagcactggtggtttcacacatgctttttgcaaatgatcgttatatgtattgtaaggctaatgttcaagaagctcaaaatgttgtttctttgttgtgaatttatgaacaagcttcgagtcaacaaataaattttacgaaatcatctgtattttttagtattagtatgctgccacatgaccaaatacaggtttgtgtacaaataaattgggagcccgtttggtacgtaggattggactagattggattggaaaggattggactggactggaccagattggattatgctaaaagtaatcttgtgtttggtttaagaatagattgaacttaaatcaaaatcaaaatatataataataaataaataaataaatgaataatttgaaagcaaaaaaaataaaataaataataaaaataattaaattat

SEQ ID NO: 248395 - DNA, 395 bp, Cannabis indica
atataggcctatggctattcccaccaaaaataattaaacaaatacaaattcataattactagttttcatatatttttttatgtacacttgtcagtctgtttggttttatactttgaaaagtgacttgatctcgtccatttgtggtagagtgaagtggattgggcaagtgtgacacacgaaaatgtttatgtaattgtcttgaccttgacacatttttcacatatatattcaaagcagcctccaacgttgatacaattttatatatttatatatcaatcacctcataatgttgtttaaagatattataggtttattgtctaaattttcagaggtagttttattttatgtgactcgttcgagaatttaacagctcatgatttggcaaagcatgctct

SEQ ID NO: 248396 - DNA, 741 bp, Cannabis indica
ttaatattctttaataattaccattatatttgttgattcgtattctcccgggttgacacgtgtcctcctctaaagtgctagtctaattttaggtacaacaaaatggttgtcgtataatatttctttaataaagatttttataatagggatccctgaaacacgctttttatgtcgtcataatgtgtttttagtgttttattttagtcaagtttttaatactatcacattttttaataattgattattctattggtattaaactattttataaaatcacacgtggtgtgcctatagaatagggttttacagcttggtatcacacgaaccatagttttaaaggtcctaaatattggtcgaatatgtacgtttgctgcaaagacaggttgactcatggtatagtaagtgtttatgttaattgttattgccttacctacttagataattatagtgtatgatgggaagaagtagcgtactgattatctataataagattatgtatagtatatacatgttgatattgatatctgtttgagtttgaagtgtttggaagatgtggattaaatgtgtgacaagttatacagtaagggcaattgaattgcctaattagcaagctgtctgggctcgaggcaaacagtaaggaagagaatcctttattcttgtaatactggaaacatgtaaattctgctatgcatgatattattagacaacaaggggaagaagatctgagatctgagagaacaa

SEQ ID NO: 248397 - DNA, 577 bp, Cannabis indica
gagaaatcatatgtcactgaatgtaaataccaaggtaccaagcaaagcaacacgtatcaatcatgaaagtccttagcgtacactatacaaactaagtgtaacaatcggatcagcttgagatcaagtaagcgaggtgcctctctggctatggaagacttcctatagcttcgtccagttagcgttagcgaggcttacagccctggcgagccaaaagataacattcaaatgagcctcgaagaactctttaagaaccgtggtcgttacaagacatgcatcgacgaccccaaaagaaaaaatggcatcaactcgctattgagatcactagaaccaagcttctgtcgagacatctccagatacaacaattaaagacgtgtttaatacacgattgttttgacctaataaaagcgaaaaaatcacagctatatgattttcaaattataaccgcatttacactatgtgatatgtaatcaaaccccgtgatttcagggggcatgatttagtacatgtcaaagttcgaatgaaaaaattgctaattagccaaaataaaaaattagactaaaagttatcctaaaaataa

SEQ ID NO: 248398 - DNA, 618 bp, Cannabis indica
ttagttgcttgatgcagcatgtgtaactttgtgctattaaagttttttgaggttaagcatttgataggaacaacctatccaaattagttcaatagcagagaaaagagagagagcagtagtgtttggataaaaaatggtagattgcctttcattaattccgaggattttgagagcctgattctctcccaaaatagtttacaaaacaaactcaaattcttcacacctttttcctttcctactctcacttatatatactcccaataccccatgattattaccattttgctccttttatttatcctaaggcctatcagtattctataatggtgacatctgcattgcaccacacataatcggcttcttaaactccttgggtgttgaatttctattgttcataggtccttgtatgaattattaagttccccattagtatctgatgggattgatgccatgcatttcttcattagtatcggaagggactgatgccatgcatttctgcaagagattctgttttcttaactttaaatgaagactggggcaaaaatcatagtgtaggatcagattttggggtccactaaatcattgaatactatcgttgacaaattcattcgctaacaa

SEQ ID NO: 248399 - DNA, 569 bp, Cannabis indica
gattttattgtgtttaaaagttacgcatgggcatgtctttagcttgttcttggtttatttcttaatttgattaaaaactatcttgctctctagaaatgtgattagaaactgttgctaaaattacacatcatcccaagcatatttggatctcctagttctattaaatttttagaatgagtctacagtatggtttatgctttttggtttgttaattcaggtggatgaggctatctttgagacaaaagaggagaaagctctatggagtgctttcttgtcagttagaagcaaaataaatacaggtacttgtaatttacattttcaactttttgcagagcaattttatttcaaagctcatcaggtaacaaaataatgcttggcgaattgaactagtcttaatatatcacctcttgtctaacaggtgttgatgttgatgactttattgatgcatcgtcagagcttcttcaaccactcgaggatttcttcaataacgtctttgtaatggtggtacgtcttcttcactgtcaactcatttgttttgtatgtattcgagggagagaatagaagatcat

SEQ ID NO: 248400 - DNA, 923 bp, Cannabis indica
ccattcacgcttcctgctttggaggatagctcaagtttaacactcttgttgaggcacgccgagggcgtggcaaccatggaaatgccaccctgtggttcaagcacgtcccagccacagttctttaatgtctgggaaaaagaaacatgatcataaccagggtaagaaaattgcaaagatgatcactgttagctacttgtacacatattttctttagaagttgatatgggacatctctgcactccaatgtcctttgatattaacatggcagaattcaaggttgttattttaactgtatgtttcatgttaaaaaaataaagaacattttttcatacaatcttccaatgaattaccgcgttctccttccctgaaagcaattagaattggccatcgactttacaaactatcgctattatatgatgactgccaatttgtttggctctccaagaaatatagtgcaatatttcagcccataatgctagcattcaaaccagaccaattgcattttacaacaaaaaaaaaaaaaaaaaagaaaagaaagaaaaaaagaagaaagaagctttctattacaaccatttggatagaagtgactccaaaagctagcctaagcctaagggagaagggtccccaagtagttataacactaaccaatcccatacttgtcaatgtgggatcctaacaatacaccccttcttagaaggggacatctacggtggcccactcagggcttttccacaggtcccccctccgcgacgtcggtcccacttgagctgcgtggctcttataccatttttttatgaccatgtaggttagaactaactctacaaaagctagcctaaaggagtacccatgtagttataaaccacccaaccaatcctatactcagtcaatgtaggatcctaacaccttcttcccacttcttaagc

SEQ ID NO: 248401 - DNA, 758 bp, Cannabis indica
ccaatgtccttgtgaaatctacataattttgtagcatctcgtttatgcctcgcatgtctcatgggctcaggcttgtgaaacgcgaccctatgctcatgcacgagaaagatgttttctcgagtttcattaagcttggtctaaatagtgtaaattgacatgtacttatcgtgcttcttttgtttctttttatctttggctgattcctaggagtcatcttttctctttgtgctagagccttctgggttgttagccttcgtagagatggtgcttgcttggatagtgctgggtttatttctcgagccagtatttatcaatttaatctcttttcttgcttcttcttttcgtacaaacacttgagttctttcattgaactcactgatgttttttacaaggcgaccgtggaagtcatcccacaactcgcctccaactgccaagagatcagttgtaatccccgcttgaagagtagtaagctgtatactgtcgttcaagtttctaatccttgtagcagttctactgaaacgacttaggtaggccataagtgtctcgtctagttgctgctttatgttagtaagggaacacgcttcaggtcgcctgtcccttgctgcctagaactatttcttgaagtctttagacagctgttcccaagaagtgattgagtcatgggtgaatttattaaaccagctgctcgttgcctcagtcagcgaggtgggaaataaaatacaacgtaacttgtttgtaacattactggctcgcattat

SEQ ID NO: 248402 - DNA, 679 bp, Cannabis indica
gactagatttttagccaaccgatgcggagtcgtaataaataagatttaaaccaaaatcacagtaataaatacagttcataacaccgaaatttgcaataaatgtaaataaaagacaccgaaatttaaagaggtttggcctcgatattggtaatagtctactccccttgtgttttattaatctgagttacaatggtcaagaacaggctcttgattgcaaataatgaaaagtgtttatttttctaagtgttcaaaattgcggatccccttcttaagtcatagatgaccccttatataggggagagggtcggtgcttctcgcttcaggagaagcgaccaatgcggagctacctcaatcatctccttgatttttggaggtagttgaagtctgatttttttgataatatctcgctattttcgagggttgagaactgtatttgagccttccataggatttgaacatttgaaagagttattgatgatgagggtctcttatgggtgtgacatggttgtcgtccactttcggggatgaagcccatacttgggggaaacacccctgaaaccccaacttaaggagggcgacaatcgtcatcgtggggtgaccccccgagacccaacttgaagggtgtgacaatcatcaccttgggatgaccccccctgagaccccttgtctgttgtcagta

SEQ ID NO: 248403 - DNA, 715 bp, Cannabis indica
aaaaattagaaaataaaaatgttatcaaacaacacctaagaatatgagtgagttttacataaaaggagttactattatttttctgaataggtgaataaatgataattttaaaaactacaatgaagtgtacaaataatatatttttatctttacttataaattataagtgttgttgttaaaatcacttaaaaaattaataaataacatttgaaacaatttagcacggaagtggcagggcacttaaatttccagatcaaaacaaacaacaagtagtgtggattaaaatattacatcaaacaaaattggaaaaagagtaacacaaataaatacagattaagataagaataaaaagtagacagttttgtttgtctaggtgtccagttccactacactacatagtttcaatcaacaaccacattacttttttgtgaaaattttgaacaactaggtagcacttatattagaattttattttaaaatataaaattttactaaaatgataaaaaaatcattttattagaattcaaaatgacattccattttcatactttaaaatataaataataaaaattattgggtgattctacaatgcatcttcttaaaaggtatatattgatgcaccatctacttattttgacttccaaaataattttttagtcattgttttacatattcatgtacgttataattatttaagatatcatataaaattttg

SEQ ID NO: 248404 - DNA, 787 bp, Cannabis indica
ctggtatagaaacaatcctgtcagcatattataatagtgatattatgaaaaataatgtaatttatttaaacatatgaaagaattgaactcatagagtggattattacttttcccctaagaaagggaatgagctttatattgcataaatttgaatcgagacccgatattatttatctgcttctgtatgtgatgtgttttgttattaaacaaaatcaatgcttactgttactcttaatggtgcatcattttaggtaccccttacaccgaacaatcctaaaaagtaagtgaatcttttctatacaagtggataaataagaagtggaaagaaggtttccatgtcccatccatgacaaccgctggcaaccgatggggtttggtcatgtgaaagatggtttggagttttgaataatatacattgtggccttaatttaagcttctcaaaactccggagtgttttcttttttttttttggctgtttaataaaataactacaaatttcgaatctattgcacaaaaatttcagattaatatcaaatgctcaatcataacatcctaattgtagaacacgagaccaatttcaatcataggtttatatacacaattatgacattcttaacaagtttacttttataaaacaaatcgtttaaataacttacagttagttatcgaattcttaaacaaaaaccactagaatttaaataaaactaatatttacgtagctcgccacgtaactttcatctagtatatatatatagggatatgattttgtcccgttattgtactttca

SEQ ID NO: 248405 - DNA, 515 bp, Cannabis indica
atagactaagttggcagttgattgatcatgtgctctaaaactttaaagctcctaaaatattttgtaattgggtcaggcaatggatatccacgacctcgtttaatatatgcctgaatagttatcagattattaggctcacccctaaatgcggttaaaggcaaagagattctttatctccttatctgttcatataggcggtcgagattctatcgcgtattcttgaaagggaactagacaatggaaccataaaaggaatcaaggagtaggaatggtcctcagattttccacctattcttcgtgaatgatcttattcttgtgggcagggccacattggaggaggctaagggtatttggaggtgtccgaaaaagttctgtgattggttgggacaatgtataaataaattgaaaatttccatttaataccagcgaggggatgagacgtaatatcaagaaagaacttggccttaacactgccgctgaaaatttaattatttgggctcccactgtttcgtagt

SEQ ID NO: 248406 - DNA, 2846 bp, Cannabis indica
taaaaaaattacaaaaaacataatcgatagtttttttttttaatatttttacaaatttaaacatttttatatatataaaaatataaatagttattttcctgttattttcacaacaatattatgttgttttatatatttatattgtatattgtttacaagttgctttcttgagcttctataaaaatataatttaactaaaaaaattacaaaaaaagtaaaaaaaaaagtctaaaaaaatgtacaaaacaaatacaagtttaagtattttgtgttaaaaattttatttttatataaaaaatggcaattctataaaatttttgtatctttttgtatataagaaaaactagaaaacaattagccgctcttcgcgcaattgttttaatttatttcttaaaaaacttatattttataaaatgaaaaataatatttattcgtgcatatgtatttatattttcaataaaattgatttctataattaattaattttattttaaacaaattaaaagaaaaattatattttatgtaactttttcagaatatttcttgaatgaaaattgattcaattaatttcaacaatttgtaattttaaattaaaaattaataattgaaaaaaataatagaatttcaaattaaagaaatgtgaaaatctgtaaatatttttttcctttaaaaatgagaaattagttcttaatattttttaattaattaatatcgattaaataaatgaaaataagtcaaagggcggttgattttaaaaaatataagataaaaaattaatgaatataataaaaatgataataaatatttaaaaaaattaattttaatatataaaaaattgaattgatgtgttacgtgtttactggtggaacctttatggatttaattgtctaattttgtgagctctttatttgagacctttcggctttgtgacttttaataaaattattttattttttttatatgggtgtactcttaacgtgtattaaatgagtaatattagaaaattttaagtttttatgattaatttttctatttaagtagaaaattttctcatttttacattatatgagttgagattggtccattcactgaaaaaaataataaaattttttttttggaaaaaaggcaataaaaaaagttgaattcgactttaatattttacatataaacatattttttatatactgtaaaaaagagatatttttttatattttttttgtaattaagtacctaagttaagcataaaaatttaaatttctctttttattattccatatatatattgaaacatgagaataatttcataaactaatttttttttgggaaaaaactaaaaattatttaaaaaagtctttattttaaaaagtagaatacatatttggatctggctcagtaacactataaatattaaaacataactagttaattactcaaattaatagagtcattatcattataaatagtatttatttttttccttttccgtcatcattttcattttcattgttgaagtttcctttcactgatcaaataagcattttctcataatacatcatttctacacatctttactctctagtcatccaaaaccgataccaccaccgtatgtattccctcaatataattataataattaaaataattattaacccccatgattgtattgttttatagcatgtgtttttattacttattttgccaccaactttttcttgcttatatagggcattacttcatattaaaaaaaacaaaaaaactcattgacaaaatcaaataagatctagaaaagaaaatcaaattggaccaagactaatcaaagtgaattcaaattataaaatacatatgcataacatggtccaagaataaataattaaataattttgtttatatattattttcaataataaaacataaatacattgaaaaagaattaaatcgtgttgtatttaattactaatttaataaaactaaagaataaataaaaattaatacaaactcgatcattcttaatatataagtcatactattattgttatttctcaattaaaatttgtttttcatcaataatattttcacatataaaagcaactagctagcataagtgaatgcttaataaaatgtgtaaatgtgaatcatttattaaagctttagaggataatcttaatcaataatgtggtctccatctacaaaattttaattattgttctttataatttataaataaacatggcatgtagaaatatatatgtttattaatttaattaaaaatatatttttatgtgaattcggaatggtttataattttaggtaagagttttatttgttttgatcattttgtataggatgatatatttgattgatagtttttttagtttgtttattgatatattatatatataggagctaatacaataggtattgtaatttttacctattgatatgtataatgatttattgccattgatttaatcaaatgacttaaattaacttttaaaaattacaccataattaatatttctctttatttataattaattttaaatattaatttggatccaactaacaatactccaaagctaactccaaacttataatttttcttacttatttaccttataattttttttataattttaataattattttttaattttaaatttatatattaatttcattttctactcagcaataattatagctaaaagagtacaaaatattcaagttatttaatcctaaaataatcaatacaatcaacaatataatcataatgtaagtggtaaaattctcttacatcaactactaggggcggaccacatagaggcgaagtggggcagtcgcccaccct

SEQ ID NO: 248407 - DNA, 2643 bp, Cannabis indica
cggccgaagtaggcgacggttatagaaaccgacgacaatactttaaacgactgtttaaaagcgtcgggaaaacccatttttgtagtagtgactcgtgagtaagttgaaagactaagggatatacacaaaaggtgattcaccctaaaataatcacaaatgacataggttgatagtgtctcgcataaatatattcattcagatctaatgttacaaaagaatgcaaggagcactttagaataatacctcagcatagaaactgtcttcaagatataaatattagatcttcacttcaattgagaagatctaaagacaagccataataaatgagctcccagtcgtccttcacaaagttatggaagtgacaacttgctcaggtactgaaaccagagcaagcctttgcccccgaaactcctgcctcgtggggaaggatgggatcaggaagctgcacctcggggtactcaggattgaaagcaactttgcgtggatcttgaaccatgtgttttcctttgtcctaaatcaaatcctcaacaacctttttgggggaagaatggatcttgatgacaggcactgtcttgacattgggtggaggaggaggaggagaagttattttagcaacattcttctttttttgatgaaccttgggcttattggaagaaccatctgtggaagaatttgctttccttttcctctttttgcaagaatagttggactgttgagtgttgcatcacccaaattgaagatcataattccagttacagtttttaggtattcttcttgctgaatcatggttgtgttctctggccattcaatagtttcttcgagcacccttagtaacttatgttgcgctagcaaatgatttgatcttccttttccatattgtgaatcatctgaaccatcaaatttatcaatgtcaattttaacacaactcatattaaaattatcaaaatttaaatcagggttgggattagaaatctcaggttcatcattcaggggcacatccaccaaatctccaagatcaaggccatcttcttgatccaatctttcttgtgcttgaggatcaaattcctcatgatcttgaggatcgattgcttcatgttcttgattattaatttcttcatgacttacttgttaatttgtattttgtatcttgaatcttagaaaaactagctctgatactactattaggatctacagcttctaattccaagacaaacaaattaattcacaaaaaatatttatggtatttttgcaaatgaaagttatgtgtccataacttagttgggaaaaataaaaacacaaataaaacccaataggcctagtccgacccaacaagctaggtaacaaaactctaatgagagttaatcaattcagtttagattgaggcgcaagtctcaaaccttcttctacttctttgagagaaaatcctgggggtttaagcacaaacatgatctaacagatcacatatgaagcaaaaatcaaacacacacacagaataagaaacaatcacacacatacaacacaaataaattagagttagggtttgagggaaaaaaacagaaaaagtaaatccaaacacccaaagttgatctcagagttcaccccaaaaaatgggctacgtctcagtcaagctgcctcagagtagcttgatcttcactatgaacaacaggtaatacaagttgcttttatattttgaactacaatctctttggttgataatctattatgattttctctctactttgtttttcttactatttttctattcgtttctttcttgtatatgattacaacttgaactcgaggagcttctcacgctactttctttcaaaaaaatagctcatgaataagaatgaagggttcaactattaatcttcagctttgatcttggattatataggctataagcagggacggagggactttagcccatatgtgggctaaagccctcactcaaatataaacatcaaattttttatatgtagatatatacatatattaattcactttgctcaatttattaaagtccaattcacaaaagccctcactcaatatcttaatcatgattcatgagcctactcttattctaatcaagcccattttaaaagtagtccaatacaaataataaaaaaaataatactttattaaaaaataaattaataccattgacaatattttattttatttttgtcaatagtattattttattttgttgaagatgaaaatttgaaagatacatttatcattatttttattagttttgacttaatatttattcaagccctcactcaactaaatttctagcttcgtcactggctataagagtagttgcggtagtttacgtctttagttgctgagtgttgtattcttttcttcttattgtactccgttttctggtagttagttgtaattgaaagttttttgagagtccataatgattttgaccttcaagcaaacttgtaattttacttgttattaggggtgttcattcgatccaatccgcacttttttggtcaaacaacatccaatccgcactaagtgcggatttcatttcttggatccaatccgatccgcataaccgtttaaatccaatccaatccacacgattggatcggttattttgtttaatgataaattatttaatat

SEQ ID NO: 248408 - DNA, 576 bp, Cannabis indica
aaaaataaaaattattgaaaattcgaaattagatgtaataccatcatattttacatttttttagataaataaataaataaaatatatataacatttaaataatgtggaaaaaacataaaagaattgatggtattggtagtataatataaaaatgtgaggtcaaataaaaaaagaaaatagtaatgtgtttcaaatgatagaataaaaaaactactttattaatattatttttcattagtaattatatgttaaattcaaattagaacactccaattactttaagttacatgttattaccttaaaaaaattacattgttactattataattatataattaaacaaatatgtttaatgtaatatatttagtcaatcacattcaattttttgtttgacgtagtgattagaatcactcatgaatttataatgtaaaaattcgcacacattacaggaactttcctcgaaccaggatagctcatcgtctaaccgaaaagcatattttgtcaaaccatgagttgttgaaaacttattgcaaaccacatgggacaaaatgctctcaaaaatttaaacaataaagt

SEQ ID NO: 248409 - DNA, 877 bp, Cannabis indica
tttattttttttttattattttcttttggatctatatctatttttatttcttataatttaaaaaataaataataattacacggtcaattattttgaataaaaaaaataacattattgcgatctactcctcaagtatcattttgatatatgagaaacatatattttttttgccgtcatcaaagaatatatttgaaatcaaaagcaattatttagtttcttttataaactgttcaaaaaaaataatataatttttaaactcaaacaaaatcaaatatgtaccgtactaaaagtattttttttattgtgactatctacccagaaaagattaattttatatttaaaagttatattattaaaaagtaaagtactgtgatactaattgatttctttttaatttattcaaaaagaattgatttctttttaataagctttactttgagataatattatctcatttacatttttgttacctaattaattacttttaaaatcatattattgtttacctactaattagttacttttaaaactataattttatttttaagttatattatattattgatcaagatgtattcgtattatttatacatatattatatagctactttatgttacctccaaatatatttgaaactaataaattacattaaaatataataaattatgatgtaacttattagcaaaattaatataatttttttttattttatattttttaaaatataaatttaaaatactatctagtttcagtagttttaaaatatatcaaaagtgttctataaaatattaaaataagtatatgaaaattacaatttagttatttttaattattaagtaaaaaatatttttttagtaacttatggaattggttagt

SEQ ID NO: 248410 - DNA, 2848 bp, Cannabis indica
tcaggaccccacaaatccgaatgaacataatctaagataccttgtgatttgtgtgtgctagtttgaaatttaagtctatgatgctttcctagtacacaaaattcacaaaaatctaccttggttaccttgtccttaccaagtagcttttgttcactcataagttgtagccctctttcactaatgtgtcccaacctcctatgccataggatagccttagtgtcttccgtcacatgctccttggtgttgtggcagcaagctacggggcttccttgcaagtagtatagaccaccatttttgtgtcctttgatgatagtcatagaaccttttgccaattttattgtacctgcctcaattttgctaacaacaccaagatcatcaagtacactaatagaaattaagtttctagataaatcaggaacatatctaacattagttaaggttctaataatgccatcaaacattttaaagttaatagaacctgaaccttcaatgttgcatgtttggtcattcccaagaatgactttgccccctctagattccctgtaatcaaacaaataagacttattgttagtcatgtgaaaagtacaacccgaatcaataatccaatcatctttaaaagatgatgcagccacatagacatctccactatcataaccatcacttaggtttgcattttgatagtcattcttagtcttgtttgatttgtttgattcctcttgatgatctgaattttgtttcccattgcttttcttgtaaaagtagcattctctcttgaaatgccctaactttccacaatggtagcacccatttggatctttaggaccctttgaatttgacctccctttgtgatgatgattgctgcccttgtgtgaacccctactagtgcttgaacctctactagtgcttctacccttattatgccatggtttcttttgtccaggccttcccctacttaggttaacatccccattagtatgccccggtctttcaaccttcatttccaaatcttttgatttcaaagctgagattacttcttcaagagtgatctcagttctcccatacttaatggctgtcttaacctccctgtaggattccggtagtgaattgagaattataattgcttgattctcatcacttaaggcctcattttcccccgagtttgctaactcaatgtgcaatctcaaaaactcatccaagttttgttctagagatttagatggactcattttaaaaccaaagattctctccttcaagtaaatcttgttgatcaatgatttcttttgaaattgctcttccaacttgttccaaatcttagcaggtgtatcttccttgtcaaccaatctgattatagcatcagagaggttgaaaatgatcaatccggttgctgtttccagcaactcttcttgctggtctttagttgtatcagctgaccattccaccggatctttaagaaccttcaacagcttgtgttgagccaatagagccctaatcttcttcctccaaatacgataatcacctgaaccatcaaacttatctatatcaaccttcatggaactcataattgtatatgtataaagttatttcaaagaaattatatagataatgagtttagaaaaatcctggtgttgttctttgcaatcttggtttttgtgtatttgaattcttgctggtatgaatgtgaatcttgatgctttcttgatgatttctttatgctttcttgatgatttctttatgctttcttaattaatctttgctgcagattgtgccttgtttggctctgataccactataggattttattactgtttatccctacacacagcagagagaaatcaattaaaaagcaatggtcaaatctgacctttgttaccccagtcaaagctttgtttgactttgtgatttaaacacccaagaaaaagaaacgacaacccctttaacaaaagctacaggtcgtttcaatttaaagcagaaaaccctaaacctctattacacatatatatatgttatttcccaaacacataactagcagcccactcacaccctagccgttctcctttgttcttctctgaagaacacaacagtaacaactgtaacttaatacctcactgcccagaaaacaaccccagctagagaataaacccaacccgattgtaccctagtttgaatctatccccagaaaattaacccccttcaaccgagcctctttcttcgttgttcttctttgaagaacacaacaatcaaacctagaaaaattcttcccaacccgattcaatacccaaaaaaatgtataaacaatatagagaatgcagaaaagtaaagagaatagataacaccggttttatagaggttccccgaaattgtgcgggtacgtcctctagagctcgcctcttccactatagatcttcaatgatcaagagattacaatggtgggattccaaaacacacaggtattattttggtaatccctaataattttacagtgttttaaactctctctttctctcgggttttctctgatttcagtactaatgttgtgtttcttttctttgcatgaacaaccctccactgagttgaatatccgaacccaagaccaaggattccaaggttaatcaatgcgagcctccttcaactcagtcttcatgatctgtttttctctctgtaaaacagacgtttgttttgttgttcatccctgaattttattcttgtatttctggtattgatttgaaatttcctgagatgttgtactgattattactctgcccttgttctgttgtattgtccttcctttttttacatgttgtagaggagagcagagataggagagttagttacaagtgttaactaactt

SEQ ID NO: 248411 - DNA, 805 bp, Cannabis indica
cttaagtgactcgcctggttgctgttttatgttggttaaggacaattctttaggtcgcttgtctctagcggcttgaaattactttttaaagtccttggacagttgttcccagggcgttataaaatgatgagtaaatttgttgaactagctgctgacagctcttgttaaagaagtcaggaataaaatgcaacgtagattatttgtgacattgctgactcgcataatagtgttaaagttgctcaagtgagagactgggtctgtggtcccatcatactgcgaaacatgtgggtttttaaatcctgggggaaatttataattcaggatatctggatggaatggctcggtttcctcatccgagtcgtagcctgaaaatttaccatgttctccatcttgatacttcctaaacttatcttctagttcaattattcgtaattggatagggtccacttgctgttgatttgcattttggttaagccaatggcgcaaattaggtgcattttaattcaaacgctcacgaagatctggttgtcttcgatttagtgttctcgaaggtcaagctgccttcgctcatagttacttacagatctccgagtaacttttaaattgataacttcgcgaattgctgatactttatgggtcagcataatgtcgaggtctatttccctctcgcgttttcctacccgatccactatgtcatcgagaccttgaacgtcccgaacttgaacttacttcattttgtatcggcattctccttcgaaagaggctagatacacgtcctctattcaagtatgtgtatacatcctct

SEQ ID NO: 248412 - DNA, 667 bp, Cannabis indica
gttactccaaattttaatcatgtaatcactatagattgcaatattaataaagatgatgaatttttttacaaaaaaaaaaaaataaaataaaaaaggaagatattatctttaaaataaataagtatttcacctattaaaaaatattttaaaaagattaattatcaattttattataaatatagacaataatgtaataattaaaaaaattatacatctaagtcaaatatcgactataacccaatcgaggtgagcacccattagtactcgtcttcacattccatcactaatgctgagtattaattaatatgtgaccaaataagagtatttttataacaagaccaagtagcatttttgagtaataataacgtaggggaaggtccatcataatttgtaccagtaaagtattataaaaatacactaactacctaccatatttttgtctatatctaatctacattcaaattttgtcataactcgtaaggtccttttccaaattctttcagaaattaatataaataaattttagagctgtattggccctttcttttctttttctagatgagagttacgtggcgagccacgtaaatattagttttatataagttctagtggtttttgtttaagaattcattaactaagtaactacaacaataatggtagatagatc

SEQ ID NO: 248413 - DNA, 707 bp, Cannabis indica
cgcgaggattcttggtttgatactccacctgaggggtttagtttatcagtaacttcttaaaactcttattatttggtgcatgaatttatccttcataccataacatataacatcacactaatttgatgggagctatctatctttccataacatgtaccaatcgtacagtactgaactattatatctgtttctttctttttcattaaatatgacataatagccaaacaaaaaagtgcatgcatgacataaaatttaattacgcaaattaaattattttctctctataaatatatagttaataataattaaaatataaagtatgtagtactgtaccacctaattattgattgatagtactattctctaccttattatttaacacttataaaatcctcacttcaatcccaaaccaaagcaccaaacacaactcctctaaaaaaaacaccaatatattgaatctaaacataacaacacaatagccataataatcatcatgaataccaaacactttgtcacgatcttctcattcctaaccctaatcttcttccatgcaacaactttagccacaaccccaactgctcatgccccatcccaatcaccagcacaagcaccagctaaacccttattagctcaacctccaaagaagtcaaagtcttcttcgggggcgcctgccctagactcagcggcctcttctgctccacccttgt

SEQ ID NO: 248414 - DNA, 714 bp, Cannabis indica
aacaatctaaactcttaaaaaaaaaaaaaaaaaacacatacctttgacattttcggagtgggtcggggttgggagttcgtcggagtgggtcggggttgcgagcgttggggttgcgagttggtccgactgtgtgctcaacgttaggggtgggaaatcggccgactgtgtgcgattgggatccctgtgcgattttacttttgggtttggggtgggtttggtttcggcagacagagacgaagagagacgatgagagaggctgatttcaaatgagagggttagtttaggaaaattgttaaaatggtcatatattaccaattttaataactttgcatttaggagaaaattttttgggtaatgtaagcatattaattcaaatttccatagtgagaacacagtgaaacactagagagaactataatggaagttattttatgcacattcccatgtaaatccaagtgtctgaactcatcactttgcacatttagtcttttaagttttatttataaaattctcattctcatctaaataacaaactttggtcgattctttctattttaatttgggagagaatatgagttataccccattaacagttaagtgttaatctttaattgggtccatatcatatcatattacatacatatatttacaaggaatacaattgataaaagtaatctaatgggcgttttttctgtatcaataagaaaaaaaaaa

SEQ ID NO: 248415 - DNA, 1005 bp, Cannabis indica
gtatttaaattattttttttatcttttcaaattatacatgaaaatagtatttttgtaaaataatgcaaaatatcggggcgttacagtcatatgcattatattctattatcaatatcaatatatacagataaaggaaagcacaaaagattttacgtgacatcttatctttttttctaactatttttactattttctaagactctcacatttttttaaaggaaaaacaacataaattatatattattaataatactattattattaaagcatgtatatagtaacttttcatattttataattctttatcattcgatattattattactattgccattactattattattataaaaactttttatattcttataagtatgtaaaaggtaattcatattaatagatggctaatattatgtatatatatataactctctctatggagaaaaatatcactatctctacttatttgttttcagatatttgaggtatgtatcatattcttttctaagtagtaataataaaaaataataattctatttctattcgtagttttatctctttctattttaatgaatgagatatctcatgtttgatttataattttaaatattataaaattctaaataatatttatagtgtgcttatgagaaaaataaaattatatattgcattataaataagatcaatattattattttattttaatttttattgttatgaatattttttaatttatcatgaactttatgtaaaatatatttttagagaattaagattggaataaaaaaagtaacaattaagctttacttggtacaattttaaattttatattaatgtgtttttaaacttttttttattaatatatatcatgaaacttttatgaaatttagggattgtagaactttaacacacaaaaaaaaaaagatttttcaaaatttgtacacaagtgaccaacatgccttttaatataagtgagaaatctttttaatatagtgtatatgcact

SEQ ID NO: 248416 - DNA, 1288 bp, Cannabis indica
taagaattaaatgtaaaaaatttaatgaaagacatgtaatcaaaaagtattatacttttgcataatgaagaactaagtggagacatactttaatgtattatttatgacaaaatccatggataatgttgcacaaatgggaaattaacatacaagaataaatcctatctagttacattttgattcatcattattttaataatcttgaaaaaaaaaattagaagctcataactatattgaaataaaaattataaaataatatacttgacttgctcttcaaaatgtaaaaaaatggtagaaagaaaatggtgtagaaaagaaatggtagaagtgaagagtagaagagcttatggaagaggtgtggaagattttggaatgaaaagtgtttgtaaatggtcttccaacactatatctataggcaaaatggatgataaagagataaatagagtaaatataagagtattgaaaaaaataaatattttgtaaggatgtaaaagtaatgaaaggtagggtaaaaataaaatggcaatgcttatttaggtgaaataaattgggaagagtaaatgagtttttatgtgtaaagtgtgggagaaaattgtggatttttgtcttttgtggatgtatttttcggatgggaatttaaccaaataacaacccatttttttcttcttttaatttccttctcacatgccacttggcgcactgctgttgcaaggggaggctaacggatcacacgtggctgatgtggattggtggagagaagttgacgaggcaggtgaagaggctccaagtgttggaacttattttactaggatctagatttactaacatgtatgttgattaacaccctaaatatgaattctctaatacgatgaaataaacacatataaagtttaaaagaccttacattgatggcagcagaaatgtctcattccgctcagatctctaacccttgttcctttctgtcacagagtaataacaagatctgagcctgaatctccttctccttcagtttgtttaaccaccgtcttccacactatgattgagtacttgactttctatgtgtggttatggtactctatcactaaaggcttgaagattgatgaagaacataaggataaatatgaaaggagtctctcatctactcgttgtctgacaaagttaaaaaattaggtttagattggttgagataggttggatgagaatgagagcatcatgttcctttatagtatttcaactagcgtttatgatttaattatatgaattaaaaaagataaaataataggcgaaa

SEQ ID NO: 248417 - DNA, 596 bp, Cannabis indica
gggcataaaacccaacactgtgatcttatggttttgtttctaggataatatgggcttgattttgacgtttacttgatgattttgctgtagttttgaagtaaaaatcaagtttgagcttttaaagctcaaagctcgagttttaatggcattttttgtttaaggacttattttttatttctgttacgttgaaaatgatgtacggatgttatataggttttttgtgaagtttggaatcaattggttaggttttggtagagtttcgagatgtgtaaacctttgggttctcaagtcctgcaaaaaacggtccactttttgggacaaatggttaacagtttcatgccaggaaatcctagaaaacagttaactgttttatcaaatagtttaccgtttttggtgttttttgagatgatcgaatatcgtattttggccataacttttcactcgagtgtccctttgagacgttctatataccgttttgaagcttgcaacgagttcaggtatatattttagagccaaaatataagttttattttaaagtgtttatgccacggggtttagtagaaaatactaaattgtcttatgcaaaaattaagcag

SEQ ID NO: 248418 - DNA, 555 bp, Cannabis indica
ttttgccggcgcaattacatgcgctggcaaaacttttttttaatattatttacttttgccggcgccaaactgcaccggcaaagttggggaagaaaatgcgatcaatttccctcacagtgcaaaaatgtgcgcgcaaaagtaggtggcgatttttgccggcgcacttctatgcaccgacaaaagtgggaaacgtttaaccattggacacgttgcatcaggatttggcttttgctggcgcatttatgtgccggcaaaaacccttaaaaattttagcggtcaacttcccgcccaaaggaaaatgtgcgtgaaaattttgtgagaacgtttcgtgcgttttcattcaggaaagactttttgcgccgacaaaagctgaaagtaaataaaacctgcagcgaacccttcttccccatttttcctcttctctttctctctctctctaattcccacacccgccgccggcatccccctttgttcccctccaaactccattttcaacctcccaaaacattattttcaaccttcacacttatttctctctttttctttttttttttt

SEQ ID NO: 248419 - DNA, 607 bp, Cannabis indica
ctccggaattgagaaattataactctaatatttatttctaaatattggggtccacaattaaattaattcacaaataataataaaataataaaaattagtgctaattgcccttactaatccaaattactagagcggtcattacaagctaccttatccctccctaagggagctggtattggaggcaacttgtagctctaaaaaatcagatatggcctctcattgattcacagcagttcttagcagagaaatcaaaattgcagcagggtacaagttactttgctctgctcaggataaaaaaagatggagtgaataggtttgggggaagtttagcactcccaaacatagcttcaacttatggattgctatgtaggaaaggatgagaaccaaagcaagcttgcacatgtttggtattgttgaagatccctaccgtgttctctgtaacaagcaggaggaaacacacaaccatttaatctttgattgcaacagatctagggcttgtttctctgagattgcatattggatgcattagagagtagctgatgcttctttacctctagggatggcaattataccggcgggtacccgcccctaatggggcaggtacggg

SEQ ID NO: 248420 - DNA, 1007 bp, Cannabis indica
ttattaagttttatttttacaaaaaattaattcaggatcctatttgtacaattttagaaaatacagaatccgttttattatttaacaaaatagaaggtggaattaataacttttgaaaaatactaaatccaaaatagtatttatttatttattttgttagtagttcacgtgctccgcacgtattatttcactagtgtattttaaaatgaaaataatttaacaacctaaatgatacgaattgaaaaggttgaactttgaagacctatttagacacaaaattttagaaaatgatgtcagttttgcaatttcaacactggatttgaagatgaattacgtactcagagactcaactacttgagctagcatcacatttatgaagttgaaaaagagttttgttttaaaagaattgccttgagggcttaaccagcctatgttgtttgctagttcagtctcaattggttaggattcgttctgtatttcttgaaaatcttaattcaaaagaaatatagcagctttgttgtgacataataatgtgtggattttcttggacttacttgttattatgagacagagaaatttgaaggatatagctcataatatcactgttccgtttatttgtaatgcatttcttttttctgggttgtgtaggaattgcctgggggaacatcttggacattggataagttcactgagatatttgttggaaagctaaaatcatatccttggcttttgtgttcaccttgtctaattagataacagaagaagttaattttgcttgtgatttccttagctaatttattattacagttgctggtgagatttttggcttgaaaaccatagctgcataccgcagtggcctagaaatcaacccgaatgtttcaaaaatagatgctgaggaaggtctcactgagactttagtaggtgagtacagtatagcaggtggattaagatttctcaatgatcatctcttctgtgttaacagtcctttgtttccagctagtaaacct

SEQ ID NO: 248421 - DNA, 891 bp, Cannabis indica
tcggctaaacaggtaagtactccaataagtaccactttgaaattgacaaaagatgaacatggagttgatgtagacactactctttattgtattgtgattggtagtttattgtatttgactactagtcgtcctgatattagttatagtgtgggagtatgtgctagatataaaagtaatccaatggaatctcatgtttctacagaaaaaaagattattcgatatgtcaatagtactcttgactttagaatctggtattctaaagacactaattctggcttggcatgtttaagtgatgcaaattggacaggcaatgttgatgatcataagagtacgagtggaggttgtttctttcttgggaacaatttggtttcttggcatagtaagaaaaaaaattctatttccttgtctactgctgaggctgagtatattgctgctggtagttgctatacacaattgttatggttgaaacaaatgttgattgattatggatttgagttgggtgtctaaataattttttgtgataacaccagtgccataaaacatttctaaaaatcctgttcaacattctcgaacaaaacacattgatataaggcatcactttattagggaacttgttgaaaataaaacattgccgttagaatatgttgatactgaaaaacaattggctgatattttcaccaaggccctagactcaagtcgctttgactccctcaaaaaatccctgagactttgccttggctaatctcttttgttttcgaatatgtacaaaatttttcagttgttctttgcttgcatctattcttgtttgacaaaacatgtttatgctcttggatgataattagcttaggatcttgtactttttatacttttgaggttgtgttaaaagattca

SEQ ID NO: 248422 - DNA, 1482 bp, Cannabis indica
ttgattcactcgttaaagtttttcagagaagataattctttacaacttctgtttgggaataatgtggatggttgggaatatgacctataattatcaaatcccgactttcttaatggatcaaatgttagtttcctttatgtgttagttctagtattggaaagtagcgcgcaaatttagatgagatctaaattatactttcactagtgaactaattgtactaaaggataaagaagtaattataagggtaaaataacaatgtaactaaaactaattatgaaccgatacatggaggactaagcactggaattgattatattaatggacagcgtagtaaaacacactaaatataattctataattaataagagttcaattctatatttattgtggagtaatcgtagaattaataaatatggattatttggttgatgagactcaataaataatctaatttattggagcttagaattataggtccatgattctcgaatcaccaccttgaaatattatcaagggaagggataaagagttggataatgttgttcgaaaaaatctattttaaattggcaaaatagtcattatttgtttttgtaataaataaataacttttcaaattaattaaatgggaaaaacataaaagttgttaagataaaaatttattaagataatatttgttgagataaatgttgttagcacaaaagacatcatccttgtcctaattgagacaaggtatgcgcctaccctatagtagggtgtccctattggttttgtctttttgagttaattaattatttaattaattcaattagataaatatttgaatttaaaagtggttaaagatattgatagatatttaaaatcaaatatttatagatattttattataggtatttatttaaataattaaatatgatttaattgattgagaattaactactataaatagaagcctaatttgataaatcaaagaagcttttcaatatataatttttgaaattaatagaggagaaaagaaaaattatttttcctctcaaacagttcttactaatgtatatagaattaatcaagaaaaaattatacactttgtcctaatagcccacattattcattgtgtgtggttgatcgatttggaagactatggtatgagtttctgatcaaaccgaaggatacaacttacgagaacttttgaggataccctaatagtcatcaagacgtatatatattcatttcctattattttatattttgatttaatgtatacacatttggaaatctattgagactgtggtacaatttataatcattgatatcaattcttccgatgcgtatctaatttagtaccataaaattaacactcgaggtcgggcttcacattggtttcactcgagatttggcattagaaggtcagtgccatccgtagttgttgagagggggtttgtcgtttgagagaatgagtgggtgagagggggtttcgttagttat

SEQ ID NO: 248423 - DNA, 1670 bp, Cannabis indica
gtttttcgagaaaattttttgattagcaaagattgcacaacaattgaaaaagcactgtagcgtgccttagcattagggcgttacagatggagaagaggaaaaattaataatcaccatttaaatagaaaattgtagaaaaaaaaatagaacaaaaacgtggctgaatattggacaacagttgaagatcgtgggtttcatgttttttttagagaaatgtcttcaaagatcgtggatttcatgttttaagccctaaataaaactcaattttattacaatcttatttactttcaataaagatcagaaattctatcttgaccttgtcatatgctttgttcataattataagtttaatatataagttttattaaatcctgaatatatagttattcacaattgcagtatagaaagtaattgtgattatatgcttcaaactatttagtcctatgatttatcagagcactagatttacactgacgtaataatcaacgataaagtttacttacacagtgatatgtggaatgtcctttccatgaaattagcaaagtatactagtatcaaatgtattggctatacatcgaactggactgatattgacagtgaaaaagatataaaacttaccgtaatatcttttctaagtcaatgtcacttagttgatctcaaagatcttaatcttaagatggttaggttctggcttaactgtactgcatgttttctttgacttgttcgtgaaaggcttaccaaaggatcaactcaatacttacattttggaaacacagtagtacaattgagtgagagcgctaatcatagatatggaatctatagcttctataactatttaaaagtgaaacaatgattttcttagagcttggcttaacagacataaatggaaaagctcttattttagtaattatattagtttactaaaaatatcatttataataagctaagtattttaaggataaaatatattgaaggataaaacggtaaatttatcccctactcgatgtaaattatctataaaggatctttgattatttagattgaaacaatagataatttatagcgtgtttattattggtgaatagagcgttctatgtaatcaagagtgcaattccgaatctatagtggagtcaggaggaattaataagatagagaatttacttggtaattctagactacttattgagagcttggttacataggcccatggtccccgcactaactagaataatattatttttagtctcaattaattgatttatttaatcaattaggattctaaataaagattttgtcttatttgtgaattttaccaaggaagcgcataattgagaagaaaagagaattcaagatttatttattaattaagagaccttggaaggtctaattaataaatgtatttaaatagtaattttttgataattaattataattattaaatagatagaattactatttaaataactagaacaaaaaatggtattattgaagaaagacaagtttgcttcattaaagaagcaaaataatggcaaaaatataacttatgggctatcataaaggggttctgtaatgccctaaactatagggacgctacgtgtgtgattttataaactagtttaatactaataaattgattaattattaaacaccgtgataatattaaaaacttg

SEQ ID NO: 248424 - DNA, 986 bp, Cannabis indica
atatatataatatatattaaatagtagtttacatttagctagctgtttttcttcttcttttttatagttatataaatatatatacatttatttatgtgtggaagtggaactataataatggtgtataaaacatccaatatttttcaggctatcaaaccaaaagagaccccatgcgtataaataaaatatatatatatatatatatatatatttgtatatgaaaagaaccttgccacttttgaaaattagaaaataataatctaagttatgttcctatattatgcatacgcatattaaggtaaaatatatctttatcatatactcgtgtatatacaagtgattacacataattatgtggtcactaaattgtaaaattataattttctttttcaagcttacgaataataacattggtatatatatatagaataaccttattagttttttttggtgaaaagggtggtgcaccagattcattgaagcaaaacacaatactacaaaacaactaaccaaaggctagtgaaaaagtctaaacaaacggaaaactcaagacaacttaacacaaaggaaaaagataaaacaacagtaaacagggaaataagaaaaaaacacagggccaaaatccatgaccaagacgaatccagaacaactgcagcaatatcaaattctatcccggatcagggacccattcagtatcatccctaaacactcctacatccatgttgctcactgcaagttccccaacagagccatggtatcgagcccatttagcagagttgtgagccaagaaattgacccccctgctgatcttttgaccttccagtttacagattgggaacagctgcatgaatctctctacagcgccattcagcagttgatgatcctctcgttgcagagcgttaaaatacgataccaccagcgaattgtcacaaagaaatattacattagtgaaggtgcgtcgcaccccaaattcagcagcactcact

SEQ ID NO: 248425 - DNA, 954 bp, Cannabis indica
tttggctatactcacactcaaagaataagtgattacttgattcttcttcttgtccacaaagtatgcatgtcaaatcaatagttgtgttgtatttacctatcctctctttggtgtttagtcttccccagaacacaagccatagaataaacttgtgcttgggaatgattaacctatcccaaacattcttggaccaagagagcctttccctgttatcaaaaagaagttgataggtatgttgaattttatgtctctgctgcacaaaaccagtagaatctgttctttgtttcagcttattcttcacacgtacaattttctccatgaccagcaacaattggaaggtggtttataatcccaccaactaccatctttcaaatacacattattaatccatttgataaataaataatctttcttacttttaatgtcccaaacataccttcccatggctgctatattccaatttctgatgtttctaaatccgagacctcctgcagtttttgtttgacaaatattatcctaagcaaccaatcctggacctgagctctcttgtgtgcctttccataaaaaagatcttcaaacagcttcaatatcttttagcaacttctttggtaagatagaaatttgagcccaataagtatggatggccaaaattacagaattgatcaacgttgttctccccatgtatgacaagttcctagaactccacattcttattcttcctgtcattttttctagaagctcttggcattccactttagatagtcttttagaacaaataggaattcccaaatatctaaatggcaatgtgcttctagagaattttgatgcttctaaaatcctatgtacctccaactctggcatccttgaacaatacactgaagtcttctgaacattaggctcgaaaccagatgttgaagagaaatgcttcagacctttgagcatgagcattgctga

SEQ ID NO: 248426 - DNA, 739 bp, Cannabis indica
ttattaaaagtaataaacatttgtttttgtattttacataaatctgggaataaagaatgagatggttaattacacgaggttggcgagattgttactcttattccatctatagtttatgagcaagttataagtgatgataaatttcatatacatctattctatataaagtgtgcttatataactgaattcttggtttatgagaaatttatggatgactttttatttttatttaataaaataataaaatattatttataaaataataaaataaaaataaaacaaccctccgttaactttctgaagccagaaaacaaattaaaaaataaaacaaaacgaaaaagaaagaaagtgttacttttctctgaaataggtgacgagagctagaatcgaaagagcaaggaggtcacggtagacgcaaaagacgagctgattgactctaacgttgagggctactttggtaattacatggtaaccttcattgaagagctgaatcagcggcatggcagcatgaaccttccatacgtcgccacctcccgctgtgaccgccgtaactgccgccatcactaccttccaagagaagttccctaaagagggaaagaagaggggatttgaccaatagagtttggtgaatcagttgttgaaaggtctcttttttgttcttgatagaactaatggcgttcaactttggcttcaatatgaatctctctctctatgtcttgtaacattagatagataagta

SEQ ID NO: 248427 - DNA, 1917 bp, Cannabis indica
ggtgcaggagctcgctgaacaaggaactatcaagatttgagacagcgagtctacggtgtcagcccgtgatcaccttattcactccaggcacgctcctgacgtcgaagtcgaggagatgggtgaagattgggaggttcctgatcgtggatctgacgaggatggagatgtcgaagggagcgaggctaattcgattgacaacacgcaattaaatgagtcgttctcctgcgaagacatagtctcgcggatcaccaaatctgacctgaccaccttttcgaggttaaatttattgcgtctcggcaccatgcgtcctcatcctactcaaagaccacaccttccttttaccaaccctgcgatcataccctcagaagacgtcgtagtctctatccccattcttcgatgcagagtgtcagtccccttccatccattcatctcccctattctcaagcagtatgatgtgtcccctttccaattaaccccaaatagctatctcatagccttaggcttttacgcgatgtatatggagaatgtgcacagggcaccctcgacggaagagtttagctatttttatgacataaataatgtaggtctccacaacggcttctactgcttcagcaagtgggccacttctgagatcaacggggtggaaggcatggtttccaatatgggagattggaaatccaaatagttttatgtgtttacggttccagggattatgactcactttaatcgtcggcctagtacgccgcgtgcttctttacttagttaattttaaagttatcttgtgactttgagctaactcgttctttttattgttgtagatagactggctcgacctgcacttgacgcgacttgttgagaaactgttgaagttttgtaagcctccctgtgcaagattggactggcgattactgtgcacgacttaaaagctgcgggaacacaagctgattctagagaacgcaagtctcaaagagagccagtgtacaaggagccgtctgagaagcaacaagagcggatagacaaatgcctctccaagcaaacttctcgaccaacatcaggtaacatatcgcatgtataaactagtgcgttaaaatcttattgttattggtacttatctgttcttgtccttgcaaagatgactttcctaaagtctgcacccgtccttaatcgcaagccaaaagctggaacggcggcgacatcgcatgtcgttcctcagaagaggaaaagcgatgttatggctactcctgccgcggattcctccaagaagctggctaaggctacacaagacaagcggaagaaagtcatgatcgatccagctgtccgaactcgcgacttcctgattctgtaggaaaagtttgtgggcgaggagttcatgtccaaggcagagaagactccttccgaagagcttattccgcgttctgtggagttggcttcgcaatccatgaccatgttcatgaaagccgttgttgctggctctaaggaagctgaactgctaaagaggcaaaatgcccagcttcaggagagcatcaagaaagacaaggagctcgaagagcttcgcaagtctaaggagcatgttgagcttgaagccaagaactctcagatgaagatcgaggagatttctcgcgacttggaggtcgagaaggagaatggaaagaagcagtatgataaggcggtctctgactatatttatacaactctttcccaaattccggacttcgacttctcaatccttggggcagaagtagctgagatggcagaggcttttcgagccatgtcacccacgcagactgaaggcggtggaggaaatctctttcccgaggatgttgatgctgcggacactgaggaagtcgtggacgaggccgttagcaaggtcgcggatggatctactgcccctgcccctcctaacgcttaactttactt

SEQ ID NO: 248428 - DNA, 507 bp, Cannabis indica
taaatcaattactttgtattttttttatatctatataatgaatcttctctctgggcatgaccccgtggactagtaacaatctgcaagaattgttgaaaccacgtacaaaaaccttgtgtacttttatgtttttgcactgtttattttctggtttattctagaattacagaattgtattatgtagctacagaataattgtttcagcatctattttattatttcacatttgattaaggaattaattaaataataaattggtaatattaaaatacagaatttcacgtggtattactttatagtacctaagaccacatctttatgttcattaattataaatataattattaagtagaacaaactaaatgagatacttttaggccaatatttttgtcacaatacgaaattcgcatgagcctgaatggcacgagcacaacacaacacgaaagtataatatgggattgggcctaaaataacgcaaaaaaaaatataaacttgaacataacctaa

SEQ ID NO: 248429 - DNA, 473 bp, Cannabis indica
aacccaggcgccgcgacctcctctatgagcgtcacggcccgcccacttgaaatcctcgatttttcaacccaggtgtcgcgacatgcttggggagtgtcacagcccgcctaggagtttctgggcagttttaatgttgaattttgtttcgttcataaattttcgatccggacaccgtttggggtgttccttatatcattggaaagctcgttccgagatctatatgattatttgtatttgaatgccaattctatgaatatgtgtgagtgtattaaatgattaacccaatttgtgaatctcgagaattgtgactaagattaccagcacttgatcaggagcacccaaggatttggaatctccacgtacttgggacatcaggtaagacagtagctagcatgtagagttaagcgcagtggcactcatatttgatatgataattgcaattaaatgagaactgcgattagggttattaccct

SEQ ID NO: 248430 - DNA, 589 bp, Cannabis indica
atgttatgtgagaaaccgagattagggttattaccctaagtttagcgattatgtgatctagagttattactctagtatttaagtgaatgtgaatgcaatattatattgtatatgctgatataaagaattatgcgcttaaggcataattaagttagactctataatcagttttgagataaactattctaaggccttattgtaaataaacgtgtgagcgcaacacgtaggtctatgtcaaatagacaacataggtagtggcatcaatatttatatgaattgtgattatgctgcatattgttatttatactgtcttgctgagccttggctcacgggtgctctactgtacatgaaagggtaagtttattgttgatcaaccatgagatcgcgggctttgtggtgtattgtatatgttcaagccatattagaccacgagggttgggtctaccagaagaaacattttgtagtctttgcttttgccacttaggtcgatgtgtaatgataacttgtaatattttgaaaagttttaaggggatcccaaaactaatgtaatcttttgaaagttttggaaagttaattaattacaagttat

SEQ ID NO: 248431 - DNA, 806 bp, Cannabis indica
ctaagttccgtactacttggaacccaaatccttgtcttatacaacagcatcccattatctgatatcgtaaaatccttagcttgaccatctaaaacctcttctcgaatcttaaccaattccaaaccagtaaactgagaagctttaattcactataacagatcaaattgcaatgtcaaattatgaagttttcctacaacaaactcaatgtctgatctgactatgtcttcagctagctgaggtgaaatcttaatcataatagttacctgcctaggacccttcctgctcaggcatcagccactacattggccttcccaggatggtaaaggatttcacagtcataaaccttaaccaactccaaccaactcctctgtatgaatctcccatttctctctatagagataatgtcgtcaaatcttcaaagaaaacactaccgtgacaagttctaaattgtgagttgggtatcactgttcatattcctttagctcacgggaggcataagcgatgacttagtcagcctacatcagtacacaccctagaccctatctggatgcatcgcagtaaactacaaagtttaccctctcagaaggtaaggctaatacttgagctgtaatcaacctctattaaattcgtgaaagcttgcttcacacttgtctatccttaaaactgttgattctttttagtgagttcggctaaggctgatgacgtcttaaaaaatccctcaataaaccgacggtattaaccagccagacccaggaaactcctaacttctataactgtttttggtctcagccaatccctcatggatt

SEQ ID NO: 248432 - DNA, 517 bp, Cannabis indica
ttacatgaaatatgggattttgtaaaaaagttacaaaaatatggcatttataggtttaccactcttctatggcatttttttacatttaagactttttatggtatttgatatgccatatttttgaaaagggttgagatgtaaaatggccctaaatttagaaattaagttagtaaatgtacttttttataaacatttagcaaaatagctattttgataaaaatttgatgataaaattacaattataaccttaaataaaaaaggacatttactttattatttttaaaaaaagacattaacttttactagagagagaaacaaggccatttgctagcatttctctttggggaaagtggaaatatgcctttttttttatcaattaactaaaaataaccttatatcaaatttaattgaaatgtaccccttttttaaaaggacattacccattataccctcacagctacacaagtcttcccattcaatcaactcccttctcccgattcaatcaactccctcacag

SEQ ID NO: 248433 - DNA, 1003 bp, Cannabis indica
attcaatcaactccctcacagttaccatcgcctcttgacgaagctgcgatccaccatcggttgcgccactcttctgccaccaccatcaacaccacacagttcgataactgcattcacaaccgccacaaccttgatattgaatgtacgttaactttgtctttctaaatttgtattagtttctccttattctcatttttcttttttccaatcttttatttccttctggtttgtttgtatgtaaactaccttgtgtttgttaggatcatgaaaatataataccttctaagtgtttgtttaaattactcaattaaaattctcttgtttctttctaacaagatgcaatatattattacattataactgatttcattacatgtgctgaaacccaatgttgtgtttgagtcccaaatacttgctcttaaactcttcatggttcaaatcagcaaactcattaagccccaaccagtaattactgattttcttatttgtttcatcaatgtgttttaagttatctctgaatatctcaaacctctgaaacttctcttctatactttcataaattttgccatgttttgagatccacttgtagaaaagatagacaagtttgtcaatgctagtgaggtgttcagaagaataccccactattgaaaaatcatcatgagctaatgaagaacaggcaaagagagacaaagataacaaaggcaaaattgaaatcttagaaagcaaagagaaagccatttgggtattattcaagaaagaaaaaaccagtgttagattttgatattgaatgatttagagagaatgatatatatagtagtgtctttagtttctgcatttgtggagactttattttgtgcatttgtcattaggttaggattatggtttctgttttttgtttttaagatttttgggtattttctggtttgtttctttgaccgtacaatttgtttgatacctaaagtgaagttcttacttcttagtgtcaaattattgggagtgggag

SEQ ID NO: 248434 - DNA, 1062 bp, Cannabis indica
tatatctacaaaagtaagttctccttttaaattaataataaaacttgtataatgtttgtgtaaattgtagtcacttaactagtacaatattactgtgaagactttgaaactaaaattctcaaaagttactaaaatgcttgaaatcttaatattaatacaaacaatgaaataagtgtaactctttctgaacctaaaggtctgtatgtctagtctgtcactctttatgatgattggagttttgaggttgaatcatttcttttctgtaagcattgaagagatcaactcctaaaaaaacattaaacaagttcattccagccatcccaaacagagctagtggccgttccacgaccttttcaaatttgggagcatcccaaataagctttgttgtgatgagattatgagcagcacgccctttttaaacttttaaaatatgattataactcaaaggcttttctttcccttccataaagtatatttgtatatatataaatatataaatccaaacatatatatttatactatggcagacagctagaccatacttcacttatttttgtttcacccaaaattgaaaaggaatgtttatctgcaccaaactcacttgttacccaaacaataaaaatatatatagaaaacacctaaaataaaaaatagaagttccccatacccgaagaggaacatgagataagcatatatcatacctattatataaataaatgtctatctaacactttttgttgtgtcttaacagattttattgtgacttaatagagttttttatatttttaaacagaaagtgttaactttaacagaaatgtaatatttgcatcctttctcaaaagaaataatcattcacaaatgcatgcattcacatatataggcatcctcgtagaaaagaggcagttattcaccattgagatgtactctttcatatatagtcttgtctatagtggaatcacatgccactatgtattatatagtgaatcacacgccaccatcttcaaagcttccttttcgatgtcactgccacttttattgattgtctctgagtcaaattacctc

SEQ ID NO: 248435 - DNA, 576 bp, Cannabis indica
ctatttattatttagaactagttaatacataggaacagatcaactttaccaaaaaaaaaatcataggaacggatcaaataacttcacctgagcaccacaacacgagtcaatttttttttttaaaaaaaatagaaacaaaaatactacttatgatagaaattcttcacaattaatttttgaaaagttttacagaatatgcagttttattattataaagaaaaatatcaacgtcttttttcttctgttttgtatcttattagatataccatgcatagtaaattgggctggactttgctttgctgctcttactcctgagatggaaatgggcctggtctattagagtggtagaaactagttggggtttgatagctagctatatttatatatgttttgaaaattgaataattagattaagacactattttttctgaatttttacataaaatgtcatttttttttgttttccaacatttattcggttaccataattttagttttcaattttaccattttttttaactttttatacggtttttttttaaattaattactatctatatacggtttttgttttac

SEQ ID NO: 248436 - DNA, 1463 bp, Cannabis indica
ttttgttaccatgtgaaggtacattgaaaatttcgttaacaacggctaagaacattgaatgtctagaaggatatatcagcagtttagtcacacgattggttaaaaggatgtgtgccccagaaaatggtaacctcctctctcttgtagttagaatctttgaaacctaggagattatcgtagagattgtgatgaacttgttcatagaaatttttttagatggcctcttaaattaacttagtaaccatatgatgacattcactaattaatctttttatcagagtcaagccatagcagcatggattctcagttctgtgttcaacacttgatccgtaagcttggtagtgagtccttcattggacaacgtgcgatactttcagtttctcagacaatctctgtacttgcagagagtttacttttcacagatccatttgatgccgcttttcaccataggcacgaatgcatgttcataatgtaagtactcaagtgaaaccacaagtataatatggcatttcttaaagttttaagttagcatcaagagttccaaacagattaacatcgatcttagtgattaaattccaaccacataccttgcttcaatacgaacttttgatatgattttacaataaaggtccccttaattctaaaaagcgccttaattcattatttctgttggttttctttcaagcaaaatgacacctactacatgtttggctcatgttagtcatagctaatgtttactcatttttcgtctactgcagcttataaattagagattctaaattgtgtttagagacagagtagcatgactaatctgttgatgtggaatctacaggatccagcttattgagtttttgatatcagattacctttcaatgtggtcgaaaaatgaagactttgataaaagtatgtcctaacaacagtgtttattcttttactcattttaggccaagaaatgaagtgtaatacatatatttataaatatacatgtcacgcatacatgaatatgtaacctgagaaataacgaaccataatttttctttgcagtgctgtttgaggagtgggtggtgtccattttacatgcacggaaagcgttagaactattggaaaacaggaatgggctgtacgtgttgtatattgaccgagtcgcaggtgaattgtctaaacaggttagccaggtttcattactccagaaacttaagccagagattcttgataagttgctatgctgagatctgtaataaatgatttttctgcctttttggaaataataaaatttaaaaaataaatataagaaatttgagtctttttaactgtcttaaaatcttttcccatataatgccattggaaaatttggagtgatttgacactcgagatttattacgtgtaagttgctgaccgagcctgctagtgagctttgggcatctcatgtaatgaaaaataaatcaagattacttactaagagt

SEQ ID NO: 248437 - DNA, 1154 bp, Cannabis indica
tggtataatttttcatttcaaatcaagcttagaacaataatttgtaaatgtgatcgtattaggagcaacttctatctatgcaatgtttgtaattcacactttagcaaattacaaatctagagagataggtcgtaaaaaaattagataataaaatttaaaataatattttaaactaaaatcttgagccaaataattggtttcgttctacctgtaccataacaaaccaacgaaaataaagtaaatacaatttatatattaaatattttttttaccataataattggaaaaaaaaagagagagagaaattcaattgtgaagaaaagtcttaaaaataaagagcccctaaatttgaaaagtttaatcagccacctaaacttaagtagttaaaattaggacttggtactggatagatgttgtctttatatatatatatatatatcatctcacccaatataaacaagtctacaagaaagtcaatagtaacatgttctaatacagacatgtcatcgaggctttttaagtttaatataagtaaatcaaacttgtaagaaaaaaaaagttacgaaatcagcacttcaagcaaacaagtatcaaaatatatagagaaaattcttctagttgatatctattgaactataagcaacattttcatcaatgtaaatattcatttcaattttaaatctcctaggaatgacaaagaatattgcaatagcctcatcactgcatatgtatgtttacattacacctcccatttatatattcaaattttttagagtaaatggctaatttaagcatatgcaaaaccaagacaaaaaggcagatcaaaaacacatcctcgacacatatataataccaaaagcaactgatcagtaatgtccaggaaaactacatactctaaaagattgatgctgcgactaacttcactagtaactgaactagctccagaaatgtaacctccagaaccaaacttgccagaaggaagagattcggcagaaactacatgatcaaaaatcagggccactgtgcagcagtactggaaaacttagaaattaaaatagaattctatatgataaaagaagctgtataagtataatataataactgacaaactaataaaaaaaaacttacctatgcacgctgtcagtggatcgact

SEQ ID NO: 248438 - DNA, 693 bp, Cannabis indica
tttttatgttattattctaggattagaatcttaaatacttacgttttgactggaataatgattatttttagctgttttggtaatgctctggtggttcggatcataagtattaaaaatagaggtttcgtatatgttttggaatgtctacaatattaaaaaaaaattaaagtaatgacaatatttttataaaaatttctatgtggcaatataaatatattacatttacatgtatatttatatagacataatgagtctcaaatagtttcactaaatatttaaaatgatggtataataatatactttactattgaaactaaaaatgcctaactcataaagatttccttaagtaaaaaataaaataaaataaaaaaagattaccaactcaatacaacaagcttcaaagagaatacatttttattactcatagatacattcaacaaatatgtgttttgacaattttttccactaaacaaacaaatcaaataaaaaaatattaaatataaacattataacaattaaaaagtatcaatttctttggtattcggtcacaaaacagatttttctaagtaaaagtaacaaaaattacttgttgcaataataaattattttttgtcttatttgaagtatgtaacacctcaaatgcaagtgaggtactaaataagtccccattgttataaatattaataattatgt

SEQ ID NO: 248439 - DNA, 1409 bp, Cannabis indica
atgcaaggttactcttagcctgattggtatagattttaggaaacatttttatacaattaaaactcaagattttttggattttttctaatacattgtatcttttcataatattgaatatggtttgggccttgaggagcacgccgattaattactttaggaaacttacaaaaatactaaaatttgggtgaacttttataaaatactgtcacacagaatttttttcaaaaatactgtgtttttataaaacaccaacaaaatacaaaacagaacaactcaaaacaacagtagaacaactaaaaaacactagtaaaataccagtaaaaacttaacacagtatactgcagtatgaaacttataaaaaagcactataaaacgtaaaaatactgcctgacagtatttctgtaaataaagcgaaaattaatagaccatttgaattttccttactttactcaaagctacttttgcttcaagaccatattataataaatgaggtaaacttagatctagtaaatctaatatgctcaaaagattccaatttttaaaatttgacatatcaattcaattctacagataaatgtttgatttaatagaaataagattattgtaacagaatgtcaaaagctatagataactatgcaatctactaaatcatcatctaattaataaggagaatttataaaaatactgtaaaataggataaagtttataaaaatactgtgacacgattttttttttttacatttttacggttttctatacaaactacataaaagtaacataaaataacatcaaaaaaaaaaatagcatacagataaaaaaataaataaacaaattaacaagagtataacataaaaataccgtattttctagtaaataaaattaaaaaaatcgtaaaaaatatttaaaattccgtgaaattgtatttttgtaaatttttttgttgtttttgtgtatttgtgaaataatcccaaacttatataatatatatatatgtaaaaagtaaatttattcttatattcacacacaattttatattacctatataataccaattagttgttaaagaaaaatcataaaggagtgtgttttgttttttgtgctcaaaagtttatgaagaaagaaagtttaagctgctgtaatttttctttagtctaggaaaaaaaaattatttttctttctgtgtaaaactactgagaaaaaaaataatattttttgtttgagagatattatatatcggaaacagataaaaaaagtttccttaaacgttttttttaataatcattaaatttcattaaactaaatcatccaaaactaaggatgcaaaaacaaaaggtaaggagtccctactaaaagtacggtcagcctcaaaaagagaagatcgcgccaaggcatgcacaaccttattagca

SEQ ID NO: 248440 - DNA, 566 bp, Cannabis indica
tgagtacacgtgtaattttcataggagtctggtctcgagtttctaggtgaggaaatctcactataacacatgcccctagtttcgcgactgatagattaggtcatgagggaaactataagcgagagggaggcgaagggtgtcacgagatggtgacctttgattgtccaatcgagggtttcaaaatgacagctgtaattattatgtttaacccatttggggtgccacgtcacgaaactcttcggaatccgtgcaggcgtggttatggataaccgttagattgggagaccttacgcattcttttgccacatgtcttaatcccaattaatgagggataatggtatttaacgccccttatatgaaatgattctcatattttccctctcattttcacttctctcttctcctttctctgaactgtcaaaacttcaaaaccccttccagatttttcttttcctttcttttagaaaaaaatccttataactttctgaaactcacgaaatcgaccaaggagtgattgacgtttccaaggttagtacaaaaatttattcacaacttatttttcctta

SEQ ID NO: 248441 - DNA, 633 bp, Cannabis indica
tgtattaggtattatgccattgctactccaaatgccaccaaaagacttcttcttggacttctacaagaaccaccgtcatgggctccaaatgcacttgatgctgctgctcaactagtggaactcctccgggctgctgaagattatgcttctggaataggggtgagctggatactgcacattgccggtgtttagctatgttcttatgatatgaaatgtataaaaatattgggtagggtgtcatagtgctcgcaatattttggtagcaataaaaattgggtttttaaagacacatcgaggatggtgggatcagaaaagatgaagacttaaacaagaaatcaatgcactataaataaaataaataaaagttctcatcaactgacagaaactgagatggatcacattaggtaaagacattaaaaaataaaacaaaacagacctaacatattagtcattttcagatatagccctcagatcttttagaaaaaacagctgttcagagtcaaatcaaaatcatagattttttatgcacactcaagcatataaccatgataatcattcaaaccagtttgcatcttcatcaaacctgaagagagagagagagacaggagagagagagagagagaacatagaata

SEQ ID NO: 248442 - DNA, 643 bp, Cannabis indica
tgaattgcagatgtccatctactaatggttgtagcaagtcttggatgttatcgccctgttgattttgatagaccttgacatacttctatacgtgcggattatttttccttatcaagcattcgatttcccgcttcagattgttgcattcattcgtatcatggtcataatccccatgaaaacgacaaaattttgtcatgtctctcttgctgacatcttttttcgtgggtgcgcacttcttgtacggggctaatgactgagtagccatattaacactttccatggcttctgccaggacagtaaatgcagtatactatgcaggattctcccggggagcttgttcggtcttggcagtgaactttccctttttcccattcccttgcctattattgttgctggaccgtttaccatttgagcttgaattgcttggataatgggggagctagacggatgtcccaatagaaggagcttttgacttgccatgtttttttcacattctgctcgctgaatggcctcttcaactttgataaaaccttctgcacggtcaagaaaatcactcatcgagtctattggtctgctcttccttaggtccttccaaatctcaccaaggacttcaatgcccccagtattgcgaacaactttctgt

SEQ ID NO: 248443 - DNA, 546 bp, Cannabis indica
tattatgggtgctttcttaagactatatagagctttgtaaagtttgcaaacaatgttagttgttgttgtgactttaaaaccaattggttatgtcatgtatactttttcctaaagaataccattcaggatagcattattgacatccaactgcctaatcggccatccctgagatagagttagagtcaatacaatttgaatgatgactggtttcaccactagattgaaggttttaattaaatcaaaccctggttgttgatgaaaatcctttgcaaccaaccttgctctgtatctgttaattgttgtggtattttaacacgcaagtatatgtatcgttaacaagttatagactcaaagagtgaggtcgatccttgtagttaaatactttaaaactaaatttttacttctatttagttatatcaaaattaagagaaaattaaaataacaaataaagaaataatgaaaataaaaagcaagtaaatcaataaggaaattaacaatgattaaaagttagggctttcgaatttcaattgcatctattaattatgg

SEQ ID NO: 248444 - DNA, 1147 bp, Cannabis indica
tggatagaaataacttatcagaactttgagaataagatagtataattcttgcatagtctattcgatgacttaggcaataattcctaatcctcatgaaatgttttatggtatctctaatgattacttaatcttaatcaagtattttgcattaatgctaatactagattgctatgttgatgacttagtctagaaggaacttacagttacagactaaaacaatatgtcacaacaagatatccctgaaaataatagtaagaggttaaatgtacttctatgtatgaatttaaccagactcctactgttgagtgggagctatttaagatgtaatcaaacaaggaacataaggagacagtcaagaaagatttctgaaagtgacctatatgttagataatagggatgtatattacaagtctttatatctacaccaactcataaaggatctgagatggtggttactcgtggggtggaggagttattctagaagagtgtaaaaacccatctataataattcaagctccatcagtgaagacacataagtttgtaaattcaaaattacccaaaagttatttgactgaagaaaattctacactatgttatctctattctatttttgatagaattagagatatgtcttctgtttattcagatgcacttaataagcagtaaggaagtttagtatcccttgatgagtaatgcatatagcaaataatgttgcataatgttttatgaacacaaaggaagtaatggtggagaaagcagtagcttaaaacagacttacagttctagaaatttgggttgagtcaaatatactgcacttcatctcgagatcaagacaatagattgattgaaatgcactacttgttttatgttagtgcagtgggagtttgttgggattttatgccctaaataaagctcatttcaatctaatctgatttgttatcaatgaaagattaaaagtcatttatgtttacatgtagttttcatgtttatggtttaatatatatatatatacaaaatctggtaggtccagaacatatagtcattcacacttacagtgatgtcaacacagtggaatgtgattgtgattatatgcttcaaaagacaaagtccctaattcatcagtgcactggatttacactgatgtgat

SEQ ID NO: 248445 - DNA, 962 bp, Cannabis indica
ttaacagattacaagaaactgatagctaaacttaagctgatttcaatttgacatttttaccagactattctaagatgtccacatttccaactcccacaaaaatgcaccaacttgttcctattagcttttaccttatcttcatttatttttagtaggaacataatttttgttccctattgaaactaatgagaaaacaataagttaagactaattagaatttttaacctctgaacttcaaaatgtatcaaatctgcccacgaaatcttagattgttaaaaatttctcctgaactattgatattattgtatcaaaggatttctaccaattttattaacgaacatctaatgttgatgaaagttcaaaggccagaatttattatctgtcaaacttcgagggtaaaattttgtacatggacaattgacacgttcgtaaaattaaaatttcaatagtttagaagaatttttaacgacctaaaaagttcgagacacatgatttaatatatattaaagtttgagagagaaaaatcataattagccaaacaagcaatcatagttaaggacatacgatgcagttataggtatctaatattaaaccaaaccacatatagttagttgaaaaacaagaagagcataccgttgagctagaatgtccatccgggttccatgaagaattgttccactgatcagactcatctccatatgttccccaagctgatatgtgtaccagttcatctaatattgtagcaccctggaaaatcaatatatatatatacacacacacataagctaatcatcaaaatggaatactaaacttttaacagaggaacagaataagccaatgccttataatgattgatggaacagaacatcaaaagtgaacaacaatcactgatcaatgtggcatttttgaggaatgaaaaagcaagagacaagaacaatctatagtgtaattattaacagtta

SEQ ID NO: 248446 - DNA, 839 bp, Cannabis indica
ttttttttttttttgccttctagtagataaattttgaagtaattagtatatattgaaaaagaaattgctgaaaaatttaatctagattcacatgactttcatgatattaaagagaaactttgtattttgatattcatatgaatttaatattgtatttgaaatatttgttacttaatttttcgggtaatttgcggccaaacccccttatatttatttttggccgccaaactatctatagttaattctctttgcaattttaatatctcgttacttgcaccccgttatttgtagccttgacactttcaactcagccaataatgcctacgtgctaatataaatatccacgtggcaattaattatcattctcggcttaaaacttatcactaatttttcaaaaaaaaaaacttacaacttaagaatattacagaattagagaataaaaacaaaacaaattaaaactaaatggaaaaaacaaagaagaaatctagccttattcagatagtaaaataaacattttgcccaaacccaaccaaaaaccctcatatttttcaaaatcatattgcgttgtacaattttagtgaagaaggatgaatgaagtgatattggtggcatggatctctagttcacgaaatgttgaagcttagaggagaagacaacaaccctcaagattatggtaagagctattttaaaactgtagttctccaagttttcttttggtgtggttggttcttcgattaggttaaaatggggggattcatagggcattttgactgtgggaagtgggtgttgggggtcatgtttggctttaatgaattgaaagtgttttctttttttttttt

SEQ ID NO: 248447 - DNA, 594 bp, Cannabis indica
atattcaaagagatgactttatagggttttgaatgcagaggactctagaggtgataacaataatagtgagtggaacacaaatgttttccatatttgctatccatggtggtgtggaggaagctattgctcatgaaagggccataacaggaagagtttgaagtccctcatattgatcttcaattaacaaatgctttcatatattctttcattctctaagttcatgaagattgatgcttataaattatatgtaacttttgttctctctcattatttttttcttttttaaagcaataaagttgtaatgtaaattcttttgattttaataaaaatgtgtaagggtgtgagtttttgcttctttcttttttctttaattttatgccaaatgtttatgataccttaaataaaatgcacaatcaatagagatacccacactttttaaattgcatcttatcatgtagagtagttctcttaagtctcctcaatgtatcctttctattttcgaaatgtgataattatatttttaattgtttttcaaaagggttgtgtatattgtggttattgcatgcattccactaatttttgaatttcttttaa

SEQ ID NO: 248448 - DNA, 1333 bp, Cannabis indica
tgtaattgtgaatgactatatgttctggacttaccagattttgtatatactaaatcataaacattaaaactacatgtaaacataaatgacttctaatctttcattgataacaaatgagattagattgaaatgggttttatttagggcagaaaatcccaacacgtcattctcctcttccctgtcttcagggttttagtcatcattgatactatcaaacacgttctcgacatcctctcttcggttctcatcgttggttgcacctttttctcttacaccacttggttagagaccaaaggcgagggagtctacctcctctgtaacattatccaaaggagttttcttgcttacgttctttcaagtgttcaccatggttgaggtggtacgatatctggcaaactttctgtagctcttaatgaaagcaccaaaatatttacagagatttttgaaaactaataaaatagaacttaagaaagaaattaagtaataagtcatagacaggtaagttttaagtagtttgggcgttaataattcctagtccacgagtctgttgtattggtcttacaggcgagtgtttaagtaatacaagtgtttacaatataaaccctagctctgcattctttttgtttctcttgaagaagaagaaagctagtaggatttataggagaggttcgactagtaacaattttttcaccctttgtacataaaaaatgagggtatttataggcatacttgtgggcaagggcatacccttcgcccacctagggtttcatactcaacatgctgcaaggactgatactacaacatgacgatatgaaagttggttggtaggaaacttccccatcgtgtggtgtacgactattgtgagggatttcgtgcgaatgaggacacgtgtttttcaaaggtttcaccttgaaaaattgttgccaagataagtcgttggacaaagagggggcttcagaggcatgtacgcgcactaccatggtctgatataggggacaatgtctaattaggtgtcagaaggtatgtaatcgttgcttcgagcgccaggtaggatagtgtcaaatatgctctgggatcattgagtcaggtgcgtctcggatcattctgacctattacctttctagaacacttggaatccaagaaactctgagtttgtgtaatggcgattggacgatttgattcctggagccccagccgtacttgctaacatcagggatccttgactaccttctagaatataacatcctttgtgatgtcattatgcggaaaagtcaatcggaaatgtggatagtctaaggtggcactcttccgtgatttccacgtagcaggcatc

SEQ ID NO: 248449 - DNA, 654 bp, Cannabis indica
agtgagagaagtcaaattcacaaattcgtatttctcatttccgacatgggaaactaactcagaaatgaagaattttgagtctctcatttccgcagaacagcaacatcttcgagaattggtgaccagcttcaccaaaacatagaaacagagtaagtgatgtcaaaatataacttaggcatcttaaagtacatcccttggacatttttacacttacccagcatccaggttgacttcatatgtcaacctgggcgttggatgtcaacctagacgatgggtcatatactgccttcaataaaatagccataactcactcaatattaatccgacaagcacgattcaacttatgtttcaaagatatttcaatgatctattaagtaatgtcttacacttcaatcgcaattcgaaagctatcaacctcaaaattcaccctcaaggaagttacaaaaataagctctaggttacctacagagggtccccgctaggctacgaaaaatgactatgaccatcagaagctaatttttatcgttggatcgtcatctatggtcaaaaaattaatttatatttttctcctatttttgtgccccccttcatctataaaaggagagctcccttagctcattttacacattcaaaaaactacccacaaggttagag

SEQ ID NO: 248450 - DNA, 1563 bp, Cannabis indica
tctaagagtcatacctcttagattcacgtgtcgttgttatattggtccacgtatttcgggcaaaatagagggcaacaacaccatatttaactttcaccattagagatgacctaagtgagtaagaaaagagatatgtagcatttcaatttatttgcatcccaataacatcaatcataacctttaaaaacatacaacaactcaacccccattataaaccttaatttttttccaagaaagagtgttaccatttgatattcaaagaaatcacaacagaatattaatattgacaatttccagtcactactacaataatggattttagaggcccttatttttgctagaaacttaataagggatggcatagggttgttaaactgttgaatggaattttatgcctcttatggcgtcataaggggcacaccttatgtcgttggttgtttccaaataagcgacgccaaaaggggtttgtaaccctacacaaccttttgtcttcctcatttgatcagccaacccagaaactcccaacccagaaactcccaaaccagagaaaccccaaaccctctctgccaatcacaacaaaaagtcacccctatatttcacttattttttttttactattttagcctcattttttttttctaaatcttctattttccacacctaaaactatataccggaaaagattacattttttcttatttttttaaggtaaactgaaggtagaggtagtagttgtggtggttataccttcggccaccatttttagtgaaaaaaatattatatctcaatgtccattaaggtataaatttaatttctactaattttttttgttaaatttttttagggttttctatattattaagattgtgttattgtggttgtgcatggtggccgaattttggtcggcattggtgggcaaattacgttaataaagtaaaaatttaaactttaacagtatatatgtatgtattttgtgttgtattgaatatgtattgtgtgtatatgtattgtgaatgagaatgtgatataggagagtattttatgtattatatgtacatgttgaatattttaaactaatagttttgttattgtgaatgagaatgagaatgagataggagagtattaaaaaaaattagaaacaaaagttttaaaattaactctattttttatcattttttttatctattttttttaatcttattcatcatttattttttttttattttttttagtagctagtatatagttatttacaactacttaacaaattactaattttcattcatattcatgtatttttattactaactagtcacttatattagtaactagttagtattaaattaactagttactcataaattatataactagtaagtagctaaataaagaaatttgtaattttatagtatttctttatgttgtaggttgtgaaatcaatttgcaaggatccgacttatttagtgttgatcggtttctagctagctcgaggtatacatttactagcttttatgattaattaattatgaatgcttagtagagtttgaatatcctaaatattca

SEQ ID NO: 248451 - DNA, 701 bp, Cannabis indica
aaaaaaaattattataatttttttcaaatcttgcattggaatagtctttccttttatttcaaaatggaatagtcattccactaaattggtggaaatgccattccattgaaatgatattccaatactttaaaatgcaaccaaacaatggaataaaaattgtttcctttccatttcattttattacctctaaccaaacctcacctaagttcttaattagctattttatattttagtttctataagcgttcaagcattttgacagggttatcactcatgtccttttgttattttaagatcattagtactcgtaatcgtttctttttaaatgatttcagtaccgaccttcaagtgcttacgactctccttattggaccacgaattctggtgctccagtttggaacaacaactcttctctgactgtcggactaagaggtacacatttttttaaaaagactcaaattaacattttgaaactatcgaaagatcagctttattgtttatgatgtttggaatgaatgctgttaaacctactataaaactagcttgtatttctgcgtggacagggttgggggtggtagtcattggtcggtttagtttgtgttatcactaccacaatattgttcattcgcgtttgttagagagtcgcacattgttaatgtgtggaaagataatagaatatataagagtaataggctactcct

SEQ ID NO: 248452 - DNA, 569 bp, Cannabis indica
gacatcgcctctaaaatacaaggtataaaacaaaaaattcgtagtattaatgaaaaaagtaaagaatttgtttttatgtctacagtcagagaagagtctacatcaataaatgtgtggtatgatcctcgtaaacaatcttgcttcctcaaagaaacagagattgtgggtattgaagactcaagagatgaattgattcaaaaggtcaaagttgattcatcaaggcgcattgtgatctctgtggttggcatggggggactcggtaagaccactcttgcaaaccaagtgtatattcgatcgaaagatagttttgattgccatgcatggattgaggtgtcccagtcatacaagagggtggagctactacaaaagataatgaagaaattttgtgaggcaagaaaagaagcatgtcctgatggaattgatacattagatgaagctactatgatcacaaaattaagagattacttacgagacaaaagttatctagtcatttttgacgatgtttggcgtactcgtttttgggatgagatgcaaagtgctttatcaggtgataatgaaagaaatgggag

SEQ ID NO: 248453 - DNA, 520 bp, Cannabis indica
attatataatagagcaagagaaatttggctaaaaaaaacaaaccaaaaatgaaagtatccaagctcttgttgggcatgaactcataaattagtaatttctcctcattctcaatgcagcaacccacaagtctaacaaggtttctgtgctggagttttgagattagtatagtttcattcttaaactcttcaatgccttgtcttgagctacttgagagtcttttcactgcgatttcccttccgcctggtattcttccctacaagtttctcactaaaataagtcattgaaaaaatgaatttgtttctctcattataaattaagaagcaagtaatgaccttatatacaggaccaaatcctccttctccgagtttatttgatatgctgaagttgttggttgcagctaaaatgctaccaaagtcatagaaaggaagctaggggttcgtgcatctgagtcgaaaattgaacaacgtttcctggattgtctcgtgactgaatccaactgatcagtgctttgcggtctcc

SEQ ID NO: 248454 - DNA, 960 bp, Cannabis indica
cagaaaaattggtccactttggggtctgatttagtccaggctgttctttcttgtctcaatgagggtgcagattttactcacattaattccactctcattgccttaattcccaaaaagcagcatgcccattctttgaaagattttcgtccaataagtctttgtacaaccttgtataaagtgatttctaaagtgttggctaatagattgaaagtggtgttggataaaataatttctccatttcaaagtgcgtttgtttctggtcgagtcatttttcataatatccttattgctcaagagattgtgcatgctattaattctcgtaaaaatggcaagattggttgggctgctcttaagttggatatggctaaagcttttgaccgtgtggagtggcactatttacaaagtgttatgtttcactttaattttcctcctaagtttgtgtctttagttatgaaatgtatttctactactacactttcttttttaattaatggtattgttagcccatcaattaagccttctaggggtcttagacaaggagatcctctttctccttatctttttattctttgtgcagaaggtttatctgctcttcttaggagtaaacaagatgctggtgttctgaagggtattgctattgcccgttctgctccatcaatttctcatctattttttggctgatgacaaccttcttttttgtgctgctaatcgttcctcttgctctgctctgcaggaagtttttgatatttattctagggcttcggggcaggtaattaatttttcaaagtattctattcttttttctcccaatacccaatctaatattcgtgcccttttcttcaacacttttaatcttgaggatagaccttttatttgtaaatatttgggtcttcctcaatgcctctctaggtctaagtatcactcttttgcttttctcaaggataaagttaattctatact

SEQ ID NO: 248455 - DNA, 1318 bp, Cannabis indica
tcaagtttgatcatgcaattcgactttgttgacttccttccataatgtctcaccagatcttgacatatcatgatgttgtgggcaatgaatctccctttgacaaatcctccctgattttgagcaacaatatcaggaataatatctttgagtctggagcatagaactttagtggccactttatagattacattgcagcaggcaatcggtctgaagtcacttggagaattgggacatttcaccttagggataatagtgagagttgtggagtttatctctttgaggattttgcctgaatgcaagaaggatctcacagcttcacatatatcattgccaatcaattcccaattgtcttgaaagaaaaaactggagaagccatctggtccgggagctttagtgccaggtatagcaaacatggccttctttatttcttcattagtaataggagccgacagagttaccctttgttgcatcgttactgtgggtccattcttgatcacatggtctaatacttcccttctattgaccattctggtgcctaacagttgcttgtagtaagcaagaaaaacctcagtgatctttgttggctcatctactcggttcccttgtggatccacaatggaaagaattctgttttggttgattctagctttgaggcttgcatggaaaatggccgtattatcatccccatctctaacccaagtagtctttgctttctgctgaaggaattgttgatagttcttgtgtgtctgagagaaactgcttcgtgctgctaattccttttgctgaagttcctgatttagagggtccaaagataactggttttggcaattatccaaaacaaaaactactttgatgactgtcgattgcaaatcattatacccctcttgatttatcttcttaaagaccggcttcaatgctttaagattagccaccacctagtacattctcgtacccgatacctgctgctgccaaatatgctgcaatcggctagagtatttagggtgagatatccacattataaaatagcaaaagggctttctcccattgtgagcaagctggtgaaaaatcactagagctggagagtgatcaaaggcaccttcgtttaggaaaatggccttagctcccggatatttttccatcaatttaccattggccattaccctatctagtttagagtagatgcggtcatccccctgttgtttattacaccaagtaaacgaatttaccactgcttttgatatcttccagttggcactgtgaaacacaatctttaaaagaataagaagtgagagtcttcaccctacttccaatcctttct

SEQ ID NO: 248456 - DNA, 829 bp, Cannabis indica
taataagttaagaaatttactcgataaatttcaaaatctacttattaggagcttggttacataggtccatggtccccacattgtccgagataatatcatcttttagactcaactgattgatttaataagtcaattataatttaaaaatagactatgtcttatttgagaactttcaccaagtttgggtaattttgagaaggaaggatatatatgaatttatttattaattagtaaactttttgagtctaattaataaatatattaaaattgtattttatttgataattattaaaaaaattggtatttaaataaatagatgagataacattatttaaaatagagtggctagaatctaactctaaagctcatatgtatattcgaatctaagagaaagattcagcacaagtctttattttaagcccatctcatctaaacttaaccctaagtgaatgtgtatataaagaaagagaagaagattaaaaaactaatgtctcatcattctcttctctttaatttttgaaattcactagcaaaaactcagtctcaatattgttcaaaggtgatttgagtattagcccacactgttcaagttgatactcaggcctttgtgaaggactgtgatgaacataatcgaatgagagaagatctaggttcagctcttgataatctgcaacaaaaaggatcaagggttagagaactgaatagaatgagacaatctattccgctgcccttattgtgagaatttttgtaacttaatgtctttatttcatcgttttaggatttttcatatttagggtgttagattatagaattatagtcaaaatacatg

SEQ ID NO: 248457 - DNA, 494 bp, Cannabis indica
tattttttatatttttttaattatgtagttaaactaagcatggaaattcaaatttgtgattttattattcgtgattagatcaaaattcgatggtttaatatttttaaaattaatatttatagttaaatttgtttagtaactcccattaaaaaatgttccatgtataaataaacaatcgttataatgcatgtaaaatattagtattgaatgattataataattttaacaacaaaatgttaaatgaattaaaattgagagttatatatatggaagagatttcaatggttacatactttattgtaaccatatatgtatatcttccgtatatatatatatatacccatatggagaaggtttcaatggttacatttttattgtaaccatcatggttacattttttttagtcattggatcattattaaatggttgtgattaatttagaaattaaataaaaataaataaaaaataacctgtaacctgatattaacttgtta

SEQ ID NO: 248458 - DNA, 704 bp, Cannabis indica
ctatataaaatatatatatattatttataatgtgaagaataagatcaaaaagagaattatattgatagatggatctcatcatgtaatttatatacgtacattatatacattgacggaggaggaagaagattcaataggtatttttgtaaaaaaaaaaattttagtaatttcttcttttgtttaatttccctaactaagctaaaaatgtaaaatttaagtctaaaatacctattatagaaaaaatcccatttaattattggtcaattaatagattatattgtaatagactaatagttgattgaagtttaatacaatctttccttcttcttttctcttaacaaaagaataattacttttacataatattaacgacatgtgtgatattaaatacctacaagattatacacctaaattgtatcaatatagatctttagcaaatcaccttaaaataagtgggatttatgtatatatatagggagctaatacttgttaaaatagatattgtattatttttttttttttttgatttaagcgtgtaatagatattatattattgtttgtatgtgaagtttggaaaatgctaagtgaaatcttaatgtgttaagtgttgtaaatacgagtttgatttggtacgaacatgatcaggcacgaaatatatgaatttaagtatgacacatcatgatgctataaattggcacgacatg

SEQ ID NO: 248459 - DNA, 714 bp, Cannabis indica
attcttgattagtggtaatgaatgttgttcttgatttctctcatattaaattacttattgagatttttattgttctattatcaacttagaattactactcacctaatagtttatgattctaagtaattgtaataaattgcaattaatagtaatgtcaaaagtattgttgtgcttgctgatttatcaaaagtattgttgtgatgaaaaatagaacttaagttaaatgaattatatatgctttattgatttgttacctagattaattttatctttatagaaattaacacttttcctaagttaaataggttgtatgtttcgtggatctattgcttgataaaaaaaatttaattattgaccgctccaccttgattaattgtaatagggagattaaaaaaaattgatcggttcaatatttttttttgggattaattgtttaattagaaaactaaaataatgtctattattatctcgtaaaacaccaaatcgaaatatcctttctttggtctatagcccctccaattcatttattttcttgctaataacctcaacaatttagagaagaaaagtttaaatgtacatttttttacctccactaacttcctccaatataggaaatagaatttaaaggaggagcttcctaattaaactaattatactattgaatatacacttgatgtactctctttaaccatcgcaaaccatattccaattccc

SEQ ID NO: 248460 - DNA, 980 bp, Cannabis indica
ttattttcatttaagtaattaagtaaaagttttaataaattataattttctataaacctgtttatttgcaaacgttgcattgtataattattattaaatcacgataacacacctaactagtaggtgttacattcaatcagttatttcttctctgaaattcaggttttacacggtcataaaaatagatggtgcttcaatccattcaagcacattttcatagaagaacaagctaatctacaacatagtccaacatgttctaaaatagaatgaaatcaaccttaaattttgaccccaaatgaagaaaaccaacactaaaacaagtccacgaagctcgtttcccttgttaatataagctaataaagtcaatgccttgaatccatatattccttccaatatgaaaatcacaagactcatattccacatagcagtcaatttcaagtaactttttaacactataccaaaacatataacaaacaaaatagtgcatacaaaattttaggctcaacttttcttaaaagcagaaggtatattactactagccaaatcaatctgatgagactacaagaagagttgaagacaacataaataagtgttgcctagcttttaaatttttttccatcaaggattatttgaatcatatcctctaaagatgttgatgaagtccaaattaattagtatatatatatcaaataattatatatacttacatttaaaattttggaggaaacttgacaacattgtattactctatacatctaattttatagtaagatagtttagaaaaatatgaataaatcttttttgttaatgaatgttaatcatatatttagaaaatttgttagcttttctacaagtttaataagtcttcagaatttgtttagttaagtgttgttttgaaagtgaggaagatgataagaatacaatatggtcaacccagccaaccatctttctaatataaaacatgaataatttttgtatca

SEQ ID NO: 248461 - DNA, 745 bp, Cannabis indica
aatttaatagaaacaatggggcactctcaaattcttacaatcaagcatggaagatcatcctaacttgtctggggggggggtcaaccagcaagctcaagcaccacaccaccctaaggaagacaagcatatccaccgggttttttcacaacaactccgacattcacaacatgctcaaaattcccaactgagttctttggagagtctaatgcgcgattatatggccaaaaatgatgctgtgatacaaagtcaagcggcccctctttgaaaccttgagttacaacttggacatttggccactgaattaaaagctaggccgcaaggttctttgcctagcgacatggaaaatccaaggagggatgggaaggaacaatgcaacgcgattcaactaaggagtgggaagaatctgaaaaattttgaggaggaaataaagggtagtggggagcccacttcaatccaaactgacgaagtttttggcgcagttgccggggactttaagttctaaattttgttttatcaactaattggcattctaataattttttgtgctttaaatcttgttggttgttctttgaaatttcaggtatctatagtgtatgaaccaacaagaggagtttgaacttgctcctattgaccccgatattgaatgcacattttgaagaagaagaagaagtgttcaaaaggctaagggccgagacatcatggttgagaatcttgatgatgatgggattgcttaacaaattgttaa

SEQ ID NO: 248462 - DNA, 7760 bp, Cannabis indica
tttaattttcacataaaacattttcgttttgggtttaataaaaaataatcaaattgtactctcaattcccaaggctttgcttctctctctctctctcaaacttcggatgtgctcttaatcaacgcttatgttttcttggccctttttagggtttctctctccaccatttttcttttttattttttgttgctttctctgcacttctagggttttgtttccagaccttcaaaattaaatttattcaataatttaaggaagcaaagaaagataaaagaccaacgcacacacagaccccaacaaaataaaaaaaaaaaacccctaacattctgaaggtgtgtgtaaaataataatgcgaatatgaattcactagttctattgggtgatcgagatcggagtggaatatgaacttgttcgtttgccaatggtgaggatggtgatggcgatttttcttgaagctcagagatttgtatggaagaggatgcctttgctgttctaatgctaatgctaacgcgcctcatcaatttatattctattctggtaacttagagaggagaaaatcgcttacttaaacatgcttttctccaagctcgatgactctcctatgttccgcaagcaggttccgttcgtcattcttgtctttctaacccattttctttttgcatgttcttcttcttccgtttttttttttgaagcgtcgtagtttccaatgctgtgtttgtttcctgagaaaaaagttattggaagcggagtcagtatcttttatttgaagttatattgaattctcttggcgactcatttgatcatattatgctacgaagtttagtggacggaccttttagaagcattaccttaagtttcctgctctagctagattttgtagtttaggaaagttaatgctaatattttggcgttttagatgtggtgatcgaacgtgtttaacttacactagacctaattccatcaaatctttggatttgctgattataataaatgtttatgatcatttatgaatagtgatatttagcatttacattgctggggcttgattaattttcgctctttatctttagaactttggtagatacgacgaaatttaaatctgtagccacgtttttttattttctttcaagaagcgaagtttttattagatgaagagaaggtttacaaaggatgaaacactctgacgtcactttgtcttcttacataaattgttgtttactcaaatgtttgatcatttggtcagggaaggaaaaaacaatggaattttaatgagaagattgcggtacttctattaagtttgattcattgtctgttccagataaactttattggttcaatgaaaatattactacatacctttttgctctagcattaggctctatgcatttctactcaagtaagttgtttactgatgctttctttggtgaaacagatacagtgcttggaagaaagtgctgaatcattgagagacagaagtttgaagttttacaaaggaagccgaaaatacacgtatgtaaatacatttatgtatacttatatttaattggtatatgaaatatatcattataagttaattgacctctgttttgttcccacttcacatgttgatatagcatgatattaaatggtttcttagccccatttattttcttctgttgagtgaattaatcttttgtcttctttaaaaatctaattatgttcatctttctgcttgcagcgaaggacttggggaaggatatgatggagacattgcatttgcaagtgcactagaagcttttggtgggggacacaatgatcctatcagtgtagcttttggaggtacttggaagttgttttattggttgtgatgcattaatttatgtacctatttctgcaaagcaattttctttttccttctgaaaaaaaaatgatcacatgggctgtggttaaatattctgcgggcggtccaagtctgccctaatagtctgatagtagggatgaaagcatttaccctaaaatgttattttgaattggagatgtatatttctagccaagagattgagagaatgtgagaggaagtggaaatggtttggttgtgaatttatgtgttaacttctgtttctttgtaggccctgttatgacaaaatttactattgcattgagagaaatcggaacatacaaggaagttcttcggtcccaggtaattgtattgacaaactctcctcatcttcttaatcatatattgttggacataaaattgtctttttttcttggaggatgcaagtgttacattttctgacatgcttcgtatattacctctcaggttgagcatatgcttaatgacagattactgcattttgtgaatattgatttgttggaggtcaaggtacaatgctggattagtactgttctaattattttatatttgtggatgctttatacttcttattagttggtgatgtgcataggacatgtatcgaattttgccaggcacaattgtgtacaggcttaaatgcattaattaaaacacgctgttggtgtggtatttaaccaaaagatagttattgtattaaaatcgcttttgatttgtcatattcgacacacctatcaaggatctatcaaatgtttcttagttgttacatttggtttttcacctgagataatcatatggggatggagaatgttattttcaatttgttaactgcaaagttctcctgttcctgtttgtgcttttttaatttttcttacaaagtttgttttatacaggaagctaggaagcgttttgacaaggctagccttatatatgaccaggtattctcttggttctttctatgattgtgtttccaccgtgttcatgttaattggctttcatttatatactcttctgaccggaattctcatctgtcgtattttttgaaaaatatggcagtagtactagtgatattgtatttaatttagatttgcaatgatattaccttttagagggtatagcttaaatggaatttgatgtaaatcttacatgtgatgatgatgaatggatgatttgtttagtgacaacatttgcagctttactttagggtatctttcaatgtgtggttttagctatatgatttatggatgcacttcttcatttttgtactcttgtttggagtactttgtaatcttttggttcagttacaagtaaataagccgactttgatatcaggcacataagctagtgtgagagttttgttggcttgaataggttgaccttgcctttatagaggtagagatcttattaatctctcatctccgtttgattaacgctgcaggctcgtgaaaaatatctatccctgaggaaaagcacaaaaactgatgtagcatctgttttagaagaggtatttcattcctagttctttagagtttaaatttacatgcttacatctatgacatatttcggtttggcatttgtgaatttctccactccaccattctaatatagtttgaggtattctaggagcttcatcatgcaagatctacatttgaacaagctcgttttagcctggtaaggctgttttctggttaagatgtgctttaatttaattccttaaatgtaatgagaaatttgttccagaaattctcattacataccttatgggtttgtaatgttgatcattctctttcagattacagctctttctaacgtagaagcaaaaaagaggtttgaatttctggaagctgttagcgggacaatggatgctcatttgcgctacttcaaacaggtggattttatggcaggtctttttatgctcgtgttaccacatattttatcacaagtgtgttaatattcaatgatattgacatgtagggctatgagttattgcatcaaatggagccatatattaatcaggtataattttagtgattgtgtttgttaaaagtatgttcgattgtgttttttagctagcttttcttgtgtcatcattgttccctttccctatgttttgaccttggattttaagaggggtttacatacatttacattaggagaaagactgatcatgaaaattggtgggtgccatggccatgggtcagaattgtggcgggtaatgggtgtcatggaaatagtggtagtgttgattgtaataagtagcagagttatcaggagtatagtagtggttttatgttgtgtatagatgagaccagccacaagaactcctgggaattgtattccttcgctggttgaatacagaagcttccctgttatctcactctctttgttcttgctgcttgttgtttgagtccggttgatgcatctcttctaattgctccaaatcaacttaactcaccaaggcctttttcttttagctgtgcatatgatttgtgaatcagtagcatgccagaagaattctgtggtgaatagtgaatacaaattactgtcaatatggcttgattacatgatgggctgagattttaaaatgttttttattttacgatgtaaatgtattggaagattcatttattatcctttattattttgcaggtattgacttatgcacaacaatctagagaaaggtccaactatgagcaggcggctcttagtgaaaggatgcaggagtttaaaaggcaggttgatcgtgagagtcggtggtcttccaatggttctaatgggtctcctaatggagatggtatacaagcgattggccgaagttctcataaaatgatagaggcagttatgcaatctgctgcaaagggaaaggtttgataaaagacttttttgagcagtttatgtttcctccatctgaatttctctccgcctcaagcccacactgtttgtccatcttaatgttttctagcgtttctcaatttaacatattgagcattatatcaggttcaaacaattcgacagggttatctctcaaaacgttcctcaaatttgaggggtgactggaaaagaagattttttgttcttgatagccgaggaatgctttattattatcgaaaacagtgcagcaaatcatctgtaagtaaaatgttatgaaaattagtgatgatgcaagggttaaattatagccataataaacttgactcttgcattatgtatacttgtaggcttctggaagtcaactttcaggtcagaggaacagttctgagcttggttctggacttttaagtaggtggctttcttctcattatcatggtggagttcatgatgagaagtctgttgctcatcacaccgtgaatctgctcacatcaacaatcaaagtcgacgctgatcagtcagatctgagattttgtttcaggattatttctccaacaaagaactacaccctacaggttcgcctcagtgatagcttgaacgtttgggattataatttactaaaaagaactcgcggttgtgaatctgttaaatttatgttgtggttctgccctgagggttgatttaactagcatttgttcctcaatgaatatttatttatgcttgtcagtgcaggcagagagtgcacttgatcaaatggattggattgaaaagataacaggagttattgcttcactacttagctcacaaggtcctgacagggtaattatgttcacattttgcattgctatacatgtatatacaaccattgattcccatagaattttcagtgatgtgtgctctgttttattttcagtgtctgcctgctagtcccatgggaagcagtcaccatcgttctaccagtgagagtagttcatttgaaagctctgactttgatcacactgcagttgacgagcttacactggagaagagttctgcacatcttgagcgcccattgagaggttctcagcagcaacggtcttgcatgaaaaatgagaagccaattgatgtcttgcgtagagtatgtggcaatgacaggtgtgctgattgtggtgcctctgagccagattgggcatcattaaatcttggtgtacttgtttgcattgaatgttctggtgttcatcgtaatcttggggtacatatatcaaaggtaaaatttgagtttaactacttgggtcttttgttatgcattatgtcggacatctgaatctgaccctctaaatgcatattcttgtgaaggagagttactttagaataatgaagattgggtaagacgtgaaggtttttggaaatagatatattaaatatatatctatataaagacttgaacctagctcacgtggttgggttggtggcttaagtttccctgaagtatatgttacaatatatgtatttgtaaatataaaagttgaataaaaatttagataaggcgcattggtttcagtgaatgttttaatataagcaaaaaaacttgtcccatgtatgattcttggtaaatacgataattttgatttagcacacaattggatatctatatatgcgaggcatctttgcatttacatttatgagtacatttttatattcttggtcttgatggtttctgccaattctgtaatgtcataattaaccacgattcatttgcagctaaacctttgtttacttttctttttcaggtaaggtctcttacactagatgttaaagtgtgggagccttctgttattggattgtttcaatctttgggtaatacctttgccaattctgtctgggaggagctattgcaatcgagaagtgctttccagattgatcttgtctcaacagggtaaaaatccttttaatgatcaaaatagaatttccagagtgatatatttatatatacattaatgtgatacattaatatatttacacaaatctgataaaccaaatggctaacctttatcctttgttcctttggtgaagctcatacaaatctgataaaccacaactgggttttgtcagtaaaccaagtcatgccgattctatatcagtgaaagaaaaatttattcatgcaaaggtgaacactgattgatattcctttgctaaggttttaatattatcttttcatttctaaatgacaaaccaaagttgagaggtccctgagtgaaacatagtaaatgtgtagccttctaattgcagtatgcagaaaaactttttcttcgcaagccgaaagataggcaatatcctcatctggtggcacaacagatgtgggagggcgttcagactaatgacaaaaaagcggtgtaccgtcacattgttaattccgaaccagatgtaaatgcaatttataagcaagcatctttcggctcatctttaactcttgccaaagtaatgctattgcatgaacagccaagccttgagacaggggattccatgggaaggtcttctaccagctctttgaacttgggtggtacaagtgaaggccagacaatggacgatctagatgaatgcactttgcttcatcttgcatgtgaaactgcagatataggcatgctcgaactcctcctacagtatggtgcaaatgtaaatgctactgatataagaggtcaaacgcccctccaccgttgtattctcagagggaaaacaacatatattaaatggcttcttgcaaggtgctttaatgatctggttcctgtcagtttgttttagttgcatcttattttgttacaaaactgagtttttattgaacttgcaggggagccgatacacgagcagtggacagggaaggcaaaacaccctttgagcttgctgttgagctaaactttgatgatactgatatccttgctctattatccgattccagtggatgacgaggaatcaccgaagagccaactaagatgctggaatttagtgtgaaaagggagaaagataaaaaaaaaatacatatatatagatatatatacaaaagtac

SEQ ID NO: 248463 - DNA, 1008 bp, Cannabis indica
gatgttaatgaaacatacttggtagtaaatctagatcctggtaaaatatttccaacaatgccttgtttaagtcagtgaaattgatgcatgttcgccacttctcgtttggctttggcaccaacacggggttcccaacccatacggggtagaaggcttcacgaataaaattgttggctaaaagtttgcttacttcctccttcaaggccacagctctaacctcatcaagtaatctcctcttttgtcgtttggcgggcacgtccttgtttagattcagcacgtgggtcatgacatttggacttatacctaccatatcagaatgtgcccaagcaaatacttcttggttgtcacggaggaactgaataacagccttcttaatctccttacttaggtgcttccccacttttacggttttggttggctcctttaagttaagagtaacttcttcaagttcttcaatgggacccaagtcaatacggtcatcgcccaaacgagggtctatctcttctatatcagaactttctcttgctcctctgttttccacttcattatcgttgtttaccaccaacatctgggcccctggtcgggtttgtccctcatagccacattgtagcattcacgtgcagctagttgatctcctttgactattccactcccggtagcagttggaaactttaaggccagatgcttgatcgatgtgactgcccccagcgtgtataacgctggtctacctaaaatggcattgtaggcagatggtaggtctaccaccacaaactctgtcattcgggtgactgtttttggggcctccccgagtgtcaatgggagagtgatttttcctgtgctggccacgccatctccagtaaatccaaccaaatttgtagtgcacggttgtaggtcttgcacacttaaccccattttctccaaggttatcttatataacaagttcacgctactaccgttatcgaccaagactctccttaccctcctgttggcgatttgagatgttatcac

SEQ ID NO: 248464 - DNA, 1159 bp, Cannabis indica
ttattttgctaataatttttttgataatgactatttttacgaaattattttttgtaaaaatccaatacagaatagcatttcgagtgttagagagtatgattgattagctgatattttaaatttaatgttggttcattggaatcacataaacaaacaccttgaattcccattaataaaattgtgactataataatctttttatggtcgcatagtgtaatttttagttgcttgtgcgatcaagcatgattattaattttgctaatggctattttttgtttttctattcttcaagttttggtttttggatattttgattcattcaggcaagcatctgtggctttgaatgtatggcagccagaagtggttcggggaaggcacaagcagatagtggagcagaatgttgtgccagttgagtctcgagtccatgcaatggatatggagctcaagctttgcaggcaacaaattcgtggtttcgaaaaagcttatgtaagttttgagatttatgatattgctatctctatgtggcgaaatgtaaagattagtgtgatggattttttccttttcggtttcattttgaggtagaatgatgagaagaagaggtttgatactgccaaagaagagttgaactcattgaagtatcatcctttgaggattaatgaatcaacaagtggggtgaaaggcgaatccgaggctaataatgtcgagagaaagaaacggagaagatgcaataaaggtgagattaaaagctttgttctttctttcaatatatgtcatgaagttgcagtttctaattctaagtgctaaccttgttattgcatttctaatttcttaactatctgatacacaacgaaactaagtttcgtctacattcttagaacgatttcttctttcatgtcgtaaattcattgcaaatcacttcctcactgccacaactatgctccttactcttcgttcggttgttgttgttggatgctgatctacgatccaacttatgttcctatcttttgtattgcatattggtagattggactgcagttcctaactcttgtagatcggttggttttgtcgctagagtgcgacaatacccattggttaactcttttaggccatgtttggtaggaaagagggagagtaagatggatggagagttggcgaagga

SEQ ID NO: 248465 - DNA, 551 bp, Cannabis indica
agaaatcatctttatttaaatcaaaacgagatataatatattccctaacatctttatttttatgcaaaagataaaagtgatataaaggagaatgcttccaaacctgtcttgccctggaacaatctagcagtgagtgagttacagtttcaacaggacaactacaagagaagcaagaaggagaaggaactatttttttaagaaaaagattataagttgtaggaagaatatgataaaaagtcctccacccaaagtttttaatcttgggaggaatgcagagattccaaaatttcttccactagttattgtaaaaaattatattagaagatgacggcggcaaagacactgtattaacaagaagataagcagacttaacggtaagaagaccagaagggtctcctttccaaatcaggctatcatttttattaattcccccaataggaacttgaaggatgttggcaacagtggcactatcaaagtaagtggaaagtttatgcttgttccagtgcccattagaattgataagaattaaactttatcagagggaggaagtt

SEQ ID NO: 248466 - DNA, 863 bp, Cannabis indica
acctgtgccactgttccagtgaccggagctccagggtgatcatgtgctccgacgaaatctgccaagaagttgaaatcccaagctcaaaaattgacctacaatctcatttctcctccgatcattacttctctgattgctaccccaactcctgggtttggtgatcatgatgaatcctgttcatccgatcactcattgttgaagtcttcttcttcgaatggtgctccaaatgtcgagaaagctattgtgtctttgcctatggtgagttcttgtaccaggtccaaggtgtccacaccaaagaaactagagttggttcagcccaaaggagtctccaaaggaaagaaagtggtgacttcatcctcaaagggaaaaagtctcaaagaacatcctcctttcgtttcatcattgaattctaaactagaagaggtgactaaggatgttgatcaagaatcagagggtgagtctgattccagtgaagaatttgttcccaaagaacaaccatctgctgatgattctgggtctgaaagtgaagtgcttgaagattatcctatcagtgcaaaacaagttactgtccctgctacagttccaaagaaggacaaaggaaaaagacccatggttactccaagacctattttgtctcagaaaaggaaaatgccctatggtaatactcttgaaaacttcaagccccattctcattatttttgttacaatgataatgctagagatatgaaattttatgagaataaaaattttactgtacggaaaaatttcaatgtcattgctcataagccttctaggttatataatttgttgaaagaaaaacaatgggtggagacattgatcgttttgatggctatatggatcga

SEQ ID NO: 248467 - DNA, 2796 bp, Cannabis indica
ctttaatctcatttacaccccattaagaaatggtaatagcccttgggtgtaggttatttgaatttcaaaaaatatgtgatcttaaaacactataaatagaggtttttggttcacttgtgaaaatatattttttgtgagtttctatcaaagagagcaccttggtagaaactataagcttgataaattcagaaagctattttcattctttccttttccctaagtgcttgtggtaagggaaaataagcttttggataaaggtgtaagacattgctcaagtttagtgattccccttgtaatacacttgtggtgtatgtggtgctaagattgctcttacatttcttatatatatatgctatttatatattgtatattatgtgtagcttattgctttgagttgtaattcttctctttatctctattttctattttatgtgtatattttatttaatattgtaacattatttaatttatgattttgtactttatattatttatcatagacttataatcctgttgatttggtatttacacgataacttctaacaggtctaagaatgaatactgtgtagtcaaacacaacacacctatatttataacaattaagagagtaaataatttgttctatgtatctttgtttctattgcattttatctcatcacattatattttattttgccacatttaagaatctccttcaataaattattatttttttcaattttttcttccgaacgagtaataccttattctcaatgagttttacgtgtttaaaaatcaaaagtccaatctttcaaaatactttaataatttacccttttgttgagttctatcaaataatttctaattgtaaatggacaattattgtggaggcacgatgtctaaacttttaatttagatggttcattaaaataaggtatttaagctccaaacaaatgtattatcaaccatacacctttaattataataattaagttgaaaaagaaaatgaagaaaaccaataatgggttggaaaattcagccaaaaaaaaaataatgggttggaaaaataaggtataaatgtgcatttgatagaaatggaaatactcgtcaaggagtcaacggcaattaataatatcaaatgtggtcgaaaaattggctaattaaaaagttgaattatgtgaattttgtggtatataaatatatgattggtgaatttttcttccttaattattttttatttttttgaattcaatgatatattatatttggttgaaggtcaatgataagttaaagttatgcacatacaccacacaaaaatataaataactgtgatagacaacatatacaaaatacaaatataatataatatattttttttcttaaataataaataataataataaaaaaagtaaataaataggaagtgaggaagggagggaaggactaaggagaggaggagaccaaagtgggtcagaagtacacgttgtgcgcaggcagttccatgtgcccacatggatgattggagagttggagtgaagaagccatagccaaattggtagagccaaaaaacaaagctttgcaatcaatcaatgaaattctgactctcagagtgatttacacggatagagaaggaaaacccaccacggaaatcttcttccgagttgttattctcagtttctagagagaaaaaggtctcaaatccagaagatttagagagaaagagcaaagatgaaggaaggcaatgatgggtttgtgagagcagatcagattgatctcaagagcttagatgaacagctcgagaggcatctcaacaaggtttggactatggacaagaataagaccaaggatgaagaaatcaatctaccaactaccgccaccgccaccgccaccgcaaccgcaaccaccgcatcatccacggctacctccatttcttccgccagtgccggcgccggaaaatctgtctttagtcccttcaagcagagacaagagtgggagattgatccttccaagctcctcatcaagtccgtcattgcacgtggcacttttggcacggttcatcgtggtttctacgacggtctagatgttgctggtttgttcccgtaattctttaaaattaaaattcagtccaaagtaaaaatttccatttttcctatattattatccaaatgcccaattgcccatatcataattttgatgttcattcaattttactatatgttttatgcttattgttcaatattttctttgggtttcatttaattttagcttatgtgagattattaaaaagactagttgttggcaacttgggttcatattataaatgtagttgatgtatgcaattgagattgattttgatgctgccttgcaagtagtccaatattagattaggtggaccattaattagtattcttcatcctctattgatattggctctcctcttgtcttgtatatatgatgtcacaaatagtacccttaaatctaattattactctgatcaggaaaagacttttatatttattaaattattgttacaaaattcaagatttgtatttaacttaatatttttcttttggaggtttttgggtgtttgactaatgtaatttgtagtcttatgggatccgtgactcttacacggatttcggatgagtttgctgttcggcatcatacattgaagatacttgttttttttttaattgaactttcatgtgatctcatctgttggcttaaatgtaattgtatatttaaataaatatatgtcatgataagctaaaagtttctattttaaatgtcgtttcatcatcgttatcatttccatct

SEQ ID NO: 248468 - DNA, 862 bp, Cannabis indica
aaaaaattagcataaaatttagtatacgtgcctcgcatgtaactttttgctagtatatatatatatgtaaatatagaaaatgtgattttaagtactttgtataaaaaattcctaattggggtggagttttgttttaaatcaattctattactagtgagcccaattttttgctttctttggtaaggccatagagcccaatcttgaatctatataatgaaaacagacattagtaatacataaactcatattacccaaaacacacataattcagtgtttctctttaaagatatttcaatcacagacaacactcctcaacaaattattcataccaccaccaaaagggaaaagtatttaaaattaaattattacacttttagcacttaagtatttaaatattgggtaaatactattttagactccgtgttttacaaaagttactaattgaactatttgttttgttaaatgataaaatagaccatatattttctaaaattgtacaaataggaccccatgaactgattttttgtcaaaataaaatttaataataataaaaaaaaaaaaaaagttaacttttaatattagtggtacttttttggagatagaaaaatatatgtttctcacatattaaaataattattttattatgtatatatgtgtaaaattttaaaataatttttttaattgaaaaagtaaatatcttattcacatcacaagtaattaaatggttactttttttaaaactcccaaaaagtaaaagtttctagaaacgagatttttccattttcagtaattgttttgaattttgatatgtatgctgacgtgtgatattgatatttgtgtatgttagagtattagctgtata

SEQ ID NO: 248469 - DNA, 577 bp, Cannabis indica
aaaaaaataataaaattcaaaataaaaactacttaaatttttaattattaatattatcataatatgtataaaattttaagtgtatacaagccgtcttatcgtaagaatatgtataccttacatcataataatcacatgatctaaaatcaacagtaaaaaaaaattctctagcggtagagaacttttgctatcctatcatacttgccctatatatatacataatacatttgcatatgcctgttattatttattttttttttcctttaagttttttgttctatatatctttgttttaatcttttctgggtattaactagattctcttctgatggcatcaaattaaaatattttgtaaaatgaaaatgcggatgcacaagaccactattcttcttatttcattctattgcaccactcatgcatggttacatcatacaaatattcttaaaaatgagtcaaatttggcatacaaccaacacaatatattaatcatttattatagcatcattacttattttttttgtaatgaaaataaattttattaaacagaaatatctgctaaaacaatggattgaagagc

SEQ ID NO: 248470 - DNA, 530 bp, Cannabis indica
aaaaaaaattatttgaacgtaaaaatataaatattataaaaaataatttcttatgtaattatttctaaaatttatatataacatttaagatgagcacatcgggtgggtaacatctaatcaaattgaaccgaatcaattcaatctaatattaaattagattaaattagatgttacaaataggaataaaaaaaaaaagttagattgaatccactcttacccacgtacccccaccacgctagtgatatatctatgaagaatgcatatatgtgatgacttatattggaagtctagaagccacattttatttctcaatcttctacaatttataaattttataacttaattaatctacgactacacgttgtcggccaccgaaaattaatacggctgatattaatattgcttattaatattagtggaacttctttttcaattactataatactaatatattagcatagcattggtaggctatctctaattatctacaatgaattggaatatatgaaaattgtttatatttagtaaaa

SEQ ID NO: 248471 - DNA, 1493 bp, Cannabis indica
atcgaccaagatttgcttcaacttgtgcacgaggttcatcctcgtcttcgtgctagtccttcttctagcgaaggaaactcttttgaccttgtacccagccataggatgatggctcgtgcaaagaaaaccacgcgtctggtcaacgcttctaatcctcaagtggctcggcttgccactctgcccgacgccgaacaagattcgaacgtctcgatggaggtggaccgtgagggggatgctgaggtccaggaggttgaggagctggacgagatgtgtgcgggaagtccttccaaggtagaaagagaggaagaggttgaaccccctcacttctgggagtacaacgaggctgggcagccactcgatgctgacggagacgtcctggttgagggcgtggactacgtcagtgaagagctagctgaggcggttcctcataggaggcagggtggcttgggtgccagtgggtaagtcctccgtccaagattttggaggcaccccttagaactctcaaccaggacaggtctctgggcgagctggactgctacattcccgcccacgataatcgtgccacaaatcctgataagggaatgtgcacctggtcgggggctcacggccagcaaggggcgctgatgcccttgcacaagtacttcagggatgtggcagacttctttggtctctgccctgcccaaattactccaaagggcattaagtaattaccactaaattatacttatgattctatttggaaaatcgataattttcaagatttaaactaaataaaagtaattcaagaaacttaaagaaacaagtgaatattgatcaagatgagcagatagggaggagaatcctgttgtttgtttacccaattgttaatgcctaattgctatcctgttcttgatgtgaatgacagattataaattaacctaactcttttcagatcttttaggttctaaaccacatgttctctaattaatctcttaattaaactaacatgtaatcagcattaagtaataatctaagtgtcacataggtcatgcaaatactctcgtttcacatagaacctcgattatccaattttagcattctcaattctcacttttcagattttgaattgagatcatagaacatgtagaaggtgatcaagcttacacatggaattaaacacaaatatagataatttcacaaatcaagatggaggaatggcaattattcattaactaggcaaaactttaaacaacattcatcatcctccctaaatgggaaatttagctcataacaataataaaaacatccatgattaattctgaaacaaaactagacataaaagataaatagagggtaaaagaaagaaactagatggtgatatcgctccgggtcttcaagattgcttcctctcctctttcattcacttttcaggcctatttctgcttgctttggccttctgaatcgtgttccttatataggaatgaaaggtgtgcctccaattgggaaaaaatcta

SEQ ID NO: 248472 - DNA, 768 bp, Cannabis indica
attatattcatattttattagttgccgaaaacctcggtcaacaagaatcaacttgttaaactcatcaatctgttctccaatagatttttcatccaacatcttgaacgaatatagggcatgtttcagatataatctattcaccaataatttagtcatatatagactttcaagctttagccaaatagttgcggtcggggcttcttttgcaaccttcctcagaatcttatcactaagattcaatatgatcgcaatatgagcctttgcaagaatttctttcttgttctttttagacatagaatcaagaagagatttttctccaagcagagcctcatacaatctttggagaaccaataaagtcttcatcttcattctccgtaatccaaagtcagtcgtaccagtaaattttctaacatcgtattttgctgtaaccatgattacgaaccaagctctgatactagtttaatgtgaaataacaatcaacgacttacgatgtaattatactggactaataaatacacaatcaagaacaataatcaaaagaatcacaaagaaccaggtaatgaattaaagtagtaaaacatataagaaatataacatcaggtttaacgagtttgagccttgtgcaatgctttacgtcttggtcggaataataacagtaatatcttattgatatcagtatcttcaaaggttaaaagtaatcctttaaaactattacagagattacaagatgaactttctcactaatttaaactttctctctctctctct

SEQ ID NO: 248473 - DNA, 1024 bp, Cannabis indica
tgccgtggttaggtgtttccctatttccagagttacagtaacctctagaaagtatagcagaaccaagggttgtagatttgggtttcgtgggattagggttttgatcttgtaacttacccggtttcataatgtgattagggcatgcatctagcgcgaggttttccgttcaggtcggccagcacacttgaattcaaagagaaggtaagaactgtgtataatgtgtgatatcaatgtttcagtgtatgtataggttatgtgcatatgcatgcttaaagtattaattgcactaccaacacttgtacaattaaggtatagagtgcataggtatagtgaatgttatttgagagtacaatatagtgataccagcacaagtacgggtgaatactgagtgtgtgtggtatatcactcagtggtactcagggtatgaaacaaaccctaccaacactcgtacgatgaggtacttagtgtatgtggtataattgcaataccctagtatggtagttcttactcatctgttgagtgttgtaaataggtgtatgggtgcctaaatgcaagtcaaaagttatatgatatgttatacgcttttcttactaagtctgtcaactcacagttttgcttcaatgtgtaggtaaaggaaaggcaaaagctgaacatgagtgaatctgagctggatgaggttgtacatgtcaaagcagcgcgacctggagtgttcagtctcgggacatctagggttgtatgttttagtcgctgtgcgacgtggatattatgtattttgaagtattatatttaaaaagtttaaaacgcgatcccgcaacttgtaaataattttataaattgtaaagtttaataattgatataaaagttttaatttgacacgtttttcaagaaaattctttgattagcaaagacaccattgtaattgaaaaagcactgtagcatgccttagcattaggacgttacaattttggtatcagagctgcctggtttgtctaccgaagcttgctaagacatgtacaatcttcat

SEQ ID NO: 248474 - DNA, 911 bp, Cannabis indica
acgggcaaatgcatctgttgtggcattctgttctctggggatctgccttattgtatagcctttgagccaacttagaaagtcttggatattgctcaaataggctatcattctttcacctcgagttgtatattcacccaggacttgatttacctatatatgtttaggtggtcagtctgtactttgtgcaccagcttgagcctagcgatcaaggcttcaaatttagcctaattgttagaggctttgaagccaaacatgatttccccgtgcaactgttaaccccaggtgtaataagggcaatgcttgcaccagaaagctggtcagtgcagcttccattcaacatgcaattttcatgttgattcttcaagttcttgctctcgcttcttctctagttcttgcttttctcctaaatcttgagagatttcaagagatattcttgtacattcaaccacaaagttggcaagggcttgaccttttatggccactctcagttgatatgtgatatctaatggtccaagttcaatggcccacttgagtagtcggcctgatgctttaggtttttgcaaaacctgccccaatggctggtaggtgtacacccttacttttttttagtaaatcagtgtaatgcattacctcaacaatttttttacaacctattagcatcttcaaagagaagatctatttctatgtgtgagaagaattcaaatcacaattttacatcccaatattacatgattcccctctatttcccatttgctattgttgtacaatctctaaaaaccattgattgtcatatgtagatacatttttaggccaaacataaatgaatctactctttacttcttccttgatactcctagccacctcatttactctcggttccttggattcccaaagcagcaggttcctctatt

SEQ ID NO: 248475 - DNA, 1336 bp, Cannabis indica
taggtcatacattacacaattaactaatgtttgtcactactatttactatttaatatcatttggtaactggttaattcctcttgatgatggcaagttatacaccctaggggtatgaaaaatgatctttaccaattttattatgatgcagcaaagtgcactatgaatggcaagtttttatgagccttactcctggaagtgaaaggtgtcagcaaagtttcactatgaactgcaacgttttaaactgaatcatacattgcaatgtaaaatgtaataaaagaaaaagaaaatgtgggtgaatataatccaatctcacttctgagatgtgttgaatataggccaatctcacttctaggcatagttgttttaccaaatgaccatagtttgagaatattgaacctctataattctcaatctcaagacggtgcaagtttgtatggggtttaagtgcatcaagtatatctaattcttgttactaacaatgagcctcaacagcattactgacacagcttttcataaccatgaagtacaaataaggtagctcctctatttcagtaaaagataagtccaaatatcttaatatgtcactatcatcattaaaattgccacttttacttgagatatgaatcgagaagaatgttatataattactggcaagattatgatgatgtagatatagatcttaaatggttagtcttaatactctcccacatgggttacaagctgcaatagcagcacactaatgacttataaagctctaggcctttgaccatacaaatcatacctttctcggccttttggctaagatcaagtgtagtatctgttcttatcagtttaatatctgatatgtgggccaatggctcacacgatattaaattaattttttaagggaaagagtccaccacaatagcttgctattagggctcttaagtgtcgcctatgtattgcactactacatgggcttggcgcacccctctaactttagtttaaactttgttttttgattagtggattctttgctacaccatacactgattaattccacattctaatccaataatttgatataattgcctttttatcaactttttctaatccaaatttgaagtccatgagttccaaggtgtagttattctatgatatgaacttgaataggaattcaaacatggtcttctactactattttatgctcataactaacatagcagctataaaattattcttgtttgagctttaaaaaatttcagttctagaaatgattttaaatatatcaccaagtttgctttttataactctgtctctggcacaaccactaatgatttggatgaaacttgagat

SEQ ID NO: 248476 - DNA, 1543 bp, Cannabis indica
tcaaatcattgaatctaaaaattttctaaatattttcttacttttgtattttaagattctcaaccaatcaaaaattcattttttaaaaactcaaaaacattaattcacactacaaccaatcagattttttaaaataattttttacatataaaattcaaatttttatttctaaatcacattttttaaaaacataatttttcaatcacaaaccaatcaaagtttcttaatatggtatattagagccaaaagtctaaaaacaatataaattaaaattgtattgacaacaaaattaaaggcacgaaagtttctaggaagctattccaaaatgcctagtttgtcttcttatatgaatattctacttataatactaaatctcaccatatatatccaaacaacaatcatctattctatccaacaaaaacaccatttacaatataatcaaaccaaaagaacacaaacatggtgagtggtcaactttgccatgagctagaaatcaaggcaccagccagccaagtttgggagctctatggtactcttcgtctagtaaagctcatcgaggaacaactcaaatctgttattgaaaaaattcaagtagttgaaggcgacggcggtgttggaacaattctccacctagattttgtccctggtatgtactctactcatcatcataaaataaattcacgtcagttgtttctgtgaccatacaagattattttgttaataaaaaaattcataaagactagtgaacaaagtaaaaaaaaaatattaagtatagattgtatatgcttaaggataggaaaggaaacaaactggagataaatttattagatagattgacatgtaattaatgaagttttcttcttgattaaacaaaaattcataaagattatttttacaaaacaaccaaatattcctaatcatcaggtgcggcgaagttcaagagtttcaaggagaagttcacgaagatagacaacgagcagcgagtgaaggaagtggaagtggtggaaggaggattccttgagttgggcttcacactttatcgagttcgactcgagatcatcgagaaagatgaaggttgttccttaattaagtccaccattgaatatgaagtgaaggatgattatgctgaaaatgtttcccttgtgtctcttgacatcctctcagccgttggccttatggcacaaaaacatcttaacacctaaaacaaggtattacacattctatatatcacctcaaagtctgaaaccaccttttctttttgttatgttacaatatttttatataagttttatcatgtatggatttgcaaacattagaatcgaatcgtgttcattcagtttctgtttttttaatatatctctttatctctttatagatataataaagaattaatgtttgttagtgactcttcctttccacctccttacataaaaaattatgattgaggcaggtggcaattattgttgactcttttgttttgtatctttaatgacatattatttatcttttgtgtgcatctcttttattgagtgcaattctattt

SEQ ID NO: 248477 - DNA, 866 bp, Cannabis indica
gtctcaaccctttacttcattttgtcattaactataactgactgttaagtagggtcggccctgaaaatatataagcctaagggtcatgagattcgaacccgtgacattgtataatatgtcatacaccctaactaactaagctatgaatatttgttgtttacaatacatttaattttacttaaataaaagcttaatagagatttttaattgttaattttgggccccagaaaaatatgggccctaggtacggacctaacctatctatacattgggtcggccctgtcgttaaggatggttatgttagttaataataggataaatgcagattaatgagtttgcttataattgttccttccatgttttctatcttcttttatataaaaatttttctgcattttttatatacaaaatagtgcattgcactcctacttgtttcaatattatacagttggagattcttgtaattacattatacactgtcatttaaataagaatattgttacaactaattcatgtattgaaaatactaaaactacatattgattgtgaacatggtaaagagatagattttgacattgtttgtacaaggagtgttttcttattacttcaaggttttaatcttcacagccccaaatattttctatgagagaaatgaaagccaaaatgatgaaatggagcttccattattctacataaatacaattaggactgccactaataatttttcagatgataataagttgggccagggtggttttggacctgtatacaaagtaagattctctctcatttacctatttcagaacattctttttctttttttttacctaattatggatattgtcattgtgatgtaatagggtacc

SEQ ID NO: 248478 - DNA, 593 bp, Cannabis indica
ataactagttttaagcttcacataaattgttatcaaagaagtaagtctcgtgacctagataaatggttagctttcatagttaacaagaaagtgaaggaaataagtcttcgcgtgaacaagaagaagacttacaggggtgatattcactactactccttgcctaaaactctagctgtcaaagcaagatatttgactaaattgaaattgaattcggtggagttggattctcgttactcgtttagctttccatctttgaaaacattgaaattagcttgtgttaggcttgtagataatgatgtagtagataagctattgatgggttccccttcccttgagaagttgcagttgcgtttttattgtcaatctagtgatcctcagctccgcatcaacttacaacatagtttaagcctcaagagtttgcgtattacactcagtgtggatttggtggagaaaatcaatgtcataaatcttgaatctttgagcctaatgtgtgttgactttgccaagatacgagtctctgcatgcaaggcaatagaatctcacttaagtgttatccgggtatggagattgtcatcattaaaatatcacacttt

SEQ ID NO: 248479 - DNA, 656 bp, Cannabis indica
gcttctagagcttggtttgacaaactacaacacaatctctcttgtctcttggttttgtttcatcaaattcggatcagtccctgtttattcttcactgcaaaacctctgttaccttggttctggtatatgtagatgatattattataataggaagtgatgatgctgctgttactgatctcatttccacactcaactcttagtttgctctcaaagacatgggtcccatgcattatttcttgggcattgaagttcaatgtacggaccaaggacttcatctatgtcaagcaaaatatgctcgagatcatctgctcaaagctcaaatggtggatgcaaagccctctccaacaccaatggtcagtacaatccgtttatcagcctatgagggggaacctatggcagatgtccaacactatcgttaaatagtgggggctctacagtacctcaccattacaaggcctgaactctcatttagtgtcaatcgtgtctgccaattcatgcaaaagccattaaccacaaattggttggctgttaaacggattcttaggtacatcagcggcaccacaaactttggtcttcacctaaaaagacccaagtccttctatcttgtggccttctgtgatgccgattgggcatccgaccctgatgaccgacgttca

SEQ ID NO: 248480 - DNA, 641 bp, Cannabis indica
tgtaatgtaatttgtaaatatgagctcacccttggaagcaaagagcaaatagatgttcccatagcctgcatcacatcaactgctgagcagatagcaaccttcaaagaatcaatatctgcctgcaaaaataagaagtgtacaatgatatcagtaattattacccgaacagaccaaatcaggtgacttcatttaaactaacataccctagctacaccggtaactggaagacggagagtgcttgcttccaaatcttccacagccccagataaagaggtcatgtgttctctttcaagcaaagcccaatcatcaaggtagggcatctgaatcatcatcaggtaaacaagagattagaaatggtatcacaatgacatgtaaaggtaaacttttgggttcagatgtgtatagactgaagaaaggaaaggaaaataaaacaaagagactaaaactgaaaaggtgcccaaaaattgtgcgtatatgacattactttctaaatcatttgcttatttcaccaggatgaataaacgtggatacaaccgaattcccagaccagcctcctaaaagcatacaattatttccttttttcaactgaaattctcttgactagaaaatgtgcccatatcatgaagaaaattaataaagtt

SEQ ID NO: 248481 - DNA, 699 bp, Cannabis indica
gtaaaatatttccaacaatagcttcttccactatggcaggagaattcgtagcatgttatgagacatcaaatcagggaatatggctgagaaattttgtcgctaagctgcgtattttggagaatgtagaaagaccacacaagatattttatgacaataaattagtagtattgtattctaataacaatagaagttcatccaaatcaaagcatattgacataaagttcctaggtgtgaaagaaatagtacagagtggacagatatccatagagcacattggaacaaactccatgatagtagatctgctcacaaaaggattaccacccaaggtctttcattggcacactactcatatgggtgtagtattgcttgaggatatcatgattcagtgggagtttgcattttgtttgctttatgtttatttaagacattaatgtatttgcttattttttgatcatatataaaattttaagttcattcactctgttttgttaagtttaagtctgacctcacttatgattaaggaggaccaactggaaatgggcatgttcggttcacattgcatgtaatttctatgctaaacatccatgattgatgtcatttggtatatttgtatatgtgaccattgatgggtttagtcatgattgatatgatgaaaactgctttgatcctatatggatatagttgatggacgagattgtt

SEQ ID NO: 248482 - DNA, 1262 bp, Cannabis indica
caattctacaaagtcagaatttccataactattctaattcacaaaattcttatataaaaccaatcgtttttagcttaaaatgtaattaaaccatatcttaagctttcccttttcaaggatttgttatcccgctattgccagagcttagatcgctaggttttgggttgaaaatcgaagaaaatagatataggaggagaaatttttgacgaaggaaggagaacgagggtttcgtccgttctttctttactgtgttatatgttacttaatatatatagggtaatactatagtggggcgtgtcctttttaccctaccgatgaggaaggtttttcaaccaatcatgatggatcatacgttaggatatatattaatcctatgaatgttagcatattagatcattttgttaaatatttttatattatttaattttttttctcaaattgttttaactattatatactgtatattatattcaacactatttattcaaaacttttctcttataaataataaaataataaataataatgaataagtttttaatacatatacttctttataaataagtgtttcagtagactacttcaacatttaaaagtcttttaatctattttttttttataattgtgtatattataattatttaagacttcttaaaacattttaaattttttgagtaatttacaatgccaaaaataaaatttatatattttattatgtccacactattcatttttttttttttttatgaaaatttcaatacattttttaaatcaaaattttaatactttattcatacttatgttacagtattgttcattcatgtaaaagtgcacggtatttttttttttatttatttgcaataagacgtaatttatagttacatgcaaaaatttcatgttataattaaaatattttaagaatgaataccccaacaagaatattttaaataaaattaacatgaattttaagaataaatatcgtcagaaaagttatcgaaacagctatcatcaccagaaaaatcgctggagcagccatcgtcgcaaaaatagtcacggagcaaccatcgtcgccaaaaaaattactataatttattaccgtcgccgaaaaagtcaccggaattttcatacgtgtcagaaaaattgtcaacggagttagatgctagagttagacattgaaatatgacacaaagaaaccaattacgtttatcaactagttaaaaatctaagacaaaaaaacggattgagtaaagcaactaaaaaaa

SEQ ID NO: 248483 - DNA, 1522 bp, Cannabis indica
cgtatatatacctaacttttttgaggaaacaggcttgtatatatatactagacttagtaatcaattaaaaaaaaatagcattttctatttattttctttatttatagtaatgacattgattattgaataaattaaaacaattacgatttatacttttattattattattattatagtgttgtctacctaataaaataattatgatcatatatttcaaactatttcgttctttgatttacgagtatattggatttacactgacatgataataagtgatatggtttgcttatacttatataagtagaatgtcttttcctgaacattagcaaagtaaacttgtatccaatgtattagttatacatcaaactggactcatattgaccgtagaaaatatattagaaacttatcgttatatcttttctaagtcaattttactattagttgatcttagatcaattaatctcaatcctcagatggttaaactttagcctattgtagtatttgagatctctgatttgttcattattaggttacccgtcggactagcccatacttacatcttggagactcggtaatgcatttgagtgggagctttcatcatagatataaaatttatagcttctataactatttagaagtaaaacgatggttttcttagaaattaactaaacgagataaatggaagaattattatttaggtaattatattagtttactgaaatatcatttataaggagctaagtgttttaagaataaaatacatcgataggtaaaacggtaaatttatccctactcgatgtaaattgtctatagatgatcattggttatttaaattgaaacaatagataattcatagcgtatttatactgaatatataaagcgctctatgtaattaagagtgcacttctaaatctatgctggagttaggaggaattaatatagaaaatttatttagtaaatttcatatctacttattaggagcttgatttcgtaggcccatggtctccacattatctggaataatatcttcttgaagactcaattcattaattaataagtcaattagaatttaaaaaaaaatagactaccttatttgagaattttcactaaggttggaccaatttgaaaaaaaaaaaagagaaataatggtttatttgttaattaagacactttgtgggtctaattaataaatatatttaatttatattattgtttgataattattattaaaaattaatatttaaataattagatttaataagtgttaataaattaaagaaatgcagtttgtttcatttaagctaaattggaaaaaaaatggaaaaaaaattaaagtcatggttcattcctctaaagtttcagtcatggtatttaattgaacccaattgtctttattttagcccatatcatttatagttaaccccggtgtaatgttatataaggaaagagatgagacacttttggaagacaactcattctatgtgatactagcctaaacttgataagaaaaagctctctctat

SEQ ID NO: 248484 - DNA, 746 bp, Cannabis indica
ccggggttcaggttcgggtcgaggtttgggttcggggtcggggttcaggtttgggtgggtctgaggcggggttagggtcggggttggggtccaatttccaaggtttaaattggggtcggagtaaggatgcacacggggcagagaattgacagagagtgcttcccccgtctccattcccattaaggattttaatccccatccccacatattttttatcggtgatggggcggggaatcccctaatggggcggggacggggacggaacagagaatctcctaataaaaaaataaagtttataataaaaatttaaatatataaatatattaaactacataaaaaattttaatattacatattaattattattcaatgaactaattattatccaaaacataacttaaaattcatacaaataatactaatataataaaaaatgcaaacatacattataaattataaaatattactagacatataaaataaaatactaaatgggtcccatcgaggcgcagtgtgtgggcggggtatgttatccccgtccctgacatgtttaacattcgaggacaaaaagtaatctccgtccctatcctgttccccatttagacggagaatccctgccgtattaggagcgggttcttgcggggctcgtccatgtgaggaaaatgtgcatccataggagtctaaaatattgattaagaagaaaaatctgtttaaaaattttacaagtaatttttttttgttttaaa

SEQ ID NO: 248485 - DNA, 621 bp, Cannabis indica
cctttctatgcttcatcactattgtattttattttgtaaatccatcgacatcctatagctcttttgttggcaggaagagggacaatggtccaatttttattatctaaaagagcttttagttcacattgcatggcttgcaaccaagctattgtttgtatggcctcataatatgtcctcggttctttgactgaagagactgcaaaaataaaagctttgtgagagtctgataaatttgaataagagataaatttttcaatattataaggtctagaagagttgtcttgtatgagtgagtaacactcaaaatctcttaggtagcttggtggtttggactgtcgatttgatcttcttgggccttcttgagatggttgtttagggggagcttcaggtgcttctggtgtatctgagtttgttgtttcttgctgtatatgttcattgttaacatcagcattgttttctggattcggtgtgcttatgacaacactattgcctgcaggatattctgaaacatgtgtgttagaaatcatagaatttggaataataatttggataaaggggtctatgttggtatcctcagtgttaagtttttcgaaaggatgaaaaatcctttcatggaaaaca

SEQ ID NO: 248486 - DNA, 535 bp, Cannabis indica
atttatttttcgaaaaatccgtgtgcttggtgatattacactcttgactaatttcaatttttgttttagaagagcatggaatcatattaagtaattttctaataattgaagtggtttatgtatgctaattgtgaaatgtggaaaattatttgaaaaattcttgaacttgcttgattgctatttgagacgaaataataaataatgcatgactgggaaagtgatttatgcattttttggatcgattgtgcctttcaagtcatccctgtaattttatcctagttactttttttgagccttaacctattctttgtttctatacattctaagcctagaaaagataaacacatgaatatccaaaatttaacccatattgtaccataagtagatatttagtttgtgagaatttagatggaaagtttattgtgtgtgtgggaataagtgtgaaaattgagagaatataaaaaaaattgattggcaacaacttgaagaaaaaaaaaaagaaaaaaaaaatctaacaaccagtgtcaaattcaga

SEQ ID NO: 248487 - DNA, 807 bp, Cannabis indica
tcctgctcaagatcagagaaccagtactaatcgccatctcaacgatgatgtatccagccctttcttcttaagctcaggtgaccatcctggtcttgtccttgtttccacagtcctaaacggcactaattaccaatcttggaaacgtggaatctcaatggctttagctgcgaagaacaagcttccattcatcgatggctccctcccacgacccgacactggtaaaaatcttctaaactcttggcttcgctgcaataatatggtcatgtcttggttagtcaactcggtttcatctgaaatagctcaaagtatcatgtactttgatcttgctgtcgatatgtggcacgatcttgttgagcaattcaatgagggcaatggccctcgaatcttccaattacaaacccaagttaccaggttgcaacaaggtgacaaatctgtcacttcctacttcacaaaactcaaatccctatgggatgagttgaaggaatttcaacctaataccccttgcacttgtggtgcaatgaaacactttcttgaccattacaatcaaaaccaagtccttcaattcttgaatggtttgaatgagtcatatgcatctgttcgtgcacaaatcttgctcaatgagcctataccgaatctatctcgggtttttgctatgatcgtccaagaagaaaggcaacggtctcttggttctcatgacaacccaccgtttgctgcatctgtcaaaacaccagcagccaatcctccaagaaacaagaagccacggccctcttgttccaattgtgggaaacctgggcatttagttgataa

SEQ ID NO: 248488 - DNA, 2059 bp, Cannabis indica
agtacaactaactaaaaaacgtactataacttatccttcacgccttatataacacacttgagaggtgttccaatccagcatcaattttatagagaaattaacttgtaatttagttattcacagcattagaatatatcaagtatgagttcaggtccacactgagttattttcaatggatcaaatgaagatatttatagtaggtacgaagatgctgtaagcaaaaaccctacttctgatgcgcccataaaaataattcgttatgaatctttcatagaagctttttctgctttatgtctacatggagagacgggacaatgcttcactgggcagcaagtgagggaactttactgtgttaatgagtttccctgcatgtgggattctgatgatgataatgatgaagaggctatccttaattctctttgctcattgtttgatgagggtgaatgctctggggcaaataaatcacccgaacaggataatgtgaatgattcgactgacaaaggtaaggactgaaatggagatgatatagaagttgggaacaaaggatgagtggatccttttcccaaaaacagtaaatgatgcactgtgttagtgtccaagttatgttattttatattttcaagctataatgtattatgagtatttgttatgaaatctgtaatttggtttattttggagtattaatgtcactttcctcatctattaattgtggaattaaaagtgaagtgaataattgtgatatcacaactaaaatgaaaaagaaaatagacttcaaataatataatagagacctttacatacaactaatagttaaacaatggaggtaagtgcttcaatctcattaaatggcctaacaaaaagttgattcaacggccatatgagatgagttgtaaaataagtacactatatatataaaataccacgattgaaactgaacggatgttcaatcaagttctataacttgagggaacttccgttgagaaggagggctattgtctctcaacggggacttcggtcgtgaaggactttctcttggagtagtgtttggtgattcttgttttggatgaagtgggtagtggggtatggagacctcggtgtagttgagaatgtcatccatgatatgttccaatttttctcttgaagtgttggcttcttgtatggcatgggctgaatggtagaggtgttttgccagtttgtatgactcctgcttagccaccgtggcttttaaatgtgccttccttataagtttttcgtgtttgtggagaacaccctcgagcctagcatagttaggacatcatgaaattaaagctgaacggagtctaggactccttgaaggtgtacctacgggtcttgtggaagaaaaaggatgaggtggggacttttgaggacttgtttcaaaagggttgaagttttggtaagggtccatttgatttaggtaatagtaaaacagggtttgaaaaaaaatgctttgtttcaaaaacctaacctttacttatatagtggttgggtgggttgatgtacacgtgatgaggttcatgtacacgtaatggattttttttttcccaatttaaccatttaatagttaataaatttttacaatggtaatatatccaattactacaatatgaaaaatcccaatttaactatttattagttaaccaattttaatagaaggagaaggtcaatcaaatcccacaaacaaaatctaagcaatatcagaaaagtactatgtgatgtgacatttttatattaaaaacaaataaatgtacggttttatgatttaaataataatttccacatttaaagtaaaaataaaatgctttaaagtattagtacacatggaagacataatgaataaagtcaattgagttgatacggccgtataaaaatgtcacatcacgtgatatgacatccactcatttcagtagttaataatttaataaaatttgacataatattcgttgttggtaatacaatcatagttaattaacttagttttgttaatttttttgggtaatgctatcatattaattcttacctaattgatttgtccaatttt

SEQ ID NO: 248489 - DNA, 725 bp, Cannabis indica
aaaaaaaaaagaaaaaaacaaaacaaaactgaaaccgaccttacagtctagttagtttgatggtcaatttcagttttttggtgagaataaggtggatcccataaatttttaatagatcatatcaaggaattattacatgaaaaaaaccctaatatcaatacttttgtgaacttgagtttcacatgcctttctatcccaaccttcccaaaatctttaggcaactcaatagtcaaaacaaacacccctaaatgtgagataaaataaagaataatttttttgtgattttaaaggataaaaggaaaggatccaaatataacttggaattatctttgtgataacattgtgatatttatctagataaggaattgttggatagaatcccatgaattgatttggcatatatgcaattgagagtggtcataataaagtagataaagacttggaatggtatctgataccaccataaaatattgtctgtgtgtgattgatttgaagtctatttcatggagaattattgaaaaaggaattataatataagacttattactttgagactcaatttattttatcaaagaagtatatgtatatataatatatatatatagtgttatgtaattcattgcttaaaaccaatgatctgatatcttttatatatatatacacaaaaattaacacatgatctttttcctttgctaatgtaatatcgaccaaagcatcaaagtaaa

SEQ ID NO: 248490 - DNA, 861 bp, Cannabis indica
agctcaaatagcagctaataagctttttgaaggcgaaccaggatcaattcgcctggagccatgggtatatgataggaatcgaccctaatattatctgccatcacttaaatgttgatccaaactaccgagcgaaaagacagaaagggaggcccttggatttcgagaggcaaggggcactaaaacagaaagttgacaagttgttagtcaacgactttatatgcgaggtgttttatccctcgtggatagccaatcctgttctcatctcgaacctaaggaaacttggagaacttgtattgacttctctgatctgaataaggcgtgtccaaaagactgtttcccacttcccaggatcgaccagttagttgatgcaattgttgggcataagcgtatgtcatttatggacgcatattctagatataattaactagataaaaatgcatgtcccagatcaagaacatacaagcttcgtaacaaacatgggactctattgttataaagtcatgccgttcagactgaagaatgctggggtaacgtatcaccaattggtaaacgaaatgttaacaaactaaataaggcaaaacatggaggtttacgtcaatgatatgtttgtaatatcgataaaaagtaaggatcatacctcagaccttgcgaaatgctttaagatattgaagaagtataacatgaagataaacccgaaaaatgttcctttggagtttcctcgagaaagtttttgggattcatagttaatgcgaggggtaatgaggaaaatcctaaaaaaatcaaggcattaatagacatgccatcactaacaaagcctaaggtagtacaagccctgaaagaaaggatggttgcacttaacag

SEQ ID NO: 248491 - DNA, 740 bp, Cannabis indica
acatatgtaaatcacatccaacaacaattatattaaattcttatccaaaatatactttactctatatttaatttacaataataattacctcgaattgtattattctttcttcgtgcatttgccttcttgtggaaaaatttggtattccgatcaccagcctgtaaccattggacccttgccctttgctgccagaagacctcctcctttaacagcagatcattgagtttattctccaattgcctagatctttcgctggaacatcctttactttgcaaattgtgcatttgaactacttttttctgcgtatcttaaatttctcgaaataaagatccatacttattgtgatgccaagtatccaggtttgaagcacattgttgtatattcttgatagttgaaatcagtggtgtattttcctcagacctccaacaattcttaattagactcttgcattcttcgtcaccaatccagatattctcaaatctgaatcttttcctcttgttggaacctttctgctgatccgtatcatcctttatttttaccaacagtgctctgtgatcagaatgataataatctagatgcgtcaagcttgtataagagaaagaatcctcccatgcttcattcaccattgcccaatctaatctctccttgatactttcattgtctgcactttttgcccaagtatatctctctcctttataatgcaatgggtgtagtgcgcacaattctaaagtactacgaaa

SEQ ID NO: 248492 - DNA, 732 bp, Cannabis indica
atcctcctatttcaaataatcacgacatgtggaaaaatacacataactgcctggtaaccgtcatttggttttatttaattgacggttattatactgggaagccttccttcattgtgatgctcgcaatttcttcatgtgggcttcttaagttcatctcgtgttatatgtgctttatgtggtgacttatctagccctcatatatcctgtattttttttgtaatgggcatgttatgtactcagttatctccgagatggttgcaatatgtgctattttgatttcactagttttctatttaacaattaatatttttgactcatgtttaattattttataaggtaagacttaaatataaaatcgttagtagtaatttctcgaggcatattaatggtatatgaatccctttaatatgtgagcctattcacttatgctattttgtacacatgtcgtggtcatattttattattcaaaatataatcataacaatttcaatatatcatattgtcataagttgggcacacctataataatattcatacttaaaaatgtagtgtactcaaatatattaatacatattaaaaaaaatactactttaatttggcacgataaaatgggcacgacatgtcgtgtcaataacaatcttaggaatgaaaatttgagttttttatagagtaatttgcggcgtaaatacctaagttttatgccgggtagcagataaatacctaagtcgcatt

SEQ ID NO: 248493 - DNA, 734 bp, Cannabis indica
gtgataacaataatcttatgagatattatcaccaaaataattatggactgtatgtgcatgagcgagagacatattcataatgcactctttttcacttagctcaggttttgtcccactagattttttgacaagatttttaacgaggcatcttgcaaatagttatgaatatgaaatatacatataaatattgcactctttttttcttagctcaggttttgtcccaatgggttatcctgacaagatttctaacgaggcaactttaaatcatactaacatacttgcactttatgaagcaagtagaaaatgtgttggaatgacatcattgacatagcatattcgggaaatatatggattgtactttgtaacacaatatcgacatttgcaattctctatgaagatgatacgaaatgcattactcaactaaagctataatgaagaagatagagccaaagatatttttaccaaattcttcttaactcatgatcttaaggagaatgactatattggtgtccaacgttaacatattcaatcaagtatcaatcatgcatacttattcacaaagttattatcagcatcaacatttgagaagaggatatataagatagaaattcatctattagaagatctcaacgaatgcctaaatgagagaaagttaatttatacagcactttttttcttttgacaaagttttttagcaagatttttaatgagacagtttttatggacatccaagg

SEQ ID NO: 248494 - DNA, 600 bp, Cannabis indica
cttctattggcagtaaagaaaaaaggatttcccagatacttttccttcgtattcagcttcggcatgcctataatctccatcaatagattctttgtgtttgcctttgtgtttggggagaaaaccacaccacttttttccttgttaatcttttgacccgaccaatcttcatattgtttcagaatactcatcagggagcttgcatttttctctattgcttggcagaagtaaatagcatcatctgcataaaacagatgggatataggagtagcatttctcgagattttaatcccatcaatattctgatccttctctgcctttgaaatcattttcgtcaagacctcacttgaaaggatgaataaaaagggtgatagaggatccccttgtctcagcccttgattaggattgaagggagcaaggggtgcaccattaaggagaatcgagaaacttacagaactaacacaagacatgattagtgatatcaccttgctactaaatccgttggcttgtaggaccttgtggataaacttccactcaagtctatcgtaagctttactcaaatccgtcttgattgccataacacctcttttacccttcttgttc

SEQ ID NO: 248495 - DNA, 2741 bp, Cannabis indica
ccattttacaaattatgtatagttttagattaggataccaattttaatccctaatatgcatataatttcaaatttcccttctaaaatttagtaaacaattgtatggaaatcaataccataccattcattcccattctctttaagtaaacatgccataagtgtataaaatcaaaacaaaatggataaaacagattttgccactaataaccctataaagttttgttatattgaaactttagccaatcaatccacaacctattcaatacccaaaacagaaacattgtaaatagcaataaaaaaaatattgctagttattatgagaaaatttgatgcaattcctgcccaaaattttaaaattataaacaccaaaaaaaaaggtaatcttccatgtgtttctctcaacaaggagccggaatctaattttgttattcacctaattatagctaaacttgatcaaaagaaggaagcttaatagtgtactccccagttttttagatacaacaaaacgtcctagaagcaatttcaatgtttaaaatttttagtttggaaaacgctcactttttgacctcttcgaagtctgcctcgggggtctgttcgccaccctgtgaaccacccgatgaagaagcaccaccagcaccaccggacatgtgctgtccgatcttcgatacagctttgtttgcagcatcgagctttgccttaatttcatcagcattgtcctctcccattgccttccttaaatcagcaacagcatcttcgatttctttagcaacttctgcaggaattttctctctgtactcttccaagctcttctcgatgctgtagatagtggtgtctgcactgtttctgatatcaataagagctttcctctcctggtccttttgggcgtgcaattcggcttctctgaccatcttctcaatctcgtcttctgataaccctccagatgagcggatagttatttgttgttccttgccggtggacttgtctttggccgagacagtcacgataccattggcatcaatgtcgaaagtgacttcaatctgaggcatgcctcttggtgctggaggaatacctacaagctcaaattcaccgagagacttgttatcggaagccatttcacgctcaccttgcaggaccttgataccaacctgggtctggttatcagctgcagttgaaaatacctgaaaaaatataggaaaggataatcagaggatgtaaattccacaatagtaaggaaaataattgacataactttatcgatgcacagaaattctgcttaaaaaattactctcagcctgaaaggcagtgactgtaaacaggtgaattaactctacaaaacgtaaccatgtaaaatgttaattgattttaagatatacctgactcttctttgtagggattgttgtgtttcggttgataagcctggtgaaaataccacccaatgtctcaattcccagcgaaagaggggttacatctaagagaagcaactccttaacatcaccacgaagaataccaccctgaatagcagctcccatagctacagcctcgtcaggatttactcctttactaggactctttccgaaaattgctgaaacaacctcttgcactttgggaacacgagtcattcctccgacaaggaggacctcatccacttccttaacagatatattggcatccttcaaacaatttttgcatggggcctttgtcctctctatcaagtcatttaccaggctttcaaatttggatctggttagcgtaatgttaagatgtttggcacctgaagcatcagctgtgataaatggtaaatttatctcggtttgagatgttgatgagagttcaatcttggccttctcagctgcctctcgaagtctttgcaatgcaagcctatctttcgagagatcaatactctctgttctcttgaattcactcactaggaagtccaacaaatggttatcgaagtcctctcctcccaagaacgtgtcaccatttgttgctttcacctagacaagaaagcaaagttatggaaacttaataaaacagaacaaaaagcattaactcaaaacatttgaagatgcccaaaattgaatacctcgaaaacaccattcgaaatctctaaaatggaaacatcaaatgttccacctccaagatcaaaaactgctataagaccttctttgttgttcattccataagaaagcgcagcagcagtgggctcgttaataatcctctgcacgtcaaggcctgcaattcttccagcatcctttgttgcttgtctctgggcatcattgaaataagctggaacagtaacaacagcttttgttacactctttcctaggtaagcctcagcagtctccttcattttggtaagaatgaaagctccaatttgactgggggaatactgctgtccattagcttctacccatgcatcaccatttggagccttaacaatcttgtaaggaaccatcttcatctccttttgtgtttgaggatcatcaaatcgtcttccgatcaaacgcttggtgccaaagacagtgttagtcggattggtcacagcctgacgttttgctggagtaccaacaagtagttctcctttttggttaaaagcaacaactgatggagtggttcgagctccttcagagttctcgataactttgggattctgtcaatattttcagctaatattagaaacagatcaaatcacataaaataattaaaacaagataagtctctaaataataccttcccctcca

SEQ ID NO: 248496 - DNA, 744 bp, Cannabis indica
tcaattacacccttgacaaactttaacttattttcattcagctcatgaaatcatagattgcaattaactaacaattagaccactttatgcatgccaattacaatcatcaatccactaaacccaaattccatacgcttgcaatacttactattctccactaatatagattatattgcacaaccaaaaatcaaaagatctttctaggcttgtactgttaggcttaggtaagagtagataaaatgatcatttaggcttgtctataccataagcttctccaatcatgtcacccaaaatatttgtcacacaatgcccaatatcctttttttctaattacatgagaaacatatttttctttcaataagtttgcaataattttatatttatcttttttttctagattttgacactcgttgtcaattttttttttctttcaggttgttgtcaatctaattttttttttcatattctcttaatttttacactttttccacgcacacagaacaaacttctcatccaaactaaagatctacttatggtataattagggttaaatttttggatattcagtggtttatcttttttaggctcaatatgtgtagaaaaataaagaataggttaaggctgaaaaatggtaactaggataaaattataaggatggtttgaaaggtacaatcgatccgaaaaatgcctaaatcactttcctagtcatgcataatttattatttcgcctcaaatagcaagcaa

SEQ ID NO: 248497 - DNA, 688 bp, Cannabis indica
ttaaattatttcacatgtaatctcatcatttgaaatataataaaagcaaaaataaattaattaaaaaaccaattttaaaactaacttataatctaagaatggcgtaagattcaacacatcattattttatatcttccaaaaatcaacaacctctctattaattcacttaggagtattctttacttttttttttatacaataataatatcttgtatgtttttgtgttgcaactcttgttagtttgatcatattattaagaaaaaaattataaattctttagtttttgttagataaataaatcaattcaatacaaaccaataacaaatcctatccaaattctattaaattgaaacaaatagaaaacaggaaaaaaaacaaaaaagcatacttctaaaaagaagtttaattagtgaatgacatgggtatataattaaactacacaatacttcaaaaaaaaaaaaaacgaataaggtttgtataaacaacgaatattgatgagtgctttaaggtccaacaaattaggttgatttaagaagatttccttagaaactacacataactgacggatcttcgacttagataactcaacctgcttctcaagttggctttgaacttcaagtatataaacacgaccgaaaagtcaacgacttaattctgcgtgactgcaagacaagacctcaaaagaaaa

SEQ ID NO: 248498 - DNA, 1085 bp, Cannabis indica
ttgtcatctaggccacttccaagcatcagatcaaaaattcgactctacatcttcttcgtattcatcaaaaatagggaaacaagtgatttcaaggaagaaacagctcatactagttgccagaacaagggaccagcgccaagggttacacctagtgctagcctagcgcccaggttgatattttgtagcctaagctgattctaaggagttttttgaaaaaggattcagggcatattctctgttttcagcaaagattaagattcaattatttttggggatcaaatggaatttccaggtggcctaaaattagactcagtgccaaggttgacagctggcattgggcccaacgcccaggttgacatattgccaacttgggccattttcaatgattttcttgaaaaattgtctcggacatatttttcgtaatcagaaataacgaagacacaaaaaactcgaggagaaaaccacaattccaaaggcatcaaaattgagctcagtgcccaagttgacaatcaacctggggtgttggtttcgatcactcaaatgccaattctactccaagcattctctccgaaatagttaaaaaatgggacaggagacctcgtccttaagttcaagaaccttggaaatgccaaaacaacatcctagaagctccgaaataagcacccatcgctcaagttaacaaatagcctagtgcgctgggttctacttatccgattctaattctgtcccgaccgatcatttagttttttacaataactaagaggcatgaagtcacaagattgaaattcgcaacttcatatttttacttttccgacaaggttatttacgcataaatcgggtagtttgagtctctcgtttctgcacaatagcaacatctctgagaatttgtgattaacttcaccgaaaactcaaaaatggactaactggtgtcaaaatatcacttagtgttgtcaatttcaatacgcaagtgcacgtatcgttgttcaagtaataaactcacacgagtgaggtcgaacctcagggaattgaactggataccactaaattagacttatgattctatttggcagataaataattttgat

SEQ ID NO: 248499 - DNA, 1066 bp, Cannabis indica
tcaaaaaaaaaaaaaaatctagactaaaatgacgtacaatacacatatacttagttatataattgcattataatttttaaatataatagataatgtgatatacactattgctggatgtctattggaaaacttgtttggcaaagcaattaataagtaaagataggcactagtgcaaataatttttttttggatactattatcttaaaaaaaaaaatggaaactattagtgttgatgatgttttttgtcaactaatttaagaagatcatataaaatagaggactacgttgattagacattaataaagtaaaactgtaaaaaatttacaagaatttatagtaattcacattcatgtcacgatgataacagagttatgtttattttatattttattaatttggtatgtcacactagaattatatgttgtgaagagtgtgtgaacaataatataaaaataaatattaagtgaaatctatgtcaaagcttatgaacgaaggtaactagactcctataggagactaacaatacataaactttgacaataatggcagtaatgaccaatattcttgggaactcgaaaatttgtattaaatttgtatcaactcagaaattcatttttaccacacaatgatcgatggggaaggtcaatcgacttctttatgggcatattagatttggatttgattgggtagggaaaataagagaaatgctaaaggacacagtggtgcctaacaccttcattatcgctattggttcaactaactattgggtcccaagtaatttaataaaatagtttttagggagtatcgctaaccaatcgcaacgtgatatgtcgagaaggtgctaggcaccactggtactttataacactgctccagctatttgaacaagcctctggtcagtgtgttaattactcaaagtctactatcttctttagtctcaacacttcttcggcttccaaacaagaaatgtgtaaccttctccgcatgaatgaagctccagagaatagtttgtatcttggttgtaaagcccgcttagttaatttggaaattagcagttatttatgtt

SEQ ID NO: 248500 - DNA, 679 bp, Cannabis indica
aatgagataaaaatagaaataatagataaaaaatatcttccatgtcatcaggttgtaggttaaaataaaaaatattaaatttaaaaatttaattaatagttataaatatcaaccattagatttgatccaatggctaataataaaatactcattcataggtaatacccattaagaatatacccatatatatatattaaagaatattgtttaatattttaatgtttacttgattaatttgtcttatatttaagtttttaatattaatttagactacaatacttttaatctttaaatatatactatacttctatttttttttttttcaaatctaattatttaagcactaaaaactaataataataataaaaaatatataataataaagatttgaccggttaaccggactaaaatgacaaaattattgggtggattatttttttattttttgattggactggatacgattagatctttgtaactcgacatttatattagattggtaaatatattataatctgaccaaaccgactaatgtacgcccctaattatttatagaaattttaagttatatatatatttatatatatatgaatattagtagaacaataaaaatcatatcaagtaattttaaacatatttttatgtataacttgaaaaaagggaaatttgcagcaaaagt

SEQ ID NO: 248501 - DNA, 1421 bp, Cannabis indica
acctttatggggtgtgcctgaaaattcggtcggagcttgcgaacggtggactaggcacaaagcaagtttctcaagaggggatatctagattctgcccctaataaccttttacttacatagtaaataggttgttggtgtttacccttttctcgcactatagctgcactaatcacatcttctgagatagccaaatagagaagtaacatctcgtaagttattggttttacaaaattggaggtgtcgctagatgcctttttatattctgaaagtcatcttcacactcttttgtccactcgaatttcttgttgcctcgggatacaatgaagaacgacaaacacttattagttgactttgaaatgtatctgttgagtgcaaccatccttcttgtcagggcttgtacttccttaggctttttcagtgatggcatgtctatcaatgccttgatttttttgggattcgcttcaatacccctcgctttgactatgaatcccaaaaattttcctaagaaaactccaaaggaacattttttcgggtttagcttcatgttatacttctttaatattttgaagcattccgcgaggtttggggtatgattcccactttttattgattttaccaacatatcattgacgtaagcctccatgttccgcccgatctagtttgccaacatctcgttcaccaattgctgatatgttgccatagcattcttcagcccaaacgacatgactttgtagcaatagagtcccatgttggttacgaagctcgtatgctcttgttctgggacatgcatttttatctggttatatccagaataagcatccataaatgacataaggtcgtgcccagcagttgcatccactaactggtcaaccccgggtagtggaaaataatctcttgggcacgccttattcaaatcagaaaaatcaatacaagttctccgagttctgttaggatttggaacgagaactggattggctatccacaagggataaaacacctcgcatataaagtcattgactaataacttgtccacttcttgttttagtgccctttgtctctcagaatccaggggtctccttttctgcctcttctctgggtagtttggatcaacatttaaatgatggcagataatgttagggtcgatccctatcatatctccatggctccaggcgaattgatcctggtttgcctttaagaaacttattagctgctattttagttgctcttccagattcttccaaatgtaaacacactttgtgggatttctttggtcgagaataacttctttcaattcttcaattggttttaataagtttctttaatcttgaacccggggtcaagatcctcatccttgtttccactttcttctaccaagatcgccattaaatgatgaccaactttcctatgttgtaactctatgc

SEQ ID NO: 248502 - DNA, 592 bp, Cannabis indica
tcttatagccacttgagataccccaagtgagtttgggagaatttggccatgaattttatcatcgggcttccactatcacatggtgtgacaaatatttttgtgggaattgattgtttcactaaatatgctcattttagagctttgctgactcactattcagcaagtaaagttgcatatctctttaccaatatggtgatttgagttaataggcaccacattgaagatgagctctgcttaccaccctcaatcggatgaggaaacagaggtcaccaatcattatttggagcaatacttaagggctttttagaagaatacccaaagtaatggagtaactttctgccgtgagcgcggaatatcactacaacaccagttatcattcaacgattggtatgaccctattccaagttgcttatggtcgcacctcacctaatattcgtacgtatacttgaggtatgaatactatccaagcattagaagatgatctcctcgcctatgatcaaattctgcaacatttgcacactaattaacaacatgcacacaaactgcatgtctcaacaaagccaaacaagaaaatgcaaagacattgactttg

SEQ ID NO: 248503 - DNA, 776 bp, Cannabis indica
ccccatcacttgaagaagaaggaaaaggagaagaaaggtttgattgttcttaattttttgagtacaatacttgtacttgtatatttccattagaattatgttatgcctttacttcttctaacgtagtggattccatagctaactctgaaaccactgccatctttaattaaggggagttgccaccctatgtggtagcgctgctttgattttcatagactttcttatttgccaaacccaaaaaaaagagagattgtctaacactttacacgattggagatgcaaatgttagttttgaaaataataatagtaaaaggatattggggcataattacttaaaggtttttttttttttggaagaagtaccaaagttttgtggtaaagtttgtaacatgtataaatttttatgaatgttatttttttctttttttttttttttttttgtagaaaagactattatattaatttccataagaggaggtggaagtttctccaatcaaatacatctcgaattcaccgtaagagcaaacttagccaacaagtgggcttcgttattagcagatctataaatatgagagatttgtgctcgtggaaaaattggataaacagaaaagtaaacaagtaaaaaagctgacagacatttagctgaagactttaatccattaacaatcaataatgagtcagtctcaattagatcaacagtcagacaatgagacaccagcaatttgagactccaagccacacgccaacgcttccatttcttcgaggtttcgatcgct

SEQ ID NO: 248504 - DNA, 582 bp, Cannabis indica
tgtgaccaatatcaccatgatattcacactttttgttcggatctccttttactccgtgagtaggttatgttgaactctagagcttcaactttttggtttatttgtccaggagcggcattgtatccagtttgtacagctccgaacctagaaaaactagctttggaactggctgcacagaagcactttgtccatatatcgtaggagtagtaaaagcagctggcagagggtaaattaatggagttgtcatctgtgaaggttaggcatttgttattttggtggaatgcattgcgagtactccatatgcttgagcatacgcatcttttagatttataaatccttgagctctaattaagaactcactcaatgtatcttcctttttgcgcagaagatctccccacactaaggatccagttataaatcctgatgttagagccgccattttcatgtcatcaatgactttggttgcagtagccacatccatcatgcattggataaatttcttcaagctttctccttgttgttgattgacgttggtcaaggtggtggcttccaaatcatagtccttggctgctataaactgct

SEQ ID NO: 248505 - DNA, 520 bp, Cannabis indica
cttaaatttgatatagccaaacaaaagtaaaaaattaattttaaagtacttgactacaatacttgtgggatcgacctcactttttgtgagtctattacttgtttacgatacgtatacttgtgtgtcaaaaatagcacaacagacttcttgggtgaagtctcttccataggctatggggtgcttctctcagcgaaatcccatcatggtgggtaggctcgagttgtctcaaatggcctgttaagcttttgtctcgcaacaggctccttccgtgttcatctctcgtgttgctattagtggatgacatggcatcacctttgccaatatatgtagttgagatcttgttccccactcggtggctttcgtgacgaaagtgtgaggcttagcctttgcgtttgagtatgccactcaacactttttgcataccaatcacaacagtttctaatctcttattcttccaacagaggttgcttatttctgcctcgtagcagtaagctcaagagcttgaactcactgagtatgc

SEQ ID NO: 248506 - DNA, 552 bp, Cannabis indica
atattctattacaactttctgccattgtcacatgttttgacgagtctcttgttcgtccacttgcctcggtcacaactcctgacatgcatgcgcctcctctgcctcctattaaagtttactcctggcatttgcctccacctctgcctcctccaccagatctaaccccaagtgatgatcttcccattgcattacgtaaaagtaaatgttaatgcaccaatcctatttcttcttttgtttattataatcatttttcatcttattcttgctcttttattgcttctcttaattctatctcgattcctaaaactgtgcaaatgagtattcacaattaaagtcaatccatatggaacaattgcttgattaaaggctcgtcttgttgctaagggttatgctcaaacctatggagtggactatcgtgatactttttctctcattgcttaactgacttatgttcggctgtttatttccatggccgctactcatcattggcctttacatcagcttgatattaaaaatgtctccttcatgaagatcttcaagaagaggtgtata

SEQ ID NO: 248507 - DNA, 1193 bp, Cannabis indica
atggcgtttcattcttttattcttcattccctctctccaggtatttctctatttctcaattataattttaatatatacttgtaaatatcattgtatttgattgattttgaaactttaccttttcatcttcttccaaaagagttcgatgaaaatcgtgaaaccctatttcgatggtgcaatatttattatttgttaaagaatgtaatattgcagttatggatattgatttgaggtactcgttttttgaatcgctgttaattctgtttatggattgtttagtttatagctttgcgtaaggtagggcatcttttgaaatggaggatcaggggcagcttaagcgtgcgatgatagacgccacggctggggcaattgcaggaggcatatcaaggattgttacctctccgcttgatgttattaaaatcagattccaggtttattttgattatgatcagaactcttatttaggcaaagtgttagactttcttgttatggaatttcgtattggtttagtgcttctgttattttgcgtgtgataatgttgtgcattttgttacattaggttcgttaattcaaatgcacaaatgggattttgccaatttaggttaattaaaatcttacatgggctttaggcaagtttgtttcgaagatagataatttgaaagactagggagcggaagttttgattgatgtgttccatatacatggaattttgtagtttactgaaatggacctttgttcctttatgcttataggttcaactggaacccacaacctcctgggtttagtccacagaaacttgtctggaccatcaaaatatacaggaatcttacaagcaacgaaggacattttcagagaagaaggattatcggtacatacataactaaccgtatgacattgactgctttcttgtagggctgaacatcaggcgggtttatcaggtttcgggttggcgggtttcgcgtttacgggtttcggattcaaaaaattgaaaccgaacccggacccgaatagggcacgagttggcgggttggcgggtcacgggttggcgggtttcggttggttgggtttagcgggttggcgggttgacccggtcaactcagtcaactcggtcaactctttaaaaaaattaatttttattcaaataattattttttttatttttttattttattaaattaagcatatataatata

SEQ ID NO: 248508 - DNA, 3751 bp, Cannabis indica
aacatacataataaatattagtttagtccaacctaattttcatgatctcataataaaattgttaaaaaattaaatttattcaatacgcattgagaatttattagcatttagaaagatgagaattcatattttaaatttaaagtattttttcattaatctcatgtgttaaatatatattaaatatataaaattataaatgtaatttaaaaatatataaatataattagatgactattggataatatttggattggtttggtcagttatccattagatcggatgacccacccaacaaccgatccgattcgattagattttcaaaatttacatctgattcgatccgatccaattatgattggatattcaattctattggatcggttgggattggatcggtcagttgtaattggattagataactttctgtacacccctaaatgcaggattgtcaatatttaatataaaatagttgttatatctaaatgttggagattgttagtttgtttttaatattttttaatttgataaaaatattttaatattttatttatttcagttggtctttgtgtaggaaaaatatcattgaatttattttaatattattataatatgttgtctttattgtattgtatatttttggtaagtattagggactcactgttcagagttagttaaaaattgttattggtagttacagggttgttggaaggttgttagttggctactctcgcttacttcctttcatctctctctgttctttgtatataaatatgatcctcttttgtactctgaacacttgaacaataacaatcaatgcaattgatttctttctctctctttctagtctttcagatcttctttctctttactctttctccttcttctttctatgtttctccattgttgtttctttggtgtttcagctatgagtagaaggattaacaatcctaatatggtatcaaagctcgatttccccctgaatgctaacatggcgactgtaggagctcaaaaccatgctaatccatcgaatctgggaaatacagcaaattcataccctgcttctcaaggaaatctcaatcgtgtgacagatgagttctctcctgtgtatttctctcataatcttttggttaaacttaatgatcacaacttcttactttgaaaatagcaggttcttgcagcaattcgtggaaatcgtttgctaaaatttgttcaggatgttgctccacctccgtagttcttgattgatgaagatcgtgcatcaaagacgtacaatcctgacttttgtgattgggatgttcaagatcagttgttggtttcatggatcttatcatcaatgtctgaaagcctgttgacacgaatggttggctgtcacacagctcgccaaatctggtacacccttgagaaacacttcacactgcaagtatcatcaaagattcttgaattcagaaccaagctgcaaaatctcaagaaaggcacccaatccctcaagattacttactcaaggtgaagcagcatgttgacttgcttgcctatgttggtgaagtcctaagtgaccgtgatcacattgcagccattttcaaaggacttttgagtgcgtatgacacctttgtcatatccaccaacacacgaattgaagggtacacagttggagagattgaagcattgcttcttgcttcgaaatcaagaatcaaaaagactgatgaagaacctgaaattaatgctaatcttgctgtttctgatgctggccagcagcctgaagccaatattgcttatcagaatcgattcaaagctggttttcctcccagaaatccatttcaatttggtacttatgcaccaaattttcccaatccaagaggcacttctccctctcatggagctcaatactactatcccaatggctttgctccaagaggatatcactaccaaatgtctcagtacaactcttcccagcctcctcaagctaatcgcagtagtactaacagaggaggcagagtttctactccctcaggccgcccacaatgctttgtcacaaaatagggcacatggttattgattgtttttacagattcggcaagagttttactagtgttcaaccaaacaatgttgccccttctccccaagctaatctaatgcacacttcgaatcacagtgacactaattggtaccccgattatggggccaccaatcattgtacccctgatgctcaaaatctggcttcaagttccacttatgaagggtttgaacaattgtttgttggagatggtacatgtttgtctatcaagcacattggtcattcatttctctctaattcatctattacttcccctctcatattgagtaatttacttcatgttcctgcactaaccaaaaatctgttgagtgtgtttaaatcactagggataataatgtgttcttcgaatttcatcctgatatttgctttgtcaaagatcaggttcatcacaaggtgctattgactgggacataccagaatggcctgtattcctttgattcttcacaactgaacttgatgaactcttccatttcaccaactgtttccagcagctcccctttttcacagcatatgtagccacaaacacttactgctacttcctcaatttcctcttcaaatactgcttctccacctatgcacactacacataataagtctaattttgatatttgggagaatagacttggccacccttctgaaaaggttgtcaagtctgtgctccatgcttgtaatgttcaaaatgtcaataaaaattccaattctgtgtgttcagcttgttgttaggcaaaatccataaattatcattcccaaaagcctctcaaaccacatataccactcctcttgaattggttgtctctgatttatggggaccctcttatattcccaatacaaatggctataagtattacatccattttgttgatgcatactctaggtttacatggatttgcatgcttaaaaccaaagatgaggcactaaaaacattttaacattttaaagctgaatctgaattgcaacttggcacaaaaataaaagtccttcaaacagattggtgtggggaatataggtcattcaccaatacactaaaagaagctggtataatccatagacatccatctcccaccacacatgaaaaaaatggattagttgaacgtaagcacagacatatagttagaaaattgtctcacattacttgcccaagcttccatgcctttaaagttttggatgaagcctttaggactagctgtgtacatccataataggctgtctacacctatccttaagcataaatcacctattgaaactctttttaatatctcaccagattacactagtttcaaaacctttggctgctcttgttatcctaatataagaccctacaataagcataagcttcagtttagatcctctccttgtaccttcattgggtatagtctaaatcataaagggtatgcctagaccaatctggtagagtctatatttcaagagatgttatatttgatgactacacatttcctcatgcttcacaaaaccatcctcccattactgttgatgtcatgtcttccttttatccatcagctattatccctactgttcacacacaaaattatcactcatctattcttaactctcacactgcttgtagctcatctttacctgtgcaggaagctattattatgcttgatacacctgttgtaccattgtaacaccctaactattttaggcgtattacgtgatttt

SEQ ID NO: 248509 - DNA, 654 bp, Cannabis indica
attattattattattattattattattattatcttcatgggcacccatagctaatataggaattttcctaccccaaacccgtcaagaattaaggtgggcgaggccggggaataggggagcagaaaataagggaagggaaaggcgacggggttggaatgcattctctactcattatcatccaatttctatccctatacatcatacatcaacttctctatttaattaattaattaatatatatatattttttaatatgtatataatacatataataaaattacaataaaatataatttaaatactattcaaatattttaataggaataatgtttctccacatgtgaaaaagagcttgaataaaatagagaactcatttacgttatttgtacactattacaaaaaagggtattcacgacggtcctaaaaatactatttttagagaaccgtcgcttaaaaaaattaagctagtgtttaaaactatcaagaaaaatagggtattctcgacgattttaaattgtcgagaggtataggcaacggtttttaaacgtgcctaagaaatcacgtgtatttttaaatgggaattgtcaaccatgctttaatttaactcatttcagatctgaaatttcattactccgcatcttaaatttcaaaatt

SEQ ID NO: 248510 - DNA, 717 bp, Cannabis indica
aattaagatagagcaaaaattagaaaattatatagaacacaagattttaaagaggttcggcccctttagttcggtaatagcctactccccttagattgtatttacttgagaacaaagaacacaatgtttcctctctctcaaagctcttacagtgaaatctctgagtattttctcttagatctctctctaaagcaattctttcgatcccttttatagtaatactagatcattatttatagggctaaatgcatgagggaaggtttcccttttgcttacaatatctataattggtaagaacatacattacatatttagaatacatgaaatgggggattgagacaacttgcgtatctctcttgaatgatcccaaaattatagggattgcttttgtgcttgagcttcacgatatcacccttggaatgattaagtcttgatatacggttcagatcactctttgcttggttcatctaccttttccctgcttaatcaagtaggctttgtgtgtgcagatgtattacttggagtcagctcagaacattcctccagctgagtgtaaagaataaagaacacgtgtcactagtacatttccacgtcatagtgcaaaaaaagggataacattaactaattcattactgaaacacgcgcatcagtcagaagtcttgagctcatattgggtagctagcaagttttatacagaaacaagctcaagggaattcg

SEQ ID NO: 248511 - DNA, 537 bp, Cannabis indica
attaaaaaacaaaagtattaccaaacggcaccataatttttaatttatttttacttattttgaaccataaaagagcattttaatgctattatcacgttgcaacacattctctcttcttgcattatttatagggctagcttgttccttcctcttcaagcatttataaaatattagtagtttaaacgtatcaaatattgtcattaaacaaaaacaaagtgctaaaagagaccaacaaatggtagtacaagtatactcattttttcacacaacgatgtgggagtaaactacactactacatacttcttttaacttgatgcttttaacttttaccttatttttaaaatttattatgtttatctcgtttttaatcattctaccaattttattcctatcgattcacgatagttttcaattttctctaatcaaaatgttgctccaacttttccacaaacctacacatcaatctacaaagaatacagatctattatatttgaaattatgtcttaattctacgagtatgtgaggataatttaggta

SEQ ID NO: 248512 - DNA, 1893 bp, Cannabis indica
aaacagggcaggtcggggtacttctatttctctcaaacaggcttaaagtggttgaccgacacggacgacaaggccatcaacaagatagggcgttttgctgattagtacttcatggtgaaggatgcgagaattacccacactcggttccagcagattctgacgtatcactgtcctcccctcactctagctcttagggatagagctcaaaaacttgtccggctaccgggggaagaccagaatattatcccgttgacctccgaggataactttgtgaggtacgggctctatcccgaggactttactcctaagtccgtggcggggatgaagaggaaatctggtgctagccggaccgaacaaactcatccggagaatgagttgattcaactgaagcgtgaagctaagttgaaaggaggtgcaagggccaagcaatattctcaggagcccttgaatcctgaagatgaagctgaggaaaaccaggtgactccactgaagaggaagaagaaactcccggcctcgctcaggcctgttgaacatgcaatttgcataagggagcccattttgcctattcggccatctcctctcgtgttcggaaaagggaaagctgtcatgtctgagataagatcgatgtcaagtgatgatggacttctgagtcttgttcgggcggtcaccttgcattttactttatcttgttttttgagcttcttgactttcatgccttgtgtttctgatggctgtcttctaaccatatcgttttattctgtgcagacatgtctcggcagatgctcgacgctcttaggaagagaatgggcggaagctctagcgcctctcctccgtccaagaagtctaagggcggtgaggggtcctcttcaaaggaaaagatgcttccggggaggtcattgatatttccgaggagctgactgctgcaaacccctctaccccaaagctgccaagtccaaggagtctggaccaccaatggttgggtctgaactggtcaggagtgatcctgaacgggtgtgggcacctactccacctttgccagtgcttccagaggccaaaaagggcaaggagatgctggcccattacatgaactgactggttcttgaggtcagtgagctactggctggtgctgacaatgactcttctttggatttgttggtgggcggagtcttgaaggagttcaccagggtaagtcttttttgatacttccctttaatcttccacattttgctcaatatgctaaagtttttctttttgtgtagaccggtttgaagttggcctacacttactcccgggctaagtctgctgcttccaaaaatgcggctctatccgacaccctgagggtagaggcggacttggccaggaaggatgttgaggaagctagggcggaagtcggagctgttcggttggaactgggtgaagccaacaaggacttgtttgctgctcggaagaaaatcactgtgctgactaaggatctcgaggctgctgaccgttttgaggagaccatcgagaccttatctgctgaggtgaacagtcttcaagacgagagaacttctcttcgagtagttcttcatcggatgaaggaggaaaaggatgccaaggagggggagctttcggccgaggtggacaggttgaaggagaaggtcaatgccttggagacagccggtctcgagctcttctttgatttttggaaggctaatcctctgtccaacttcgactacttgggtgatgctaaggacatgtacctttagtactgcacagcccaagtggcttatggtggaactgaggcggctgcttcaacttttggccagactgcaaatgctcctcctgttcaaacaacaaatcctcctactctagttggccccagaagaaccgaaccaagagcctggaactcca

SEQ ID NO: 248513 - DNA, 868 bp, Cannabis indica
aagaagaaaagactcagcagcagagttatcatacatcgataactctttattagacaactcaccttctttaatcttctccaaagaggcaaagagtgcttttcttttagtcttctttaaccactgtacaggaaatataatgataatgtgtaatatttatttctcaagtaaaatactatattataagctagtaaatgcctaaaaaagcctatttactcagaaacatatcaaatatatccccaagtatttttatttttttgtctttgacaaatatagggcatacctaccacatttaaatctcttaatttatgtgctcataaaaagtaccaaaaaagagcattatttgctctcaaaatcctctcagtatacactataccgagaaaaatagttttcctattccaagtgctcaacagtgtaaactaagaacaaaatttcctcaatttttgacatctcatacagcaccttattactattaaaggaaaactccaaacaattctatgcattcactaaacaattgcatccatttgcttggaatagacactaagctgctcaagtttttcaaggttaaatatatgtaatcacatctattttttttttttttgaaaatatttcaaatgttagctctttcttccctttcaatatttatgcaaatacatgtatatctagcagccaaatgagttgaccaaagaaaaaaggaatgaaaataaaaataaaatccataaatgcctattttatttacaagctgcagcaacccctgcaatacagctgaaaaagaaagaaagaaagagaaaaaaagtgcttgttaattatcctttacagcctcttttaataacgtggttgttgtccaaacaaccttgacaaaggcactaga

SEQ ID NO: 248514 - DNA, 1432 bp, Cannabis indica
caaacgtcaagctcatgaagatctattccattaggctgcacatcttgatctgtcatctcactgaacaaagctttggcttcttcccatttatctgcgtagcacaaaccatgcatcaaagagctataaacaacatcaggaagaacccccttctctttcatttccaagaacaattgttgtgctttttccatcaaaccttccttacacagcccatcaatgatagccccataccaaactagatttggtgtgcacttaaaaccatctccatgatctttcccactagccatttgttcatgtaactcgagtgcaatagatgcatttccagtcctacacaatccattaatcagagtaccaaaggtgacagcattaggcttacaacccaacttaaaaatcttcttaaagattgttcctttgaagcagcagcagaaaagtaagagggcattgatttgaacaccattggagaaggctgaacagagaggaagaagaacaaagaacagagatattttatattctctctatatacaaggtccgtttgtttgtccctaatctttctctctatccattttaaacacagattatgcattgattacataatttttgatttttctggtttgtgaattatgcattgattgattacattatattcaaatttcaaactgagattgttacaaggttttgctgcattgtcttcaagcattacttagccttaaatttatggggttgaaagaattaatgctcaaattctctatttcaatttcaatcactctttacacatagctaaattaaatgaattaatgctcctaatataagacatatatgcttgatttttctatgttgtaatatttatgtatttaatctgaatataatcattacattgtcttaattaaaaaaattacaatgtctattaaaataaacatgaaaaaactataataattgtctcttagttcatcttgtattgattgaagaaggttttgcctatatgctgttgttgtggtagtgtgatcatgaattgaggttgtgaacttggaatatatatggttggagctgttgcagtgtttcatcattggtttgttgggaaggttgataaatatggcatcaaaacttaagtgtataaaatatggtaagttttgaatttttttttaaaagtatgggaaaactcattatatataaggagaaatgccataaaaagattttaaaattgtgtttcttttttaaaaaatttaaatactggaatgaaagacattgaaatcatgattgtttttttttttttcaaaatttaaacactcaaataaagaaaaatattatttaaaaaaaaagtatacataaagaaactcaaataccacaattagttaaataatgtaaaatataatataaatattataaaaagatactgaaaaataaaatttaaccagttacaacaaaagttttttttttt

SEQ ID NO: 248515 - DNA, 812 bp, Cannabis indica
taactttttactagtatatatatgtgcgtgatgactaaaagttctctatatataaatatataaagagaaaaagttaccttgagtgacaaccttttattagttataatatagattttttgtgactaaatgtaatttttagtcacaacaaaaagttatttttaactagaatatagtatttagatgtaagttgtcgctaatttagatatatatatatatatattgtgaactaaaaatacatttagccacaataaatttgaatttttgtgattaatatttttagccacggacgttctggttacaatataaaaataatgatttataattaatcacgaattttttcatttttagtcataagtttgttataaatattggttataaatgcctaatgtgttgtccaaacatctcaaacaaatttggaaggtaagaatgatgcctttttggaaccaaataatcaacaaccaatttaaataaagaaatgtaaacataaatgtaaatttaattacataaaacaaatttaattattttaattgtatgataaattatatgcaaaatataatataatgttatttaggggtttttttatttatatattttaaagagtttctttttttttgtatttatagtgagtatacggtgcaacctacggagcgcacttaaattgtaactcaattcaaatcgcaattcaaataaccacccagattgcaattaacggagctattcaaatcttaaaaacaacgtaaaaataataataataaaaaaaataaataatagtatatggtagtgattctcttttttcttattatttatttatt

SEQ ID NO: 248516 - DNA, 1853 bp, Cannabis indica
acagtcttggccgaaactacatgaccctagacttgggtcattacaacaccaactaatatattttaaatacttaaaatactatagtctaattttccaatagataactatgcttagctttaaaataataataatactcatattcttatcattttggaaactaacaaaattcttagataaaaataataatttattctatgcaatcactatttccacatcgaaatttctaggcataaaataataacgaatattttggttattacaaagctccaataaactagattatttattgaattttatcaaccaaataatcatgtttattaattctatgattactccactataaatatgaaattaaactcttagtaattataaaattatatttactgagtattactgaagtgtccattgatataatcatttccaatgattagccttccctgtgtggttttaattagttttggtcaaattactattttacccttctaattacttctttatcctttagtatcgttaattcacttgtgaaagtataatttagattaaatctaaatttgtgcacaacttttcagttccataattaacacttaaaggaaatcaacattcgatccattaagaaattcaggattccataattgtagattatgttcccagccatcgatattattagattcctaaaatagaagttgtaagaatcatcttctctgagaaactttaacgagtaaaataaagaaactaataacataaacatgagttcatgattattcaagatttagggcaatctactatcgatcatccttattatatgaataaggtcgttataataaacgacatgtttaataaagattgcttaatttcatatcagtccatgtcgtatataatctctattatatacaacatcttcacttagatgtcatactacatcactaatctgaatcgaaattacttgtaccgaataacaggcatcagtgaaccgtactagtaattattgattacaaatttctaaactttactatgttgctgtctgttttattcatggctaagtggtcttaattctccgtacaatacaagattgtcaagctttgctttcttctttgattaatgttaagttattttttgttgaacgatcaacaaatcgagtagctcattgggtagcacataactctcgatactcctctggttgtattttttctgagtccaatactccgatggaacttaaaactcttatgtactgagatttgatttaataaaaagtctttctttcaaaaaaaaataatgagtttttcgatatttatataataaattattcaatattaaatattaataatttaacatacaagcataaataaaaatgttcaactcttattataaacagaaatatttttacacgcatttcagggcataaacgctaacaataacttactgctcctcaataatggtctatctcgctactagcagatggcttcaacatacaagcttccttgcttctcccctagctatcaagaaactaaagcttggggtaagagcagccaaactaaggtaatttccaagctgccttgtccatatttgacctgcttatcaagttcccgacaaaagcagacattggtaacattctcagtcaaccaaagagcaacgtgtaatactacaacactttgttggcattttccaagaagacctcctccactgtgaaaatagctaaaaagacaaacaagacctcctccactctgacaagagccgaggagatgaacaagacctcctctgctatgaaaatagtcgaggagacgaagaagacctcctttgctgtgaaaatagtcgaggagacaaagaaggcctcctccactgtgaacacaactgag

SEQ ID NO: 248517 - DNA, 882 bp, Cannabis indica
gaatttttatacatcaaattttaacattatatatatgtttattaaataattttttttccatttaaacactaaaaaaccctaacattatctaaccctaccatatattttctctcagccgcacctaacattaccacatcctattaccagatctcttccccttctctcatcacaaagctatcaaagcttctctctcttggttgcaggcggcaatggaaggaggtctctcttggtcgcagggggcggtggaggagacgaagacttcagggggcggttgaggagacgacgtcgacttctctctcttggtcgcaaggggcgatggaggagacgatgccgggctttgcacagtgagggttggatcgggttatcgccggggtcgacttctctctgtttcatgttctcggacgagtcgtctccgataacaaaatccatggatctcgacgggtgtagttgagtcgtcgtcttcggctatggctagtcgtcgtccgagctccctctccttctcgacgatatgggtatatttttggtataggtgaaagggtataaggatgtgaatctttgtggggtgtggttcttagcacaatgacaacaaatcacttaacaaaagaatttgttccctcatcttataatactttggtttgttgattattactgagaagttcatctaaactattgggctagagcaaagttgattatgatggtttcatggaaattttttggtttgaagaatcagcagcaagtgtgattttttgttgcccagaagtcacaatcttgcaacttaggcgtttttcctattaactttctacaacaacaaatttcttattttactttttttttctttagatttgtatcatatgtattctgtgaaatatgaaatttttttca

SEQ ID NO: 248518 - DNA, 823 bp, Cannabis indica
ccataacattgtcgtatcataataattacatacataacattaatgatccaaaaaatgatcaactcacgaggagtcacaaaaataacaataaaatgacaaataaaaagacagcaaagatgataacaaaactgacactagattcttataggaggtttagccccgatttctacagtagtagtttactccccctttagttgaatttatctttagttctacactgattacaaatatttttctatagagtttctgctattatgtatcccttccaaggtgatagaaagttagtatttattgggagggagaattaatcagtattaattgctcaaattcgcaccccaatcaatttcctaaatttgtagaattggataagatcgaatctttcaggatcttcataattgaatgaagacctcgatttggtctttgcaaccagggggcacccaagtgtatctcacctagggagtacctgtactcccaggatgatattgtgttgtctcttttacttcttgtgaggcattgtcttgtctcttaagtcaatcctatgcgcaagggttgctctacggggttacaagtgtagttgagatattttcccttcataccccgactgtacgccatccaggtctacactcggggggaggttgtatgttgcccaagtgtatacctggggaggaaatctacaaggtgttgaaatacttaatttaatgttctcattagatcttcactttaaaagatctcagatcggtgatgcagaagataacttgatatcagaaaaaactcaaacccaaaaaccactcgggaagcaagagtatgctgcctaggtggtaaa

SEQ ID NO: 248519 - DNA, 1667 bp, Cannabis indica
gaatgacatttaggtaccaaaaagattgattgaaataagagtaattagggaaaaattcatgggagtttttggccccttggtactctatagtgcctaggcgctcccatcttggcgcctaagcatgcctttattttttgtttgggagttttctgactacctagacagaaaaggggaacctctaaggcgctacacataaccccatacctaggtggagagggggtgcgtacatatatagaaccaagcaaggagaactcacttgccatgtttaatttccagaccttgtacacggccatctcactaatgcagtcgacccgagcttgagtgttatcgaccatctttacttttttactttcaaaggatttttccaaatcgattgtttggtaggtttggttttttgctctccagcctccttggtagcactctcactagctttcttcaaatcagcaacctcattctcgtgtcgcacaatataaataatacatatttgtaggtaatatattatagagaaagatgaaaaaaaacacacacaactccaaacatgaaaaatataaaaaagaaaaacacaaattactaagatgataaggtaagaaaatacaaaagagcaaggactataggaaagcctcaccgaagaagtgtgcaacaagttaaaaaaaactatacaaagttatgtgtacttgaaaaaaatgtttaaattctaattaaagtgaataaggatatgcatatattaagagcatcacaaatagaaagctaaaagtgtagtgtatatgaatatgttagcttatcttcatatataaaactaaactccaatagtaagtataaagtggttcaaatttagcagatactaaaagttgtgacaaatttggtacaaaatatagtataagctaaattttacactacaataaaaaatatatatttatatatgttgacttgtctacatctttctataaaaaaaaaggttaattttatccaaaatatattggagcactattataaaatttgagccaaatgtaatattgactcattgttttagctcaaattatatactatgcccggaagatgataaggaaaatgttaagggggtgttaaataccataaatagtatcatactggggaagggtaacattcatgggattaggctaagtaggggaggtccaattattacccacctgttttttgcagatgaccttatcctggtgggcagggctaatttaaatgaagctaaaagtgtttggaattgtttggagaggttttgctcttggtctggccagaaagtgaataaactcaaaacgtcaatattctttagtaaaaatactcctgatggtatgaggagagggatcaaggaagcattgggcattaattcaccagaacgtgctataaattacttggggctgcctcttttcagatctcgtcagaaggatgctgattttaattttattctggacaatctcacgtctaaattgcagggctggaaggctaagaatttgtcaaaggcaggtcatgctacccttattaagtgggtgggcctgtcgatgcctatatatgccatgcaaaaccacaaaactatctagtcgtatggtctcgagggttgatggtttagtccgagatttctggtggggctttgaaaaaggaaaccatggtcttcatttaaaggcttgggataagctgtg

SEQ ID NO: 248520 - DNA, 846 bp, Cannabis indica
tactattatgcacactattgttttaatttttccaaagcatatacacagtagcagctagatcaaagttatcacaccggaaatcttccctgttatccaacataaccagctgttgaactctatcggccaagctggataacccacccaatcaaacacctcattcataactgccttggaaacaaaacagccgaagaagagatgatgaagactctcctcttcttcactacaaataggaaaactggtatagtatcaagctctatattaatctaaagaacttatcgcttgtaagaagatggccatgaaccacctaccaaagaacaaatctatgcttgggcaaagaaacattacaccaaacagctttgtagaacatgtcagcatcaagttgaattagcccattataagtctagaagcaagaaacttacctcttctgaacagaaacaactacattaaacttgctgaatttttttctaagttggcaaattttcctccaataccaactaacatctcccttcaactcatactcccaaaactcagctcccttcatacagatgttatttatccatttaacccaaagaatgccatgcttatccatgatagcccaaataaattttccaagaatagatctattccaattaggaccacttttgaaccccaggcctccataagctttagggagaaaaactttgtcccaagaagccaaattaatcttacatatttctcccttaatcccccataagaaatccctacaaagccgctcaacttccttgattatactctaagaaagaatgaatatgttcatccaataattacgaagcctcaagagcacggagtggatcagttgcattcagc

SEQ ID NO: 248521 - DNA, 780 bp, Cannabis indica
actctgcaaaatgtcacaatgaacaatctagtgagtgcccccttttgggttcaggtataccgattacctttcctaagcaaatcaaagtctcttgccactgcacttttaaacatcataggggaattcattgattttcatgaggattcccttgatgagggttggggccctttcttaaggactctagttaaaatctctgtggacaaaccacttctccgtggcagaatgatcagtttaccaaggattcgggatgatttttgggtggattttcgttatgagcgattgcctgaattttgtttcgaatgtggaaggattggacatccctttgaaaaatgtgttgctttcatggaaagaatggacaatggtaatgatgatgatcttgaatatggtcattggatgaaaggggcaaaattaccaactactggctatgataaatatcggactgactttgccaagggtaatgcttggccacttttgactcatttcgcccgtaaatctttgacttccacaataccaactctgtatagaccacaaccccagccaagagtactttttcatggtgaatcttcgactcccactcattctctgcctcctcattctcatactttacctgcctcgtgttggaaattattttaccaggatcttagatctacttacaagtatgtttattaacatcctaaatatgaactttctaaaacgatgaaatagacacatataaagtttaagaaaccttacattgggtgcagcggaataatatgctcctccgttcagatatctagccct

SEQ ID NO: 248522 - DNA, 2391 bp, Cannabis indica
acacatgtcctccaaccgaattttggttataacaaaacttaagtaaacttctcgtcaatgataacacaattttcactaagtattctcatttggttttgagatagaagcttttgacgattgtgtatatatcacaggttcagtaagagtaaatatataatcttggtattatatattggtaaaaaaaatttcttgccgttaatgtgtacccattttgcattagcaattcaagataaggtgagattattattgggatatctttgaattataataaaatagatatatcaataaagtatttaaaatttttagcacgaaagatactatactaagtgaaatgcttgtagctaaagagtaagtcttctatgtcattttactgaaaacaaccttagaattcaataaatatagaagattcttaaattatattggaatctaatatatgcttaagcatgtatgtatttgtatttaacatacatattaagaattttggataaatatttaagtaaccttagatggaacttttggaatgtagccaaaagggttacaatgaatttatggagaacaagagactacatgttcactaatcaataattaaaatgtttggaggtcattaagatttctgattttgatcttataaaatttttaatagtagattttgtcacatgtggctacaaaattaggaatgatagtattgaaaactattaaaatatatataaagatatatgttgtgataataaattaataaggttgcatattttagtaataacataagctatacaaggccaaagacatattgactgaggtaattgttaataaaatgatgttcagagtaataaggtatctatagaacatataagaacaaactccatgttttttgatcgggatcattaaggaaataccacttaagctttttaggagcttgctcatatatgaatgtggtattatttaagattgtgctggttcagtgggagtttgtacttggaatgttctatcaagttgacacatatttgtggtttgattctccacataacgtatggacttaaattttgagtattctaatgtatttttttttattttttttttttatattgaggtttaagtataaggttagaaagaattgataaaggaggatgaccagcatactaagattacatataatttccatgctaaacatgattgattacgtggagataggcatgattgatctaacaattgaaccataaaatagtaattttgaccactcgctttgatttcttttatccaacttcgatgtttcagtgtatcacttataatacaaaactagtttcgaactcttaaaattagatttttaagaatcggatcaatgtggttagatgttggggtcatggccctaatagtttctaaattcccttgtcaggataatatgggatgtcttttgtgagatttgtcctgggttgttttagggtattgtttcttttaataattgaaaagaaaaaaaataattcttaatcaattttatgatggaggctgatattggtgcaataagaaagtgagctcgttatgaagcgaaaatctcacctactgaacacaagtacaatgcagtctcttcttgccttgtttacatcttacacaggccttagttccataagtttttccttttaccttttttaaatgaaatgattctcttcgctaaaactattaataatacaaaatcacctccaacgcccatcatggtatatttctaatgaagaatctagtcaaaaattcctactgcacatgccaatggatgtataggtgcatgttcataggacacaaaccttccaaacttactgaaagtttactatgcttctttttattccaaaaaataaaaataatatatagtttaatattttccacaagtatgaagaaaaacagaaatttttatatacttaaaagttgctttgcttcaattttttttttcataaaagcattcctacacacacttttcgtgaatttcatacgatttctttaaacaactaaaattaggtaaataaatttttataataattggtaagaaaatcataaccactactatcgcgtaaagcatatttggagtctcttgtagactatagagagggagacactagtttcatttttcctatatatatttgtgatttaataagctagttaaagctctattctcttacgcaagttgttcattatctcataatgtcgacatttaattcaattatcttatatttgtcactctctcactgtctcacttcagttactatcttcgttttgcctttttatgtcgtcattttcatcctttacttttcttaacatcttaacataaatacacatcgaagaaaacttccatttcttgtccactctagcaatctctatctcttatatctttttcttctctgactctctctc

SEQ ID NO: 248523 - DNA, 534 bp, Cannabis indica
ccgctttaatttgaacggatattaaagtggatatgagggtaaatttacaaagcaggtatgagagtgggggagcaatcaccgcacccgccctgtatatgagaagtgttaaaccggatcaaatcatggtcatgacttttggtagtgctcgaataagattgccttcttattatacaggcaatttacaataatttttctactttttctcctttttgatatttaaaagatattttatttttattttaaaaatatgtttctttgggaatataagaagggaaatttaaattattatgctttttttaatacataattggtttggagaacacttagtgtaggtaatttttaaaataggactaatttttaaaaacccccaaaatagccttgtcaaaattccaatccctttctctctcttccactcaaactctctctcggtccatcttcgcccgatcacagccgcctcacacaaccacgcccgactccgacttcgcccgatcccagccacctcacacaaccacagcgccgtcaccccctcaccac

SEQ ID NO: 248524 - DNA, 1231 bp, Cannabis indica
agttccaattcatccaattatttattttatcatcttttttctttttgttatgaaatggcttaaataccataaaggcaaataactatttccattgatgcatatacattacaaagcttccaaatttttcccatatattaatacagatactgaaatatattcttgttctaggagaaaaatatttacatgtttttattttttccagctataatatttcttggaaaaaaaatatattaactaaataagggcgttaggtataaaaaaaaatattaaagaaaaaatgtaggccagtatccaatatatttttcacttttactataaagggagttcaactaatttcaatttttttgtttaatttgaaattagttgaattacctttaggatactaatttcaaaagaattgataactgattttattttcattaaattaaataaaatttaaatagagtttttcggctaaattctttcaattattaatttacttacacttaactctctaagttcaaattttgataggataaactttcaaagtacttaactgcttacaaattacggtcatcatccattttttaccgttaattatcaatatagactgcttacgtacacttttatacatgtgtcaaatttattgatacacttaatattattattttaaaaatataaaaattatttcaaaatttataataattttattttttttaaatatttgatttaattttaatatgaaaatttaaaatcatttttaaataataatattaagtatacacataagtagcccataatgagttaaactaagaacaccttaaatttgctactaattcaataatttagagaattttactctaaaatttaaacttaaaaaaattaaatactagtaaagctacagttaaaaaaattttgctaaaaaaaactatattaatattatcatttgaaagttatacggtgataataaacatgttattattctctgacatattttctttgtcagcaatctgtccaatctaatctattctccaaaccaaagtgataaaagtgaaaaaacaaaaaatttctctcattattcagtttcaaaattcatcaaacaattttattactgcaggggttaattttattttccaattttaaaaagaaaattaaatcaggtagcggtgaaaatccgtgaaaatttaataattaataataatgaaataaagaaaagggagtttgtttggcgttgagtttttttttttttttt

SEQ ID NO: 248525 - DNA, 1034 bp, Cannabis indica
ggccaaggaaagtgggtgggctcagggtgtttatggggctgcctagattgacaaagctcaacatgggccttgtccaccatttgatcagccataatagttgtaagtatgccactatcagctggattaggaggaggcctagaagaatacttttttaatatgtcctcatcaaataaagtacctttattaccttgagaatgtcttcgcaatggtctaggagaaactgatcttgcttttctttcctttccaggatttccatgtccttgagcaccactaaacaaaatttccttgcctttaccctatggtttgacacttgaactctccactactttcaaatttttgccaaaaacagcacctgggccactttcattaaccctgattaccttcttctttggtttgcaagctatttgctgcaggttctggttcccaccactgccattgatgggtctttttccttcatttttggactgcgggccagccacagtaggtgtcctcgccggagaaaccgtccgacctccatcttctctgtagaaatcaagttggttccgtgtgttgaagcagctaaaaaacgtcgattcggccttcatccaaggtccataagctggaaccgcttcaccttgaggagggtatgcataagcagttgtgcgaaaacaagatttcttatcgtgaccaaggtagccacaattatagcacagctttggtaatttgaaataacgaaattgtatccattctttcctacctctctttatgtcaagaaaaaaaccagatatgagttggaaagaggtattaatctctacttgaaactttagaaatcccctccttgtaatggtcctttgatttgccaaatcacttcctataaagaccccttctttagaagcaatcgttctagtattaacggcatttgagtatacggagtgggtaaaccagaggccatgacccaaaaaacagacttccccatatccatgttgttaccaatccccgatcctcaggtccattctctaatgatcagaagctttccattgattatccatggtcta

SEQ ID NO: 248526 - DNA, 909 bp, Cannabis indica
tcaaggccaaaatcgtagcttggcttgatgtccaaggatgaaggttgcgcattaatgtcctgcgagggagaagctggctgaccatacacctacaggatgaggtctggccggccatgctctagctaggatctggcaggtccggttcctgtcagggtctagcagattatgttcctgccagggtctggtaggtcttgttcttgtcaactttaccaagaggaggctagcctttagatatggaggccaacttttggtgagtagaagtcagctttgtacatcttttccttgcagaggtcaggttctcttggtcgaacggaagctccctgggtctgaaagttaccttttgggcggccagcttgtgcctagatcctggccggccaaacaagctcttcctggctagcctatagactccccttgggtggccaaacatgttggtacaactacttgacgactcgcttcactcctttcacttgctgcttgacggtagataaaatttgggataacatttgccccccaagtccctgtttgaacatttggttgcttagggactttctaactctcatcttttttgtagcaattcttgtcgagcagccgtatctagccaagtgttggctttttacatggcatgattttagatctttgatcttctctctatatatacgtctcatcttatcttcttagatatctcttctttctacctaccattgacaactttcaagctttttaagcttgtaaaaacattttgattctcatgttagtttgtgatctttttggtattttgatccacatgatagttttagaatatataatgtgtgattttctgatggaaaagatttgattttggccttcgttgtgattcttgactctttgagtcataatgagccttaactcaaccctaaaagctaagtcact

SEQ ID NO: 248527 - DNA, 1042 bp, Cannabis indica
ctgtgatttttggacggaggggtatagagcaaaacgaaatgagaatttaggtagttttgcccccaaaaaatcgatttttgtggttaagtattaaaatttaaagtttatgtagtttagctgccaatattccttttaatttttatacacttactattattattattaatattgtgggtaatttgtgacgaaactctcttatattttaatttgtatacacataacccttttattatttattttttttgtgataaaatttctttatgtttacttttctttgcaaatttgagatgccagttagatacaactgttaaatactaactgaattatcactgtattggttttgaagttttactttcacatatacacagtagttatccagttgatatttaacgataatatttagctgacacctcaaatttacaaagaaaaataaacctaagaaaattttaccacaaaaaacaaaaataaataaggagttaaaaaacataagaaaatttcgatacaaattatatgttgttattattatatatttaggtaaaagaatttctatagggcgtgtcaaaaaaacaaaaaaaccccaatatttaaatttttttctagcctattatgtcatttgatttttttttttggctacgtgcatgaagcaaggaattattttgcctatcatttttttttttctccattatcaggatttcactagccatcaaacactcttgcccaaaaattcaataaactcagaagttagggaggtaggtgttaagaattgcttcaaatacttctatttattctcttcctaatttttacatttttttttattttactttagattctactctccttaattctctttttcttttattctttttattcaactttattttatagagaacattaattttgtcaaaaaaaaaaaaaattagagatcattaactaattaaaattttaaaataaataataattcactttgaaaatgtaccaaattatgtcacttgaacttttctgaccgttaaaaatttcccccgaattattgaaattgttagta

SEQ ID NO: 248528 - DNA, 355 bp, Cannabis indica
ccaaaaaattaaaaaatctttttttaattaaacccataattagttttcgatcaacccaaatatcatccgattcacccgctttgatggaatcaatctttccacccttctctctctcactttgttattaaaaagattcaataattattatttattctttattattctttttttttgttgcatcattacagatattttttttagaaattaaattataggcttattgttaaatatctctgcatactatcattattaatttcatatcatatttcacacttgtttccccattcaaaaagacctatctttcgatcttgctaatttcttccccataaattatcggacttgctcgaaaatcttc

SEQ ID NO: 248529 - DNA, 813 bp, Cannabis indica
ttatattttattttttctttgaataatgtttatattaaagataaaaatgagtcacacaatcaaattaaatacaaattaaaaaaatcacaaaaattatacatatacttagatattgtactataaataataattaatactagaaataaaattctcttttgaatgatttataagaccaaaaattaaagctgctacatttcacatgtgcttgaggaaacccatcaacatgagtttgacaattaatatataatgttaattatatttttcttttccatctttgcgtcagaaaatatatttcagcatttttttttttttctaattttcgtatggcagtatttaatatggatataatattatttttgtaaatttttaaaaaaatttatagtgtcgaaaacatatattgtaaatcggaatatctaattaaaattctgtttagatactgtaaaaatattcaatttttttttaatatttataagaattatacaataattataacgaacattaatgttccaaacattaattttcaggcaagaagattaagaaaaaaattataaattataatataagaagttataattaacgcttctcgtacatatattagtttaacttatttttatttatttattttttaaaaaaataaataaataaaaggagaagaggaaaggcatttaatgagattcatgatccaaacattaattatataccaatatatatagtctcaccaaaatctactaataattatgctgtagattaaataagagaagaatatatataaatattaaccatgattgattgaataataaataaattgaaaag

SEQ ID NO: 248530 - DNA, 750 bp, Cannabis indica
tggaagaatcaattctagaacttgcttgcttactatttgaggtaaaatcataaatgatgcatgtttgagatgatgatctagacaatttaaaaaaaaaaaacgattagggccttttaagctaaccttgtgaaaattttatccctagttccctattttgagcctaatattaaactttttcttctttgacacttatatgagttttatatgaaacttattggttttttttctctttttctataaattatatcatgagcatatttgaagattgatttcaagggaaaatattttaattgggttttctttttcaattgttgtcatcaagaaaaaaaaaaaatgaagaacaacaaaaaggggttgagaaagaacaaaaaaaatatgtgaaataaggaaagcaaagaagagaaaaaattaaagtttaaccactccttatgctatacaataataaataagtttgagagagtggtatttacatattgttgtaaattatttttcttttctcaatcttttgaactaatggatgacattttgtgacataatgttaattttagttgctggtttattggtttgtgcttatagtgtaattttagcctaaatgattatgtcatctacctttacctaagcctcatcttaagcctaaaagaccttttgatttttaaacatgcatcgttgatattagtggagaatagcaagtgatgcaatcatatagaattaagggtgtgatggattattagtgtgatttggcatatataa

SEQ ID NO: 248531 - DNA, 677 bp, Cannabis indica
agaatcaaaggcatgcctaggaagggacggatcaaaaaacacgacacaacacttgcaagagacaaaatagttaacgtacaaggacgtacattgagttcaagtagtggaggcgtgcttgtgtcagtaccacctaacactggaccaacaatgtcgccatatcccattaccacctgttatcggactagtacatggtccccatagagtccacttacaactcatttgtaaacaaggtcaatagaacccaactactgtataaatattaaatacccttttactctattagaaatggagttggaaccttgtaatatggagagaatataatcagaatacaagataattcattgtttccttctcacacaatttcttttatatttcttcttgaatattacttcaccatttttttagtgcacaatacaaggtttctagctacaatatagttgacgagttctgtcaacacgttcaatttattttttatatatatttttacgttgttctatacaaaaaacacgaaaataacaagaatttttttgaaaaataacatgaaaataacatctaaataacatcaaaacaaaataaaaataatatacaaataacaaaaactaacaacaaaataataagcgtacaacataaaaaataacataaaaatatcaaaagactgtattttttgtaaataaaat

SEQ ID NO: 248532 - DNA, 778 bp, Cannabis indica
ttgccaagattaaatacaataaccaatcaacaaaaattctgaaggaggccattcacctcaaaaatttcaagtgaggtctttaacctcaaaatttcaaatgaggtctttaactcatcaatcaaaatcccatatgaggttattcacctccaaatgtcaaagtaaattcatttttcacaaagatctagaactacgtttgacttgttttttataaaagaatacgcaagcaacttagtttttaagactaagtgcagttgccaaaaccacaaaatggtacaaaatacaaatctcaaaattccattctattaaaggttattcacctagaatttttttaaaattttcaaaaaaaaaatgtaaacaatacatactagaattcttatattcaagtcttaaaatacctctctaaactacaagtggcttgatctttcaaaaaaaaaaaaaagcaagcagctcaatatattaaaattacaattggaattgaaagatatttcctttaaacaaaaaaaattgtaattaagaaactattcttataatcttagatgtatcgaaattaaataaataaaatatttttcacaaagatctagggagaccaaaattacatttgacttgattcctataaaaatatgagtaaatactatttgggaccctgtgttttgtaaaagttactgattggaccctctgttttgttaaatgaccaaatggaccctatattttctaaaatagtaaaaataaaaccctgagcttaatttttgacaacggtaatataaccaacttgaagaca

SEQ ID NO: 248533 - DNA, 530 bp, Cannabis indica
tatcttttggtggtagtcattaattttagctattatcgaggagttatcgatatgttctcaacaagttctcgatagttgaagcattgcaaaagaattgtaatttgtttttttaattattatcgcttgactatcgacgagttatggataggttatcaatacgagttagaattacttttttgctatgtggtttatcattgttggattgtcgatggattatcgacaaaatctcgacatgttatagtttttactagttttgcaaaaaagttgggagtttggttattattaatagattattgtcggagttgtcgatatgaataaatattcatcaattaatacaaatttgttttaatttttgtagttatactttgcttaataaatgctcatcaaacttcctttacttttatacatccaataaaatctctcaacactccaagcaccatcatacaatataactagaaatgcaagcgatcttgcaattcaatacaaaccacaaataacagaatcagaataacaaaaataataaaaaatta

SEQ ID NO: 248534 - DNA, 664 bp, Cannabis indica
taggatgttaatcaaacatacttggtggtaaatctagatcttggtaaaatatttccaacagatacacgtgtcagtttcttattgttggtcaaaatttaggtataacaattgccccctaaaaagtgttgtttaaagaaaaaaaaattttaaatgccttcaagggtacgattgtattttttcattcaaattttgcatgcttttattttgatggttcaaaactttgaggcaaatcatttcaacatttaatgccctggctatttcgttctcgtttagttcccatccgttagatttatccttctcttaatcgaacagttaccaccgtttgggtataaatttcaaatttcccttcattttcgccatactgcccacaaaacccttagaattcaaaaatctctcaatcaacctcatctctgaatttgcatgccctcactatctttcactttttttcttcgaatttcatctaatagcatccctcgacttcagaatcatcaagacccagtttcttaaaaatttgagtttcaatcgcaaagttctttgaaacccagaatatctcattaaaccagtaagtgacattcccttttgccgactttcttttatattttcaatcttaatttcttggtatgtgttcttagtttgcgttgtttattgtttgggaaaactttat

SEQ ID NO: 248535 - DNA, 1118 bp, Cannabis indica
gttgggattaaattcacttaatctgtcaaagtcagtaagttcatcttttcactcatcagataaatatggagaaagttgttgttagttataatagttagctttgttaccaacttaaagagagctctaccaacatctatatatagaagtgcctcgactccctcaagtaatctccaatgctcatacttcaattttagagtcaagtttagagaaagagagtctaagatcacaatgagtgtgtgtgtgtgtggagggatgtaatgggagtatcactctttaagtgtattttactcattgtgagactatttctttgtaattgtttattgtgttgagttgtattcttggacaatctcatggtgcactactcactattcctaatcaataaagatccatgattcattctattctcaagctaagtttattcttgtctaatttcatctaagttctagttttgattttgtgattggttctagtttgaattgtgttttcttgaacattgttactactgtaacacttaagttttgagggtgatcattcatcacaaatggtattagagctcaagatttagagttcaagaatcacattcaaccaatcaagattcatcttcaacatttcaagaatcaaactcgaactttcaagaaccatattcaagcaatcaagaatttggtttgaatgactacaacaaggtttgaggtggacaagttcgctggttccaataattttagcctatggagaatcaaaatgaaagaatttttaattcacaaagggatccatgaagcacttgatgctgaagccatggaattgattaaagacaggaagaggaaacttgaaaattgaaggcaaggcatacaatgccatcctccttaatcttggtgatgaggttatgagggaagtttcaaatgaagacaagaccttgggtctctaggacaagttgacttcaatctacatgaagaaatctcttgcaaactagttgtatcttaagaagaaattgtacacactttgaatggatgaatcaaaggaattgagaaagcatttacatgattatagcataatcgttcttgatttgattaattttggggtgaaatttgatgatgaagaccatgctataatcctgttgagtt

SEQ ID NO: 248536 - DNA, 627 bp, Cannabis indica
tgcttacaagtttcggggtacattcgtgcaactcggaggtcaaccctgtaacaactcatgagtagagttagtaagatcaacttactaggttacaattgctggaggattttcgtaatgatatgttgagaattggatcttgccacaaatataagattcaaatatctctttcttatcttttcaaagctacttgaatcgtccaattccgatgtatatcgagaaagttatggccaaaatactaatactaccgaattgtgacaacttggtatgcgagctgacggctccgaagcgagccggcgggctgttgtgcggcccactggctattgtgtgaccccatggggtgttgtgcaagcccaggggcatttgggatgagtcgtggaacctttatgaaagtggtggagcatccgttcgactcacgggtgaaagaaggagatgttatacatgtgtagatagacgtccggtgaggggccgtgtttgagcattggggctcgcctgtgaactcatggcgggaacgcatgcgagccgtgggagagagtgtgtgtgagtggagagaatgtgtgtgagtgggggctcacatgcgagccatgtgtgcatgtgggagagtgtgtgcgagtgggggctcgcatgcga

SEQ ID NO: 248537 - DNA, 1158 bp, Cannabis indica
cctagtctcggttcgggtttaggtctctgtctgggttttgatctggattcgggtttgggattaggtcttggtcctggtcctagtcctagttcggttctacttgcatttgcgattctgagttcgagtttaggtttgagttaaggttggagttcgagtcctggtttgagtttgggttcgggttcagatttcagtcgaggtccagataaagctctgggtgcaggtttgcatcctgggtcttggtctatgttgggtttgagtcccaatttccaatctcaatctgagtctggattcagttatgggtctaagtccttggttctgacccttatttgggttcgactttgggtccgagtctgggtctagctttgggtctaattctaggtgtgggtttgagttcaggtccgagtctatgtctgggtttgtgtctatgtctggaccacgatctgggtttaagctcgggtcaaggtcaaagttcaagtcccgagtgcgggtccaagttatggtctaggtcaggcttggtcaaaatctaggtccagcatttcgatcctagtcttggtcttggtctgagtccaagttcgtatccggattcctatctaggtccaatctgtgtttgggatcgggtcctagatttaggtccaggtctgggtctaagttccgttcttggtacacaaccgtgtccgagcccgagttccattctcagtttgggtctaagggttggtctgtgttaggtactaggtctgggtccggaacctggtcacgatcctagtcttgttctagggtcctggttcggcaattcttattcaggttctaagtttgggtcccaggtcccatttctgagtttgggttcgggatcgagactgcggtgcggttctaggtcccgaacctggatttgtgtccctagtctcgttccatgtttgggtctgagttctggttctggtttgtgtcccgagtccaggtttgggtcgggatctgtgttcgactcccaattcgggtctaggtctggtttgcagtcggggtcctggtctggttacgtttatggatctaggtccaattttagttacgattccaagtccaactcttacttctagtccaggtcaacttccggttttttatccaattttgggtcacagggtactggttcgggtccacttttgggtttgg

SEQ ID NO: 248538 - DNA, 1947 bp, Cannabis indica
tatgccctcacatatgggtcattgttttggacgccctcaagcttggcgagatgtgaaatttgcgagctccaatgttcaacttgactcttcttaaatgattgagcataatggaagccaaggaatgacgctaatggaggtggattgggtggtagcaaatacggatcttcatatgtgtacttatccatgaccattttctcattatattgatacccaattacttgttgtatgagcgatggtggtggaattagcgtttcttcaatgctttgctcaaataatttctcaacaccttgggtagagatagaattcaacaaatttgaatttattattttctctcctttttcttcatcattttggattgaagtaggctccatttgatgctcaaaggtttcctcacacttctcaaaatcttcattgtttttccaagtgatttcttcatcatctagccacacattttgcatatcacttggaaatacaccttgggaattattatgcaactcccaagataactcctcaactttcttctctagattctttaaggatgtggcattgctatgaattaagtcatcatttttagccatatattcattcaccttctccatgtatgcattcaccttctccatgaatgcactcatcattgatattccatctcctaataaatcatcttcccatggtccttgagtgtcactataaaaagtttgctccatagggctagaggtgttctcccaaacttggttggttgatgaagaattccaacaacactcatcatactccgccatgtcctctaacatccaataggcttcatcgatagatagttggtagaaattggtggtaccatctcctccttctacccattctcttgtgcttggatgcaacccatttaagaagacttcaagtacacactctctagacaaaccatggttaagaaaccacattagcaaatccttatatctccacaatgctctatgtaaaggctccgagtcatgttgaatgaaattagtaagtacttgttgatgagacatcttaagtaccttgcaagaaaaattcaaacagaacaagcaaacgtaaaagcaaacaagaaaaataaaagaccaaattgaaaagcaaatgattttaacaagaaaaattctttaaatcaatccccggcaacggcgccaaaaacttgttgtgctaaaattagatatacgcaagtgcacgtagtcacaaacaagtaatacaatgataagtaaaagagtatcgtctccacagggattgattagaaattaattatgcaaaaatcaatactaaacaatttgggtaaaacaaacaagaagtgatgatgatttgaactaggctaaaaactaaacaagaaaataaataaaatgagaaaggaaaatgagcaaaatgatgagctagaacaatcaaatccacttagaatgcaaattcaatgtaaatgtcatagaggaatgcattagtaattaaattttgtcaaccggaaatataaatgaacatatgatttttccaaacctatatgttatgggctctcaagattaaattaacatattcctatgcaaatctagacctagagaacacaaattaagcaccaatttcccatgggtcatacaaggtaaatagcatattcctataccatctacaaatcacacttttccaaggtgataatcttgcatcattcaagtatttccactaatcttattttttccaaaatcaagattagctaacaacctacaattggtgatcaagcaaaagtaggtagacaaacattaggcatccttgaatgaacaaaactttcttaccaaaaatattcataaaacatcaacaaaattcacaatccaaggttcattaaaagttctaactaaaagaaattagttcatgctcaaaaacataaaaatacccaaaatgaaaacaaagaagtataaaaatgaaataaaaaagattaaaggagtagaagaa

SEQ ID NO: 248539 - DNA, 1019 bp, Cannabis indica
atcatccagaccacagggcgagttagagagcctggggctgcccaaaccgatccaccggcactgcctccaccttcgcagaatccgggttataatacgagggttggtaatgctaatcctcctgctgattagcagcagatgtttcaagaaatgcgaagtgtcatacttcgtgaagaagaagagttgcgacgattaaggcaaccgactgcccctgttaatcaagtgttaccaccagcacctgtgccagtggtgggtaaccaggggtttgttttgtcgcatcgagactcggtatttgagctgcaaccttcgacttttcagggaggtattgatatattaaaggccgagcaatggatgaagagaggactgaatgccacaatcagtcgggacttgaaggttaccacttcacatgacactttgtacaagaaagtgatagagctagccttgagtgttgaggaggctgagcaatatgtagtaaaagaggagaccgtaaaggatgccgtcacggcatcgaattcgcatgctagtggtaacgtcagtaaggggaccgacagtggcaaccctgatcacaaatggaaggctgaggcttttggagtatcaggggtcataaatagaaagcatcagggaaattgaggtggtcgtcaaggtcacggattttctttcaagtcatatcttgaatgttcgaagttcaagaatcaccatcagggtgaatgatggaccaaggatacgtagtatatttgatatggattttatgaatcggacgttccaggattacctgaatagatgtgtgatcgtgtttatcaatgacatcttggtgtaatctgaattagataaacaacatgagttgcatctcaaattggttttgcaacgattacgggaccataatttgtatgctaaattcaaaagtgtgaattctggttatctcgtgtcttcttcctggggcacatagtagataaagatgggattatggtggatcaagccaaaattgaagctgttcgggattggccagcaccaaaatcagctac

SEQ ID NO: 248540 - DNA, 943 bp, Cannabis indica
ttcaaaaatttggactaaaaataaaaattattggactttagagcctctggtaggcctttgtgcatgcctggcccaccataactcagatctaagtctagccctcgcgataaatgtcaaggaggtgctcgagcaattctccaacaaatggtgcttaagtgatgtaccaacaaccatggcgtcaaagactaatgctctagtctaatagtgtgtgaactgtgataacaacatatatgttaagcactaggttcaagttatatactgaagggactcagctagttggttattcatcaaaacacaaataacttatgcataaaaattgcaacacatattttatcatttaaattttaccttcaaattaaaatattatactttcaatgaagaataaataaaaagaaaaagtgactagtctcttgtaaaatactcagaagatagtgattatatcttatcttttaatttatagcctagaggcctacaaacacaaagcttgagtacccagtcataattttctagcctcctgggtaggttattatcatcatctttcttcaattctcacttataaaccggattcaataatggatataatctgattatttcccctctaatttatgatgtcctcataatttaatgtagattctacttttccgttacaccaattccttcaatatctagttctgatgtcacttgtgtcatgttttcccaacccactatcaatcttctaccctattttgcaagggtggaaattatcaaaaatgcataaacgacattgttgcctctaaatggtaagtataaagatcagcagcgactgtttcacgaaagcataaaagtgtagcatatgatcatcagtcaagagaccatacttcaaaaaagaagtaaaacatttcgagttagctcagaaaaacgaaacattttgataaatagacaatcataatgaagaaaatataga

SEQ ID NO: 248541 - DNA, 689 bp, Cannabis indica
tttcttggggatatggagggattatctacgcatcagagtcatagtcaacatagagaaaccattgaaacgaagaatcaagctgaagcggactaatggtgaatggttatggtgtcagttcaagtatgaatcagttcctaccttctgtttcatttgtagtattattggccactcagagcgattttgccaacgcttatttgatacaccactggatgagatcgagaaaccttttggcttatggatgaaagctgatccgattagaagaaaatagaggtttggagctcgttggctacggactggaacagaggcggacggtcagttttccgatgcaccagtgaatgccggagttgatgatgccgaattcaatgcaccaaatcaaggggattatgctaatcgaaattcttacggaggggatcatggaagaaatatttgcctacaaaatagggtcaatgatttggagcataataatggaagggataccatttacaatggacagcctatgatgacagagaatgtagatactatgaatcctcccacattaattgtcgctgattctaaaagaagaaggactgacgatgagggacaagcgatagacagtgacaaagaagaggtggcaagctttgacccgaatgggctttcaaaaaatgtgtctttggtgggttctggggtccaggcccacctaggattatgag

SEQ ID NO: 248542 - DNA, 739 bp, Cannabis indica
ctaggcaattcgagagcaagagaaagagagaggggttgacaaatatggacaatttaattctagggttttcttctttgttttcttttatcgaaagaataaaaggatttatatatatatatatattcttaccattaataaacttaactaataggcaaaagaataaaaagataaagactaattattccattaataaatcccatgaaattaaagaaaaggcttctaagggcattttagtcctaaaggtaatatcccgaccaataaccgatacttccgagcctaacaatgatactctgaaaataaaaagatactaacacacaaaatatgacttctaaaggcccaacgtcactttctacagcttccgaacaccaacacagaaattgagtaatttagtaatttacataaaatagcataataaacatatatgaacttaattatattaccacaacatgcattttataaatattaattaaatctcatatataaaccctagttaaataataatccaatttgttaatcttaagcggtctttacataggatatatgtagagtttatgatgtatattattttttaatattttaattaaaaaaagtgataaaaaaatgtgaatctatatgattttgtttgtaaattagttaaataatatttataaattgaataaaatataaatgaattagttaattagtatttacaaattgaataaaaaataaaaaatgaaagaattaagaagagaacaaatag

SEQ ID NO: 248543 - DNA, 1011 bp, Cannabis indica
catatcttacaaccataggaacagatcacgacgatataaacacatttcggaacagatagagagtcaacgcagagagggacagacgatcatttccatgaacacaaaacaaaacaaaggagaaaaagatattaaaaggagattgactaaccatatgtagtctgcgattggttttcgaccatattgatcagctatcattccccaaataatggaagttgttgttagttacttctcctaacatattatcataatgaaaagaaagaaaaaaaaaattccatttcggcattattatttcccttcttcaaaccataaaaccctagtttaaagaatacaaacatatcaactataaattacttatttaactcaatggattaaaaatatatatatatatacttgattagaaagaagatagacatcaagtaaaaaatatacatatcattatttctcttttgtttgaacaattaaataataacgaataaataattaaacaacaacattattataatatgcaaatcaactcaaaagaaactttaaaacaacaccaaaataacttcttaattacaaacgaaacttgaaaacaactacaaatcacgtaatacaacaattcattaatttactaacaaaaacaaatactcaactgaaaaatcagctcattttaatacaatatttaaccaaataactagattttaaaaataagtttgatgcgatttgtaatacgttgttagaaattttttgaataaatattattaaaaaagtgtactttaaatataataatttattttataagtaaaagacttttagattattctttcttagcaactaaataacagcaaaaaagctactagacaacaacactactttgaaacgtacaaaaattaactaggcatcaatacattttttttttgtttgctgtttgacaatcctaaatgtaaaataaataaaaattaatacaacaacaatcttaatgtattacccataaaaaaactaaatatatatatatatattcattttctc

SEQ ID NO: 248544 - DNA, 826 bp, Cannabis indica
cctatacagatcctaaatttcctaaagaaaactacactaattcaaatcgaaatttcaggagctcctatcctagatccagtggatctcagcctccttacgatggatacaattctggatcctactttccttcataaaactcgagtcaatttagaggtactcaatctcggtttgtcaactcaagtctcagttctcaatcaccaccacctggattcaacaatcagagaggaggtttctctgggaatagaggaggaagaattccaaataacaataacaatcggcttcagtgtcagatttgttttaaaacttgtcatgctgctctagattgcttctagaggtttgacaaggcctatatcaccaattcatcatcaccaagcaactctaaaaaccaagcacagatacaggcacatttggccagttcaaacttgggttgggactcgaattggtatccagacactggtgccaccaaccattgcaccccagactcccaaaacatcatgacacccactgaaaacactggttctgaccaactgtttgttggtgatgacacaggtttatcgattctcaaaactggtcattctctgttatcttctaaatacactactcattctcttttactcaataatctattacacgtgcctgccataacaaacaatttgctaagtgtgtctcagtttgccaaagacaatgatgtctatttccaatttcatgctgacatatgttttgtcaagaaggagaagactcatcttaccttactgaagggacaccttgtgaatggcttgtattcttttgactcttctcaaatccagctgcatactcctgagtcaaa

SEQ ID NO: 248545 - DNA, 500 bp, Cannabis indica
ttttttggtaaaacatacaatgttctattctatactgcccatttcacttgcttaaccaaatcagctgcatgattactagttgcattccacaataagtcatttctatctctccaaattgcataagccaaggcagcaacaactgccatctttacacccttgcagaacttggaagctttcgactttcggatacacttcagcagcccatgcaaagaatccgaatgcacctccaattcagccaaactttcaacatcttcaagcaatcaagagcaatgtcacacttaaaaaataagtgttcgacatcttttagatgacttgctgcagagaatacaatcgggtgagtcaatgatattgaaattataaagtctttcccgagttttcaatcgattttgcacagccaaccacatcaagaaactgtatttaggagaattaagtctattccagacctcattgctccaaacaactttgtcaaacacaggacaaaccagcaataaccattgctg

SEQ ID NO: 248546 - DNA, 776 bp, Cannabis indica
aaataaatttccaacagacccatacagagtcaaactgtcccgtggttctagacaaacctactacgaagtccatagcaatatcttcccttttccactctggtatgttcgatggctgccgcaaccctacaatcccctgatgttcaggctttacttgcccgagtcatgcgatgtagtggtgactctaggaagatcttctgctgccgttcatgtgggccaagtcgtcctgatggacgaggaagaggaagaaggagagatcatccctcccctggagcgcaaatgtaaaggcaaaatggtggagacagagcatgttaagaaaccaaggagggcggatactccagccctcggcgctgattcaggaattccttctgaagtggatgagtatcctgtgcctccgggtattatcttgactctcgttcatcctgatgaaggaagggttcagctccagatttccaagtacaactaaaccttgggtgaacacaccaaggggaatgcggaggccctaaggaaattactaagggatgcctaagatggatctttccagggcgagtatgtcagagacatctgggatttcgatttggatcccttgatagacaggtttaagcgcttcgtgggacctagcctggctccttttacttcggagatgatgagccattttaccgccgacctaaccaaaatccccttgaagatatatgcggcctgcgcttttacctaccccgtgtatcaagtccaggaaatgagcgtggcccttactgtagtgagttcttatttctcagatt

SEQ ID NO: 248547 - DNA, 1692 bp, Cannabis indica
gagatcaaagaatgatctttgattaattgttattagctaagattaggaaatggatgcaagttaaaatgattggagatgtataagattcaaattgacaataagatggaaattcctcaagcataagtgaaaaaaatttacaaggaatcgtaagaggataatgaaaggagtaatagaaattggatttaaataacgaaaggacaaaaacaagaaaaaaagtaggaacaacaaagaagcatctaatttctcgtaacccaccatgaccttaccttggagttaagcatacttaacttggggtaatctcaagatgggaaatcttctggagagtcatctcaaaaagtgtacgagtgaggacaaggtacgctagaaagattcatattaggatgcggaatcaatggttgttctagagattaccaagagaaaaggatgtattaataagtaaagatttataagatatcgagataagcatgtattaataagtagaaataagaaatgatctaattgaatatctatcataaatgaatacttaacttgttaataagttaagttagtagactagtttaggaggtcccataggaagaatagaaagacgcaattatgaactatgtatcgtggaatcttatggttttgaccaagtactaatggttggaaataccaagttaatatactctctattagtgtagacaatttatataataaatgaggatatgaaattcatacgagggaatagtctaatcttgtgaaatctcaaagttgatatctttggctatgatattaagaattaatgaaggatattgagaactatggggattaaagtaaaaatagcgtaatattttattcttgaaagatgggtaatctgggaagatcaatggaatattagaaatatgttgtgaccatatttgataaaggttagattatcttagaataatctcttcccctgacgaagtgtttgtctaaaagtgatgattatatgtaccattaaataggtctttaataagtgtggtacgagaaagatgttggacacatgttcactggagtaacacaggtgataaaagaacagaatggaccgaaaagttacaaggaacttataaaatcatagagtgaattcgtattgtatacccgcttcattgagtgcacagaaaagctacgctgatccaaagcaggggtagtgaattttgaataggagacactgtatttcttcaagtatcacctatgaaaggggtgagtagatttagaaataatggaaaaaaaattaagctctagatatatcggtccttttaaaatattggagcggataggccaggtggcctatcggttagctctaccacccgcgttgttcgggttacataatgtctttaacatttctatgttgagaaagtatgtctcagatctgacacgtatttagagttaagatgatatttaaccccagacaacttattttatgagaaagcgacttggaaattagagtcacaaatgttaaagctgtatccccaagttattcaggtaaatttagaggatgaaattttataaggaggggatggttgtaataccccaataagcctaatggtgagtaattagaatttataattatattatgggttaatcatgtaataagtaagattatgatcctactaatctagttcaacataaattttaaattttctataaatgggtaaataagcataatttataaat

SEQ ID NO: 248548 - DNA, 642 bp, Cannabis indica
ctggtttcttcatcaagtaactgatttcttcatcaagaaactggttttttcatcaagaaaccagttttttggtaatttttctggtgactgccaattccgatgacttttctgaagttttctatcagtgctgaaaaagtcgtcggagtagctgttaatgtctgaaaagtcgtcagaatcggcattgtcaccaaaaaaatcaccaagaaagtggtttctttatcagtgatttttccagcgacaatgtcaattctgacaaatttttcggcgtcggtagcaactccgatgacttttccggcaccggtagcaaactccggcgacttttcctacattagtgacaaataaaattacttaaacaattaaaaacatcaaatataggatttgaaaacctaatttacatatatatggcatttcaaataccataaaaagacttaaaaataaaaaaataccatataaattggtcaaacttaaatatgctatatttatcataagaacttttaaaatcccatagtaaacttactttcttctagtataaatggtgacattttgcgaaaagaacatacaaaaataaacatgtgaaatgaataggaaagtgttagaagattcatatttaattaataaaaaaattacataatagatcaaaaa

SEQ ID NO: 248549 - DNA, 1328 bp, Cannabis indica
agataaaatcatagatattaaattaataaatacaaatgactaagtttcccttgaaactagatatttttgtaccatcttaatgggctttctaggcccaactcacatcttggttttttgtccatgggtgaaggctacacatcaatgtcctgcctaggagaagctggttggccatacacatgcaggatgaggtctgactggctttgcaaggtctgtaggttgacgtgtggccggtcatgctccaaccagggtatggctggccatatgcctgtcatgatttggctggccatgtgcttgccagggtgttgctggccatgtgcctgataggatcctacaggtcatgttcttgcgaacttttccaagaggaggctagcctttagagatggtagttaacctttttaaagtggaggtcagctttggacaccttttccttgtagagatcaggttctcttagtcgaacggaagctcccttggtctacaagtcaccttttggccagctagcttatacccaatccaggcttacaaactcatcttggctggcctatagacttcccttgggcagccaaacatgttggtgtagctctttaggggctcgcttaactctttttgcttattacttgacggtttttccacaccttgtaaggagaccttgtcttgctattggtaaggttgtgttccacaagtactttgtcttggcttatgtggacatgatacattaggtggaaaaagtttgggatactagtgtacattttttctagtaaaattttaaatttgtaacctaaatttaccatataattaatgattcacattcatgcataaaaaagtttaatttcatttcattcacaatatatcaatatctatatgtataaatatataatcacccaacacagtatttaatctatatcattatgaagattgctctagtaccaattgttgattttcatggtctatatctgagttataaaatcagaagcagaattttgataaaataatttttatctaatatgaaccataagcccaaggatctcaacataatgaatatagattaaatctaatctaccgaaagaaatttaattacctcttgatgcctatcaggatatccttgattttttttgtataacaataaaacatccaatccaagaacttgattgaagaatcaacaccttgatcttttaaatgagtctcaacactttggaatagagtgagctattatatcttaaaggatgaacaaatttaggtattacattgtgtacttaactcatgacacactttaatgagattaggtttaatctcacacactccttgagaggtgtggggcatgtgagaagaga

SEQ ID NO: 248550 - DNA, 1489 bp, Cannabis indica
atctttgactctcgcctaccaagacactatatcggtttgttgaaaactttagaaattatttaagatatgattgttttgtattacttactgaatgtatgataatttctaaatgtgtatgaatttatattgaaccatattgttttctattattaattttagtataatttcgaatcttcattgttaatctaacttaccttgttgttttaatgggacaaatcccaaagggttgtcatccattagacaacataatagtgttagaactcgattgataagtatttgtaaataaaacatctagttgtacatccaaagatgacaacttagactagtatttacaatatgaaacattgaaggaagtttataaaataagaatgactttgactctcgcctaccaggacatcgttggattcttattttaatcgaaattatcctttatttttcctcttagctttttcatttagaatttacttaaatagtatatcattggatgaatgattaataaatcctctgcttatggtgtcattctattttcttctatgaaagtgaatggcacagatgaatatactcccgacattctatcctgaaatgatataagtccccgatcttagaattttctacttgtatatgcttactataggcaacttagagttattagtagtggtggtccaagatagaataattactcatgtatatttggtataaatttaagtctttgactttaaattttggctaattaagatttttttctcccgaactttgacatgtacgaaatcatgctccctgaacttttaaggtcgttaaaaataccccctgaactatgagattgttgaatttaaggatttctatccaattttagtaaaaaaactcgaacatggatgaaagttcagggggcatgatatagtacatgtcaaattttgagggacatgatttggtagatatcaaagtctggggagcatgatttagtacatgaacaatcaatgaaatagtaaaattgaatgaaattgtacaaaagtccttaaatcaaacaatctcaatagtttagggggaatttttaatggtcaaaaaagtttaggaggcatgatttggtatatgttaaagtttagggggtaagaatcctaattagccttaaattttagattccaaatatagaaattttaaattttagtttcctagaatacattggactatacagtatgactttcacatagttattaatgtcaattttttgtcaatatattcaaactgtatgttatgtatgaaatatgagttttgtattcagtgaccatggttcacttggactattttaagaactttttgttataactaaacctttttcatcaaaagaccacaaccttattttagtaaatctacgatatttgcatcttgttcatagtagttttgacaaaatgattctttgtaaagagaaaatatgcttatatcaacttgaaaataggatcatttatattcgtatatattttgcaaaaaaaaaaaa

SEQ ID NO: 248551 - DNA, 1123 bp, Cannabis indica
aaattagggtttctcattcctaactttatagctacaagaggttatctttttttttttctaggtaggtctgctgaccttccctaagaataggtgtggcttggtcagagttgtgttttgaaattgcgattcaatttttactactgctattagtcttgtctctgtgacatggttttaagtgttttagtcttgtctatgtgaacagattttgagtgttttagtcttgtctgtgtgacatgttttgttttattttgttttgttgttgagtcttcgatggctcgccataaatcgttgttagtggttgtgaacaacaagttctctacgactaaaggggttgttagtagtcaagttaatgaccttgcacaatagttaagtgctcaagctacgtggttgaatgaacctactgcaacagtttccactattgtgtcttctgagccgtagatgaaactgaatataggtgttcttaagcttaactgtgatgatgtagtctttctcatttattttatttttagtttttttgtcaaacgatctgggaattaggcggttgaatatttggttcatttttctaattttaatcttggtggtgtctccaacagggagatgtcctgattggattgcatgctattattttagctgattgctattacactatagaagatgctctaaactcctttattttaaagtttctttaaaatttactgttagatcattttttgaaaatttagttgtcaaaatattttctaattaatgtgcatatttattgagcatttaaattgttcgtattacattgattttgtgcctctaattactcttctattctaaggaaagattcattctcagctggtctcttttgatttaggaaactttttgtaagagaaagaattctcttatggaaagttgtttattttttaggaaacttgactttctctttttctaattgatgatttcagttttgccttgattagaacagatcaagtaaactttatttggcacgtttgaagtccaaattcgtgatctggtatattttaaaaagttcctttttggtcctgatctgctgttgcagagcccgattctgatgctgcaaatcaagaaattttttaagaaaagttttgtactagctggaaaa

SEQ ID NO: 248552 - DNA, 1344 bp, Cannabis indica
gtcgttttcgacttaaatgccttcaatctgagcttgatagccttctctataaagaagaagtctattggaagcaaagggctcgaacacaatggctcaaggctggtgatagaaatacaaagttctttcatcgttttgcttctaaacgtaagaggaataatactatcaaatttctcaaagatgatcatggaaatattctctctgatcatatggatatgggaaatctggtagtctcttatttctctgatctttttagctctgatggtagtgatgccgatgccattagcctcattcttgattgcctaggtcctcctttggatgacttggattttgcgttcttggataaacctttcaccattaaggaagttaggaaagccctgtttcttctctctggggacaaggcccctggtcttgatggccttaatgcctacttttaccaaaaaaattggtctactttgggggctgattttgccaaggctgttctgtcttgccttaatgagggggttgatttctcggcagttaatactacccttatctctcttattcctaagaagcagaatgctcatactctgaaggattttaggcccattagtctttgttctaccctttataaagttatatctaaggtcttagctaacagattaaaggttgttttagataagattatctccccttttcaaagtgcttttgtctcgggtcgagttatatttgataatattcttattgcccaagaattagttcatgccattaatttaaggaaaaaggggaagctaggttgggctgctctcaaattagatatggctaaggcttttgatagggttaactggcattatttagagagtcttatgtttcactttaactttccttctagatttgtttctcttattatgaaatgcatttcaactacctctctttcttttctggttaatgattctgttcagggcttggttaatccatctaggggtcttagacaaggtgatcctctttctccctatctgtttattctctgtgctgaaggcttttctgctcttcttagggcaaaccaagctgctggcttacttaagggtattgctatttctaggaatgcaccctctttatcacacttgttttttgctgatgatagtcttctcttctgtactgctagtcgttcttcttgtgctgctctccaaaatgtctttgatatctattctagggcttcgggtcaggtcattaatttttctaagtcttctattctttttcccctaatacccagcctgatattcgtgctgtgttcttctcctcttttaatcttgaagatagaccttttatctgtaaatacctgggtcttcctcaatgcttaactcgttc

SEQ ID NO: 248553 - DNA, 535 bp, Cannabis indica
accaatcactaaacattcaaagattggaaaaattaatcttaaaaaaataaaaaaaaaactaacctcttaatttctaaccaagctttttactcttccagcatttttaatttccgttagtgttccgagcgaagtatctcccccaatacttcaagtatggacaaaaaataaataactatagaaaaaaaacacagaaaagaaagagagaaatgaaaaaaaaaaatagtgaaaaaaacattacctgtcaaagaaaatagcggttgacggtggtgcgatgggcggaggtggaagaggacaagagaaatgggcggagaaggaggagggtcggaggaaatgagtgaaggaggaggaggagggtcaggggggattttgtgggggaaaatggaaaaatgttttctgagttagggtggggtgttttatagtgttttattaccgggaggacccgctaatattaataggatttcgccggtaataaaaaaatggtcagaatccttgactaataccggcagaacccacctctaataatccgccggtatta

SEQ ID NO: 248554 - DNA, 791 bp, Cannabis indica
atcaacagtgtgtcgcaccacatgtggatcctccatcttcgaatgtagggcaatcgaatatggagcctccatcctcaaattgtgagcctccaactatgaatgtggagcctccatcttcaaattttgaacctccaactaatgatgtggagcctccccaattcactcaaattcctcaacagtcacacttgcatccctcctcacaacctccctcttcttatgatgctcgaaatgacttgttagagtcagtgaagtgtttgatagctgaccaagaaaagttgcacaagtcaagatatgaggagattgaacgtgtaaatagagaaagatacgagacaataatgacaactatctctgaccatgcttacttgaatagagtgaggcatgagacactattaacaaaattggatgatttgactcgcatttttcgacctatagctgcacaattttctggagctggaggagaaaagactacagaaaacaaccaacaagtaatttgcataattttaatatagttattattattgtcatctatattttatttataaataatatgccttgtaacttcatggttgtaggattcaccatctcatgcacacttttttggagatggatttgtaacacctgcaagagagaggaacatggagggtgatcaagtctccacacttgtaggagagaagactgctgagaatacaacatctaactttcctacacaacttacagaaaacgaagtcaccacacaatctcatgtgtctgcaaactcctatgagacaccgccatcaattatttatgaaggg

SEQ ID NO: 248555 - DNA, 910 bp, Cannabis indica
tattaaggttgcttacttttttagtgatcatatattttttaaattaattttattataatattataggaaatttatgtagtacttacagttgttctgtagactttcacagtaaaaatcttacttttagtcagaataatttgtgaattaaaattaaaaaatattataattaattataaataataatttataaattagaactaaaaaatatgtggctaaatgtattagcacaaaaatcacaatttgttgtgactttataatacgtttttagtcacaagatttgttgtgactaaaactaattagtgataacttgtatttaaatactatgctttagttacaagtaattttttacagtgactaaaagtcacatttagtcacaaaaaaattatgttgtaactaaaaagctgtcaataaaaatagctttttttagagccctatctgtttcgccatctaagagagttttttaatccaatttatttttatgatcgcgtaagttatactattgaagactactcgtaaattttcaaaaaattttgcatagtttacagtgtcaaaaataagctttagacaattaccatgcttataagaaaaacagttacgtgtgcaacaaaatatatataattttatttttggtattgtaaactacttagaatttttcaaaaatttacaaattaatgatcttaaataactataacatacacaattataaaaaaaaattaaactaaaatattttatcgaaacagataaaaaatctaccattggtgcctaaagggatgtacggtagactttcattattatataatctttttcttttatattttaaaagttacccttcataaaagctcatggtttttttttcttttctttttctgaatgtgtccacagctagtactttagaaatattcatgtttga

SEQ ID NO: 248556 - DNA, 544 bp, Cannabis indica
ttggagatgtcggacgaggaggggtgaaggaagatcatcctgcactatgagatgtttttcaacctccattatctcccaaatcctcacttgaggcaattcagaaacaagaggatgccaagaacgattttgtgcactttctccgagctaatgagaaatgcaacagtgaaattgcgtaaggtaactcccgactcctccaattttgagatctggttctgtggtgcataaccttgataattcctttaagaaatctgagtctagaaatagcaaagtaaggattactttagatgacattgaggaggaaatcacattctggaaaccttcaatagtgtgctatgtcttgggagcaaacccccctttgcatatgttaggctacttttagcctatattttggattgattttatgttcgcttctcactgttttaggacggaattacgcttgttttctatgttttcgggttccttggaataatagaggtctccggatgcaaaagtccagtgaaagacaagttgagccaagaaaaacacctttttgaggaaagatgca

SEQ ID NO: 248557 - DNA, 630 bp, Cannabis indica
gagacgaaatctttttaaggggggataattgtaaaaactgcttaactttaatttggaaattagtagataaatagggttttattatgaaactttcatattagttatgaattaccaatttaaggagatttatttaaattcagaatgcattttatatgtcataaatggaatttcgtatttttgcatgttttgtgcccggcaacattggaatgcggtgtttggctattagaatcacattttagtattcttagtatagcggggcaatatagtcagacattgggaatgtcgcgattaattgagattttagaattgaccaaattacccttaagtgattttgtgactttttgcctaagtgaagggcaaaatggtcattttgcccaattagattttttgtcctttagtaggattttatttgatttactaagctgatttttggctgatatttatttaaataaaacctataattacttcattttattaaaattagaaaaaacataaaagacattttttctctctccaaaactctctctctttctcgagttccctagagcaactagggtttgaggatttttctgcataaattagggatttcaagaaagttttttgtgctttcaagctcaaggtaagttccta

SEQ ID NO: 248558 - DNA, 1907 bp, Cannabis indica
tttttttttcagctcttggaatgctttttcacactcccctgtccactaaaattttagatttcctatgagaatgttgaagaagggtatacctttatccatggatttttacacaaatctgcttagtgcagcaatacgtcccgtcaagctttgtacttctttgattgttgtgggcgacttcatgtccaaaagggcttgggtcttgtccgggtttgcttttattcccccgacattgactaagaagccaaggaaatttcttaagcctactcaaaaagaacatttaagggggttgagcttcattttgtacttttggaggatctagaagaattcatctagatcgtccacatgccccaacctttttagacttgccagcatgcagtccacatactgctccatatttcgggcaatgagatctttaaacattttattcacaacaccttttataagtggctcttgcattttttagcctaaaagacatgactttgtagcagtatatgcctatgtctgtcatgaagcgtgtgtgctcttgatctggtgggtgcattttgatttggttgtaacctgagtaagcatccatgaagcttaggatatcatggctagttgtatcgtctaccagctggttgatccttggaagcgaaaagtagtcttttgcacatgctttgttcaagtcagtgaaatatatgcacactgtcaacttgttttttttgtttggatacgaacatgggttggatacacaaagtttcttgaatgtttggtgattaagtcatggccactcatcctttccactttatctcttagcacttgggtgcactcttaatccaacaacctccgtttttattgcacaattcaaaaatttggatcaatcttgggggcatgggtcatcacagaagggtcaattccgaccatgtctccacgtgacgatgcgaagaggtccaagttttccctagaaattttacctgtactgatttattttgtggcgctaaatccttcctaatcaatagtcttatagctggaaaagtgtgattaaccttcacttcttccagttcttctacaagtccaaaagttgttttcataatccccaaagcgaggatctatgtattcgcctcactttaggatggccttcattgtcctttgctaggctcagagctctttgcagacatcttctctttcttggctttgcacaaggccaagttgtaatagtgacaggtagactgttggtgtcccctcaaacatcctagccaatgccttgttgggaactttaggcaaaggtggtcaataaatgttactacctttaggttgtataaagctagacaacctatgatggcattgaaggctgaaagcactttgcttagtatgaattgtgccatcagcattccagttgttgggttctctccaattggtaggggcaatcggatgtaccccatgggtctaatgccttggccaaagaagccatatattacttgtgtgtaaggtgccaagtcagttagttggagccccatcttttcatatgttgatttgaaaagaatgttggacgaggatccattttccgcaaagcaccttacaattatcatgttctaatctatgcagtaattactaggggtcattgtgcaagcagttgacttgggcagcgtctccttttgtaatagagatggcgagctctccaagtttgggttgcttgcaacacctcttttgaatggccagggcatcacttttaggctcgtgatgcagtgtctgcgcatagcactcccttaacttgctggtttcgcctgcaatgtcaggtccgccactgatgacccctaggtgcccggccacttgaaatggcatagagtctcagttttgggtagcttgttcctaagattggtccatctgcacataacaaaacaagtggggattgttcttccttataagga

SEQ ID NO: 248559 - DNA, 599 bp, Cannabis indica
agtgtaatagccgaaaaaggggggttgcgccatctgtcatgtcgtttatggagattttaatacgtcttcccccatgcggcattaaatgcgaggtgactgttcaagacatctatgcacctcgcagaacttccttagcataccttcgacctcccaaagagtagaaatgcttcttgtgctctcctccgggagacacctccctgagatactcccctttcgcctaggacttattcgatttttcgtgtgttgattcttacagatccacatgtcagctctatccaggtccacgtattttgggaaaaaaataagggcaccatttaccccccaagcctcgtttagtgaaagataaatgaggcttgtttggtgcctccggttggcatattggtttaatggcacatgcttcaagagcgtgggctgcatttatgatggtcatcattaatatttatttcctttcgcaggcaatgattcccttcccgtccattgagaaaccgacacatttcatccgagtgtcaataaagtaatcaaacgttttcaaccgccctggcgtccatttgtctcaaccgttggatttgtagaatgcgaatctgttggaattattttac

SEQ ID NO: 248560 - DNA, 4320 bp, Cannabis indica
tgcagtttgcggttttgaattattaatatgcggttcaaaccgcaccgcatattataaaaataccaattttaatatttatttaggtccaatatatgaatgttcaacttaaagtctattattctttcaaaaaaaacttaaagtctactaatttgaaaaaccgcatgtgcgggttggtttaaaaaaatagtcaagaaccgcaccacccgcaccgcgaacacccctaatgttaagagaatgtcatcaacataaactaaaccaagagataaaccattgagtctcctgaacgatgaataaacagagaggtatcagatttggaagcttgaaaactcctttgaaacaaggtatgcttgagcttctcattccaggccctgagtgtctgtttttattgggattttatactctaaataaaatacatttcaaagtaatcttattgactattaaagaataatatagaaggtatactttgtattaattacttggtttcatgattataatttttagttttgatatataaattctattaaattcagaacttatgaattatcatgattattgtgttgtctacacagtaaaaaatattcatgatcataagcttcaaacattaagtcctataatttattagcgcacaagatttatactgatgtgataatcattgatatagtttactacacttaaataagtagaatactttttccagggtattagtagagtaaactaagatcgaatgtattggctatacatcggattagaccaatatttacagtagaaaagatatcgtaaacttactacaatatcttttctaagtaaatatcacttggttgattttagatcaatgatcttaatcctagtatggttaggttctagcttaactgtaatttttttgttacaagcgtatctataggattgactcaatacttacatcttgggaacatagtagtgcaattgagtgaaagcgctaattatagatatgaaatttacagcttctacaattgtatagaactgaaatgatctctccttagagcttggctaatatacataaatagaagagctcttatttcaattattatactaatttactgaaatattatttataagaagctaagtgttttgagaataacatacattgaagggtaacacgataattttagtcaatattcattataggcgatctatgaaggatcattgattatttagattgaaataatggataacttataacgtgtatattctcggtgaatagagcgttctatgtaatcaagagtataatttcgaatcgaatctatgatagaatcaaaaggaattaataagatagagaatttactcagtaaattctagaattatttattggaagtttgattatataggttcatgatcctcacactacctgagatcttattgccttatagactcaatcaattgtttatattttatcaattagagttctagataagactatcttatttatgaattttactaagcaagggcaaatttgagaagaaaaaagaaatttagggtttaattattaattaagagattttagagaatctaattaataataaattaaatggtaattttatttgacaattagtcataattattaaatagacaaaattaacatttaaaggcttagaatggaaacaatagtatttttttttaaaaaaaaaataataagttttaactaaaatgacatcattgaaacccatagccatctataagtggtttattatttcaaaatattatttataatatgaataatagtgagaaataaaaaagaaagaagaagaagaatggatgaaaacttttaaatgtagtttcagattgcttccttgatttttcaaacttgtttctctttaaaattgtattttctctcttgtcgtcttcacaagctgaagttataatgttctttttataggctagaaagatagaaaatatgacgttttaataataggatagggatcgaattgtacagaagatgctatagcgactcaaacacagcgttatagcgccatgcgtgattcctcgagttttcaaacgtgcaaaaatcatcttctttttttcttttttccaagtcagcgctatagtatagagcctaacacatggcctcgtagcgccaagatctatttattgcagcttcgcttgtttctcgattcatttgctttcaacactttgctcatatatgtacaatttatttcatttttgtcgtaatttcatcattttaccattaatactgcacaatacaaaaaatacatcaaatctatgtacaaaattttaagaaataaacaataattcacctaaataatatccaagaatgaatgtacaaatgtttactcattcaaaaaaatattacaatttaaatgtcaattcattataaatatttcttttatgttttatttttaaaaaaaaaaaataatatttttttaaaataataaaataaaaaaaatattaatgcttcttaaaaaattattatcataatatcattacctatttaaattatatctaaagttaaaaatcaaaatttagtaagtatgaatgtaatataaattcactaaccaaaacatatatacccacagtatttttttttcttttataaatttcaatcaaaatattgaaaaaaaaaaacttatataaacttttgacatttttgaccggtgaaaccggtgtcctgttaatctgttatcattaaaccgttgctaatcctaagcttcccaactaaccacgctccagctctacccgccattaatgaatttttcaagcttcttcatatcctaattcctaacgcaattagcgatatccgaatcatcctctcttcaatgcataatactactagggttgctgttgtgggaactggaagtaacaaattgtttttctcgtttatatataataattccttcgttcctaatgtatatagacttatagttttgattttcgatatgctccccattgttagtttcaggagcagtttctgcctcaattctcgctcgaaatggtttatctgttaccttgttcgaatctgccagaggccctggaggccgcatgtctcagcgaaggttctctgattctcttttaatatataaaattgagtaaagggtatatgatcatatagttgatttcggtaattcttcatttggatctagttggaaggaaatgaatttgaatcaacctcctttttatttaagtaatttcttggactcgtttggcttttagagagggattttttggttttcaggctattttgcaagtttaagagtagaagtgtctaagagtatctgtatttggttttgatattttcgactatactttcttacacagagaaactactgaagatgggacggaattaatgtttgatcatggtgctccatttttcacctccagcaacaatggggtactgggtcttgttaaggagtggcaacttagaggacttgtagctgagtggaaggaaaagtttgggtcctttgattgtacctccagcaaattcactgatacagaacaggtttacatgtattgccttttatttttcaggagagtaacatctcaatcggcatattttatattttgaatcagaattccttaaatatgaagatgtaagattaaatcaccagttttatatagtatattagttatacactgagataccatatagattttttttcatttgaatattctacccatcatgcattaaaactaaaactaaacgaaaccaatctgtttgtgaaatctttttctatgcacacatttgctcttatttttatctcatgtcagattatagtctttctgaatctttctatcactacatcctgtaggaccaagtatgtaaaagatatgtgggtgttccgggaatgaattctatttgcaaagcattatgccgtgagcctggtgtgtatataaatctactgcttctctatattgaacatttgaataatttttcaaggttcagagtgagttttttaatattttcttaggagtggaagctaggtttggtacaagcgttgggagattggattggctacagaatgaaaatctgtggatggtgacagccttggatggacagaatcttggccacttcaatggtgtagtagtatcagataaaaatattttgttgccaccaattacaagtgtaacaggacgaccacaaccacttggtatgatctatgatttttatatattcatctgctggtggagcatgtattttatattaagaacatccaaaaagataatatgttttgctctctactgtgtatttttttcatttgttaactgggactggattgttgcagaaaaatgacatactcaagtttgattttgtttcttaatctatataga

SEQ ID NO: 248561 - DNA, 1193 bp, Cannabis indica
tcattccatatcttgtattgagaggcgttgaccataagtagacgtggttcgtaagtaaaactgaatgacagatataaaagctttatgagaatcagaaagtttatcataagatatgtaagttttgaagaatatgaggtgtagaggttttgtcttgtaagatagaatgacactcataatctcgtaaatatgcagtaggcttagtgatcctcctggtgcgtctaagagcatgttgtgagggatttgaaggtcctgtgttcttgctggaaacatcagtaggctgaggtgaattcgaaggtactgtggtgttgctgtcagcatcagtattgtattggtccgaaattccaatgttttggttatgatttgtatcctgcaaatttatattctggtttgttctttcaacctgaaaaggattgttagtgcaaggagtatgttgaatattattaggaaaatcatgaacatgagtatgagagatgttggtagagggaaaaaccatattagtaaaatgatcaattaattttgtttctgtgttgagtcgatgaaagggataaattctttcatgaaagactacattcatggaaataacaaattctttagtattaatatcatacaatttatattctttgatacctttaggatatccaacaaaaatacaagttcgagcccgaggagtgaacttatttctgtgagcagtgagagaattagcaaaggcaagacaaccaaaatttcttagatgctcatattttggtggttcattatacattaattcataataaggacatttattatccagattaggagtgggagtgcgattaataaggtaagctgcagtcatcacacaatcactccaaaattggataggaagtttggcttgaaaataaagagctctagcaacatttaaaagatgttgatgttttctttcggctatggaattttgttcaggagtttcaacacatgtgaactcatgtatgatgccaaatttagcaaagaggtctttaaaaaataattaaggtgcattatcagatctgaagcatttaaaggtgcaatgaaattgagtttggacataagatagaaaatcaggaatgatttggatagcatcagatttttgtttcattacaaaaatccacgtgaatctagttttgtcatcaaccaaagtgagaaagtatttttgatttgagtgagaaggtatatgataa

SEQ ID NO: 248562 - DNA, 662 bp, Cannabis indica
aaattagagcagtgcacatttttcctcgtaagacccacaagagggctccactggatttatgaaaatgcaactttttatatttaaaatcatagactaaaaaacaaaacaaaatgaacttaatttcttttggaagtagaagtagaaggataataaattcatataattaattaaataatttacatgtatgcataattatatatgataaattctgtgatagagttatatcctaataaaatcttatataagactaaaaaagctcattgagcagaaactaaaaaactaagaagaaaattttaaaattgagatgttaattggcatggtgctaataatcctagaaattaaactctaagaaacaagaaggttgtcattcctcaaaacatagatagcttcagcaactttggctttcaaggcatgaggtgagttgagcaagtgcagaagctgtgtgtggtccatctctagaagcatgccagtgactttagctgcatttttatgctccaattgctccacaagtggatacaacttgtttcccaccaatctcctctgttgttctgctgtggaattgcctaagccactacccaaaccaccactggacatctgtggctgcataagtggaggttgcccattttgttgtacaagccttgttctagctcggagtaactgct

SEQ ID NO: 248563 - DNA, 620 bp, Cannabis indica
aaatattttatatagggcctgaaatttaattttgttttaggtcccatatactttaggacaagccctaggtatgtccatctgatttgaatccccctttcctcggatgattgatcttataccagtagacaatcttgatattattactaattttagtactggtttagataaagaaagtataattgagtttttgctttgctttgtttcaatcattgaagttgttttggattataagaggagttttgatgttttcatgttatataattacacattgcaaactacaatattattcatcataataggatagaagaaattatatgttcactataattatatgaattagtagggatgaattatatgtttggaccaaattttagattaatgatttatacataattaattagaataatgattcatcatatattttatttattgaaaaacccaataaattaaacaactatttgtacaaaataatagatctataaggatttgaaaaggatgaacaatacatatatttttttataacatatatatttaataattttttaaataatataacatatatcaataacaatttatgtataaatataatattctttattttcatatactctcaatattat

SEQ ID NO: 248564 - DNA, 767 bp, Cannabis indica
aaaaatattaagttttttctcatttttcgttggaatgctttccttccatttcaaaatgaaatagtcatcccaccaaaataataaaaaaattattttattaaaaatttagaatgatattctaatactttaaataacaacaaaaaaaaaagtaattttccttccattttattacctctaatctaacgccatctaagagatatattattaagcacatgcttcttctttttagtaatttaagatcattgttagatgatctagtaagtatattatttaaatttttaaaagtagttactaatcgtatatcaaacaatcatatagctacacatgaattaattatgcatacttatacttttcatagataaacaacttgtttagctaaatcacttttttttctttattatattagtataacaaagtaattttcaacgttaatgatccgtttgtttgccaagatgtatgtttatatctaaataaatcctttaatatttttttttttgtaaaaatcctttcataatattttgacattcacttcaagaaggtaagtattatgctaaataaaataatattttaatcacaaaaatttattctaaataaatttgaaaagtgattacagattaaataaaaaacattttgtaatgtagaaaatactatctaaacaaaagctaaaaaaaaagcctcacttcaacagatactcaaaataagtagtgaaatcaaaatcaacaatgtcttggcatcaaaatctctccatgcaagtctacaccataatt

SEQ ID NO: 248565 - DNA, 582 bp, Cannabis indica
gaacacttcttcgaccatcctcacctactcggctgtaatttgatattataccttattttacaaaatattaatttcgatacattaattgaaaagattcaaaactgtttagaagtacaaagtagattttacaataaatatgcaaaaaggtgattgatcattcacattaaataatagttattgttacaaaaataatgacacttaaaagtgaacttcgccacagaaaattaaaaaattaggtgtgtaacaattgaaatatatgggtttcgccacaaatttctcttacttttatatattttttcaagaatagttatccactaccataataaaaaaaaatgaatatttactattaattttatgtatatataattaagaaataaatatttattactataactattaggctattacatcttattttaagattaatttatttatacttacattaagttttttcgagcttatcttgtcgtgttatttttaattttatatctttcatatcgtcatattaatttgaaccatcatatcctggttgtaccaaaactcttgcagtgtcaaaaaactcaatctatatttaccataata

SEQ ID NO: 248566 - DNA, 959 bp, Cannabis indica
caatagttcagaaaaaaaaatttaatagcccaaaaagttcgaatagcaaatattctaattagcgaacaaaaaaataataataaggcattgtaaagaaataaggaaaatcaaccatctacactacttcaccatttagtctagttacatgtactgtaaatttagagcaaccttatagattgtactccgaacatgaactaggacgtttgagtcttatatgcactcatttaatactagttttattaaataaaacaatacttatattatatgtctattctatataaagtgtgtctatataactgaaattcttggtttatgagaaattcattgatgactttttatttttatttaataaaataataaaatattatttatatataataaaataataataaagaaattccattaatatttgaactgaaaacccatttaaaaagaaaacaactagggatttgatactccttcgttaaccctaagaaaaagaaaaatataaccaatcaataaaaaccctaagaaaattttaaagtgtcaaattcaccctttcttctttccttgttcttccgatagacctcccatcagatcagaaaacgatgatccaaaccagattcttccccaaatggcttcttccaagaaacccatcaaaacccacttcttcattttcttcaaaatcccattacaaccaacccattatttctccttcttctccttctccgatcgtcaacccaattctccttcaaccacgtgtggtggtttacgacggagtctgccacctctgccatcaaggagtgaaatgggtaatcaaattagacaaacacagaaaaatcaagttttgttgccttcaatccgagacagccgagccctatttgagcctatgtggactcaatcgagacgatgttcttcgtcgatttctcttcgtggaaggtcctggtgtgtttcatcaaggctctaatgcagctcttaga

SEQ ID NO: 248567 - DNA, 687 bp, Cannabis indica
taagctcaacgtatataattcttccaagtgtcataataatttttgttttgttttgtttaagatgtaaacgcttaagatgtgtttaattacatttgggaaatatataaacttaaattatgataaaaaagaaaaagagtattattttgaaattttgtatgtactttgatggtaataatagtccatcaaaataaacagaatcaattcaattcccattgttttgtacacgaaacctctaaataataagaaccttagactttgggtgacgacgtgcatgggttgaggttccaaaagaaagctgattagaatcgaaaccataggctattgcttttctctttctcataataaaatgacaaaataaactttattacctatcaattaatattaccaatagtccactattatatacaatacataccagaattttcatattatttttaatttgactctgttcccgtgttgacaaattcacaatttcaatacgtcttttttgacggtgagagtatgatgttgttatttttgggggacaattatgacattaattaaattgtatcttctggagtactttggcctaatgtgaataaaatacattacattttaatttatgtgagataatattctttaataaaaagatacgacaatattctctctccatagaaagacacaatttgatattatatatatatatat

SEQ ID NO: 248568 - DNA, 835 bp, Cannabis indica
atgaacaatatcaataataaactcataaacaaatctgtaatcaaataaaaaaatctcaataaagtttctgatataaatctcaaaagtcccaaaataatacattcgtataaatatatgtatatatcaaagatcaatcaataaaaaaactcccaaactcataaacacatatgaaatcaatcaaatgaaaaaataccaataaagtttctattaatcataaccaaagcacaaaatgagaaaagtaaattagtcagcaagtctattacaattgtggcttaacaacagtaaccagaattcaacaatttccaatctttggttcagaaaaaagattacaaccaaattttttggataaaaatctacaacaaatagcatgtgcaatgagaacaagaattaaaaagtgtgcagcttgataagttcaaccaaaattggtttgattttcttaattacatgtcctagaaaactcaaaagtcaaaacaaacaacagatgtaaatagaaatttataaacatatttaccattgaataacaaaaaatgcaacaagggaactgatttaacctaaagatattaacatatcaaaattttaattcttaaacatgcgagacatcctagcttcctcttcgagtgagatgaacaaaaatgaattgatacgcagttgggtgcagcaatttgaccgcataaagcaaaattgcatgacatataaaccccaaagtcagcacagtttaacaaattagatgataatcaagcatcaaactttaactattattccatcaaaattcaatttttagcatacaaatatgatcaaagagacaaataatacacttatgaatatcttcattaga

SEQ ID NO: 248569 - DNA, 661 bp, Cannabis indica
cataaaaaaactcatataaatgtgaaaaaataaaaaaagtccataaccctatagtgttatttatttatgccataaaaaagtaaactataccctcaattcccatatttatgaaaatttcccaataacatattgagcctatgtgtcatgaaaaaataaacaaacaaataaattaggccctcttacctttttgggcccttggcatgtgcttgtattgcaaagcctatgggtcggtcattttcaataatttaaataatattggtataatgtcttgtaaccagaaagaaatgtatgttttaagtatttttaagtctcatgagatggaattcaaggcactcttccatagtctaatgggcatctcagcaacaaattggccttacttacattgaatttgatgccttgatggttgtcaatgccttatgttctccttcaccagctatttcatcctttactgatttaattgttgatgtatcttgtcttctttcctttcccctaatgttaaaatatctcatgtcaaacgtacagccaatatggctgctcatgttttgctaaatttgcattaggactggatgaagcatgctcatggttggagtgtatccaaatgactctatgttttaatttataatgacgagtttttaccaaaataatttgcatgcttaccttg

SEQ ID NO: 248570 - DNA, 1057 bp, Cannabis indica
taataataattattaataataaattttttattaatattattatattattagtattatattattaaaaaaaacgtctgatcttcttcatttatatatataatatataagttatgttatatgtttgaaacagtaaagaacgaacgaaaccctcattcttcctccttcgataaaattttctccccctatattcattttctttgattttcaatcaaaaacttagcgatctaaactctgatagtagcagaatagcaaattcttagagaagggaagcttaaggtaaggtgtaatttcattttaagtgtaataacaattagtttcatataggggttttatgagttagaatagttatgaaggttctgaccttataggattgttctcgggtagtcataggactagtttagatgttttcttgttgaaattgaggtgattttgagttcaaaatcgagtttgaaacttttaaagcttagttcgagcgttaatggcgttttccgtttaagggtccaattttaatttctgttatgtaaggatggtagtattcgtggtatatgtattctctgtgaagtttggagtgatttggataagttttcgtagtgtttcgatgagtgcaaaaattgagattttcgtatttcatagtgtttttgaaattcataggagatcagaaatcatatttttgtcctaacttttcaccaggtgtccgttttggacgttttatataccgtttcaaagcttgcgacgagttctacgataaggtgtatatttttgtcctaacgagatttgatagaaaatcctaaattgtcttacgcgagtgttaagtagtgttttgggataaacacttattgatttattattgttatggcatagggcccaagattatcgatcgttctccaagcaggtcagccaacatacctgatccagaacttgaggtaagaaaagtataatgtatcgcatggcatgacatgttctgaaattatcgattgtctgattaggtaatgataatgtaatgatactatggacataatatatgggctcacctgattagttgagcgatatacctggc

SEQ ID NO: 248571 - DNA, 1079 bp, Cannabis indica
agagagaggaagagagagagggtattttttttagtttttatttaacaatttttttttattttttttaaaaaaaagggtaaaatggaaagtttatgtaattaatggaattaatttgtacaaattagtggagggtctaaattttgatatttggggttttattaaggacaaaaaaaataaaatttccctatattatcacctttgtaatgtatagggtgtatcttaaccacttgagagaaattatattgtgtaaggttagagagagagtattaaacctttgagagaaagttcttcttagaatctctataaaagtttaaagaatttttgtaaccttataaacaaatatcaataaatatatagatgttgttgttctaacttagatataaaatattacacatagttcgaacttgttaaatcctaatatcttctcctcattgatttactgtcttaatttctgatttttataattctttgatagtattattcttaatttggtattttttcattctatgtcattgtttgattaaaaaaaaaagttcttaaaaaatacacgatcttagtttacacatgtattatcaacttgtttcatgatttcaatttttatattttgtatgatttggtaaatagctgtcaattttagttattaaataattttaaaagaaaaattgttacatcatcaaaagttacttataaaatatgctttttctgaaaggatatttatttatttatttatttttagggaaatacttataaaatatgcttggataagcattattcattaacaaaaataataataagcaatttctagatataattattattaatattataattttaagaatagattggtaactgatacagtggaaagttgaaaccattctaccaaaaaacagagaaaagaaatgtaatggaaaccaatgacacaagtcaaatatcttaataattaaaaacattaaaaaatcatgtcaaaaaaaaaaaaacattaaaatataataaagggtcatgctcagacaagtagtaaagtcaggacagatataatagttgaatcggagatttattatggatttatcattacaaaatac

SEQ ID NO: 248572 - DNA, 835 bp, Cannabis indica
cattcacttcaagagaaggatagcatttagacattaacattggtaacttaacaacaggattcgtctccttattttcttatcttgattaatcttcctttgttatttttaattttctgaattgtcttatttaattcataaaagtattcttttaccagatagaatcaatagtataatttagtggtaattagtcaaattccctgtggttcgacctcacctgtgtgagtttactacttgattgcgtatacttgcgtagtgtttataaattatagcaacaattttattctattacctccaatcaaatattttggtaggaaaaatgaatggaatgtgataaggatggattggaaagatgtaatgtgttatggatattgtgtatgatgtgtggaaatataaattaaggaaataaattgatcacatatttaatttggtgtaattggaattgtaatagaatcaaattcttattacattagaaaaactgggtaaagatgactacatcaattaaagtaaataaagttaaaaaatgtaaatactattttggaccatgtattttgcaaaagttataaattggattctctgttttgttaaatgacaaaatagaccataattttttaaaatgaaaaaaataagatcgtgagcttaattttcgacaactcttttttttaatataaccaacttgaaggaaattcctaacacaaacaaatacagaaaatgtaaacagttttgtcataacacatttagatcagatttttattaaattttattttgacaaaaaatcagttcagggtcctatttgtaccattttaaaaaatacattgtctattttgtcatttaacaa

SEQ ID NO: 248573 - DNA, 744 bp, Cannabis indica
ttctaggcacaaataatagggccctgcgcacaaaaaatggagttttcccaaaattatttcgagcattatctccttcttcagaaaatattaagaattaactatttctggagaccaaacgaaacttccgaaggggcaaaagagggaccaagcgcccaagttgacattttgtcaacttgggttgtttccaattcagttcaataaaaattgctccgagcatcttcaccgtcattagaaataatgaagattcaagtgaactcggggagaaaaccacaaacccgagtccttggaaataacacccagcgctcaagttaataatcaacctgggacgttgccttcaattgcttgtatgccaaattcaatgcgaccattgaatctgatatggtcaaaatgatgggagagatcccgtcctcaagttcagaagcctgggaagccttgaaagtataaaaaatagaatctcgggagctcaatttaaaggccccaacgcccaggtcaacatttggccaggttcgttgggttctgcttatctgattctgatgatgtttcgattgtttgtcaagttttttacaggtgcaatgatccatgaagttagatcaatcaaattcacaacttcaattttggctcattcagaagccgaaaatcttgagtcttccatttttgcaaaacagcaacatccccgagaatgtgtgaccaacttcaccaaaacatataaaaggattaaggagtgtcaaaccatcacttaggcat

SEQ ID NO: 248574 - DNA, 579 bp, Cannabis indica
atcaaaaagtagaataagcaaaagcattctcaacttgttggcccccaacccattgtatccaattaaaaacttcatgggacgcaaactgaccatttaaagctcattcctactctaaactgaatttttcattccaacttccaagttatcttgcttcataatggtaaccttcctaactaatcatcataacttctaaatcatatttataatttatagtttagtatcttcttaataatgtaaaccaagagaactttcagaaaataaatttcaatttgattcatcaagattggaaaaacatcagtcttacaacataatagctacatgaaacattttccaagtgagatacctgaaaactgaatcagaagaaagaattcccaagtgagtatcactgtaagggtgccataaaacttgcagcacacggatgacactgctcccattagaatagatttgtgaaccaacactaacagtcctgcataaatggtacatcaatctcaaaccttgacataagaagtgctctttaccaaccaagactcaactacaggtagaatcgaaactaaaaaaccaagaaaacaaaaagtttcc

SEQ ID NO: 248575 - DNA, 610 bp, Cannabis indica
ctttgttgaaatcatagccctataaaaaaataatatggtttcctcttatacctaaattttatgagcatttctatcatatcatggaaacagtagacatctgtgacatataaaagctaaaaacacggagaagaaaatgatataaggaaaaaataataaatttcataaatttgatcacatagaacatattaaaaaaactttctagaactcaacggggtttctccagaagcccatttgcacaatgatgaccctcccacaattcaagcccaccaatcaccatccccagcataaacaccacaggctgcttcactttccttccttagttcaataccaggcgggtccggccacactaatatcaacacttgaaactaaaatataagctaaaaataatgaagatagtacctttactcatggtttgatataagtaggatgaaaatagataagaaaaataataataaataatgtgaacatttgtctctttttgcatctatattgtttaccaaaaatcaaaaaatagtgtgatttagaatgagttgaagcaaccctttcaagagaataagcgggatttctaacccgaacatgtaaacttgaaccaagttgggagcagtagcaa

SEQ ID NO: 248576 - DNA, 653 bp, Cannabis indica
aatttctaataagaaaaaataattcgcacgtgcaaaagtatgtcaaggccgatcaaaatcagaggggtgataacaaccaagagttactaccaccacaagtagatgaacatctgcaagttattatttgaggatcgcacaaagctggagattcaggcaaagcccgaaggtatgcccgaacagtacaacatgggcaaaagaaactaattctggccgtcgagggaagaaaaccaaagataccacgggcaggggagcccaccataacattaatgatgaagatgctatcaatatcagtttcccgcacaatgaactggttgtcatggaagtccagatagctaacaatatggtggcccgaaccatgatagacaatggagcctcttccaacatcttattcaagacactatatgaaaagatggggctccagcttaaagatttaactccctggctccagcctgtgtatggtttctctggccaaggtgttgcacctctagggaaaatttgcctacccctcactgttgggcaagctccgaagtgcgtaactataatggcacaattcttagtattggacgttccatcagcatttaatgtcatgttaggccgacaagctttatatgacttaaaagctgttatgttaatattccattcatgccttaagt

SEQ ID NO: 248577 - DNA, 499 bp, Cannabis indica
cttttaatttctttatatttattctatctttaatttaaatatggatttgaatattgagattatactaattttttaagttagggatatgatgaatgttaaatgatgttattccataagttaatgtgatttgccatttcttctttcttaaatcttgtgatttgtgcatattcgttttaatacatgttctcacctttaacatgatttatgatcctaacatgaaatctgaaaagtaaatttaaaaaatgttccaattgaacaaacatgagtacactgctacaaaataccctatatagaggcaaaacactaattaaaaaggaaagctaaagcctcctaataatacctgctaataaaaaattgacatctagaggctattattttatagaaactgtaggtatagaattagactacaccttgttgaccgagattttcggcaactattagaatctaattatattaaagagctgtaagaaagtgagatgaagatttttacgtggttggg

SEQ ID NO: 248578 - DNA, 524 bp, Cannabis indica
tgacgtactcgtgtataagagccatttattccgtgggtgtaagggcccaatggagacttgaagcggggacgttacaaagacagtcgaaattccttgcgaaaagctcaaaggtttgaagaataaaaatggcaaaataaatgatcagtttcaaattatacctaaaagatactcaccgtgcgatctaaataagacctgatctaacaaatgagaatttttttacaagaatggaatagttagagcattaaatgagcaattatatgcctcgaagttctaaaccgccaaaactcaaagcatgtagtttttcaaataggtaaatacaattatatccctaaaaacatttaaaaagttctttttaatagcactttttagggaacaattgttatacttaaaagtcggctattcatcagatgctgacacgtgtcctacaaaaagaatggttatcaattcaaagaatatagtaattaaattacattattaaatgtaatttaaaataactcgtttcaattaattatgagttgatagaa

SEQ ID NO: 248579 - DNA, 1476 bp, Cannabis indica
cgagcgggctggcgacgccgctttcgtgcgccgccaatgaggtggaggcggaggaacttgagaaactttacgaaaggtcttcgtgtttgaaaggagtggtgctgaaaacgcgacacgtggctgatgcagttttgttcctcgcgagtgatgaatctgagttcgtcaccggtcataacttggaagttcatggtggttttacttcggcctgaacgatctacttggactcttatgttgggtcgggctttatgctggatcctctagttttttttttttttttttgaaaatgaacattgattgatataataaattcatcgcaaaaaatcagaaaccatccatttaaattagtttgtggattcatccacacgaactgctaattgtatataacaaatatgaattagagatggctgagaaaatttggataactaactaacacaaacaactaaaaaaatccaaatatcaaaaaggatcacttaggaaaagtaatggacagtccaggtgcgagctacaactacagaatccgctttctactaatctcccaaataaaaattgtttggacgctttaacatatattaaataacaatacgagctcctacaaaaatgttaaaaagaaataatgagaaacatttcaaattaataaactaagtaaactatcaaatcccaaaaaataatagctttagattaaaaatatgaaaaacttagggtggtaactattttaaaaatagttctttgttttttaattaaaaatttaaaaatacaaattaaaaaaaaatgagatttttacactaagtaccaaatttaattacttttttacatgcttatcaatttattaaacatttttacaaaactacttttacttttttaaatctcaaaaaatattataattacaaaaatactacaatattcaccatttggtttctctcatttttgtttcttcttctttgtcttcgactgctgatgaagggtggtggttcaacaactgagttcgcaagtcggataagtcgagctctaatcgccgcttccaactacacaaagccaactcgttcatggactccttccctcaagaacacattgcaccgactccgttgtcgcaactcactcaccccatcactcgttgcccgagtcatcgacccctttcttcttcctcaccactcacttgcacttggattcttcaactgcgcagcccatcaaccaggttttagtcacactttcataacttaccaatcaatcctcaaatctctttcttgttcctgccaatgcaatgccattgatactctcctcaagcaagtgaaaacccaaaaagttactctccattaatctatttatggctctgtgagatatagacccaaaatatgtaacgctttattagctactctagtttttgctggttattttgagcatgctcagaaggtgttcaatgaaatgtctcaaaaaggtgttccttctacgactctaggatttggtgtgtttatatggaga

SEQ ID NO: 248580 - DNA, 858 bp, Cannabis indica
aaagagttttatttagggcataaaacccaacacctattagggtaataaccctaatcccggttactaaacattcatgcatatcattctcaatataagcgccactgcgcatactctacgtgataatcactgtcttacctattgtccagcaatagaaggagatttcaaatccccgggtgctcttgatatggtgctggtaaccctagtcacacgaatccgggataattcacacttagggttaacccctgactttcaactcaataaagttcaagcatgtcatttatgatttagataatcatacagagtttggaacgagctttccaacgatataaagaactcccaaatcggagttcggaatcaaaagttacgaactttcgaaaatcaactcaaactgcccaaaaacacgagggcgggccgtggcatgcccagaccatgccgcgacacctggaaccaattcctaggtcaactcagaggagcgggccgcggcatgctccagagcatgccgagaacccagaaaccaacaagctcctactcgaatttcagctcccaaacccaaccaaactcatacaaatccatagccacaacttccaaatcataattcaaagttactaacaatcactagggatttaaaacacatactcaagcattaaaatccaactataaatccccaattcagaatgcataaaaaatatcacaaaattcatgcacaaccatggcaaaaccaagctcttgaacaagagttctcttccaacaactcaacccaattttagccatgaaaatatcccaaaaacacatgaatccactctagagaataacctataatcaaaatgcatgctcaacaataaaattctcaaccaaatc

SEQ ID NO: 248581 - DNA, 648 bp, Cannabis indica
gaagctccttcagtgagtgcctttggtccgtgatcccgaaaacttatatatgtttctggatacactcatacttatgctgacatggagatctcgctcaaaggaaagttggttaagttagttaagactaacttaacaatctcacttcttgcaaccaccgactttaggatcttgatcctaagcctataaatacaaccatcacttaagcattaaaggacacgacgaactttagatcaaccagattgatttgagagagagagagagaaaagattgagaggtagagagagaaaggtactaaggaaagagagagattaagtttgggttttgtatgaaaatcttccgtatatgatgaagattcttaggtaagagtgtgagagttgaaacactttgagagaactcatcaaagaatcgatctcgactgtaatgtgcctgttcttgctcaattaataaagaagatttaggtagtgttccaaaactggattagagccatagataacattgatctattgatcatgaataatatatatctctgtgtcgatttatatttcttgctttaatttttatttctaattttgatattctatttatccctatttttttcttattttgttagtcgtgaattgttaaccttgtcattactaattgtgattg

SEQ ID NO: 248582 - DNA, 750 bp, Cannabis indica
ataattcgaaccaatcaatttatggtccgtaattttagacatcacgagaaccacatcagaaacaaccactgatttcaaatctgattttatccctaccataatcttgaaagcaaaaacaattgaaagagaaaaggaaaaaagcaaacaccaaagaatgaacacccaaacacgaaggtaaaaatatcaaaccacaaaatgagaagaaccgccgaaaacctatgcaaggaggatggggaagggctgggaacatgacgaatgttgacagtctccaaaaagcagcccgaacgcgcccgaacgcatcggcacgtgggagtcatttatccttctgtttcactcattgatcatcattcttcttcttctgacaacatcattacttaaaaaactcctcatcgtctgttactcatactccaaactattcaatcaaatcacataagccaagaaatcctcatcaaaatccttaagtcttatccccatcaacgaggaccaacccaaccattcagccaattcacatgagccaaaaactcctcagccaatcttttcaaatcttgtcgacatcccaaacacaaaaatccgggttgactcaaggaaaaataagaatctagcaaacactgaacaagcttccactcgaactcaacaaagtcaagaatataatccgattccattcattcttgaacaaacacaggaagatgctcaagctgaacctattgtggaagaaaatatgtttgacgatctaagcattcccattgctct

SEQ ID NO: 248583 - DNA, 559 bp, Cannabis indica
agatgttcgagcatcgtgtactttaagggagtcatcaaattttgtacactaactgctagtattttctcaaatgtgtttttgtcataccgacccagtttgcatgctccataattcgtgacttcacttacttgagatggtcgttcccaattatgtctaagtatgccagccacgttgccttttgtgttcaagaacactcttgtaaggaccatatttcccacaatgaatttccttacccttactttcttgttgaattaccgagccaccttttggtgatgagctactagctttaggtctgctgaggctcttttttcttcaatttcatcatgtgattttccagtttggcatgattagcttcttgattataggttagtctcctgtaggacagaggttctaactctacatgcaacatcgcttcataaccataagccatagcgaatcgtattttcctggttgttgttctttccattgttcggtacgaccacaatacctcaagtagttcatctggccaattccctttggcttcttcgagccattttttcacggtgtctttgagtgtctt

SEQ ID NO: 248584 - DNA, 1536 bp, Cannabis indica
attataaaaattaacttaactctttccaaatcttttaggccctaaatcacatgttatttgatcatctctgaattagacaaacatataatcaacattaagcaataatttcaaggttacttaggctatgtaaatactttcatttcacatcaaaacctagtttatctaattttagcattcccaattctccctttcttagattttgaattgggattataaagcatgcaaaaggtgatcaatcttaagcatgtaattaacacaaatatagataaattcacaatcaagaaaggacaaataacaattatcattaactaaaaataatgtcaatcaacattcatcatctccccaaataggagtttagttcattatctctatagtcaaattcataattaaaattgaaactataaaataacatagaaaaattaagagaggagaaaagaactggtttaagcaatcgatccaggtcaccacaagccgttcttgaagtgctctcctttgtttctagggctccaaatctgaataatcctcaaaattcatgaactcctcctaattgaaccaagctttctctttaaaattcgtgaaattatgaaattgcccaaaaattaatctcgtcattaaggctttgtcgcggcatgggaatatgcctgtcgtgacgaaggattatcaacaaaaatagcaaaacttcctgccaactctcgttgcggcgaaggattatgcccatcgcgacgagcttaggcagaaaagttcattgtgcattttcttttcaactctttcatctcttgttctcgattcttatgaatactttctttaaaaatccagggatctgaaacaaaagaatcaagcataaaatagccctaaaactagaaacaaagagcgaaaagtacccgaaaaatatgacccaaaacttagactaaaattagcctaacaatatataacgctggtaaagctaaaaaactgtgaaaaaagaatcacctttggcagtttagctcacccactttcaccaaatatttcattaatttcgttggtaaaaggaactactaccggcaaaataacttgctggcaaaactaaatttaggaggcaaaaaatttctttgtttcgctggtgaaactaactaactgtgccgatgggaacttttcccgacgtaatttcgtagtttcgccggcaaaatttaatttttctgtagtgtttgataagtttgaatagcgtagtgaattaagttctactgatgcatgtattgcgatcggatgggcataattttttttattgttagtgttattttgtttgttttgtgtgctttgtttgttgtttattgtatatttaaaatttttggggatgtccaattatagttaatatttcaataaaattagaataaatttctctaaaaaggcatacatattaaagaaaaaaatgttagattatattgtagtaaatattcctatatgtgtgaaaattaatttaactaattaattactatacatgttcaagcataattgaatatatatttttttggaagaagtaatattaatattatttttaaa

SEQ ID NO: 248585 - DNA, 5824 bp, Cannabis indica
ggaaagatgaaaaatgagtatgatccaaaaacttagtgagctttaaaaacaacctctactagcaatgcagataaactgggcgacagcatcaagaaccaaagtcttctgaaggcaatggccccacagaaggaattccccaggtgcactgtgctgaaacagttcagaacaatcgcagtatgggagctaagagaaggaagtctggttctgtgaagaggtttaaacaagagttgcctttatgtgatgctcctgttatccaaaatataacaattggaaccagcattctccccggcagcagaattgaactactagggacaggaagtctcactgctgctggggaaaatccaagtgacaataatagggctgatgaatacgaaaattcattgtgtatcaccaagattatcaaaccaataggctattcagcttctgtgacaaacaatattcaggatgtgtcagtgacctttatggccatgaggtatgtcattgaattactttaaattatttctattaactttttacatataactgtaaaatgattgggtttgagaataatttgtataccttgcatcattacgtattatgcattctttattggatatcattgcgcctcccataaaatatgagtgaagccttgttggaactcccttgcttgctaccttaacacacttactattgtcacattatctcatccctctgaactctgtctaattttctaaaccctttaatgattggtcttgaagaatttgaagttattaacaagggtcgtgttatctaaatgaaatatacctcttgtttaaaatcctaagactatgtttggaagtttgatatgaaaattttcgttgaattgagtgtttttctatacaattttctttctatcccaaatatgataattttttattttttattttccactttttttttacctacattttccttacctttttctttccttgccgaaatccaacttccaaacatagccttaatgaaatgtacctctcgttaatatgcgaaacagtgaatttaactttccttgggttgggatttattatgctatgtctaatagagtgctaaaaattattatgaactaattttttgcactagtgtcacttaaaaaagaaagggaccaatgatcattttgggtcaccatggtatgtgatgcagtattagcacattttgctgcttgtattatactttatatgcgtatacatgttttccttaacaatgttaccttttttacaggtcggatggaagagaggtgatggtggataacaagttcctcaaggccaataacccacatctggtaattaatgttatctattgttttgtgttgtcaatatggttatcatcactacctggctgtttttactgttattatcaattctcattttctcttattcatctccagttgatcaacttttacgagcagcatctccgatacactgccacattgtgacttcatcagctattgtggtcttcaacttgtttgctgttagctttatacagttctttccttcctagtattgtagttgcaggagtactgcagttcaacaaatgtagttatcagtgtaaaaactaagtaatatatgatgagactagggttcataccaccagtgtcaatctgcccattatctcattttggtttctcctcatatgatatgaccagagatattattgctatgtattttggatcttaacatgagaatgaaaatgatttaaaaaatcatacttcactgtttcagaaattcactgtactctctaccatagttcttgtaaagttgtgaaggttcctctttcaaacttctttgtcttaatagtatgacgtgtgggaattccatcatttgtggagtcaacatatattattgtgattttctttcatttttggcttctcctcatatatattattgcgagaatttgacttttcatgcatatatggtttcaattcaacccccaatgatttggttctataattttctttcttgttcatcttctttggtatccaaagtcttaaaaacttatctggtcagcatttctttttaatatgatattagtcacttatgttaaaaagtctcgactaaacaatttatttaccttacacaattaaatatatttgaactggtctcgtttttctcaggtgtgttataatgaaatcttacacttgtcaaaagagtataatattaattagtacgtagtaggaaactcttgttttttatggttggcggccagtttataactgacaaatgaaatgtattagtgactagagtcgttggcgtagctcaactaatcatatgagatctctataactataactgtttttgttattagagtcatatcagctcaaaaattccaatgggagaaagagggccatcaccattgataccattgctattggtgggagtgttggcaatggttatttttggaccattcttactttgtctttgggagactgtaataatgcctctattagaactgggatcaatccttgccatacttatacttcttttagttttacttgtacacttgaattcaacattgttccccaaacttggagctggaattgggatgtctatgtcatcattctcctctgtctctgcttccacgccttcggacgacgatggctttgggcttgggatgggaagctttcttttactactgctatttttgcttctttataggctgttctgaagccaatgctccctcccttggtgattgttataattgatagttgatatataaataagagactttttaataagtggtaagaaactttggttgtgttgtcttacggataagttgaaatcttaaaaatacaactttgtacatacattgtagacgtagtcattagaatctctcacaatttctttttaaaaatagatagatagagatgtataacggcatatgaatgtaacacacagacaaaataaagcaaagacttgattaataaacaacaactatcaactatgaattctcaaaatgttatacaaacaaaggaagaaaagtgaaagaaattaaaaataaaaattagttcttgggaatgtttacgccaacaatcttagcaggtgtaatcctgagaagattaccaggctttccaggaagagcgcctttgatcataacaacattgagttctttatcgatctttacaattttgagctttcgaatcttacgcttagtccctcccattcgaccaggcatcttcttccccttgtaaactctaccaggagtggttccagctccaatggaacccagagctctatggcttttggacccatgagtcatcagacccctcttgaagtgatgacgtttgataccaccctgaaaccctttcccaatcgtcgtccccgaaacatcgaccaaatccccttccttgaaaagctcctccaacaccagcttctggttcgcctcgaacccctccacggattgcagccgaaactcctgtagatggcgcatagggatagctccggccttctctagatgacccatctccggcttggtcagtttccggtccctcacacggcggtatcccacctgaacggcgtcgtatccatcggtggcctgggtcttgacctgggtgacaatgttgccttccttgaagccgacgacggttacgggaacgaccttgccgtcggactcgaagaaactcatcatgcctagcttggtggccattaatccgatgccggcctcgacgctcatggtgaattttgacgaggacggtgtcgttttgaggtggagtttgggaggaggaccgaggaaggaggagcgcagagtgaaattgggtttgggtttgttgaacagggttccgactgagaaggaaatggtggaggacatagttgttgacattttcttcttcttcttcttctttgttatgactccaaacaaagactcagctcaccagagcataacattcactctcctgatttccttttcttatcctatttctcttcttcttcttctctcttctctatctctattttgtggattttgggcctcaccaaagcccaatatcctttcaatctgggcttatatgttaataggatttggatttttacaaaaatactggattttagacaaaagtttataattttactactacgcagaaacttttacaaaaatactatcttttttataaaacaactgtaaaacactaaatagaataattaaaaataaatagatgaaacttaacataatacacagtatttttttaaaaaaaaaaaagaaaaaaaaatggaaaatttcagtgtggtgtaaaagtccctaaattttgaggtttgaaaaaaaaaattgcataaaaaagaaaagaaaaagtaagaaaagaatttgaatggtcttttaaataatgagtattttgcgacgtaaatacttaagtttaacttacggttggataaatacttaagtttaatttttaatagtaacaatatttaagttatattctagaacatgaccgttaagtgtcaagtcattattcacgtgtcattttttattgatatatttatataacttttaaataaaaaataaaaatttaatgatctagaccaattgaaaacatctacgtggcaatttatttaacatttaacggataggtacctacagaagttttagaattataaccacaaaaaattaaacttaattatttatttacaaccagaaattaaacttaaatatttatactataaattatttttaaataaatactaaaacttgtatataaattccacaaatcaaaacaaaatacacacatagcagcagcttataattaaaaaataatttagaagtgtttcgagtaaaagaaaaattagaaaatattttttttatttatttaaatatttttttccatagatttatatactatgtactatgtagctcctagagttggctagagttccattgtttgcctcaattatgtaattttaaagtcgttatttggtagtgttagttttgtagtcgagataacttgtaaagattcacatcgtgaccggagaattaatattgaaaatggtaattgacaaatggagggagtggtagaggcatgcgatacgacacgataatacgtttaataaatatatcgtgtcacacatttaaatttaatacgctttatataaacatgttagacaatacgaaattgacatcgttaatataattatatataagaacacaaacaatactatagtttttcacttcacataatataaaaaataaaaaactatttaaattattttatgcaagctataattgtgttatttttggattaagcctcttaattcaaaaatgacacgtttgataagcgtattaaacgtcaacacaatttatgtgtcatctaattttattttttgtgttacttccaaaatatgtcattgtatcacgaattaccaaccctaatgtattctcagcatttttaattgtctatttcggaaaagttaattgattacccatcttaagaaagaaaatttactattagaggagaatttaatcccccaatattgtcattttggcatataaaattaaagattgtacacactaattacccaatgatatgtattaaatattagccaaggactacattacttttaattgtatagttaaagttaattacaaatgtgtcggaatcattattcaaaataaatgaataatactagatacacattcaaattgttacgccctattcgcattgctacgcttagggatgttcactaagtatctgatccaatccaattcaatccacaaaatgtggatatccgcatttgcgcagattggattgggttgaaaaatttaaaattcgtacttgtgcttgtgcggattggatgttgtttgatcttaaaaagtaaccgatccaatc

SEQ ID NO: 248586 - DNA, 622 bp, Cannabis indica
tgagagctggagacacaggtggcattcttgaatatcttcaacacatgaaatctgaagattctaatttttttatgcccttcaagcagacacagatgatttgctgactaatattttttgggctgatgcaaaaatgaaagaaacttattcacattttggtgatgttatttgttttgatacaacttacagaaaaaatcatgaatgcaggcccttcgctatgtttgttggagttaaccatcataaacaaaccactttgtttggaggagcatcattatatgacgaaacatgtgaaacttttatatggttatttgatacattttcagcagcaatgttgggaaaaatgccaaaaataattcttacagatcaaaatgcagcaatggcaaaggcattagcttctcaatggccagaaacttaccatcgtcttttatttggcatatgtatcaaaatgcagcaaaacaccttagtagtatttttcaaaagttccgtcaattctcaaaagattttggagattgtatatatgaatacgaggaagaagatgaattcattgaagcatggaacaagatgcttgaaagatataatctcaaagataatgattggctggagaggacattcaaactaagagaga

SEQ ID NO: 248587 - DNA, 677 bp, Cannabis indica
aattttgaattacatgtggtccccaagggggggacaacttctcttttgtaccatgaagatcagtatgtcaggtggtctcgtgtcccctgacttttaataggacaaatgttgtctctaccatggtacattgagtgaggcaagttttgtccccatttcttgtacctgcggtacgatcgctatctcatatgtggcgtgcttgctccaacatttttattcttagttattccttctcattttcccatgcccaaaagttatgaatactcaacaaatttaggctaagtgtttcgctttacattcttttgcacaccaaacaccaagcatcttgaggatggtattatatgtatttgttcgtaggggactgaagtggggaaaagggagaagagtagggagaggtgaggagtgaggagggggagaggagggagcggggaggtgtggcatgagggcagcggggagcgtggggcgtgagcgaggaggggagtgtggggaggtgaggggagagcggggaggggagcggagagcaggaagcgtgaggggcacatgggcagcccaccacttgtacttacattgaacttttttatttggatagggaatcttttctcttttcttattttcattcaaaatatacacttgataaattttcatggttaacagcaataattaattgtacaaaaaaaaaa

SEQ ID NO: 248588 - DNA, 785 bp, Cannabis indica
acctaattagtcatcatactcaatgggaatttttccactccgaacccaaaagcaaggtaggggcgggaatatgagcataaattaagaaacgaggacggtgctaggaggtacgttacccgcttccacccgattttcatctctactcgttggactttctaattgggcttgttaaaaaatttatatacaaaagtatttaaaatgacatgaaatgtttacatggtaacggttttggatttttttttgattatttttttaaatttatattttcatgaaaaacaatgtaaaagtagcatagtgtaaagcaaaaatgtcaatacaaacaatacaaaataaataaaaaaaacaatcatccctatttttttgagtaaaaacttcaaatttgtaaaaatattgtaaatatttgtagagttatattcttatatttttttttgttctttttgagtatgtaatatccgaaaaattttataaatcgtcaagcagcggttccactcaggttggctgacacacctgaattcgaaagttacgtgtttatatatttagtgtacacgtttattaagcttgttagattacatcgatagcggtatcagtatgcgtagagtcatattggataccaatagatgtatgtttggctcaaaaactgatcgatgctatcacatcagtacagctaaagtatgtctagcgtaccgagtataggatgatattatggtcgatagtattgtcgtacgaatgttctagacttagtatcgtgttggacacggggatagggttatgattgggtgtatagg

SEQ ID NO: 248589 - DNA, 622 bp, Cannabis indica
aaatcattccacatcttcatgttcattatgaaatttaaaaaatacatatcaagatgacaccaataagaaaaggaacaaacacattaaaacatgatcacatattctttcctgaaaacatcatccatttgcttttcttctgttttgaggagcctcttctcattgtccttcaacttcttctcattctctttaatcttactatcatactcatcgaccctttttcccaagtctttgatcttatttccaagctcttccatattcttttctctattctccatcatacgaatccttgcttgcaaatccgaaagctcgtaattaacaatgcttatggttctatacaattcgaagaggttaaccatggttgttgaattgggaagtggtatacaatttttttttgagtttttttgttcttggaaggtgatctgtaatttgggatgaattagtttttatagacttgcccatgagacaatacaatgggtataataaccaagagagaaatcaatatattttcttggtaaaatcgacaattaatattttgaacttaccaatgcaattatgtaaccactcattaattattaaattgaccacttaattatgatcttattataaattttataatgtgcat

SEQ ID NO: 248590 - DNA, 952 bp, Cannabis indica
ctgcaataaacactgagttgcaactatacaagagaaaaataagtggttttttgtctcggaatggctactgcagaagaggcacagtcatctgagatgaccttcatgtgtttcaatcttgatctagttcgaaggcgatcttgaacagccgtccacaatataaagctttgtcttggaatgttttgtctattccaaactccatggctcaatttaccttcctttgaggggggcaaaataaattgtaaccattagagattgtatagattgaacttgtaaactactgtacactcactttccccttgatttgctctttaacatataccagttttttccaataccaactcgcttgttgtggggcttgatagtcccaccatcacatattaaaatcaattcaaatatacctggttttattagtaatctatctaaaataccatcacataagtaaatcaccatttaatctcctaaagctattcaacaaccacctcaacgcatgtgattcagcactttaatttttcgaatgattgagagatgctatcatttatacattgtgtttgatttttctttttcctgttatattatatgttctcttagaaaaatctcgacgggaaaagagaaaagaagctcagttggagaagaattccaaaaaacaccaagtacacctccagcgtcaggtattggagcaaattttttgtgggtttcaatgcttttgtagtaatgattggttgttcttgagttttattctaaatttaaaagagccacaaagttttgtctagttgtttgagagacatgaccgatgaattgattaatatgcactatagttttgaccgtacacaagaggagcggaggagtggtgatcatgtttctggagaagaagtgattgaatattttttttcatttaacctaaacgaagggtagaacgggaacatgacttataattgtgggtataaatgcatga

SEQ ID NO: 248591 - DNA, 630 bp, Cannabis indica
atatttaatttattctaattaatttttgtgttatttttcagatttgagcaaagtggtaaaaaaatgtcaaattcatatacaaaagagcccaatcaaattaacgctcaatttcatttgcagcaaaaagtttggaggaaaatgatgagaactcaaaagtgtgtattcaattaacacttttgtgtatctggttgaaattagagcaaatgactccaaacatcattatttccaatcaattctatgggctcttattttattcttctctccaacaaagtcttcaagcccatcatataatttcatcaagtaattgggccatgagcaccatagtagtaattggtctccaaagggggtctccattcagcccaattcaatttgccaacgatgagcactccatccgagtccatggcacccacattcaccaccaatacatttatgttactgctccactaaattaagtaacacttggccattatcaaaacccatttctccaccttaatagccattatctccactatttcatgtacacgaaaataactttagatgcaatgattcactataaataggcctttggacattgtgaaaggtatcagattttacctaaagttattataccaaaattttatctttttcttt

SEQ ID NO: 248592 - DNA, 975 bp, Cannabis indica
aaatagttaaactaatatattttaaaaaaaaatctttcaaataataaatatttaagtatattggggtaaataatggttttttttttaataaatcatgcaatttattaatagaaattagttaatataatagcctgctatccaatcaagacatctttctcgttggagacacgttcgagattagaattagaaaaatgagtcaaataatcagctgcctaattccacgtttgacaaaaaaactaaaaataaaataaaattaaaaagattgtagcatcacaattaaacttaaaaacacctaatatttagttttatctactgctcagaagacacaacattaagaattgttgaagaaggttcatcaaccttgtaggaaattgagcactctgtgcaagatacatataattaattgtagtactaacaaccctttcagtccaagagaacttattatttccaactaccaaaagtaatttaatggcgagccatccaagaataatgaagaaccaataatgaaacaacacaaaatcatgtcacacagacaagactaaaatactaaaaatcatgtaaaagagacaaggctaaaacactcaaaactatgacagagacaagactaatcacagtagtaaaattgaatcgcaatagtaatatacaacccaaccaagctgtacctatgcccaaagaaggtaataaagacaatctcctgtagctataaatttaaaatatagaaaaaaataagaaaatattaaagtaaatcaaattaatattttttttaaataaataaataatgattaagaatattatgttttttcattaattaaaaatattatgttaaataatggtaatagtcactgaaaattaatataagggaataattacataaggtactatttttttgtaaaatatttacatttttacgtttaaattagaatgttttttacatttttacggtttttcaaaaaataacatgaaaacaacataaaa

SEQ ID NO: 248593 - DNA, 512 bp, Cannabis indica
gcgatatttatagatggtttgcatgtgttgttcgtgtgtactacagtgtccgtacatttgggggtacacgcattcttaggctctgacacaggggataatcccctaattcagtgggatttggtgtcagagggttgccatgtcatcctggactaggtctccagggcgcctcttggaatgcccttctggatgtatcccaaatgctcatccgaaaggtctcagctgcttcgtcttatttgggcgggacaccctttcggatccagaaagatctgatcttggacataaacattatgacccttggatgggtgcgaggcccatccttttgtacaaactgggtctgttatcttgttagagcttttgaccaagccttgtatgattaattttgaattgggaatgtgatgtgtcccccttataaacagaggaataacaagtataaatgtgtgttaaaaatccatactttctgatgttttaataatataaaaaatatatggcaaacaagcaatcgaagatctttg

SEQ ID NO: 248594 - DNA, 768 bp, Cannabis indica
ttttttggatgatgtgtaggttgtttttcttgaacctgctgaagctcgtgcagcatttaaaggattggcatacaaacgttacaagtaagttaatatttgctttcttcatggattatttgttaaacctatacccattagtacctactcatgatcactattttatgcataaagttggagttttagatgatgttgtgctcttattgacaaacaagctaagtataattctttacctaccattgttttaatttctaggcaactgctgaagagcagttgttgggttagtcttggttttttgttacttttatgtttgacattggatctatatcttcacataacaaagcaatgtctttccctgtctttctatatttaaagatcaagacagggaatgaaaggaatagcagaatattcgaaggaaatgagagatcagcagaggatatgtgggagagcataagattttggacagtcacctgggtttttaaaactaagcattttgagaatttttcctttctagacttgtgtagggaatggaatgtgttgatgtaaataggatttatgacttgttacgctgcttacggagcttagtttattctagatatactttactttggtcaccaaggttttcctccgccacaagtgaggttattaatacataacgcccgcacgcgcttgagtctaagacaagtggcctctttctttttcaaaaaaaaaaaaaaaattactaagatcaagacaaatgttgattagctagattcagaatgatcaactttg

SEQ ID NO: 248595 - DNA, 683 bp, Cannabis indica
agtcatcaccactcctaccaaaactaagggtaggatacctcatgggctcttaaaagtactctactgcacccttggcttaaaaaacctactctactatttgagcatagatagtaataacatcagtcgtgatcatcagtttgggtttgatctcagcattaaattcttacaagtattcaacttccttactgaaagtggaatgtcccattcttgaagccaacttgaataacctatctcacttgttactatacatataattgaggaatgccatttccccaccaacccaggacaccttcctagaattggaatgtttactaattacctaaccttggtaacttctttaaactaagaatgccattagggcttaactactaacctagatttatctaggtttctcttaaaacatgagatttcttcctatctaatcttttacatatgcttctaatcaccctatttgagatattaaaccctagggagtatactgtcttgaaccaacccaagcaattagaataaaaaacttaagaggtcacctaaacatctcaggagttaacatgttcccaagtcaataatgggtgcttgggttgacatcttgggtactgatttacatcagtttcggctaggcagcatccatgtgcaattagctaagccattgcactctagcacatgagagacatgccacaactaag

SEQ ID NO: 248596 - DNA, 656 bp, Cannabis indica
atcagattgtaatgggttttatttagtgcacaaaacccaacagtattttggtcgttttcctatcttagctcacgtgggaacggtggcatacactttggaattatccgttggtagtcgaatccatctaacctttcatgtgtctctgttgaaaccgtttcatgacaattccaacgtgacttttttttccactgctcaagcactctatcaacaacaaaccggtaatgactccccaggctattttagctacgagactcagtgaaggccagcaacaagtgctagttcaatggtctttatgtgccccaaaggatgcaacgtgggaatattttcaacaattctgtcagttgtacgggtttaccaaccttgaggacaaggttgttttcgagcaggggagtagtgttagcccagtccaattggaaagcccaataccacttgacccgaaggaaatgcaagagaaggtgagaggctggattgagcaagcgagctgttaagaagaaccaactcagttgccaagagaagtgagcggcatagagaagaaagagaagcaaccagcaagtgatggagagagagtgcaagcacgtgaagcgtgagtgcgagtacgaccccgatggctcaaagaatttgttaggctggagtaaagaagagaggagcggctggga

SEQ ID NO: 248597 - DNA, 564 bp, Cannabis indica
aactgcttctaatagaaatctatgtgaggtttattgatgtgaagttgtctatccaaacttttatctttacttcttggacaactatgccatggtgatgacaaagctttcaatgtgccaatttgaagagtctaagacaaaatgtcttcttcattctaatatgaactcaagaatatgtcatttttattttttgaggtgtacattaaatgcagaatactaaacttatgtattattttatattttattatatttaaatttagatttcatttttggaggtagcttcaagttgacccttgacaattgggaccttatactcatgtctagtggtttacaaatcctcatcaaatttaacaaatgatctactccaaatttacatgattcagttgagctcaaatatatgtttttatgacttcaaataataaactgagtgctcttttagaatttaaagaaactatagccatggaccatggtcatatatatcacatcatttcgttacccttttcatcttaacggctttgaaaaaaaatgctaaaacttattaatggtgtttagcatcacccaaagtcg

SEQ ID NO: 248598 - DNA, 557 bp, Cannabis indica
aaacagtcttgttttatgccatattatatttttagtgaacataatgcttcaactcatctactttcttttttaagggatgaacgttttactagttgaataaaaaactgtctattaaaaaaaataaacggtttgcaaatatatatctacatatgatataatatttataaacttaatcataaaaattaaaaaatgagagaattgaggagagagtatttataattcttataaaaaattgaaaatttaagaaaattaaggcaagaattaatagaagtattttgagtaattttaggttgtcatattaccactttatacttcatctttatatataggaagatttgagaaactatgcatacatttagacataatgagtaagttgaacataagttggcaaaaattagaaaaatgctcaaactttcatttttgtactcataataccctttctcttctaaacttcatatttttctcttctctcttcaccatccaccctaactactcactcactcattcataccctaacctaacactaattttacctaaaaaccatctcatttagctac

SEQ ID NO: 248599 - DNA, 1247 bp, Cannabis indica
gtttgaaaaaaaaaaagtgactatatttgcacccattaattatgaaatattaaactaatttatttttgatacttttttttttaaatttttatgttatttttactattaattttatgtattttaattttttttctatttatatatattattttaaaaaaattaaatgattatttttgttgatgcaaaaaattggtgaacactcactcgttagattagtgaaagaaaatagaaattaattagtgtaaatgaaagacacaagaaatttatagtaattcactttttttgtcgcgacggtaataatgctatgtttacttcgagtttttattacttacgagaattacaagagaattgattaaggcaagagctctatatttctcgagaaggatgctctaaccttttggatagttttctaaatgtgaaaatgagctagtggaactctccttttataaggaagaatatctcattaaaataataataaaatattacaaaaaatatctcttagccattgatgatgatctaatgttgaaattgactcgggatgataatagtcaattttcagagctcaaatcttgttcgttggatcgctttcgagtaatttataggaaaaagttacacttttcttgggaatgaaagtcagacttgaaatcttcagaaatgcaatatgggtgtgagacattagttgaaagagctttttgaactagctttaaaatttaagttgaatcatgtcaataagatcaatattgagggagttatggcagttagactgaaggttattcagcaccaagcgcccaatttgacatactaacatcaacatggacgttgtgtgagtgaaaaatcgctccgcacttgtattttttgatgcctaagtgatatgttgacatcacttttttcaatttctttgttttggtgatttcgttcatgagtgtttagagatgtcactttttcgcgaaaacaatagacttgaaacatcccaatttgtggctcatttgttgatattccactttgtcgaaaaggagaaatatcaaagtatgaatttgacttgtcacaaaccgtatcactcgtttactataaagaaatatttaaatggtcgagatggaaccagaatcggataaacaaaacccagcacaccaagccatatgtcaacctgggcactaggtgcttcttagggaccttcctcaggatcactttgataattctacgacattctagattgcaaacaaggtgtcctaccttgcttttaaccaaaa

SEQ ID NO: 248600 - DNA, 922 bp, Cannabis indica
ttaagtttgtgtcggtacaaaatcgacagaaaaaggtataaaaatactattcccgtcggttataaaagaacacgatactttgatatcgactgtccaaaactgacgcagaaaaatatcattttgcctctcctgtatatatgtcggttatgggaaccgaggagaataaatgtcagttaaaaaccgacaaaaattggcctttttgtaatagtgtgtgtacgtccgaattaataacaagcttttcgggagagacattccatacacggtacaagcttatttgaaagtaccttttggattctatatgaccttctgcaggactttttgaatccacacaaagcttccagtatcttctctttggattcacaacttctaattccgatgacaaaacttgtaaccataaccaaaacatatccaccttggtttcaagttgaagtcgcttgataaaccaatatgatttaaatgttgttgtcccctcaacccctccaagctcagatgaatccaatcagcttcaggcaatgctcaaacttactatttggcactaccttggctatcatatcagaaggattgtcttcagttggaactttggaaatcttcacagcttctttctccacaacctctcatatgaaatgaagcttgatatcaatgtgcttagtacgttcatggtgcacacaattctttattaattgaattccactccaattatcacaatgaacagtaataaccttttaattgagcttcagctcctccattaacccaattaaccacagtgctttctcgattgcttctgtcaagaccatatatttgtcaacagcgccacaaccttctaaagattcgctttctaactaatagttgttccgaacatagtaaacacatatccagtcaaagacttctaggtatcaatacaccctgcataatcagagtccac

SEQ ID NO: 248601 - DNA, 680 bp, Cannabis indica
ttttttaattttttttataaatatgtgtggattgaattggatcaattacttttacatgtcaattaacatccaatctgcacaagtgtagaaatcagcactttacggattggatcgtgcagattggattggatcggctattttatgaacacccttactcacagtgttttcttcatggtttgctcattgttgtgaaaactaatatacacaagtatacacaatctcacaagtaatataatgataagtaagattgtctccacagagattgtaaatgaaatttaatgtaaaactaattatttaacaatttagaattttaagaaaataaattgattgaatgttgtgaattaaaatgaaatgatcgaattggaattaagattaaaatattgctacaaatgctaaaaaattatttaaaagaaactgttatcaaaggaacaaacagacttgaataatgtctaaaactgctcagttgctacaatattacttcaacaaaatgcaaagaattaactagaatttccaatatgctcatgggattttttcaaaactcatggataaagttctatcatctaattcaatatattcctatattaagtaagatctaagaacacaatccaaacactaattctcaaagttatgtaaggtaaaaaaaatattcctattctacttattaagaacaacctagaaaa

SEQ ID NO: 248602 - DNA, 1009 bp, Cannabis indica
agttcaagctttaacttcaagagaaggaatccctgacttgaaggtgtctagtgtgtttttttcaatagtcaatgtaaccaaaaagttccttggttgtaggaagagcattggttcaaaccagaaattaataaaatcaaggtaaacgtggatggtgcaatttttcacagcaatggatctcatggtattggagcagtggctcgagatagtgatggacaattgattgaagctttcactgctctgaaatgtggagttgttcaaccagccgctgttgaagcttttggaattaaggaggccttgagttggatcaagtctaagggatggtctaatgttattgttgaaactgattctattgtgtcagttcaagcactttctagttctctttttatgccttcaatttttggtttgttaatttcggattgtaaaagtttgttaaactgtttggttaatgtttgtgtgtcttttgttccgcgatctgctaacagaaccgcccattgtttggctcggggttcttgttattggtctgatcgcatcttcaatgtcagcaatgttcctaatgctgtacattctgctataatggctgatttggctattataagttaatgaagttcaccttctattcaaaaaaaaaaaagttccttgtttgtagtttcttttttatcaactgaagttttaacactggtagatggtgtagctaaaaaagctagagttgctagcgagttggctattttgtatcaaagggagggtagtcccattgtgattcccatctactttcttaatcaaagaacaagtaattctttcaaaaaaaaattacacaaaatttctttaaattgaagtaaagtattatttgttaactgcaaagacaattgtaaccccatcaaaaacatattattttttggcacgtttactataaagtattcagaattgaaataaagtaattgaaaaatataacataataaattaagaataattggaattaatatttgtaatatgttgtttactaaaaattttt

SEQ ID NO: 248603 - DNA, 682 bp, Cannabis indica
ctcgcgcgatcgttataaattaaaaaataaaatttaatttatgattatttggttatttcaaaaattcatatattaagtagttgttaatatttttaatatttggttatttcataaattcatatattaagtagttattagaaaaaaaagaaaattaaaccaaaacccagtccctctcttctctctcgtttctcgcgcgaccccgactggcgatcggcgatcggcgacccaacccctctctccctcgctcggcgaaccagactggcgacccataccctctctccaacctatctcctctcttgtctctctcgatacaagatcgagaccgagatcaccccactcgccctctcttggtcctctctccatctctctgtttgatcggtgccgccaccgaattgccgttgaaggccaagcccgccccctctgcaattccgtttaggtttcatgttgataaaatgtcttctacccatgtttatgttcgattgcataaagggcaaactattgatgatataagcgaaggattactggaggactgtgctcagctcgtcaaagcaaatttcatacaagggctactgtggagcacatggaccggttctataaggagtttgataatgaagatgtgaaagatagtgaggatgaaaacaaagaatctagaagtggcgaggattttggaaatttaaatcct

SEQ ID NO: 248604 - DNA, 1646 bp, Cannabis indica
agaagtcgtgaaaattttaaacaaccctaaataattaggggccaaccatataataggctatagccttgtaaggcgccaaagccataaaaatggcgcaaatatagaacaaaccaataacaaaaagattacaatatatcccattataacaactcaacattatagaacaaaactaaaaacaaacaacaagatatattcaactaaccaccatttcagcattcaacccaacaccaaactcaacgaaatcacccacgattaaactaaaattaaaattttaactcaaaacaattcatcacactgcgcaaacattcaaacaaaagtactaaaatgtagacgcctttcactaactcagaaataaaatcataataaatcacatttacataaaatttgactacattgttattatgataaagctttcaaagaaaacaatatagtttcaaacacaacacacttacacgaaatcatcatccaaaaaatgggccagaaaatttgaaaacaataacatcaaatcaaacaccaaacaaacataaaaagaaaatgcagtgaaagaaattaacataattgacacacaagggaacttttggttcaatcacaaaccattttggtttggacttaatccattgttatgataaagctttcaaagaaaccaatacatagcttcaaacacaaaattttcatccaaacaatgaaccagaaaatttgaaatcaacaaaatccctcaacatcaaatcttatgatttacagaaaaattaagtaaataccgaacaacacaattcaatgtatatacatatatcgattttaaattcacaaaaggaaagaaatttgatagaacagcactgtaccttgaagatgacactttttccaataaagcatatttacttaaattttgactccattgttacaataaagctttcaaggaaaccaatatatataaataatatatagtttcaaacataaatcttcatccaaacaatgaaccagaaaattcaaaatcaacaacatccatcaacatcaaatccaaatgattaacagagaaatctagtaaacacccaacatcacaattcaatatatatacacacacacacatataaatatatatatatcgatttcaaattcatgtaccttaaagatgagaccatttcttaaaatttgactccattgttatgataaagctttcaaagaaaccaatacattaatatatatatatatatatatgtatttatatatatagtttcaaacacaaaatcttaatccaaacattgaaccagaaaattcaaaatcaacaaaatccatcaacatctaatccaatgattaacagagaaaattgtgtaaacaccaagcattacaattcaatatacacagatatttatatatataaatcaatttcaaattcttgtcccttaaagatgagacttttaccgatccgaccagtgggatgattacaagcatactcttccctggtcaaatttacataatagatttatggaatatcttagttgttataaaatattatttatggatgtctaaattactaaattaattatcaccattaatgctttggttgtattttcctttattacatcagtttagtttctcattcttttagtcatatttttgtataaatatggattcaccccattagaataaac

SEQ ID NO: 248605 - DNA, 1046 bp, Cannabis indica
attacaaatattttgttcgtccagccaaagtaactcaaacaacccaccaatcaacaaatgtggtaaaggagcaaacaaattaagactataagtcagaacaaaatgagatactgagcctgtaatcaaaatctcacaaccaaaataggagaaactaaaccttcacaagtacaaatcagcaaagcgtacaaggcatactaacagaaatagacagcagaaccaaaaggaaggtcgaggagaacaacgagaagaaaaactgtggcctggaacattgccacgtgcccccacgtgccggcgcgtgggaatagtggtagtggaataatgcgacgcgtggggcccacttatgggtcttatgggaaccaaactccagtggctagcatatcggtggctaggcttccttcatgtgtgggtggtgagaattaagatgcactccaaatagggttttttagaagggaaccctaaactcaaaccctattttttttacatatatatggactctacttttgaattttaaaacacaattttaagtatgttctgacatcgtgaaaaaaatagtgaatgaattatgtattttattcatagaataagtatatatctatatacaatagaaaactaactaaattagagtgactaaataagaaattaactaaatacaattaatatagctaatatattataacgaagggcaagatgccaaccaaacatcataagagttggtatatgtatttcaaatatattggatccaacatattttatttaataaattatattaaaaatcgttaactaacacatggtacaatgttgagctaaggtaccaaatagtaaggctctataatacacaataatattgtatttatgttatctacatacaatgttgggtaagtcattttcactcactgtattgttttccatggttttaaatagggatttttttaaaaatatacgtaaaatataaaataattacaaatataacttaacaaatctcaattacaataatatcttgccacgtcattgaaaaataccttaatttcaaaatattatgcctgaaa

SEQ ID NO: 248606 - DNA, 531 bp, Cannabis indica
taattattagcaggtttagtccaaagctcgactccatcatcactattattaagagatagagatgatagagcaaatttatcctgagctttccgccagtgatcaagagtaatagaagcagatacaagaacatcatttacagaagaattccttttgttccaaactgtattattgcgagatttccataaagcccaacataacatagcaactttacaaacctgatcattgtctcctgtttgctgcaaactttcgaaccagctgccaaaagaagaggaagcagctgcatttataggaagtctgaacgatctccagcagtcagtagcaaaaggacaatgcacaagtgcatgaatggctgtctcgggttgggttttacagaccggacattgagcaaatatgggcacatatttagttacaagattcacacatgtgggaagggaatcagtgatagcacgccatagaagatttagcacctttggtgggatctttaagtgccagaatttacgccaaaatccagaattattctgtgttgggact

SEQ ID NO: 248607 - DNA, 6137 bp, Cannabis indica
ccaagactgatataaacgttcagacaaaagactaattggtgattcatagaattaattcatggaaatttttatattttaatggtttttaaggtacaagttacaaaaatatgattttgtttttttaaaaaaatgttattaatgggattttttttagaaaaaagaaaaaagaaaaaaactcgattacccttaagtcacaattttacaccgatttatgaaaactcatcaaattgtaattttcttcaactacttgtgcaaaatatacaattagattttctttaatatataaaaaaaaacagtattaaaaaaagtaaaaaaaaaaaactaattgtgaaccattgtgatttttctaacccaaaaggccatgctaaaattctttgcaacttaccaaacaccatgctaaaattcatttaaaaaaacccttttaataacttttaaatcatgtgttgaaaacaaataaatcataaattttgaaccatacatgcccttttcttttaatttatttattgagaaaagacattttatataaataaattaaaattaaacctcatagtcattacaaaataagtccgataataaaacttcaacattccaacaaccatatcaattgtggataaaaattcacttaactacgttataagccacaaaattacaagtgcaactaatattgaggaaattcaaaccttgtttcttagctatttacatacgagcctaacacaactataataaaacatcctatatttggttaacaattttctataatttaatgaaaaaaaactcaatattaaattgcatcagtaacaacattaccctataacatttctcatttacatacacatatatatcatacattataaaataaataataaataaaagaaaaaaccaatgcaaaatttccctagagggtactaactaaccaactagaccataggacgttttcccctagtgtccaatctatgatggggctctgaagatgtaccagaagcactattggtagtcgtataaaacccggtcgtgttcgtattcgtattagtatttgtattcgtatttgtacctgaagtgaccgtatttgagtcaccagatgagccagcagtagtagttgaagaagtatgggcctggcccacaggccttctgggccttctgtatctgttcccaggcattccgggcctagtgggctcttctaaattactgggctttttggacagaatcaccaccactcgatgcatggtgggccgtagacttggttctccttgtgtacataataagcccaattgaatacacatagcaacttgttcttccactgcagttggagccagcatagggtctagtatctcaaaacacttgcctcttttgtaattttttgtatgcctgtaaataaatccaaacacttgattttgttaatataatttgttacatgttagaatattaaaacatatttttataacatcatagtacaaacaaacaagcttgcttcacattatttgttggtacttttggactatttatatgcatagcacaacaaggttgaattttataccttttattagtttgaccaagtttggccaggaaccttacactgcaccaaatcattaaccacatttcttttcaaaataataataaaaaaaatcattaatctcatgatttttgttgctataatttgtaaataaggtcacgtttggttggaagaaataaaaacataagaataagaatgtgaatgagaataagatatgaatgaatcaaatttaaaaatatatataaaaaattgatacaaagtttattaaaatatttctcatcttgtattagagtggtcatttattctatttcataaaagaatagccattctactgaaatggtgaaaaaatcatttcaatactaataaaataaaaattaatttctttctatccattctagttcattacttccaaccaaacaccacctaagtacaacaaatcgaaatatttctggtgcaaattcttcttttctattttagtattttatttagttgcaatttaaagtattgaaatgttattataaaatattttttctactacttcgatgaaacaaaaattccttcccaaaataagaaaaaatttagaatcttgtattttgtaaaagttaccgatcggtctttttgttttgcaaaaaaaaaacacaccctaagcctgattttggtcgaactactatttatcttaactttaaaaatccgtcttcttaacctaaaacttcttattttcaaactctaacaatcatagttcaagatatattgaactcctacaaccgaaaaaagtttgactaaaatcgagttcagggtatcattatgtttctttttgtaaaacacagccaaaactgtaatttaacaaaatacaatgactaatcaataatttttacaaaatacgtagtctaaaataatgtctatcctcacaatacaaatatacttctaaaatttatttttattgaaagatgtatattgattaaggtgaaagtgcaatttaaaaatccaattaatcaagactgtagtctgtagagaattgaaaggagttattacaaaaaccagttaaaatttggtattgtgacgtggagagtagaaaagttgaccaagtatctttggttggctttgttgggagttgtgaaaatagatgtagaaaagtcaacataattttctgccacgtgtgtcattgtcaccatatgagaacagctgttagttttaacagcagagacccatcattattctatgtaccatgtttaataaaaccccattccatacgaaaatggaagattagtgctacatttagtatcgagtgtatatgtcactgtcaataatggtccaattaaatatctaattctatatagtttaataaaataatttttaaagagtatcgctagccaatcgcaagacgaaatgtctagaagtattaggcaccactagtgcccaataacaatactcttcatttatttacttaaatttgtgtcttgtaatgtttaagaataaagctttttctaatttattggaataacataccaaaaacaaaacatttagaatttttgtgtattattgtacccctgaatttttcacagtgttaaaaataattcctgaactattcagggtgttataaattgctctgttaagttttggaacacttggtatgatgtagacaatttttacgtcaataccaagtgtgtaattaatttgaaaaaaaatatattttttaagatttaatttttagtaattttgttaatctgatttttagtttaataatacttaaaaaaaaacatattttctattaattcattttaaattatacaaagggtattgatgtggcaaccggataagtaactatgttatcattctttttgccacgtgtgacaaaatttgaaagaatgactaatttacaataccgtgaatagctaagagactatttttaactagtttgaaaattcaaaagcacaataatacatatgttatagttcgggagtaaaaatcttgaataagctatataaatatgtaagtagagagttggttgaatgagtcttacccaatcaagtagattctgagcatcaacgtttagatcaaaggatgaatttctgtggcctgtgatgagttccaaaactaaaactccaaagctaaacacatctgcctttaccgacaaatgtccatgcataacgtactcgggcgccatataaccactgttgcaaatcatcaaacacgaaccccattgttaataagtgatcacattctcatattctcttcaatcttattaaaactttgtgaaagaaacatacttggtgccagccaccctagtgttgacatgtgtttgatcttcggggaagagacgggccataccaaaatcagcaattttcgggatccacttctcgtcaagtagaatattgctggctttgatatctcggtgaataatgcaattgtgagagtcttcatgaaggtagagcaatccccttgcaaccccacatatgatttcataccgccttttccagtcaagattatctctttttttggactctgtttcaagacaaccttaatcagtaacttgtagctttaaacttcattggttcatcagttcaagataatgacattatcaatttactgcagactgatttagatgataagctacactaagtcatggggccaaaaaagataggaagtttctcgggttagctcttagaaacttgtggggcacaaactcttagagttaacaggtaaagtcaaggttttaagggccgtccaaatacatggtttgttgaaaaatagacaaacaagatgtgaaagatgggaaaatttttgactcatcaagggcccacaatgttggcatgatggaggaacaaaagtaagtttaagatcttaaatcacatatttagatgaacttgtgtgagtactcaaatggagcatttgaaaggccaattagtgttgcatttcactatttcctttcaaattagtattaccttaacaaaccaatcctaaataacccgaaatccaagaggggtagctcaaatggtcagactcgtggtttgctcccacaaggttcgagtccctctagggtaccaagactagatttagcaatgaggctagcaatataactagagtgcaaatatctatgaataaacaacaatgaatggtgtaactcaatgaaataagtacttcatatcaaatttaacaataatttaggctaagaagaacaggtaagtacaattgaatcttaggcaagcaatttttccagatttttggcagcttttcgatttgagcatgagaacaacattgcatcattaagtgtgattaaatcaatttaccaaacagaaacctggtattgaattagtacaaaattcagtgagaaaagataaaaacttactgaacagaagcttgtcaaggctctcattcgaaacatactcgtaaacaagtagcttctcttcgccgtgtgtacaatatcccaacaaattcacaacgttgcggtgctgcacacgggcgagcagcttggcttcgtttgtgaactcttttctcccttgatttgagctatgagacaacctcttcactgcaatatctctaccatcattcaattttccctgatttgatttcgaatcgaaattcttaaaattagaagatatctaaaaccccaatgccccccagacaaaaaagataaacacataacttttctactgaggccaaattacagaactggagctgaaaaaactgcaaaaattcaaaatcacatttttggcaggaatacaaaaatgtaatgagaaaaacaaatggtaactccagaaaatggattaaactcaatttcaataacaaaaaacatgaatatcaaattttctcgaaataattagttaaaatatcttcaaaatgtatgaaaaaagaaaaatctaggaaaagaataaagaggaaattccccaaatgccaatttctggaactcttggtaaaaattgaaacttgagaatccagttcatactaaccctagattttctcaggaaccaaacaagtaagaccaattcaaaaagccaagatttttttttcttaccttataaacgggtccaaaaccaccttcaccaagcttatgagttgggtgaaaattcttggtagcagcaaccaaagtttcaaaagcaaaaaccttttgttcctgtgcagcaatctgttcaatctcttgttcaccagatacctctgtttaaaaccaacataatctaaaaaataaaaaaactaaataataaaaaaaaaaaggtagaagattgatgaagatgagagaaatttaaaacctgggttttgtttcttacctttgtttgaattgaatctgaagggtttcataagattttgaagaatattcttggacttgctcatagacatagttgtataaaatttctatagctaaagagcatcagcccatgtagggcaaaggtgagatttttataatagttaaaacaatgtttgtgaaaaacaaaaacttgggaaaatgttttctgtttgtaattttcccctgatgacaattttcaatggattgggggtttggtttcatatatgagtatgataatgatgattaaggagatgaaatgtacgtattcgcatagtaatctatgactgcaacacattcaggcgtgttgacccagtgacactaacattgacttttttttttatttttttt

SEQ ID NO: 248608 - DNA, 832 bp, Cannabis indica
gtgattgttttaggccatagagtaatctttttagcaaacaaatatgatcttctttacccttctccacgtagccttctagttgttgcattaggatcttctcctccaattcaccatgcaaaaaggctgttttgacatccatttgttccaattcaaggtcattcattgttgttagtgctaggattagccttatagaggtgtgtttcactactgatgagaagatttttgtgtaatctagcccttctttttgtgtaaatccttttgccactaatcttgctttatatctcacttcttctgaaccatgaattctatctttgatcctgagaacacacttgcagccaactacccttcttcctgcaggttttaaaatcaagatccatgtcttatatttcttcaaagattctatctcttcacccattgctcttccccatttcttcttatcagctgacctcatggctttagcaaagcttctaagttcatgttcaaattgttctatgtttactgcatagtgaatgatgtctgtaaaaccaaacctttaaggagctttgtgaggcctcttgtctctatctcttcttagcttgtaatcatggacagtagtagcttcttgatccacttcatcgtctagttcttcctgttatgcttgtacattatttgtaggagctggttcatcatctgtttgtgcatgtaatggctgttccaattgtgaattgcctgacacttccacctcaaactgcatactctcatctctgctggtagaagcattattatgttgagttttgagtgtgtctttgtatactttgtcctcttccaaagatcacatctctagtgatgacaa

SEQ ID NO: 248609 - DNA, 1278 bp, Cannabis indica
tatgggttgtgattttaaaaaaccgccaaataaaaaaaccgccaaaccgcccaaaaaccgcccaacccaacccatgtgcaggcctaatatttagtgtttaagtatttttttctttatatttttaaattgatattaaaaattaggtgtacaattaattggatatccaattaaaaatctgatttcattcaattattaatcggattggattgaattttaaagtctaattaaatttaatcagaagatgatttttcaaatagaattggattgaaacgagaataaagaaaaaaaatgttagattagatcaaatgttcaagtctatctctatcattataactttattattttatatttaattaattaattagttgataattataaactacaaaattttaatttacagtaaattactttatattatcacgatataaagtgaattaatttgaattatatttttttctgcatactaaaaatagagacgttggagtgaagcaggtgtgtagggagagagagagagataagagtgaagaagtggcgagaagcatgtgaaactgaaacaaaaggttttgggtgacagagaaataagagtaagagtagtgttattattatatggaaaacaaaaaaagataggctttattagaaatcatggtagcaactacctattattttattaaacaataaactagcaactagcaagttgtatcatcatgcatgcatttcaccaaaaacaaatccactaagcctaagccacacaaataaaaataaataaataaattaataaataaattcaccactaggctgcctgcctctatatagagctccaaaaacaacggtgtacaagccctgtcacaacattataatcaccacctcgtaatcataacaaaccacaacaaaataaaacgagttgataaaaaaagaatgaggaatctccactcacgctttctaaatgcattctttaaaaatgagaaatctttctaaatacctaaactcaaaaatattcctctcattttagtttacacattctctctattttctcctatgaaagaccacctaaactcaccagagtacaccgctcaccaccgaacttcgcttaccaccactcacatctcattttcttgctcaccaccgcacttcgctcaccaccactcacctctcattttcttgctctaacagatctatagatttagtttttctgtttcgttgattttttgctcaaaaattgaattttaaatttttcgcgttttttgcgttttttctagttttatggttttttttttttat

SEQ ID NO: 248610 - DNA, 879 bp, Cannabis indica
gtatccatcaatcatatctatttaagttaattcacgacacccttaagaaacatattctatatttagaccatgtttgcataaatataagtacataaccttaaccttaatggtttaagtttgaaacacctttcctcaacctattctgagccactttttaaagaacactagttaacaatttactctatgtgttgccctatttaaaacacatgtaatacacatcaaattgcaattatattaaaacttatccaaactatacttttctctatatttaatttacaataataattacctcgaattgtattattctttcttcgtgcatttgccttcttgtggaaaaatttggtattctggtcaccagcctgtaaccattggacccttgccctctgttgccagaagacctcctcctttaatagcaaatcattgagtttattctccaattgcctagatccttcggtagaacatcctttactttgcaaattgtgcatttgaactacttttttctgcgtatctttaatttctcgaaataatgatccatacttattctgatgccaagtatccagatttgtagcacattgttgtatattcttaattgttgaaatcagtggtgtattttcctcagacctccaacaattcttgattaaactcttacattcttcgtcaccaatccagatattctcaaatctgaatcttttcctcttgttggaacctatctgcggatctgtatcatcctttacttttaccaacagtgctctgtgatcagaatgataataatctagatgcgtcaagcttgtataagagaaagagtcctcccatgcttcattcaccattgcccaatctagtctctccttcatacttccattgtctgcactttttgcccaa

SEQ ID NO: 248611 - DNA, 901 bp, Cannabis indica
gctctttctttgtgtgtgtttttttcacataaaaaagtaaataaatgcatagaatagaaggattgagcagcaaagagaaaaaaaaaatgtataaaacgacaagccaatcaagaatgtcaacgtgcaaatattaaagcatcttgaatagttaaattttgagcattactattaggcactagtggagtttagcactttctcgacatgtcgcgttgcgattggctagcaatactccctaaaaaatattatattaaattatatgggacccgatacttagttcgaccaatagtaatattaacacataagatggtacattttagcatttctcttcaattttagcaaaatacaaaaatattataccattggatagaggctagagcctatcatagataagagaaatgttaaagggcaccagtagtgcctagcaccctcctatgtgtcaatattactattggtccaactaagtatcgggttccatataatttaatatattagtttttagagagtgtcgccagccaatcgcaacgcgatcgagaaggtgctaggcaccactggtgcctaatagcaatgctccatagaaaattgtgttgatatcactacatgaaattgatactatcttttttaaaaaataataaaaaaatcaaatataaataagtagtgtgacaatatttataattaaaataaataatatattaaataataatatgtgaaatcataattatagcattattgaagagtgctatatgtttttaaaattaatagtgttaaaaatgatatggaagaaagataaaataaaatattgtatttttggatgatatgaaaatttttagcacctttaaaaaaatacccattaaagatgctcttatgtgctgggagttgcaatttttgtcaaaaataaaactca

SEQ ID NO: 248612 - DNA, 660 bp, Cannabis indica
tattttattaaatataaataaaaaatcacacccatgaatttctcataaaccaaaaatttagttatatagacacactttatatagaatagatatgctataataagtatttccgtgtcatatgtgtatttgtctttattgtggatattgtccacgtgaaataaatggtagagaagtgagccatatataagaacatggactactccattcattgtcaatttcttttgaaatggaatcccatgattctcaacagtctttaagaagagtgttattgttaattttttaaaacattctcttagccaatatttgtgtctgaaatatagatgttagaatattttttttaaaaaaatttttgtagttgtgtttgttatagtcacaacattatttctgtaaatttttaaaagtttcgagtaatttattaaaaataggttggaagatttttgaatacgcgtggtaaacttgaatatcaagaacactgttttcggtactattaattatttagaattttttaaaaatttacagaaatgatattttataactatataaagaaggaataattacgtaagccactattttttgtaaaatatttataattttacgttcaaagaatgtttttttacatttttacagttttccaaaaaataacatgaaaacaacataaaa

SEQ ID NO: 248613 - DNA, 1580 bp, Cannabis indica
cctaaaaccattcttgagataaacgatgccaaaattagggatcatctaatagaaaccaatcaggatgaaatttccagtcgctataggcgatttttacaagagataaccaagggtaaacgtcattatttgcaagatgcagcttggcctgaaccttaaactttatcttctattcctctagcaagacctctatttttacctcgagtcactgttactttttcaccaggtgacttagacttcaaagtcatgagcactcaagctcaaaaatcaaagacccccccaagatcctacagttactttcgaggtagaactcattgaatccaaagtaagatccataggagcttatgttggtaatgtattaaagccttgtggcatcaaacaagagagaggatgtcgcattaggtccgtcgctccaggggaatttagctgctttccaccagaaagagtaatccgagaagagtgtggtgaagcaagctagtactagtgcctcgtctggaataagcacttggagcctcaagcacatcaaggcaggagtagtactcccgttgagagagtactagaaggattctataattatctcgaaatttcccctttttagttaattttgagttcttatagaatcctgccatgtttaaaggttttataccatattatgggatgggagtgtcctactcccctcgaaatagtatatttctattctgtaaaggttgttcccacaaggaagcgaggatcaggaggtttttattacttcggtacccacacaaacgatcgcaagatcattgtgaggttacctaataaaactgaatttaaagatgacttctttttgacaactagtctctccccattaacacaacaacattttgcgttatacataagtattatcttttcttaaaagcttggttttgagtttttgatttttaaattaaaggcatttatttatttatttttattgtgctaacaacggtcatgagaagacaaattccaactccagaaatggttgaacgtcataaagctctattaggtcttttgtttggaatgcgctcagtagattttctactaaacgagactaatctaaagaccgttaatcttcttggcaccgatcaatctacctgcgactataagaatctgaagtattctaagtggcagaaagtcccagttccactcgatgaggaagatagagattacgtggctcgcacccactatctcaataaagtagcccctcgggaagctgaagaagaagcatcttgaggtaataattgtggatggtcaccaactgtgcttaggactgaatgtacttcgttagtcaagtttcaggatagtcagtataatttttatacttgggataaattctgtatagatcgtataacacatagatttgatagttggtatcctaagtttcatgtccaacttagttgcaatagttcttacttcagaattagcaatatggtactaatttagatagggcgggccatctggattcaagttgggacttatctctaataaactcctatgatatatacatgatcactgggtctagggagtttaatagttatcaagtttttcttcctcatcatctgataatt

SEQ ID NO: 248614 - DNA, 1034 bp, Cannabis indica
aattcttagagatgatataaactaactaacactaactgaaaatcaatgtctagatgaattacagttagataattcaacttttcaactaagctgcgatagttctcaagatcttcaaatggtttcccatcacttgattgatggctcaatatctcttttttgttctcgacttgttgtctcaatttgtttgctcatttatcgaatttgttggttagtttgttgtttgagttagtttggtgggacaaacataatatttgtaatggcttctggaaaatcagttcttgtttttgcagttgaatatgccatatttttacagtatcaggagcctcataagcattcatcttcttttatcactactattgttgattcaggtaacctaaattcgtgtcttctttcctcgtcttccaaatgactagattcaggtgctgcaaactatatgatatatagttaatattagcttattttctaatcttcaacctcacgcttccatttctactgttaccttagtcgatgggtcaccatctcgtgttcttgggtttagtacaattcctcctactccaatgcttcctttgttgtccgtcttacatgtacctaatttttcttttaatttcatctctgtcaatcaacttacttgttatcttaactgttgcatctcttttttcctgatcattacttatttcaggatcttatgatgaagcaaattattgataaaggacatgagtcgcatgaatatggaggcctctacatttttgatacaccaatacctaaatcaattgcttgttctagtgtacaatctccattcaaggcaccttgtaggttgggtcacctatcattcctctgcttataaagatttgtccacaatatagtaagttgtcttcgttagattgtgaatcatgccagtttgctaaacatcaccgccttagttcaagtccttgaatcaataaatgtgctagtgttccttttgaattagtctattttgatgtttggagtcctatcatttttaaacttggtttagctattttgttacttttgtggat

SEQ ID NO: 248615 - DNA, 1587 bp, Cannabis indica
aagcttctctcgataacacaatcccttactctagtcaagaaacaatagatgtgcgtgatggtaagaagcttgttattttttatattggtaaagtttttattccttcaaaaagtccatttcccttgcatttaaactctgttttacaagtccctttcatcactaaaaatcttattagtgtttccaaacttactaatgataacaatgtctttcttgaatttcataaaacttgttgttttgtcaaggacaaacaaatgggagcaattcttgtcaaatggacacttaaggatggtctatatcttcttggggatgatggctcgagcttcttaagaactttaattcaatgtcatttagttgagtccaactgtcctttaatgtcacaacattgtacctatcattcttgtaatcagtcatgttcttaggaatcatgtaattccattgctatgaataaaacaacaatctcttctcattttctcaaattcaatgctactgtgtataattctaatctttttattgacattatcttgtgtcattgcaaacttggtcatccttcacctgccatacttacaaaaactctaactcagactaacattcctcattctcttaaaacattatagttttataatgcttgtcaacaagggaaaaatcacaggcttcccttttctttgtccaatgctcgagccagccaacccttagaactcatccatactgatgtatgggggccatcacatatagcttccaaagataattacaaatactataccgtatttgttgatgactttagaagattttcgcggatgtttcccatgacaatcaaatctcagtcatttaagttgttcattcaatttaaaagcttggtagagaaacagtttaatttacctataaaaaaggttcaagttgatggtggggtgagtacagagtttttgaaaagtttctaagagatcaagggatctgcttttaatactcttgtcctcatactaccataaggttaaggtttggtcgttattaagtgtaatataaacaccacaaattactgacatatgaataatgtaggacagattacacacgcgcataagtttccttatatatatatatatataaaaattaaatcacaccaataaaaaataaatatattgatgtgttaaatttggcatagcattttatttctattttattttttataaagattaaattattatattttatattaaatttaacatttttttaacatgagccaaatttaagataggatacaacacggccttagaaaattaatctacatcattattctcacacatagttggagaaactctaaagttttccacaaaaaaagaaatatttgaagtgattaatgatatatttttatattatttatcaaattaaaatatttaatcattttataattaaattggataataataattgatgaactaacaaaaaaaaaaaaaaaattatctcaaaaaatgtaacattgcgtttttcaaagtgaagacattatggtgccgtttggtaacatttttgttttttaattttttaatcacaaaatgaaagtaaaatttttgtttttaaaaaatttatttttgaaaaaac

SEQ ID NO: 248616 - DNA, 697 bp, Cannabis indica
gtctacctcaaactaaacccaaagctaactcaaccacgaaccccaatgtcctcgccatccaacccacaaaatcaatttttgcttagtcatagaagcttggcgagcgaaaatctatcggagcctaaacgagaagcccctacttgcgtcgtccaccaagaagacgatccagagaagacccacccatcgagaaatctattgaaaaactatcgagaacctatcaaaattctattgcaacacaattttcaggaaactatcgagaacttatcaaatatctttcacaacacaatttttagttaactatcgagaaaccattgaaaatattacaaaaaattacaatcgaaaatcaagtaaaaatatttagaaaaataagcagaccatcaaaaacctgtctaaaaataatcgataaagtgtcgaaaatggccattattgaccttagtacgctatacattgagaagccatcgataccatataaaaaatgcatcaaaatttaaataaaatacccatattacaccataaaatgagatctcactgtttaaaaaaatagtaaaaactaatacaaataataaccatacagatctactcaaaatgaactatataattttctaaatatcatcttcatgtcgtccatgacggtggagcagcaggctcagtgttcgtgagatggttgtgtggtcctcgacgtttgtgatcgtcgtgg

SEQ ID NO: 248617 - DNA, 1507 bp, Cannabis indica
tttatctattttaatataactacgcttgttttaaaaaaaaaatataaattcaatggaaaatggccagaaagtattagcaagctctcaagtcttgaattattagatatttctgggaattccttcagtggagttgtctatgaaacacatcttgacaaactctccaaattagaacaccttgatttatcttacaactctttgactttgaaatttggaaacaactgggttccttcttttcaactccaacatcttggtttgagatcttgcatgataggtccacatttcccttcttggcttcaaacacagtcaaatatttcacacattgatttatcttattcaggaatttctgataccattccaacatggtctttcaatacaatttctagtttaaatgggcaaccttaacagaattaacagtggctaactaacaccataacagaattaacagtcaaaggctaactgtcataactgtcatgagtcttaaaaatgatcatattcaacacatccaagtgatgagtcttaacaataatcttactaagaagatgttcacccaaattccactcattttcttgctctaaatatctcaacgcttcatccatatctcttcttgcaaactcgtaagtctttcggttatattttgtttagttatgttataatggtataaacattatgttatttttgtaggggtactgagtcacttcgtacattgaagatgccatggaatgatttaccaaatgatgagacaatatttgaaagtgtagctaggaaactgtccaaattaacttacttggatataagtcactgcagtggaattggagttgaaggttatcactgtaagaatcttgaaagattggatatgaactctcttagttagagagagttttgaaggttgttgctaatcttaaagggtggtctaaaaaggtaactatatagctattttctgcgatggaataccaacaatcaaacatagttccattgccaaacccaaatggatgctaattcattaattggtgcatgcattttatctttcttattcttttttttttttctattctaggaaacagagtactaactctgttattagctcttgctttggtttttatgtttcgtataaatataagtgttttatttctttcaggtatctttgtaagtatatttttgggttaacctttttttttttagttgtagttgcataaaattgactcttaaataattgtgctgattagcaaaagcttcaacttacttatgttattatctttaactaaaaacagagtactgcctctctctcctttacctatatttggtgaaatcaccaccacatgttgatcttcagaaattattttgtaattaattggtaaaaatgtatttattaagtaaactaaagggagatagaatatttaatgaagcagcagtaaaagcaatacaataattaggcatgcaagcccagtttaaggattgagtacacaaattaaatcacttcatttcaaaaaactctaaaaccatatccaga

SEQ ID NO: 248618 - DNA, 978 bp, Cannabis indica
ttcttttcaacttttttttttttgagttattgataattaaaataattatttatttcttaaaaagttaaataaataattgcattaataatagatataacaaaatataattattttaaaatggggtgtataatataataagtaatatacaattaatatgttaatatttactactgcacatcatgtaaattaaaaaataaaaaatcttatcattgtattttaagaaaatgtgttaaaaataaactaaatatatgtatctaaatctacaaagcaacacacatacaataaaaaaattatcaagaataaactaaaaatatacaccataaaaagtacacgtgaataaaaaaaacaattgaaaaattatgaaaaccacttaaaaacaactaaaaaatagaaaaacaaaatgcacatacatacaacaaaaatattgttcgaaataaactaaaaacatacacgataaaaaatacacataaactaacaacaactgtaccaaaatacataaaaataacagaaaaacaattataaaaactataaaacacctaaacaataatataaaataactatataataacaaaaaatagctacaaattaacagaaaataacaagacatcaatcttgttaaaaatgaaatcattcataaattaattctaaataagctacaaaacatccaaaaaatatactacttttataaatcatgtaaaagataaaaaaaatataggaaaatgcttttaatttttttgtaagagagagaaagagtgtttaagaatatgagtaaaagaataaaagttaaagaatcatatattagtaaaggttaaaagaaattaaatatgattttttttttataaaatgtgattaattaaagaaaaatagtttaaaatagttagagtgagaatagttagtcatataattaactaatatttttcaaaatatgatattttcaaaaatctattagtaatatgaaattaattaaattatttttaa

SEQ ID NO: 248619 - DNA, 813 bp, Cannabis indica
gcctaataagacaaagttgatgcgctaatctgacatccatatacctctatcattgtctaataagacaatcgactagtaggaggcctaacaacaattttcacttgacgtcatgactttaatccacttaacaataatcactattccattaactcaatcataattgagtcataacgataataattgtatataaacatgctatgtggtacaaatatacatttattatcttgagttttaattcaagtgtattggttggcctgaatggagaaagagcaacgatcccgggccctatgtcacaacaacaaaaagaacgattaatcacttgacctaaccagttctaagtccttaattcatcaccataagtccccctacagatcactaggataccaatatccttaatatcgagaaaccatgaaaaatgggggttctaaacaccacaaaaaatggtaagccatttagaaaatggcaacccgtctttggggtttcttggcaagaaaaacggttaactattttgccataaacggtggaccgttttttgtaagaaacgagaaccccaagttttacacatcctaaaatcccatcaaaacctaacaaattcatttcacacttcacagaacgatcatacaacttctatataacaatccctacatgacaaaaatcaaaatcatgctcttaaacgaaaattatcatgtgagctcaagcttagctttgagcttaaaactcaaacttgactccctccaccccacagcaagaaaacctaacaaatgagtatccagaacacttctaatccaacccaaaaacacaaccaagtgctca

SEQ ID NO: 248620 - DNA, 1647 bp, Cannabis indica
attatgagttctaattccaataaaagcatatttacttatcatttacatttttttttttcttgagataaaagttatttacattttactttttttgaacctctaccaataagacttgtatttagtgtcttaattattgaactcaattattttttttattatttttttcaactttatactatatttaatactaaaatacaaatttgcatcaatttttaacatgttatacaatatagaaagaaaaaaaaaaaaaagacgctcccctcatttacaaaaaaaaaaaataatcgacccccctcaacttaaatcctgaatcccccactgtatacattacatagggataatgattttaataccaaaaaaaaaaaacaatttctgtacttcaacattttgcaacttgcaaaaagaaaagactagtatggattatcctgcaattgaaaaaaatatataaattagtgagaataatgcactatatatatggcaaatagataccctttgaaaccaaaacccttcatttatccaaagttaattgattcagccaaacaattaaaaccaataaaatcttatttacttaatacttgaaatgagatggaatacagttatagaataagtcaaaaaaatataatggtgattagctaattttgaattagctatatgagtaaatgcatagaagttgcaagcatcattttatgctaattgaattgaatgttgactgctaatcacaatctgtaaaatcactccaaatagagatatatacaaatttttattctattaactacgcatatatatacattgaaaaaagtaaaagaaaaatgtggtaaattggtaactctcttggagaaagttcatataaattgatcaaaagagttgtcataaagtactattacttcaaatattggttgatgtacatattaatttaatatattacagtatcaccaaatatagataacaaagtaatattattgattttcatagtggcacaattatcacaacgatactctatattgacaacctagaaagtggagtgggtggtagcatattaatgaacacctcttcaccttagaagcaattatatatatgcatagaaataaaatttaatatattagtagatagatgcatgactagctaagatgccaaaaaaagaaaaagtataacatcgacgaacctttgcatctttgcaaggtacgaaatgccaatggctggtgtaataaggtaggctgctaatgtatttaccctgaggaaacattgctgattattattatcattggaccaaaagaggcaaataatatttctgtaatctaacaacaaaatggagctaaacataccactctaataaagggctgaaaacttaacttttatgtgttactaaaacatggtctcttttgtaaacactgcatgtgtgtgaaccctggcaagcctgcaaagaaaatacattatttaaattaatgaatttttaatttctcttcttcagctttattgtaatttacaaagacaagtgttacaaaatcagagctcaccataactcatcttttgtcctccaaaatcaaagtcattaccagaccaaatcaccatgacaagtttttataagatatgcaaaggaagtgtattaagacaaacaatttatatgtgcttgaattatatatgatagga

SEQ ID NO: 248621 - DNA, 673 bp, Cannabis indica
ttacatttaattttttaaaaggtaatatttttgttagtgagactatagcccccacattgagactagtgggtctgttcctagttttagttgttttcgtaattactatgataatttctatgtaaattgttatgtgaattttagttgcgattaatactgttctagtagttactacgtagatttttgtaaaaataataataataaaaaaaaactactttaaaatataaaaatagaaagcccttttatttttttttcttcattattttgtttttactaaaaaaaaaatcaagataaattaggtccacagaatattcaactaaacaaatatgtggggtacatagctcaattattgcaagtacaattatctactcttgattatgagaaacagtagttttcttttttctgttggggtcaaatttatgattgatattttaataatgtattgaatagtgattatattttgtccggtgtggtatgtgaaaaaaataattttagggtaatttttaaaataatttgtggcataatatatctgtgagactgcaagtacttgattactgagtgttaagtaaattgtcatatgacaatttttgattagtttgtacttcatcaaatttttatttttatttaaaattaatttaaatatactaataagaaaataacacgtaaataatgactt

SEQ ID NO: 248622 - DNA, 868 bp, Cannabis indica
gatacttaatttgtgggacatcattgctaataaacacatattttagttctcacgacatgcattcatgtagctgtgtctgtgtgtaccaactcctaagtggactcttggattgttatagtttgcttagagagttgttgaagtaactgaatattccttataccatttttactataggcggaagaacaaaattgcctcattcgagctcaaattgaaggtttaaaggaaaaagaggcggatgtctcagtcatggctgatgctgttcagaaggtatggtttaattctttttgtattcccggtttcacttgccagaaattttgaaagttgaaacatgtaggctaataaaaatattaacagacattgtttcaatttcaaataatgtgcaaattctgcagttgagaagagggagtttaaattatgggctaccaggaagcaatgacataaccatcaacccataattattgtaagttaatatatatgaaaactaaattgtgttatgattgacagtttcatgtgtatttttacaattacatattgcaaagcttgctgattgatatcgattgggtccttaacttttcatcatttattttatctttttaaagtccatgtagttatctgtcaaaaataagtccttttttctttttttttttttacataggtagtaatttattgttaaattttttacttatccattttagtatttattttgttaatgagtctgtgtattgattttttattgttattcgtttcctttttattgattattttagtcattttgttatgtttggtatggtggttgtttttaattagatttttaattagttgtattgtagttgtgttacaatgtgtttaatcatcagtcattttgtac

SEQ ID NO: 248623 - DNA, 922 bp, Cannabis indica
actccacgtgtcaccattctcataatgtcacgtcagagtgaaaaaattgggataacaaagaggaagaaaaagaactcctaaagatgaaagcaaatagatcgaaatagaagaaaggtagataaaaataactgaagatgaagaatttgggagtacatttaacaatgagataaatctcagtgatttatgatttagaaacaaatagaataattgtagaacatcctaatttatgaaataatgacatataaaatcatgatttcatgataatacaagatctgcattatttttttttggaggaataaactaactagaaaatgattatttggtctgttagaaaagagataatcatgtttggtctctacaaattaacatattacttgttatatgatcttattcaattagttctgaaatattaatgccattgtcaaattcaaaaaagttaactggatacttgggttgaaaatgacatttaatttgcttctatgtcacttgtttattcacgaagactaaagaagaagaacataaaaaggcttgtgttggaaaagagtcttgctctgttaatgtttctacaaacatatttggctctgttgattgtggaaactggaaattcattagcaactggaggtgatattagggtctatctggaaaaattgtctgcagctgaagatgttcagaagtttgtgaagcaaaacccatttggtcaaatgcttattagtgagagtaactagtcttggggtttctacttcaaagtcatgagtgcaatgtattcattgccaagatcaatatagtgcacctgagaatatattcaatatttatgtttttttgattgaggatggggcttagtagcggttacagtggagaaagctgccattaatacacaacaaaagaagaagataatgccattttgttttagataatacttttt

SEQ ID NO: 248624 - DNA, 1896 bp, Cannabis indica
ctctcttaaggttataatgtatggaaaatcttaagttatgaggagagcaatggtaggcgtgtgagaaagagagagagagttcaaacttagagcttagggttttcaacttaggacatcaggctttcgacttagggttttagggtttagttaaggctctttatgtaggagatcttaaaccatttaattaggtaaaataagaagatattacatattaaattagtaaaatataaatgactaaaatgccccttaaaatagatattttgcctctatttgtgtgggttgttaaggcccaattcggagtctagcttgtcgtcctcgtatgaagctgtgcaccaaagtcctttcacgctagtgtctggccagacatgcatctgcaggatgcatgctggccaaccctttactgtctagaagctggtcggcctatgcttggcatagggccggccaggggtggctggttcgtcattcgtcttcccgttcaagtgtcgggactcctcgttggttaaagtgctgagtagatgacttggccttcttgttgacttcaccataattaataaattatttaagtgacatgagtttgcaaaatttgattttggcatgattttccaagttaccagcgtctaggttgacatcaaacaacttctcaatcacaggaatgtcaacttggccatacgctgtcgaactatccacagtaatgcatccataagccactcatttcaactttgattagcgcggttcaaacttcattggaaagctctcttcaaaatctttctacgcatgtctcacactcatatctcaattttaaagttttttagtcgaaaagttgctcccaactcaatgtgtgatttttatcgcaaattccaacctcctgaaattgacgatcgccatccgaagtcaaatttgaacatcccaatcattggatcaaaataaattgtcaaattcaccccatatgagatattcccggaatcttctcaattttcattactacaaatataatatttatctttggaattttccttaaaaaatgaaaaaccaaaaaataaaagaattttaaggcccgcatcattacttttagcctcgcgcccaatgaattctttttcggttttaaaaaaaatcgaagataaaagggtcgaattacacctttatgttcggcgtcaattatacatagaagatataggcccctacacgctgaatcaaaaaggccctaatattaaagatgtgtcttcggttacactttacactctccataaggttagactttctatctttttcttacttattttctctcaagagcttataagtgagaattctctttaggtaattctcttatatacactttttaatgtaataaaagttcgaagtagatataaatttatgaacattgcaacacgatgatgagtgaattactataaattgttgtctttcttttattttattattgttgggttatgatttatgagatgatatgttattggttgtttgttagtgtcaacgcgacccactcacaaatcttgatttgaaaaaatttgcccaaatattattttaattagggtaaatagcggcataagtacccaaagttttatgtttgtaagcgacataaacccaatgtttatttttagcagaattagtaaccaatgtttgtaaaactgcattcttcaaatttcgcctgtacagattttgttttaaatttattaaaagaacatttagaagtaactgcttgtgcatatttctatctagacccaataatcaagaatttatgcattatatgtgtcatgtttaagacaataacagagtctgtactgacaaaattttaaaagaaaattacaggtttacaaacattgaatacttatgccgctaaaaataaacattaagtttatgccgcttacaaacataaaactt

SEQ ID NO: 248625 - DNA, 588 bp, Cannabis indica
aaaaaggctgatgaggagaagcacgagcagggggtcattaatcatgggaacaagagtgataaaggctggcgaattcctaagaaaaccagtcaggtggtccaaaatcgcagcaagaatgtggaacataaagtaagtggtaactcatttaatgctttacaggggaaggaaggcacgactcaagatgatagtttgcttctggatcatgttcatgaaattgagggtaacttgtctttacctttgtctcatggataactgcaatatcataagttggaatgttaggggtatcaataagaaagataagcaagatgttgttgctgaattttgtctaaaaaataaatggggtgttggtgctttgttggaaacaaaattgaaggggaataaaatcaaggagctatttgacacaaagctagctatatgggagtattacactagttccacaatagaaggtcgcttacttattgtttagagaaaaagttttgctagagttattgtcattgctgaatcttctcaacatacgcactgttatgtcgagatgacgggttgtgataaagctttttgtgttacatttgtctatggtcacaatacgat

SEQ ID NO: 248626 - DNA, 613 bp, Cannabis indica
tatatatgaggattgttattgggcacccgtagtacctagtgccttctaagcgtgtcgccttacgattggttagcgatactctataaaagttattatattaaactatataggatttgatacttaattgcaccatagcgatattgacgcgtaggaaggtactaggcactagtgagccctttagcatttctcattatatatcgttagtgatccccaaaaaacaaacgaaaaattatattctcatcttccccgttaagaggaaaaattaaaaaaccctaagtcttattttcttggaagatcattacccaaaatcaccacaaagatcatttgtacaaaatggattaagataatcactatcaatgaattaaggtacgcttcttctatttgagttattctctttgaatcaacaaagatatcctttagatttatatttatgcgcttataataatatgtaatatgtttatctatagtattgaattttgttattacatattttatgagtgataaagaaatctgacaattattatcaagaaccacttttgattgattctttaaaatttatggtttatgtttaagaaatttagaattttcttaaaaaaagtttgattttccagtt

SEQ ID NO: 248627 - DNA, 747 bp, Cannabis indica
gaatcagagataaaatagggtagaacagagtaataaaaaacctgaaacaaataaagcacaaaaataataaaattaacaccaagatatatatcgattcaagtcctatagattgatggctctactccagttctgaaacaccaccgaaatttttttattgattgagtaagaaaaaaggtatattacagtcgagattgattctctattaggattattgtaaggtgtttatctctcactactcttttacctaagaatcttcttcatctacagaatattcttcatacaaatctcaaaatccaatctttctattttattcgtacctctctctctctctctaccttcaatctctctgtgcattcttaatcttcaacctcaaagtcactccaaaaaaaaaaatcaacccttgcaagtgatgagtatgatcagagatatagatcaaggaaatggatttctaagtcaatggttgtagtaattaagttgttaagttagtaacgacttaacaaacattcgtaatattatctccacatcagctcaagataaagctcttccgaatgagagacacgcttcttggacactaaatgaacttctcatatagggataaacgtacagttaaagtcgactatctagaacttccttccaggaggaaacaactaatcatccggaacacctttctagaggcagactagcttccctagagactactttcggatggagagagcgtccttctagatgatatctttccatgagacg

SEQ ID NO: 248628 - DNA, 595 bp, Cannabis indica
tgttgataacttttaagctagagaacccattgagaagattaagagctaccgaaataatgtcaggcccaactgtactccaatttttccgataaaaaccagtcgtgaaaccatcctctcccagactagaagggtctatctgaaaaaaaaaaaaaaaaaaaaaaaaaaaaaaaaaaagcttctctaatatctttgccataaaaatcctaaatcaaatgggcattcatgtcctcaaaaatctaactaggaatcgaattaatgactttatcaaaagcatcatcagttggtttgtctaaggtaaaataattagagaaataatcttcaaagatggctccaattttatcttgacccataacctccagtctcacactattttgaagctttaaaatcttattcttggcctgtctacctgaagcgcacctatggaaataaacaatattcttgtcccctaattgaagccagtcatttttagcacgagaagcacaatctttctcttctttctcttggagaacatcaagctctttttcaattttagagagctcctcacaactgacattatcaagattagcatccacaatctcaaattctttgagctttt

SEQ ID NO: 248629 - DNA, 521 bp, Cannabis indica
tgtcggaagcccacaccatcaactacaagtgatgcgcccaagtgagaacccccaaacaagatttggccacacccaaagaaaaaagaacacccaatcctagcaccatcctccaaagtcgcaataccaaccatagcgaagcattaagaccccaatccacatatataacaatcaaaagatccaccctaatttcccgttaggaagccccactagaacaccaaaactgtcccagattctagcaaatgatccttagtaatagagatcctagccgactaagatgactcaaatgataccacaaaggcccgcaggaaccaccaaacgacatcctcgcagatctatcccaacacagtttcacaccggaatctcgaagccaccgaaaacactaatttgagaatcaaaaatcactctcgaccaaagtcacgccagagcccaaagaaggttggtgagccttggttaaaatgaaagaatgaaactggcggctaggggtgttcatcaaattgcccaaaccgcttaaaccgctcgca

SEQ ID NO: 248630 - DNA, 707 bp, Cannabis indica
atcacaataacatgcctaatctaaaaaggtattacaaataatgtgtacaatttaaatatgagcattgttattaggcattggtgcctatagcacattcttaatatgtcgcgttgcgattggctagcgatactccttaaaaattattatattaaattatatgagaccccatactaagttagactaatagcgatattaacacataggaaagtgctaagcacggctagtgctctggcctttagcatttctctttaaatatatatatgtaacacattaattattcatataataaatttattcttgttatattgttataatgtacaaatagaaaaataatatagtatacaatctaatcctaaatcctaaaatacttttgacattaatttcagaccccttagattctgccgccatataaagtgacttagtgatcaaatgagttggattattcaccaataaactagaacccaaaagaaaaattaattaatatacaagaactaatgtatttacatacatatcattattaaaagaattagtgatgcccatattatatgtaaaatcattaatgatacaaattgagttttatataatttaatataatttttttttaggaagaatcactaatcgattataaggcgacaatttctaaaaaaaataaaacactattaatatctaataacaatatttttttatatatataattatacatatta

SEQ ID NO: 248631 - DNA, 671 bp, Cannabis indica
tctacgatgatgtaccgtgcagcgtttctcctcatttttcgagccttgtttctattacttaggagttccctagtgttgaggtaggctgctattggcgtcatccagttcggggatgtgtcaatcatctcaatttctttcgtacatgttatgctgggttttttaagaaactagattgggattagattagccctaccagttatattgttgcttgtaagttgggctaaggcatcagcagttatttttcttctctctgaattttcttgaggacatagctcttgaattgtgcaagcaggtcatgtattttgcttagataggctatcattttttttttctccgagccttgtactccccaaatacatgatttactaccaattatgagtcactgcagatctcaatgtgttcgacatgtagctcccgagcaagttttaggccggcaatgagggcttcgtattcagcttcattgttggatgctctaaacccaaacttgatcgcctcgtgtaagtgttgcccccaggagtgacaagggaaatccctacaccggacagtttatctgttgctgatccatctacatgtaacttccatgtaggtttatatttgttgttgctcggctgaggttcttgtactggctccgggttgttttttgaaatgctttcttcttttcccctacactc

SEQ ID NO: 248632 - DNA, 1730 bp, Cannabis indica
gatgttttttttttaaaggtgtgaatataagcaaaagttacatcaaaatggagggttagcctatttatactatctttttctttctctctcatacaaattgtatgttaatacgtgtaatggaatgagttttgaatttgaagttaacatcaaattattgtttttgattttgaagctaactatattgaaaaatactttgtttagaaatgtgatattttagacaattgaatgggtgcaagcaacgatgttcacttggacagcctagcctagcatttagcttacaaatgagctttttgggctcaaggtcatactcttaagaaaaacccatgttcactagtttttctaaattatctacaaatagccaaattaaaaaataaaaaaaaaatcagctagattttttttattaaaatataaataggaaaaaaaaacagagtaaagaaaacgtagctatattaacaaatccaagttgttaaaccctttaccatatggggcgtttggtatgagattgagatttcatgtgaatgagaatgtaaatttaaattaaatttgaatgacaagagatttgccttttcaaataggtcatatatttttttaattaaaatagtagtaatattaatttcttcaatttcatgcgtttcatattctttaagtctactctctccaactcaaagtcatataataaatactcattaggtagtatttggttataaagaataaaaacatagctagaataagaatgatattccaatattttaaaataaagtcaaataaaataatagaataaaagttattttatttccattttattccctccaaccaatgtttaaattacccaaaagtatgattttatagagtacagttcaattcctccataaataattataattagaccctttttttttattattgaaacatgagaaatatcattacattaaaatgaccatcactggttattataaaaaagtatagcactgagtaaatttaactcgagattacctgaaaatgacaaacacttagtccatttaaccacattgtaggtaacaaaattatggtcacaataaacaaaacaaaagttgcagcttttaaaatactgtttcaggctcttattgtcactaatgattctaccaatttcccatggaacatcttctccattgacgaccttgatggtcagctctgaattaccttccacaataataaagacatggcctctttccctaatcgttgtgatagcgaggagcgcaacactagcttcatccataatggtagggatggccctaaccactcgagtttctactttctgcccacaaaaattgtccattttcatcatgggccaccacaccgagagcattcaccttagggaacaagcaacattgaagtttatatttatccatctgaagggggtggcgcccaggcctttgttttattgttgacaagattagtgtttagcaattttgctttgtactcaagaaaattcaacataatttggtatgccactttacttccatttggggtagtgttgtcatgcagtagattgctcctacacatccaaatagagtcaagaacactggaggcgaacaacagtaattgctcagcctcaataccactagagcccaattgccaaatagttctaagccaatccacgcaactacgagtagagaagagggccggggtagcgccccaggggattgaaaaccaccgtgctctagcaaagatacaggttaaaaatacacgct

SEQ ID NO: 248633 - DNA, 1714 bp, Cannabis indica
cctaagctgggtagaaagcttcaattatgaaattgttgttgcgtaacttctctacctcttccttcagagctagggctcgctccttatccaacagtattcctttttgttgaactggctagaagtttggatcaatatttcgaacatgtgaaattatagaaggatcaattccgaccatatcctcatgcgaccaggcaaaaatgtcttggtttgctcttagaaattttatcaattctgattttactttgagtaacaaactttttccaattttaagctttctggttggaatacttgggttgatttcaatctcttctagttcctccactggtccaacattgttgcttgggtccccagtcgaggatccacatcttcatccccgccttgggaggttccctatttagtaatgttttttcccttgtctgaactctggctagacgatacttcctttttagccttggttatggcaagaacattcccgagcaacttgctggtttcctcttaggcaccccaccccattctttgttgggaacttaaggcatgaatggaatattgacgtaacatcttttaagtcatataaagctggtcggcttatcatgacattaaatgttgatcgaacgtccaatactagaaacggtgccattatagttatgctcttcggagctttcccaacggtgaggggtaggcgaattccccctagaggtgtgacaccttggccggagaaaccttacacgggctggaggcagggagttaaatctttaagatggatccccatcttttcatacgttgtcttgaataagatgttggaagaggctccattgtctatcatggttcgggccaccatcttattggctatctggacttccacgaccaacaagtcattgtgtgggaaacatatcttgatagcatcttcatcactaaatgttatagtgggctcccctgcccgtggtatttttggtttcctttcttcgacgaccaggattacttcttctttctcatgttgtactattcgggcatacctttctcgcgctttgcctgaatctccagctatgtgcggccctccaataatgacttgcaaatgtccatctactagtggtggtagtaaatcttggttgttatcgcccctctgattttgatcggccttgacatacttctgtacgtgtggattattttttgttatcaaaaattcaattttctgcttcagattgttgcattcattggtgtcgtggccataatccttatgaaatggcaaaacttagtcatgtctctcttgcttacatctttttttatgggtgcgagcttcttatacggggctaatgattgagtagccatgtacacactttctatatcttctgtcaggataaaaaatgtagtaaccttggtaggattctccctaggagtttgttcaattttaccagcacactttccctttttcccatttccttgcctattgtttttgttagtccgtttaccacctgagcttgaattgcttgagtattgggggagctagacggatatcccagcagagggagcttttggctggctagatttttgctcaacttctgcctgcacgatcaaggaagtcactcataaactctactggtccgttcttcccgatgtccttccaaagttgtccaagaacttcaatacccccaagtatcgcggacaactttccgtcttcagtcactcgtgcaaccttagttgcttccgtcatgaatct

SEQ ID NO: 248634 - DNA, 1642 bp, Cannabis indica
ggcacaaaacccaacaataaccccaattcatactttcacttgattagcaatattactgtacatcattgtttccttacctttgtatacgtcctagggtaataaccctagacaacattattattaatttagggtactaatttactgagtctaacttaattatgccttctgtgcataatcctttatttcaacatatttagcatggcataacactcaaaatcatttgattattagggtaataaccctatgctagataaccgctcattttagggtgataaccctaatcccggttcttaattaatcacatccataatataaaacatgagcaccaccgcgcttagctctacgtaaaaactaatgtcttacctgatgttccgcttatatggagattccaaatccccaggtgctcctgaccaagtgccggtaatcctagttacaattatcgggattcataaaatagggttaattcctaaatatactttcaataatcacataattatcattacatttacatattaacatatagatcttgaaacaagctttctaacagtataaagagcatccaaaacggagtcccgagtcaaaagttatggccaaaacaaaaattggccttcctcgatgcagtccaatcgaaatttcgattggaacaaccctgaaccaaccggaattttggaagtctcggcagaaacaacacgaaaaaatctcaacttttaagcccccgtaacatactcaaatcttctctaatcacaaccaaattttcaagagcatcataatataacataacaaacatattttacagctcaaacacaataattgcaccaagaaccaaaaagtgtcattatttgaaaacaccgcgccaactatacatgattgtgactataccgcaccgacttgtccgaaaaaacctacggaaaaacaacacaagtatactatataataatacagtccataagcacgtcataacattaaaattacaattttatccttctcaggtcaaaattacaaaaatgaccctggctcacaaatgaggtcttaacacgttatttctcaatttaattcacgtacaataaattaattaataatataattccatataaatacccatttaactagttagggtttgctaatccgtttctcttaatcttaggatattacaattatccccaccttacataaattttggtctcaaaatttacctgaataactccggatatttatgcttcatatccgtctcgagttcacaggtttcctcttccactttattgttcctccataatacctttatcaatgcaattgtcttatttctcaagaatttttctcttctctcaagtttttgcaccgattgttcctcgtatgatatatctggttgaagttctaatgcttcataactcaaaatatgggacgggtctgagacatacttccgaagcatcgaaacatgaaatacatcatggacaactaccagcgccgagggcatagccaacgtgtacgctacttgccctatcctctcaagtatctcgaaaggtccaatgaacctcaggctaagcttttctttcttaccaaggcgcttgatgcctttcataggtgatactggtggatatattttaccaggatctagatttactaacaagtatgtttcattaacatc

SEQ ID NO: 248635 - DNA, 820 bp, Cannabis indica
atatactaaattttgtttaagtttaaaatttagttactttctttctttttttttttaaaataaatttagttacttgtatgttaataaaaaaaaaaaacttaaagtgttgcttttaagtatagttattttttgataccaacaacaaaatatatgcttcccacacattttaaaatgactaccttaaaaagtaacacaaatataaactaattagtatctaaatgttatatttttttaataacatcagttaattcctcattcaattcataaaaaaatagcactcagtttgatattaatactcgcagtaagagaaaaaactgcatacaactaacttcaattttatcatttaaatgtctaatatttgttaataattttaaaattacgtatataactaaaaattatcctatatttttttgtctttttttctctttttgggcctatagtcctgttgaaccgaatagtcactatgtctagcctattgggccttttaatgagctttataatatttaactgggctttgattgttttattttgatgctttttttttttggaaaacttacaaaaatactgcttttttaccaaatgttttcaaaaatactggaacacggcaaactttacatttttactttccaagcccattttcatttcttttatactgtcaggcccaatatatttacttttatattgtaaacagtaacaaaacacaaatggcacctctccttcgtggttggggacggacaaatcaacaccggaatcatagaaacaccaaaaaaaaaaaactataaaatctggcaaagagaaaaaattactaaatcaacaacaa

SEQ ID NO: 248636 - DNA, 521 bp, Cannabis indica
tttttgcacattttttgtaattatgtttttgttgtacatttatgaaaaaagcccataaataaaagtacaacaaaagagtttttcttaaagaaagcttagctaataatggtccatggttgaatctaaaataaattctttacttgtattcattgtttgttactttgaaatagtattgctattagacatcagtgttgtctagcacttatataaagtgacgctttaagtatgaatagcagtattctataagaattattatattaaattgtgtgaaactcgatacttaattttatcgatagttatatgacacttcaaatggtgctaggcattagtatttacttataaatttctaacagattatgaatttgctattgattaaactattatttaactcttaaaaaaaaattgaagaccaagacacaaaattaacatgttgtaaatttttaaaaatttatttaactatgggctcatgtgtgaagcacattaaaccccaactagttaaaaaaaaagggtaaattgcggca

SEQ ID NO: 248637 - DNA, 802 bp, Cannabis indica
acatcaccagcataaaaataaaaaatctattactttttactcataagattagtttcttcaaaaactcaaattattccaaacatgatgaaaaatactaaaattaccaagtaataacatcttctaactatggagaaattaacaattgtagagcctaagaggctcttatcaaccacataacctcacattttatcaatttattaagtacttactatatatatgtacatgtatttgtggttgatggtagagatgttgtccatgccacaacaagcactgcaacattaaaaggaagggaaggatatggaggatactagtatgaatttagaatttcaataattatatcataattgtagtttaaatatttattaatattattgtaatatgaacaatgtaagatttaatttagtttgctataatttaataaatttaaatattttaattatttttttatgagttttaatttaatattttaatgtaaattaattaatttcaaaaaaattaaaaaaactattagaggagacctatattgcccccaataggggccataaattgcctctaaaaaagtataagttgctcctaaaagtattttagatctcaaatattgatttcaaataaaagtgccgtccctagaaaattaaaagttgcccctaatgttcacttttagggataaatttttttcttgcccctattaaggaatattagggacaaaatattagaagctatcttttagaggtagaatgtcacctctaatatcttttagagacgaatttagagtgtttaggagcctctaaaactctcttttctt

SEQ ID NO: 248638 - DNA, 938 bp, Cannabis indica
tgtggatgaacaaaacaaataaaacaatattatgaacatatatatatatatatataaaaaccaataacaaaaaataactttacagaaaagaaattattatatataattcaattacaagtcaatgtacaacctgacaaagtctaaatatagttgtcctacggttgggttaatcatttaagacatacaccatataaagcaggagtattgtacagaaatataacatatatactaaaatgacagaagtttattgaatagacaatggacaatgaggcataatatacataccagaagacagtttaatgacagtagaaagtttcacaactgaaaactaattcaagagatgtgcaagaaaagtaaaataaaacgagttctagaaaaatagcatcgacctctcgaaacaaaataaacaaaattgggactaaataaacatctgaacaagtaaaattctacctcaagacaagcaaaatgtaatgcatagaaacaagttggattttaaaaaaaataaaatagaaatgacagtatcaaaccatttaaaggcaaaattatatatttagcaataaaaatgaagcagctttagattttatcttcgcctaggtttttgaataacatacagaatagttctgatctaaaatcttactatatgaactactaaaccacggtctaaatatctactttagaatccaaataaatacaattaatccaacccattttcctacacagcaataactgggcattgaagagacagatcgaattgtcttgaatcaatttcagggacaacaacaaaaaaagagacctttagaaatcaggcatttagtacctcaaaccattgatccatagcgaattttcggccatacattttgacaacttaactgaaattctagcctaagggcttatttatggactaattttaataatatttattctatgaaaataaaatc

SEQ ID NO: 248639 - DNA, 1066 bp, Cannabis indica
gatcttcgtctttcttctcgtttacttctaccaagatcgccatcaacttatgcctgtctttcttatgatgcagctcaatgcgatagcaatcgcgagccagcatctggtcaccacgcaccactcccacgccatctagtgtttggaatttcaagggtaggtgcttgatcaaactaattgcccctagttcgataagtgctgggcgacccaacaatatgttgtaagccgagggtaggtcgacaactaagaagtcttgcataatagtagcagataaaggtgccttgcctaaggttaatgcgagcttgattatgccaaggctagctgcaaaaattcaccatacaaggcctcaatttggtcttttcgagccccattttccatagagtctccttataaaggatatttatcgagcttccattgtctattaacaccctcttgatctttttattggcgagttgaatggtaatcaccaatggatcgacgtgaggatatctcacgtttttctcatcctccttcgtgaatacaatgggaggttcctcgattttcaccttcttcgaaggttcttgggcaaaggtcgattgctcgttctttatctctttcacatatcttttctagatgttattgctttcccctacgatatgtgaccctcccgaaataacctcctctccttcaacaggaataggttgtaacccctagttgtttgggttattgggcagactgggctagttgtatccctggccctgtcttttcacgtactgtttaaaatggcctcgagtgatgacactttctatctcatcttttaattggcgactttcttcgattgtatgcccaatatccttatggaatttacaatattttttaggatctcttttactccttgaattcatcatgcgctcgggcttgccgaaggcaaccttttgctcatgtgcgaggtaaatattctaccgtgtttcattaagctttgtataaatagtatacactggcacacactggcacatacattgctgggtttacttcccgagctggttttcaacagattcatttcctttcgggcttcttccttccgaacgaa

SEQ ID NO: 248640 - DNA, 1370 bp, Cannabis indica
ttttttggataatggaggctgccctcttccaaagaaaatcttatccttttcccagcataaaccctacacatgtcataaatccaggcttttcaagtatttgcttcaacaaccactcctagaacgtcacttcagctattttttgccacatcaattaatgaattaccacgtcatctttttctacattagttttaacaatcagccctgctaattttgctacagtaaagttcctgcaaaatttcagcaaaacattacactttctctattaagccctattctttaccaaaacccaaataaaacttaataattcccactaacaactccaacttacccaaaagaacataaaaatacaaaataacatatattctcacaaaagagaaggaaaagaactaaatataagtaaaatacatacacaaattaagctaaaaaaaatgacaagtaattctttattcaagagttatcaatttgatagtctataacaactttcgataattataaaacgtgtggtaagacaataatatcatccaactataatagtttattgttgtaaaatttatttgctatgtaagtacacaccatggtaatttatttgctatgcaagtacacatagtaaaataaaagtaaatatttctttatacatacaattttttcttcctttgtgtttgttattttttgttttatttattttagtttgttgctagcgacataaaataacaataatttatttttattttgttgttggttatgtgaaaaaaaaatagtaaatattaagtaattcaatattaaaaactaaccaatctaaaataaccaatccaatccatacttttgcgaatttaatttgagttactatgtggattggattgaatccaaaatataaaatccgcacttagtacagatcgaatgcgctcaaaatagtgcagaatggattgtatgattagcgccattgagaatgataaagagaagaataaaaaaaaaaaaaaaaaaaactcttaaaaaaatgaaataaatgaaatatgcaatgtgtcaaggcttttattcatgtcacttaacaagagataggataatgtgcaataactcttttcaactatatatgtgtactactagctaactagttcatgcatgcatgatttatatagatagtgttattaaaaaaaataattaattcaatatttaaatttttcaaatacattgaactaagttgaagaataattttattatgaatataaattatttactatttcatgcatgattatataaataatgtaattaaagtaaataattaattttatatctaaattttttaaatacattgaactttataattttaaaaagtaaattaattaataaaatatgataaaattttgaaattatta

SEQ ID NO: 248641 - DNA, 1543 bp, Cannabis indica
aggcagtggttccaatgtacccttcgtctggacgtcacgtcttagggacactttttatagttgtttttcttctttgttattatttttcaaatataattatgcttcttttctttgattttaggtttcgacacttaaaatgtataaattggtcaaatttcgaaaaacggtgatttataaaatagagaaaattttgcaagaaataaagctaaattttaagcctaaatttaactatgttctgatcatattttagaaaattaaaacataaaagttttagatctcttttgtagcttttcaacgcatcttgaatcagctcatttggagttgtatgtgaaaattatgtatattttactgagaggggtcgaagtaggaatagtttggtcgcgactaatattcgtggccgcgacgagcacaacttatggtcgcggtgagggactacagaaactctatttttcacttttttacaactgtcatagcgaggctattggcggccgcggcgccgactccgtacgggtcaaggagaacttcttttcttatttttcagttgaaaaactctatttacactactacaaaatactcaatttgcgtcggtcaaagcgtctcaccaagatggttgaccgaagcaataaataggcagtaattttaggcttcaaatgttaactgaagctaaaaataatacaattagcgttagttattaatccaatgccgaaagaagaaccgaggcaaaaaagggaatagtttgaaaaacatattttcctttagcttcggtttaaaagtgatgctaaatttattttgcttcagttggaaattgagggtaaaacttggccacaatgtttatcaatttctaaccccccaatattttgagaagaacccctatcatattgcatcttcaaaattaaatcaaaccctagcacaaccccgccctcttcgaccctcaccactaccaaatggtagtagccttattcaacctctccaccccacgtagtagcaggccagtgacgcactaccatagccaacaacccgacgactcaaatagagtagatacgagtaaggcatttgtcttaaccattaactcagcatcactcttctctctctctctctctctctcatattctttttttttttgacataaaacttcagatccaataagcaatcataatcaccaatcactagtcactagtcactatagtataggttaatttaggttatggcataccggtttaagaaacagacaagactatacactaacgaagataagaaactgacaagactatactgtattaactccccccctctctcttttggtgggagagtgccccaactcttgttaatacaagcataagttaattagccccatcacgcattattattaattaaggaaaatttgaatgaaagttttgaatactatttccaatgttgtgcttgtgctggtgcagacttcttatattggcgaggattattcttcttacaaagaatagatgtcgctgaatgaggtaggcttttcaataatttcacaacttccttcacaccactatgtagaagcttt

SEQ ID NO: 248642 - DNA, 618 bp, Cannabis indica
gcttttgttaaaggaagattgatccatgataacactattattgggtatgaaggcttacattgtatgaggaaaaattggtttcaaaatggaaggaagttggcgcttaaactggatatggccaaagcatatgatcgggtggaatggcgatttttagagatgatgatgattcggctggggtaccacagacattgggtggaaaaaattatgaaatgtgttacttcagtcagcttttcgtttcttcttaatggagaagtaagggggagagtgagacctgaacggggattacgccaaggagatcctttatctccattcctgtttctgtattgtgctgaggctttctctagcttaatccaggccgaggaaggtcagggaaggatccaaggtattcggtttggaagaaatgacctctttatttcgcatttgttcttcgcggatgatagcttggttttctttgatgctacaagggatggttgtcaacggttcaaggacttgctagatcactatatgattgcttcgggccaacttgttaattatagtaagtctgagatttgttttggcaagaatgttgatgaggacgagcgaagtcagttggctgattttttgggggttcgacaggtt

SEQ ID NO: 248643 - DNA, 1280 bp, Cannabis indica
tctaggttagattctttgctttataaggatgaaatctattggaagcaaagagccagagttcgttggcttaaggcgggtgatcgtaatacaaaattttttcataggcatgcatcatctcgtaggaagtctaataaaataaaatatcttaaagatgatgagggggttgtggtgaacacctcagagggcatcactgagcttgttatctcttacttttccactattttctcttctgagggatgcgatcttgaggccgctgcttcaatatttgactctttaggtccaggattggatgatcctgaaatctcttttcttgctcaagagttcactactgaggaagttcggaaagctgttttccaactctctggggataaagcggtaggtttagatggcctcaatgcttatttctaccagaaaaactggtctgtggtaggggcagatttcacaaaggctattcttgcttgccttaatcaaggttgtgatttctctgaaatcaactctaccctcattgttctcatccctaaaaagcagcatgccaatactcttaaagatttcagactcattagcctatgtaccactttctataaagttatttcaaaaattctggctaatcggcttaaaaaagttttggataaaatcatttctccatatcaaagtgcttttgtgtcgggtcgtgtcatccaagataatattcttattgcgaatgagttagtgcatgcagttaataataggactatgggtaagcggggatgggctgctttaaagttagacatggccaaagcttttgaccgggttgaatgggattttttgagacatctcatgtttcactttaatttccctgtcccttttgtctctctcatttttaagtgcttgactactgcttcaatttctttttctataaatggtcaagttcatgggtctcttaagccttcctggggtctgaggcagggtgaccctctttcaccctacctttttatcctctattctgaaggtctttcggctgtgttgcaagattttcaaaataaagatcttttaagtggcattgctatttctcgacatgcaccatcgattactcatttattgtttgctgatgatagttttttgttttgcacttctaatcggcaatcttgtgagaatttacatcatgctctttctctttactcaaaagcctctggtcagatggtgaattttgctaaatcttctatactcttctcccctaatacgagtcaagagatccgaaatctttttttccaaacttttcaacttgaggatagggagtttat

SEQ ID NO: 248644 - DNA, 740 bp, Cannabis indica
tggaattacgaagtagaagatccttggtttaatcacacaagttctgatgattttagttggaagcctaagtacaactacaatccattatatgagtggaattgtgaaaaggaagattctttggttttcttataactttcagcatctatacaatagttccctcagtgacactattgttgagttacaagcatctatggcgataaattgcgagatgatgaaagacttacttgctgagttgaaacaaattaagcaagaattgagcaaattttctgatcaccacgtaagttcgcatgttaatggtttttctccaccaccagtgagtgaagcactaatctcaactgccacctttcacaatttggagaaggtaagtgtcaactctacctatagttgtgaaaattttgaagaatctactctagcaagtacaaatgagggttatcatactgatgtgatgtggtacccacattattcataaaggaaaatgataccaccactattcagaaagaaaccctttctcattctaccattcttcccctaactctggatgaaaagaaatactatcatactgatgtgatagacaaagtcattgaggaaattaaaaaattatttttctttaatcatttaccatattcctctacgacttagacaatgaccattttctttttcctgaaaatgtaactaatgcgtctatttttgagacataggataaaagaaaattcatttttgatactggatagtcaagaata

SEQ ID NO: 248645 - DNA, 1218 bp, Cannabis indica
atctcctagacctcaatgtccccttcatgatctccctcctcctacacgggtggatcctgttccgcactgggcaaggtggcgtgctgagccacgttagggtcagatgcgtccactttacgcattgtctatttggtaagagccatcatcctatggctagacgggaactttgaatcaaaatgttcgtcgcttcaagagggcagactagaacaaagttgaggatgatcctcgtgcaaaagttgaagcaggtcttggttgatttagtgtttgcttccccaaaactcacctgggttcatctacaaaagacaacacgcaggatgagtgtttggtcaggatatcgaacattaaacaggaaaatatgccgaccagatgtactcaatagattaaagaataaaattatttgacgaaaaggaaaaactcagaagtttgaaattttcgttagttagggcaaaaatttcatgaagcttagaataagcaagatgaaagacaagcattgtgcagttcaaaaaccaagcattatgaacgatgaagtcccatgaatcgttacaaaggaaaatcgtagagtttctaaacttagggttttctacatatcttgtacagcaaagttaaagttgcattcagaaaataaatgtgcaaagtaaaagaaatcgagaacttactaaggatcaaacgtctgggttcaggttacccaaagctgaacgatagttccggtgaaaattcttcatcaaacttgaagctaaaaaccactcttttcgctctgaacttgcttagcaaagaaggttggtgaaaatgagtttgtgaacaaatgctcaatggtatttataggcaaacaacaaaaagaggtaatcatttcagaaacctcagatacctcggttccccgaaatgcaaatatgggaaatcaaaagcaatcaagtgcaaccgtcaaaggaggtgagagaaaatcggatttcaaagcattaatggcgtcacagcatttattggccgaaaaccgatgggacgcccagtcagcctcacatcgagtcgcgaacagacgcgcctaacacgtgtcacccatctaaacgcaaagattgctcagatgaagtctacacgcaacttcaaaagttccatacagacttggggggcaaatataatcccaatttctgtactttgacgttgcagcactcgatagtgacacgtggtgtaacgccctaatgctaaggcacgctacagtgctttttcaat

SEQ ID NO: 248646 - DNA, 518 bp, Cannabis indica
gattcatttggaattgatttgggatcttttggtcgccggaaacgaaatttaagatcgggtttaggtcgggtccgtcggactcacgtgcagaaaaacgggtcaaaatgacccgggttgcctatagtagacgactccgtacgacatgtcgtttatcttatgttaaaaacgacatgtcatttttaagtagagagttttggccactccgtacgacgtgtcgtttttcccttatgtaatttttatacctaaggtcgtacgacttgtcgttttctcttatgtgaaaaacaacatgtcgttttccagcatgaattttttgagtccgactccatacgacgttcgttttttagggcagattttattaaaaaaagggaggaaaattaagaaaaaataagaaaattccaaaatttattattttatttttgaattttattctatttccttatttttgttgatttagtcaattaaattacatttctttaaactattcattcatatattatatgttatttagtaataaatta

SEQ ID NO: 248647 - DNA, 1386 bp, Cannabis indica
aaattttccttctagaaaccaaacctaaaatcactcatcaatcaataattcagctatcactgccattttctcattcgcatcttctccgacattctcactctgtcgccaacacgatcacccacgctcgtcgcttccgacgtcgtgtgcatacgaattcgccgccccaagaattcacaaaccaccgccaagtgtactgcataacttgttggtaatttaattttaatgaatatattctttttatcacttaaatacttatattttattgataggtggtacatacaagaaattgaggaattttaataaggacaaaatgcttattacgtgtgtagactcatacctccgaactttgttgattggcaaaaatccctcccgatctatgataaacaatgaaaagtcatccttccgtctggttctgtctaaaatattaacgttatgtacatgtgaaaaagttaatgaggggtaaaaatggaacaccaaaacaatgagaattttttatttttttattcttttctagaaataattaaaattaaaattaaagaaaaataaaataaaaacaaacttataatttgcagagagaaactcagtgaataacaagccctaagttccaaaattttcagagtataaccaaccataccctttgaaatttcagagcataacaaagcttcgacattttcaaatgaacgtggaaggaagatagtcattggagaagcttcacttgaaagtttcagacctcacaaagtgggttcttattttggatttggggacaccatgagtgaaataattccatcttatggtatgacttttatcatcaattattcttatactattatgtatgtctaacaccatggataaatttttctttgtggatgatgattttgtttatatgtgtaaatacacttgtaccaagagctccattttaaaggctttaattgttttgtactgagaatatttggcattatgtgaatgctttttaggcatttgttttgtcattttgtttgaccgtatcacatgggaaaatagtgaaaattagaatatgtatttgtggggtataattttgttagtcttgagggtactgaatgaaacaaacagtatttttctagttttattgatgtacatatataatataggacttgttatatatgttgacatgaaatttttaataaaaatttatggtaaggctataaagtgttagccacacgttttgtcgattaagaattatattaactaattgaaggcaaggttttgtgtgtttgtatttgaattgtatggtgaattgacgtctctaataagtggttttgtttttgggtttaaagtatatggtaaacaagttaaggctctttctgttaaaaaaaataaattacagtgtatgtatagttattatttttt

SEQ ID NO: 248648 - DNA, 775 bp, Cannabis indica
ataataatatagttttgatatgtagagaatgttaaatccaatctattataatgagcctataatgacaatttgatatgggcttttgaacacatgggcttaacctctaactctaataagggccttcctttttttttctttttatagaaaaatacatctgaccaatgatatctttttctataaaaatcactttttgtgaacaattagtattagtaacaaagtgatattatatggcccccatggaggagatgccattatggtcactttgattaattactataacatacaataagttagtataaatcaatttgattagttgataaacattaagtgtaaaccaattaagatgatcttagaaaagcaaagcaaattagaaaaaggagaccaatgatttagactagtagtggtttacttccaagtaagatatttaatgactcacttcaaggcaataagtgttgaaataacagtatccgtttgacgtgataaaaatgtgtttagtaagcaggtaaaaaacaagttttttgaattttttttaaagaaattacagttaaaaactgctctaactcaacttttagaaaaaactactaaaatcatatgtacttatttattatatattcctttcaaaaatttattatatattaaaaaaataaaaataataaaaataaattaattataataaaataaataattattaaaattcttatttttattaatattaacaaataatatcaacctagaatttttcatatatttcatatatacttgagtttctattttt

SEQ ID NO: 248649 - DNA, 758 bp, Cannabis indica
gatgatcattttgatatatgggaagcatatattttttattgctacaaaaacgaataactcgaaagagtaacttttaaatttcttttctatatatttagttaacaaaaataatcaaactttcaacttaaacgaaatttaatatatcaaccaattttataagtttctaagtaataaatttatacatctagtttattttgtaacaattttaatatgtttctaaaataaatatatagaaatgacatagtatcttaaaattcaatacaataactaaaatcacaagttactctatattttttagcattaattacatcccagcacataaatattaaattatttaatgaattattgttggttattaaaataccgagtattatgtaataatttcatacacgcatactggtggtggtttgttttgaaaaccgataatttttttgaaataggttgacacatatatatactttagtagttctcttctaagcttcaatacttatactcttttttttttgctcattacttttatttttgtctttatgtgactcatgacatatagagtaaaattaattttttttttaaattaaggatgataaacttgtcaaacattttctttcttctttttttttttgttaaatatatatatatatattttttatattttgttaataaataaataaacaatatttaaatttaaataaaatttaatgtgttaaacattactatttttttatttttatatttaaacattacaagattaaataaaa

SEQ ID NO: 248650 - DNA, 678 bp, Cannabis indica
actccatttaaaacggaccaagtgacaaaatgtacaacttaggcgatggaccctattttttacacccagaaagtgttgtttcttcttcaaaatgacctattaccccatttttcataaaaatgaaaaagattaaaaaagtcagatcttcgatttgatacttggaaggcgcccagattggcagattgtcaacttgggcgttgggtgctcggggccctaggcgctcaaaaacgaacttgctccgattttaatttggatgcctcaatatgtcggtggtatgtctaataaatatttcaatgcaagttttaatccttttgcactaagacggtctgaaaccctagttggatatgtcaacttgggcgccaggtgaaacctaggtgctcaggttggcttctgttgcaaattcgtataatttcagctctcaggccttggattaggttgctcaatgtcttcatggtttagaatactgaaagatagtgagttagatccatgttattgaagtctaaactttcatcccgaagataccgacgtcaacctaggcatagggctagggtcccttcccaagttaacttctatgactcgagtctactcaactttgtggcgtcaatccttcatggcacgtctcaaacattgatgttcacgttactaggaaaaattttcgagttaacaagccatttatat

SEQ ID NO: 248651 - DNA, 1434 bp, Cannabis indica
aaaaataaatagaggaaattacactctatactttttttatattgtcatcttttatttttaccttcttttttaaaatttatcatttttacctctttttttaaacattgtactaattttgcccctgtcacttcaagatactctccatgtgattctcttattgtaaggatatgtttcaaataaatataaaattagaggtaaatttgattaattgatgaataaaagaagcatttttcaacttacaccctagaaatatgggggacataaaatatagatataattatataagttactaattttgttacgtttaaataatttttttttaatattttacggttttcaatagaaataatacgaaaataacaagaaaattatataaaagtaacatgaaaataacatcaaaacaataaaaataatatacaaacaataaaaaatcaacaataaattaataagagaacaatataaaaagactgtattttctgtaaataaaattaaaaaaatcgtaaatatatttaaaattccgtaaaactgtatatttgtaattttttattgtttttgtgtatgtgtgaaataattcctcaaatatacttatatattaggatggaagaactactaattaaagtgggtttggttttgaaatcttggtaaagcaattgagactttttaagtggtgaaactgaaatatattaaaaaacctactgttgttgcttaatacttgctcttctagcttataatattaataattaaagtgatatattggcgggaaacatgttcctaattgcaagaatagatgtgacacaggccatattatattattatagcatgaaataagaaaagaaattcaaccctaaataacataaatgcctaacccactacataatttattaaattctaaaacaaccaatggtggacccaacacccaagaaattgtttgacaagtaatcagagaccattgaaaattggcagatcagtttctcttacattagttagaattggagattcttcataaaaaaaaaaaatagaattggaaattaatgttgtatattttttttttgtcacgtggaatagagcaatgagataataatagtagtagtagccataccatttgggaatttttttctatgttttttattgtaaattattttaaagatttataatagtggtcctaattaatatatacatttgggtattaaaggtgcaataaattctccatcttctttctttacttttggagtggcccctatgccttgtgaggacgccgtacttccagatggccccattttgatttccaaaatctcttgattaattattattattattattattattattattattattagggtaaataccattttggatcctctattttacaaaagttaccaattggaccctgtgttttgttaaatgacaaaatggaccttgtattttctaaaa

SEQ ID NO: 248652 - DNA, 1133 bp, Cannabis indica
aaatataaatatacaccgtaattatttaccattaggcttatcaggatattataaccatcccctccttataaaaatttcatcctcgaaatttacctgaacaatttggggatacaactcttgcatttatgactctaattcctatgtcgcatcctaataaaataagttgtttggagttcaatatcatcccaactccaaatgcatgtcgaatctgacacatactttctcaacatagaaatgtgaaagacgttatgcaacctgaacaacgagggtggtaaaactaactaatatgccacctggtctatccactccaatatcgaaaaaggaaagatgtatctaaggcttaatcttccattcttttcaaatctatgcaccccttttattggtgatactcaaagaaatactgagtctcccacttgaaatttaatatccctatgctttaaatcagcatagcttttctttgtacgcaatgaagcgagtatatatcttgaactcactctatgatttcataagttcctttgaaatttttggtccatcatgtccttctatcacctgtgttactccagtgaacagatgtccaatctctttctcgtaccacacttattaaagtacctaaccaatcgtaaatttaatcatcacttttagacaaacactttgccaagagaaaagattattccaataaatctaacttttatcaaatatgtccacgacaagtttttaatattccatagatcctcccagattacccatctctgaagaataaaatattatgctattttcactttaatccccatagttctcgataaccatcattaatccttaacatcataaccaaagacatcagctttgggatttcacaaaagtagactatttttttgtatgaattctatatcctcatttatcgtataaattttctacactgatagacaacatactacctcagtatgtccaactgttattactcggtcaaaactataagattccacagtacatagttcataattacgtctttctattcctcctattggacctcctaaactggtctactgagttaactgaataactaggtaagtatttatttctgatagatattcaattagagcacttcttatttcaactcactaacatatacccat

SEQ ID NO: 248653 - DNA, 800 bp, Cannabis indica
acgtctttctattcctcctattggacctcctaaactggtctactgagttaactgaataactagttaagtatttatttctgatagatattcaattagagcacttcttatttcaactcactaacatatacccatctcgataccttgtaaatctttacttgttaatacatcccttcctcttgataatctcggaaataacaattaattttgcattctaatatgaatctttctagcgtactttgtcctcactcgtacgctttctgagataaatcactagaagatttcccatcttgagattacctcaagttaagtatgcttaactacaaggtaagctcatggtgggttatcaaaaactagaagcttctttattgttcctacttgtatttcttattttcgtcctttcgttatgtaaatccaatttccatcactgtcatcattatcctcttacaattcctcgtcgattttgttcacttatgattgaggaatttccatcttaggggttgtttggtacacaactttccttactcgagaataggaatactaaatctaacatgtgttttgtaacgtccccgcttcagcctccattgggccccttacacccacggactaatggctcttatacacgagtacgccactctagctgctttatggactgatgactgaccctacagaccaacatgattgtttccagcgtgctttgtcctcactcgcacgcttcctgggaaaacttcccaggaggtcacccatcctgaaattgccccatgtcaagcacacttaactgtggagttctttcgagatgggct

SEQ ID NO: 248654 - DNA, 570 bp, Cannabis indica
gatatgggccactttgctatcatcatatcactcgaaactttgttctttaccatttcgtatattgataaattttatcaatcattctcaatcagaacttgaacccaaaagaaactagatccatgcatggaaaataagcccaacacccaaatcaactgcaccttttcaacgaattgcaaattgaagccgaaaatgaagtcgcccacaatccaaatctgatattccaactatttgcaaattgaagccaaaaattttcgattggtgaatcgaagccaataataaagtcactcaatcaattcaaacatccgttggtgagctcacaatcgaggagcgaaacctattatcctttgcttacaagattatgatcggagctcgcactgcgtcgcggcgaatcgattttctggctttgtttttcattcttcagaactccggcgccgttctctctctgaactttggtgcccattcgtttcagcccacatttcgtccaccttgaactccgacgccgctctatctttctctggcgtggccaaatgtaaagcccgcttagttaatttggaaattagcagttgttta

SEQ ID NO: 248655 - DNA, 482 bp, Cannabis indica
aaaggtctgtctagcccaaagctgtcagatctagaactagactagtcaaggaggtccattctcaacatacatcaatgcaaagtactttttgatgcagacagatctccaaaaggttattggggatgtacgatgtcggatcttcctaacaactttatctaaaaataaacccaataatggtatttcaagctagcctcagagagattcaattcttagaatgaattctctcaataattttatacacaattctcatcctcgagttagataccttcacaacttgaagaccttgtctagataaagcaaagccaaggtgaacctttgaaagattacattcaaaggtttatggtcaaggaaaagaatcttaactaacaatatgaaagagttcctcaagcgagctgatgacttcataaagttggaggaatatgtctgacaagcctagataggaaggcaggtcagttgtagacagactcaagatgccatgcaac

SEQ ID NO: 248656 - DNA, 862 bp, Cannabis indica
caaacaaccaaaataacatcaaaattacaaatgatgtcgacaacatatcgctacatgtggctaagagtttcaacttccaattcaatcatagctaatatcatgagatgtcacaaactatgtcgactaacatcgctaactataacaactttttagtctaaggttgatggtattgacaaaagtcgctaaaatatcaagaaacatcgctaactatgatcgactttctaacctaaggttgatgatatcgacaaactttgctaatatgtcgagaaacatcaataaattgcaaaaaaaaatctcagaaatcaaacccaaacacacaactttaacataaaaataaaaaaaaaatctcttaaacttttgattaagcttttggattatcaggtcttccaatgtacgtggactccctcgctaaaataccaagatcttttaaaattttggggtgctaggtttcgttggttagtgggattcggggcagttcgtgggtttcaaatgaagaaaataaaaagacggggagacggaggctgtttgattgtgttggatgttgttgatggtggtggatgctgctatggtgattgagagagagcgggagatattcagagggagagtgtgagaattaggtgagtttaaatggaaggggtattttgggggtctagtaaaattgaagtgtatttagagaagaggagttctatttgtacctcataaaattataaatacaccccattattaaaaaaaatataaacttaaataatttttaaaaattactcttaattatttttttaaaattttttcctcacattattttatgttaatttcaatacttattttaatttcattttcattaattttttttaactcatgtata

SEQ ID NO: 248657 - DNA, 929 bp, Cannabis indica
aatgggtgaataccaatttggttcaaatgctaagaagtaagaaggttctgtcatgaatatgaatgatatattattaatgcaatataaatagagtgactttttttgacagttttaaaccgtcatttaaagtaagtttttccgtctgttactattcgatggaagtctttcccaacagttataaatagtcacttaaagtaactttttccaatagttgtaaacggttatttaaagtgacttttctccacagttatttaaaatatatatatgattatttcttgtatcatttccaattaaattgtttcttgtattgtaacagtagcaagctacgtatatttagttttattttaggttttagttatgtttttttttcaaatgtcatatgtaattttaaaacaaataatgcttaatatagagtgataattgtaaaaataataataataatttgaagacaaagagaatgtataattttgtaatatattaaaaaaataatatattatgcaaagtcttaagaaataaaaattaatgaataaaatatattaaaagcaataataataaatttataaaattaaaagctaaataaaaagtaaattgtacatatatatatttaaaaaaatctatacttaaagtttgttaaattaaagaaaataatgtaccggacaaactaaaaaaatagtcccatcaaatttgcatacgaataaaaaagtatactactcaatccaaattaaattcagaatccaaaaattctaaacaatggtagacatagagattgaggcgttagagagtaaagcaacatgattatttttgttgctgaaaaagcttattctcaatacttttcaaattgccattgttgtattctaaacaaacaaataataaaactacaattttaataccgataccattttaagtaaaactgatgagttctaaatcat

SEQ ID NO: 248658 - DNA, 1365 bp, Cannabis indica
gtaattgagaatttttttgggcagaatctgtgtattggtaattactatattgtagttatctgatttagtatgtttgatttatattaaattaggcctctctaattttgtatggaattagtaatattttgaaataaaatttagcatgacttttgaatcatatcaattttattaaagtgcaacaataaagcctttcctttattatttttaccaatcaaacaaattctacattatacattactataccactaactatacaagaaacaaaaaatgttactgcgaacaaaattacaatgaaagctaatacattatacattacttacaataaagtggcttataaaaaattaacatctaaattatcacttttgttaacacttaatcaaattaacatcatataagaagacttctaaaaatatatatttgtatctgatgcatataaatgatttaaacataataagctgcatataaaatactaaattcccattccttaagcattgtttgtatttgatctacacatccaaacatcatgatctaattgagttttaaaatgcatcatgataaaaatacatcataatctaatcaagttttgcaaaaacaaaaaaaaaaaaaaagaaaccagtaaggaattgcaagacttgttcttgattaagaaaagctaagttgtctgcagatgcagaacaagtacatggaattcgtggtctaagttcttgaatctcatcccacatacatttgagtttggtgaagtaagaacttacagaatcttcgccttgacgcaaggtgatcaacgtttctcggagctcgaaaatccggggtccatttccttgatcaaatcttgaatggagctcagtccacatttcagcagcggtgtcgaggaacatgatgctgcttttaatctcaggggtcacggagtggaggatccaagacatgaccatctggttgcagcgattccaatgattgtgaaggggatctggttctggtggagaaggaagagtgcctttaagaaaagtcttgtttctggcgcctacggataactcgaaatcacgacgccatggttggaagttgtgatcggacagaggcggagtgaccaggatcaaaccagggtggtcaccggagctgagataatagggactggagctgtcttcgtgcgcaggacgaggaatagggggaagattctgtggaagagtttctccatgatgatttggagctggaggaacggtgggcgtttcgatcgacggagcatctggaatcgaagaggaagtatgcggcggcggagtgcgaccggaatgtcttgatccagtagctcgtgttctgaccatggtgaatcaatggtgagaaaacttggtcgagagagaaagaaggagaagagtt

SEQ ID NO: 248659 - DNA, 673 bp, Cannabis indica
aaaataaaatgttaccaaacacctttttaatttgcttgaaactaatattaaagcatctttcgttcatttttaatatttctacaaattcacaaagaatagtctagaagatggatttattatttcaacaagaaaagaatttatttactttattttctcctttttttggggtaactctttattctctttttatacctataaaagatatataaaatacaaataaccgactacaactcgtagtaaaagaaataagtactcaattaaaaaaaacatatcaaactttaagctcttcggagttcatttttatttatttgtttccaagtttggtggccaacttttgatccatcggtaagcttttgattttttttattcactttctcacatgtaatacatatacaatttctttgtttgtttcttatttatatttgttatatatataaagcatacataactgagtgattaatgcatgtgttttatcatttcaccctttattaaacaaatataaacatgtaatttctcatttatttttttaggccccgtttggggaagttttttaaaaagttaaaatcacttttagaaaaagtaaaagttatgagttaatatgtgtttggtaaaatttaaaaaataactttttcaaaaatttaagtaaaatttatagcttttaggaaaagttggc

SEQ ID NO: 248660 - DNA, 704 bp, Cannabis indica
cccctctattgtattgatgatgcgagatgcctactatgttgtgtaaaacgcgaggcaattgagtattgttattttcaccctgcttgtgtgggagagtcaacgattcacgagatctttgaatatctcatctcgtaaattactactggttgcttttattagatccccatcgactcctatctttgcttgaactgtaggatctacgtcgtccagaggagtgtttccattgcgactgccaattttgtttcaggtgagtaccatggttgtagtatacaacctttgatgtatcactgctttcttcagctcttaataaaaaaaccaaaatatttatcgagatttttggaaaccaataaactatatgtgcaagcttaaagaaattgatgaataataaagaaaataacaatagagtttttactattggttcgggtgctaacaagtcttagttcacgataacattagaaaagctttatgatttatacaagtgtgtgaaccctaaatttttccttagaaaatgacgaatgatatttttcttgaatggatgttgttatatttatagtgttagggttcttattcgtcccacttttcccactaatagggcaaatacaaatgacatattgacttgggctcatctggtgataactctaggaattagagttatttttatattttttttaactaaaatttgcttagttcttaagtttttaatt

SEQ ID NO: 248661 - DNA, 669 bp, Cannabis indica
ttccaaaataaagctcaatacttcagcatagctcatcaatgattcatactcaagaacttgaacttctaacatgcttttaacttaaaactcactagcaaaatataagggtaaaccttgaattcacacatgaaaaaaaccctaaaatcttatctatagctcatcaaaaatatactctaccactaagccacaaaatcaagccaaacacatcatgaataacatcaaatctatccacatgcatacaagaacaacacaacctattttcatgctttcaacaataaaatctcagcaacaatttcaaacaaaaatcagtaagaagagctacctcaagttcatcacaaagctaggcaccaaaaccctccaaaatccaagtttgaatccaagcaatttccaacaaaattcaagaactagaaaaataaatttagagagagggagggggtcggttcatagagctaagaacaaaagctaacttttctttattttttttacgaagaattctattttgttgcaaataatccaaaaggccaaattaccataatgcatttagggccatataacacaatataagcattcaagggtaattttgtcatttaacacctcatcatactcaaataaattcagattagtcacactattaataaaatgccaacaaataatcccaaaattgtattt

SEQ ID NO: 248662 - DNA, 614 bp, Cannabis indica
ttctacgcgcaatgacagaggtccaatcttgtataaggccatccgatgttgatgcaaataactttgaaatcaagccagccattcttcaaatggttctgtcaacagtccaattcgggggacttccttcggaggacctaaacatgcattttagctaacttcatggagctttgtagagaaatttaagatgaatggagttagtgacaataccattcacttgagattattcccattcccactaagggaacgagtcaagagttggttccacctaacttaatcaacacttggaatgaacttgcagtgaagtttctctcaaaattctttcctccagcaaaagtagccaagttgaggggagagatcaatagtttttatcaacttgacaatgagtctctctacgatgcttggggagagattcaaagatttgatcagaaagtgtcgtcaccatggaattcaaaattagatgctggtccacaatttttacaatgggttgtgtggtaactactcgcatgctcattgatgtcgcagctagtgaggcattcatgagaaaaagtaccaacgaggcatacgagcttttagaagagatggccatgaataaatcagcagtggcctagtgaaag

SEQ ID NO: 248663 - DNA, 537 bp, Cannabis indica
aaccaaaaagcataaacagaactgtgactcatggcagtatttgttgaaactagatgagcaaatagtaaccatattttgcttttctttcggcacaatttagataacttgtggagcagcataaaagaaaacaagattgtagactcgttctaaaactttaatagaactaggagatccaaatatgcttgggatgatgtgtcattttagcaacactttctaatcacatttctagagagcaaggttgcttttaatcaaatgaaaaaaaaaaccaagaacaagctaaagacatgcacgtgcataacttttaaacacaataaaatcagaaatggtacctcaatttcagtgtcaacattctttccacgaacaattctggtggggcgagaatatgcttctattaccttaggaaaaagcttcccttttgacaaggtgtccatctacaaccaatcatttggattatatcagattaaaaattgttagcgaatgaatttgtcaatgatagtattcaatgatttagtgcaccccaaaatctgatcctacact

SEQ ID NO: 248664 - DNA, 651 bp, Cannabis indica
aaccttttattttatgttgatctctaaagctatgaaaagtttatcttttttcaatatattataggttcatctatgtaagtatgttgtcttgtttttatttaatctatttttattgttttaaattattcaaaataacatttactttgttctgatgatactttttgttcttctgtaggttgaacatatatattataaagttgaaattaagaatttttttggctaaagttggtagccataatatctttgatgtcacacatcttttattttcgtttttcctgagccaagtgtaatgtgtgcacttcccatatcaacaattttatttgaacaattttatttgaaattgactatctgatttgtatttctaaaacaattgtgttaagagttaatttgttgaactagacaaatattaaaatttacattaactttatggtctatatatttctttaaaggctagcgcgcataaacaaatatgacattattttccataggcttaatggagaataaatggtcatagctcatgttattgttgttcggttgtagtagtgtggtggtaatggtggtggtgtgatagatttttttttttttaaattcttttgcgacggtgcactattatttgcttcagttatgaactgaagcaaaaacttttttttt

SEQ ID NO: 248665 - DNA, 638 bp, Cannabis indica
ggggaagacgatggctcgatggggtccgatagatgcttgtgctgaaaaaatttagtttggggtctgacgggtccggtgggggtctgatgcacgtgcttgctgggtaaaaaatttttatggatccgacgggtccgatgcatgtgctgaaatttttttttaggtctgacgggtccgatagaaaccccgattgggatccgatgggtatcttattttagccctaagaagctcgacagtaaagagaagaagagaaaggggaggggtaatgtaaatgggggtattttagggatattttaaaatatgccatatcctacaaatattaagtgttatgtgtttaggggaaaaatattagatatatgtaagtatagaaaatcaaatttcccataaaaaattactcatctctctatgttatcatgatgactatacatatagacaaataattatttcccatagttttctttagagtatctccaagcgtattaaaaattactaaatcattaaaaaaatataatattttattttatttctctttcacattacttttaatactttttgttctaaaaattccaataataagcacgattataattattaaaataatattatattattatttgaaaattttgtattttataattacc

SEQ ID NO: 248666 - DNA, 688 bp, Cannabis indica
cacaaaacccaacatctatatgacactcccaaaagggtacaaacccaagagacaaattctcccaactgatgtttgtaagttaacaaaaagtctttatggcttgaaataagcctctagacaatggtacaaaaaactcaacaattatcttctatccattggtttcactcagtctctctcaaaccacaccttattcatcaaaaatgattaaggcatttttctcgccctattagtatatgttgatgatattatgattacctctaataatgattatgttgttacatctttcaaaaaataacttaactctatgttttagcttaatgacctgggtcctttactttttttcttgggattggagattggttgttcttcctccgggatatctgtctcccaacgacctttcacccttcaaattttgactgacacaggttttttaggagcttctactgctcccaccctaatggaatacaacattcgactctcatccgatgttggaaatccattagaaaatccaaaaatgtacctcagcctcattggtaaactcctttacttaaccattacacggcctgatatctcttttgccgtaaacaaactcagtcaatttctatccaatctgagggctccccacctcactactgctcatagaatactacaatatcttaagggcacctctggccaagggctatttttt

SEQ ID NO: 248667 - DNA, 742 bp, Cannabis indica
tgaagtaggagctgaggattgaccaaaattagtaggacctgagcttcgaggaccagtagcataaggattccagtgaggtgacctcgaaggctgagtgaaattcccacgattttgaccatttgcaccttgattcgattgatcagaggaagatgtgcgattcttgaacgcaccacgattatgagctagattaaccgaaggtgctgagtctagatcttgagtatgtttttcgatcctgtgctcctgagctaaaagaagcgattcaatctctgcaactgtatattcttcatgttgagagttaaccgagatgatgaagatatcatagtctggaggtaaaccattaaagatcgcagagatgtgttctttcactgtcaaagattggccaacagagccaagacgatccaccaaggtcttaattccaagaagatagtcattgatcgacttcgatcctttcttgaaattacgaagctgagtttgatattgatcaatttttgcagcagattgagatgcgaaatattgaccgagaatactccaaacatcagaacaggtttcacagccaacaatgcgcattagaatagtttcagacattgaggataagagccaagcatagagtaattgatcttgtttgatccaaaataaataggcaggattgagagtacctgatcgttcagcagcttcagtgagaaattttggaggaatagggggcgtggaggagatgaatattgagagatcatgacctttgatt

SEQ ID NO: 248668 - DNA, 1306 bp, Cannabis indica
atttggataggttgttcattatacgataagtctgtttggagctcaatatcatcgtaactcaaaacatgtgttggatctgacacgtgctttctcaacatagagatatggaagacattatgcaccacagacaacatgggtggtaatgccaattgataggccacctgacctatccgctttagtatctcaaaaggaccgatgtatctagggctcgactttcctttctttccaaatctacgcaccccttttaaaggtgatattcgaagaaatatagagtctcccacttgaaattcgatatccctacgctttgggtcagcgtagctttctgtctactttgggaagcaagcatacgagatcaaatatattcaatggcttcactagtactttggagcaattgaggtccaagataacatctctctccagccttatcccagtggataggcaatcgatatttcctaccatacaacatctcgtaaggtgccataccaatggtactctgataactattattgtatgaaaactcaatcaagggtaggaacttgctccaagatccttcaaaatctattacacatgctcgtaacatgtcttccaatatctgaatggttctctcagactaaccatctgtctgtgggtgaaaagttgtactgaatctcaacttggttcccatagctttctgtaaactctcccagaacttggaagtaaatttttgatcacgatctgaaacaattgactttggggcaccatggagtctcaatatttccttaatgtacaattcagcatactgttccacagtataagtcactcacacaggtaaaaagtgtgctgacttggtgaatctattgactatcacccatatggaatcatataacccactggtcctaggcaaccccactacgaagtccatagttatgtcttcccatttctattcaagtattctcaagggctgaagtaaacctgccgacctttgatgttcagccttaacctactgacaggttaaacactttgaaacgtattaaacaatatcactcttcattcccagcgaccaatagattgccttggtgtcatgatacatctttgttgtccccgggtgtagggaatacggagtagtatggagctcatcaaggatttcccttctgatttgatcatctgccggaacacaaagtctacccttatatcttagtagtccacttggagtcacagtgaaatcttttgtagcaccaatatcaactttctttatgagttcaatcaattcaagatcattctggttgccaatcgttattctttcaagtaagtcagactgcaatgaaat

SEQ ID NO: 248669 - DNA, 503 bp, Cannabis indica
aaaaaattataattcactaaaccaatctatatccttttgatctacacattggggcattacacaagtaattctattttcactaacaacttgatttcatgcactaatatcttcaaatcggtatcctccttgcaccagtattttttattccttgcataccaaattttgtacactgcagcagctacacaagcagtatagcagctctttttgaatttgctttgttttgccctattaatccacctcagaacacccggtaacgaattggtctttgacttccatcccagccaatttttcaattcctacaggcagtgttgtgcaaaccgacactcaaagaacaaatgacacatactttctgctgtaatattacacagcaagcagtttgtatcacctaccatgttgaatttctgtagtctatcccaaatctttagtttgttttgtacagcaatccataatacaaaattatgttttggtacatttaacctgctccaaatctgcttgctaaggtg

SEQ ID NO: 248670 - DNA, 1872 bp, Cannabis indica
gattattatttttaaatatcttaattaaaaaaaaaagaaaaaaatattaaaaaaaaaagtgatattttagttatgagaaatgtaaaagacaaccctccttggtatcataccactattagtgtaattaattagtaggtcccatataacttaaaaaattaatatttaagtaatatcactaaccaatcgtaagttacttgcatgtatataaatataaatattcttagagaaataaaaaaataataataagaatacttccatgtatctacagtttagataatggatcacgtttggaatttaggttaatagatttttttcaaaaaaaaaaattaagtaatcggtagatttttcaaatagagtagaagtagaataatagatatttaattttatttttttaattattaatttatttataatttatacggattgtagatatttaatttttatttttttaattatcaatttatttatagtttatatggatgtttaatatttataaaactaatagaaaataaaaaataaaaaataaaaaagagagaattaaggaccataaaataaacttaaactttattttcaaatctaatttttaaaattttatcaaatgttttaaacaacaacaacatatatgaccataaaaaattaagactacgatatttttttaaaaaaagataaagatgcattagtacactaattttaattttaagagggtgtattataaaattttcctgtaatttaatatttttagaactttattttacatttttgcctcatttcatacatttttgtaaattaatctttattaaaatttcaatcaattagtcttaaaatttcaaccaaatattggagtgttagagcatctctacttcaatccaagcatatattaaatttgtgtgcatcaaattttacaaattatctctaataattgtaccattttagtatatattttttaccaatttaatatagaatctactacttttagtaaaataacttaaatgattcaattcaacaacaaatattataaaaagattttgcttaaaaaaatctcacattttttattatttatattaatagccaatataattaatttatgacataattattatattgtcaacaattaatttatcattattttaaagttcattacgatttcacccttaaaattttcacatgtattaaattatttgaactttttaaatagttacaaatttctctcaaactattgagattgttaaattcaaatatttttatccaattccattcacttttactaacatgtcgattgttcatgtactaaatcatgcctccggaactttgatatcttcaaaatcgtgctcccgaactttgatatgtactaaatcgtgcctattaaactttcatctactccaagctttcattagtaaaattagataaaagttttaaaattcaacaatctcaatagttcggggaaatttataataatctaaaaagttcgagagacataatttaggtcatattgaaattcaagaataaaaatcctaattagccttattttagaacaaattataaaaaaataaaaagttagatgaaaagaacaaattatgcattactttagtgtggattcaaatttcaacactattaacaacgatgcacaccattttagtagaatggtgtacaccgaagatgctataataatgttgaattttaaatctacactaaattagtgtataacttttcttttcatttttaatcttttttttttattatattaaaaagtaatcttaaattagttattgtacaataagcacaattatgtaataaattaattattattgattattaatataaacaatataaaatagtgagattttttattatgtatttaattattagtagtta

SEQ ID NO: 248671 - DNA, 824 bp, Cannabis indica
tttccttcataaaaattataggtttccttcatataattaaaaaaaaatatattatatcaataatataaaattaaaatttgataaatttatgattaattatcactaaataaaatactactgcacgcgaagcgcggtttgtttcatagtttcataaataaaagataaaatactaatttaagtaaatgaattggcacaaaataattgaattgaaatactatacccataattatattatgggaaaaaattacaccatcccaagttttatgcccaaaaagcaacaaagacttgaaaataaaaaaaaaataaaaataaaaaaaagaatatatttatttagtacattgtgttttcatgaaaaatatatttagtatcctgtatttttaataatatttaattagaatctcatattttcaaattatatatatttggtactctaaagtcaaatttaatcaatatttaaccaaacaattctcagttatatgtaatcaaataattaaatttaaattcaaaattcataaaattttagatgtgataaaattttattaaaaaaatttaaatttaagatattaaatatgcatgattttaaaatacaaaataccatgtggtgcgtaatgatggtggtaatgttgagtttgcctcgagtacatggtgctctttgaagacttcaccgttagtagctgaactaactgctattcatgatggtctacgggtagaattgcagagaaggctgcttgtgtttggggtggagtcggactgcagggaggctgttttgttggtgcacagtagggatgatcaaagttgtcgcaagtttgatggtttattgctgc

SEQ ID NO: 248672 - DNA, 919 bp, Cannabis indica
cacttagaaagatatatgataagtttatgatatcttttctatttgaatatcagtccagtccgatgtataacaatacatccaatacacgcttactttaccaatgccttggaaaagacataccaccatttaagtgtaagtaaactacattgttgattattatatcagtgaaaattctgtgtactgataaatcgtgggactaatatttagtcacataatcttgattacttaccactgtgttgtcaacacaataatcatgaataacaatgtgataaggatttaaaagaattataaaccaaacaaatgatcatgaagcaaacatgtgaaccaatcattatatttaaataagtaataatacaattctgttcctttattgataaatgaaattcaagataacattgaaataaagttttagttacggcacaaaatccaacacagaattacatttttaggccactaagaaaatttagcgacaaataagctacaatatttatggctaagaactataagagtactgctcaaagttagcatattaaaattaagtgtttagcaataaagaggcgggacaagtggtcatgaagcacacaatactaaattgggtgatcgcatatccttgattaaaggcatgccgcaacacaaattcaaggatcgtaaagtaaatttgagaattagttatccgtatgcagtttttggttgtacaactaaaattgttcaacgaaactctaatttcgatattttctcatatttatgtgcacattaattttatctaagaaaattattttcagaggaccagaatatgttgggttttatgccctaaataaaactccatttcaatgtaatccattttattcaacatcaataaagaaacaaaagtatttttcattcatttgtgtatgttttggttcatcttatcaattgcttg

SEQ ID NO: 248673 - DNA, 883 bp, Cannabis indica
attgtaaatgtagcttgaatctttttataggggatttatatgacatttttctttaagttaagttttgttttgatatgtctagtaattttattgttacatgttaggattgggagcaaaaattatggaccaaagaggtaaacaatgtgggatctaggcttactcgattacaattgcgagccagctaggtcttcagaagagaaggtatatgaagtggtgcttaaacaagttgttctggttcgagaacagaggaaacacaaagaggcaaatttggacttgaatccacccaccattcaaattgatggaaccaccaattgggatctcttgaatgaaacttatgaattatgattgttgtgctgaagtctgtgatgaatatgcgctaagactttttatctgggtacttattctttttctctattcctctacacatcaatagtggagtgagcttttattttttttatttaaagcttccgtgttcgtgtgtatcatgggttaatcatatatagacatagttaatgtcttcaaccaagcagaataatatgatgatcattttacagcaattgaatcaaactataatcatgagtttgagacttgacatgagtgtgtcattcttttctgttacttgaggtgatctatatttcgattggttttctaaatatgaatatatttgtaaatattaatatatcaggtcttatatatgggaaccaatttgatgtggaagaagcaataacatttggtagagatgccgctagttttattagtagaactttcatgaaagtaagagttattatttttttgtgaaaggatgaaagtaagagttattattacttttcttatttgtatacaatcaattgggtcaaatgagtattgtcttaatttatctccg

SEQ ID NO: 248674 - DNA, 1061 bp, Cannabis indica
gatcttttgaatgattcaattttactctggtgctaggttccttctgaatagaataagtaatgatgtttggatgaagtacgacatgctcttctagttcacctgctttagttgcagcagcagattcgatattttcttcttcaaaattcaagtctactacatcagaatctacatttgctacttcaggtggatagtttagaaaactatctatctcggcttctgtagaaaattctaaaaaaatctttaaaatcatcaacaaccacattagttgattctaaaacagtttgagttctcatgttctaaacatgataggctttactatttgtggaatatccaataaacacaccaacatcacttttagcatcaaattttccaatatgctcacgatctcttgaaacatagcaaacacacccaaagacatgaaaatgacttacatttggatgcttacctttccagattttataagatattttggaaccaggatgactaaacactcgatttattgtatagcaagctttatttatagcctcttcccacaaatgtttagtcagattcttactatttaacatcattcttaccatctcttacaaagtttgattatttctttcaacaactccattttgttaagcagttttaggagctgaaaatttatgagctatacctgtagacttacaaaaatcatcatatatagagttctcaaattccttaccatgatcacttcgaattcgaacaattttactaatgttacatcctttttcaactcccagtctcaaacaaagtattttaaaagcgtcaaatgtgtaagacttttctcttaaaaaatattgttggaattttatgccctaaataaaactcatttcaatataatcttatttgttatcaatagaagataaaaagttatttatgtttacatgtattattcatgtttatggtttaatatacaatttctgttaaatccagatcatatagtaattcataattacagtgatgccatgtgacagtcagtagtcccgtgatccgtaaggggaaacactgggtaagctgtgcaatcccacaccgcctgg

SEQ ID NO: 248675 - DNA, 1188 bp, Cannabis indica
tttttcttttcttttttggcaatatatgaagaaagaaaaacatgatataccaaaaaggaaataaacaatataagggtaagaaaggactggagaatgttgaatgaacaaatagcagtagagtatagagcttatttgtgatgttgcctgacgcatctttgttaagtcatcactcatttcgataactgtttgatccaaaaaaaaaattgggatcttcaaaggaacttatgactgcattggcatatgactggaataggaatataaatgaaagaaagagaatgaatttatgatttcaacaaaacagtcctaggaaaaaaaaaatcatattcaaatacatatatctataaatattgtaaaacatatcaccttgacaactctagcaaaccaatcaaaaagattcatacgggcaccaagagcaccaccacgaattttattggagcgaactgacttgactacctcaactttgaatgctcccactaaccaaaatgctaaaaattagtaaatgcagatacttttgctaaacactttaaatgaactccaatcaatcaaaatcatcaaagctagataatttcagtttcacgataatgtaatgaagttacaaatttgcaaaacaatacgaaaaattatcaaagctagtttttttattatatcaatacccactgaattcgagaccccaaaagcgactcagtttgtgaacgaattgaaaattcatgagatgcctagacataaaaatgaagatagggagaaacccaatagagacgacgtacctccggcaccgaagaagggcgtagtgagaggcctcttaaccacacatagtctaaggctgttagtagaggaggaagaagaggcaggtgtggacgccagggttaatctcgtaaatatttgtggtttgacggccattgttggagcaaaattcagtttaaatgcagcgattggaatttgactccttcgaatttcttctattggaatttaactcactctacgattggaatttaatttcttagaatttctccgattggaatttaactcactctgcgattggaatttggttcctttgaatttctccgattagaatttaactcttttgagtttctccaattggaatttcgttgcgtgagatgatgaaaggatatattaattgattgggaatgggttcacatacagaaagaaaaaaaaaatcttttgtgggat

SEQ ID NO: 248676 - DNA, 720 bp, Cannabis indica
taagggtaataaccctagactgcattattatcaaactcaaggtactaatttattgagtctaacttaattatgccttgagcgtataattttttattccaacatatttagcatggcataacactcaaaatcatttaattactaaggtaataatcctagactatataaccgttcattttagtgtaataaccctaatcccagttcttatctaatcacaactataatataaaacatgggcgccaacactcttaactctacgtgcaaactcctatcttacctgatttcccacaaatgtggagattccaattccccggatgctcctgaccaagtaccggtaatcctagtcacaaattttttggattcacaaataggattaatcactaaatcaactctcacataattacaaatttagcattcaaaatccaaataagcatatagagctcggaacgagctttccaacgatataaagaacctcccaaatggagttctgagtcaaaagttatgaccaaaatcaaatccgaaataaatataataaactaccaatgtcatggtcgcaacgagacttccaatggtcgcgactagagcccaaacaggggctcaacctctcttgttaagtgctaggtcgccacaactgggtttaaaaacccagaaaatgcccagaaaatcaatatttaacccaattccaacataggccaaattttccttaacttaccaaataattag

SEQ ID NO: 248677 - DNA, 698 bp, Cannabis indica
ttagagagattttagagtgtcacatcacctttcatatctcttctttatatatgtatactaggttacgaggggcggtcgttataataatttatttaaaataaaatagtttaattataacactgttgttataataattgatttaaaataaaataatttaattataattatttaattttaaaatattttatattgtcagtgtaaaaaagtatatcttacatagttgttattaattttataaaggaatgttatgataaaatatagtttagtaatattttgaaatacttctttataaacaatattttttatgaaagttctatctttcatctcatcatcatcgtttagtatgatcaatctttctcttgtagtgactcgagagacaataacatataattaaccatgcaaagtccatgaatacacccatgagcacatccataaagatggacaaagatgaaagcggtaagaatgtggacatcaccaagtatcgaggtatgattggctcattattatatttaaccgctagtagatcggatattttatttagtgttggtctttgtgctaggtaccaatcttgtcctaaagaatcccacttgagtgccgttaagagaatatttagatacttgataggcacaatgaatctaggactttggtaccttaagaactcaaactttgaaatagtaagctactcggatgccgacttt

SEQ ID NO: 248678 - DNA, 849 bp, Cannabis indica
gtgaagatgaaaatgggacaaggtcaaggtataaggatactcaacttggagaactggaattgactcattccactaacaattcaaactagccagaaagtagttcaaaagggggttcgtaaactctaattcttgtttgaatttacacattgcattatgttaatcaattattgattattagtttgtaattattttttcttaggaaaacgaaagcgcttggtagaggttgatgagatgaatgggaggatattcatgatcacaatgggggtggtagtagtgacgatgatgatggtgatgatgatgagggcaacaatttctcaagcaatgatgagtttggtgatttctaaatcatcaagtcattattgctgaatttgttctaggataatagaatatgattctagttctagaaataaaaatatatttatttacatttgagttttattagatatttgatgctatgttattgttttatgagacattttatgatatgtttggtattttataagacattacttatctttggtatttttagttactctaaaatattattttgattaaataattcaggcttacgcctcaatgcgccttgaggcttatgcctcgcctcaccaaaaaaaaaatgccatgaggcttaaatcttcaattttaaacattgaagtatctaactactttttgttggtgagcttatagctttaagtttgctagatctctttgttctttaagttcgtctagtgattctatcagagattgtggttgttctcgtgatcttagtataataatctgtgggatggaggctctagttctactagcaacattgtaacaccctaactagcataggcgtattacgtgatt

SEQ ID NO: 248679 - DNA, 607 bp, Cannabis indica
ataaattgataaatatataatttaaaaaattaaataaaattaaaaaattgaaattcgggtatatatggcgtctattcctacgccatatatggcgtcggttaaattaaaccctacaacgtcggtagcgaatttcgtcaaaaccgatactggaagccctaagaaaccatctcaaaaggtggtttttgtagtagtgactacttcccttgttttaatatttatatgtgcgcacaataataaattgtttgaatatgatatttaacgttttaaatttttaaaaaattagtgaaaaatcgtagcagctacacgtcttcatgtgaaaaaaaatagtttaaaactgattcaaattaataatggaaatatcaaaattcactaattcaaaattaataataaaattttgcattttaacatcataaatttatttaaagtattgagaaaaaaacaagaaaaaaagagaaaaaaggaaaaaagttttttctctctcgcttcagctctaggattggtgctatagcaaaaacaaggcctagaagtcaggggaagcgaattttgaatgctaagaaacctaagaagtgaggtctgacatctactgcagatgttaggaagacaaaat

SEQ ID NO: 248680 - DNA, 526 bp, Cannabis indica
tgttctatgttatatacaaatagatcttgggtatattattaatttttctaacagttgtctgtcatggttttctcaaagagagtttttaagtttgtttaggagagagaagaaaatgaatgagagatcaacagagagaaaacatttaaatttcttaccaaataattgttttatgttatttaaaataatttttaattagttttttatttcaaaattatttcaaaagatttttttgatacaaataatgacatggatcaataatatgtcgacgcttgtcaatatggttagcgttaatcagcacttaaaggtgttggtagtaacggatgtaacagaaaagtaacttgtggtatttaatccgtcgagataaagcatatgatatataagtgtataaactcaaaaatataagttatttatgctgcaaattttccaaaatataaatatctttatctttatatattaaaagtaactatctaataatttttgttggtataacagaggtggtttaatgttgttagcttaatatatatat

SEQ ID NO: 248681 - DNA, 950 bp, Cannabis indica
tattgtattacaatagagttgtaaatcttgattttcttccattgttataaaatctctaacagagttgtttgtactcttgtccaaaatggatgatcctcattatgtgcttgtttagtttctagtttgggcttcttcgtcggtcttctttgactcacctctactactctctcctcacctattactctagtcatcatcaccatattccaccaactaagctggaaatcaatcaaattggtttccacactttctggtctcctctccttattaatagctatgttgtttgtttcccaaaacaactttacacttatttacagatttttatgataggagtagttaatacctttacaatataggcaactacccttaactcagttcctaattttttaataaaaaatgtcaaactaaccgatcaagctaaaaaaaatgccaatggataatagtgacctaaatctattttatactcaaattcgaatatattgttaaaaaaaaaacaattaaaaatattgaaaaattctacagccctatatgttttagcatctaaaataattttttagtcaaattttttctatgctataattatttaagacatcctgcaaaattttaaaaaatttggaaaaaagacacgccgaaaattatattcaaacgtattgttttctatattgtaaattatattccaaaattttcaaaattttgtagacatcttaaatagatataacgtacatgaatatgaaaaaaaattagattaaaaaatttaaggaagtgataaagggcaaaagaaaaaaaaaaataacttctctacatatataagacctttcaaggattttttattattacatttgtgtttgtatgcatacgatggaaggcaagtttttacgtatatgaatttaggggtgttaaaatagcgattcaattcaatccgtactatccaattcaatccgcaaagtgcggat

SEQ ID NO: 248682 - DNA, 520 bp, Cannabis indica
ggtaaaataattccaacacatggcacccacttccttggaggtcctttcagtgattagcgtcatctagcataatgaagaaataagagtcaaaggtacaatataataacaaaggaaaccgtgacaagaaggcctaaaccgtacttacccctactacctattgcttagctaattgggccaaagtaaaagggtcagtactgccgcatattccccatttctcaaatgttatctcacaacactacttgccacttggtcgagtagctcaacgaaaaaaggtggcaagtctttcttgaccctatgaatcaattgtttgccaagtaccatagggttaattacaagtttagtagcagtgatgtgtaaccctttggtcatctcaggcagcttcagggaagaaataaggtcagccctcttctgaagccccattcattccttctcgtggtgtcttctcaagaaatgctcaacgtcctccaccttcttcaaaatgtcattgttgattacggttgttgtgatattttcaacacgc

SEQ ID NO: 248683 - DNA, 1034 bp, Cannabis indica
ggggggccatggcccctgtatagtataatgtacgtccgtccctgcgtgtatatgtttattttttcgtccatattccaagattttgctctaacatgcatgaatacggttgttaggattaaatttgagatttattttgtgaatggaatgatctatagcagcattgattcacttatcattcctctaagaacttcaagtcgagaattcctctcttcctcattaatcatcaaccgaatgtttaccatgattcttgattttgcttcctgaaaaaaatatcagatttattcttagtttttcatatatttactataatcttcttattaattcatgattacttatataatatatatacctgattaattaattaagagattagtgattagatatatgtgattataacatgtatattgtgccccattaagtttcagtacgttacaaatagctcataaattattcccagtattgtaaattggattattttgtcaagttttgtcatacgtggcaaataaaataatattatagttgcttagtcattttccacacgagcactatgtgtataatttaacattaaaaaatataaattatatattttaaaaaattattaaattaaaaatcaattaatgattaagaaattacataaaactaaattaaaaaaaataaaataatgtttaaaattaattatacacgtggcattaatggcatggcactcacgtagcaactggctaaggagtcatattattattttgtttgtcacgtgtgacaaaacttgacagaagtatcactttacaacactgtgaatagtttagggactatttttaacaggtttaaaaagttcaaagagcaaaataatacataaaattatagttcagagacaaaaaattctcaaatggcctttaaaaatataaaaaaaaaactgccatacatttctccacataaattgtttagttttttaattcacaaaataaaatttttagtttttgtaaaataaaaatagtgctctataactattttttttaatttttaaaaactaaaaacaa

SEQ ID NO: 248684 - DNA, 735 bp, Cannabis indica
ttcagattgattgaagaatttttaatgttgttgtttttgcctatatgttgaaggtacaagcttgttgtttcagtgtcagaacctaaaaacattgtctcacccaccataacgaacattcaggtacttgaatatttcatttattttatatattccttttcctccagtgggatagagttgttttcttgttggaaataacatgcagttgcagaatatcgcagccttaacttccaaatattaatctagagtgcaaacaatggttacttgtgttgttgggagacccattttgatgctattttttctatctcaagtactagttgttattaggaataggaaggtagttgtcgcaaacaattgttattggttttttagattgtgttgctattccaactatatgaacaactttcttcagttgtaatagttctgtgcaaatagaaccttgcttgagtttttttttttttttttcaattactgagtctccgaaattgtgtttgtaaattgagtttttattgtaattcatgaatgatggtgacagggatggttgccgggattgaaagcagatggagataatcaacttcctgttagacatttatatatataaactgaaatgtatatgtttaagtattaagtgcggaattaatcaaacatatatacactatgaacaaggatcgaaatacctccagccattgaatcttgagcttcaaacccacataagctttgatctgcaaaggaaattga

SEQ ID NO: 248685 - DNA, 1059 bp, Cannabis indica
gcctgccttggacaatgtttttgccttccatccttgtaatttggaagtcaaattctccaaagtgatattaaaatttgcatcctagtgtcttgactgaaataaagggagacctaggtatttgatgttgccttccaaactaccaataccaagggctttcctgatctctgacttcatgctctcagagtattcttgctgaagaaggtggaggttttaagcttgttgacacgttgctctgaccattcacaaaaattaccaaagacaattccacatacccatagcctccgccacattagccttcccaaccaagataagatcattcgcaaagaaaatatgagaaatattagggccattttgactaattctaatacccttgatcttgcctttttttcacagattcctcaaaaattctacataaaatctccgcagcttagatgagaagatacggggaaagtgggtcccattgcctcagaccacaagagggtttaatttttccaacctgacccccattcaaacaaatattgagagaagtggtagagatgcattggtcaatccaagacatgatcaacaaactgccaactaagcttgtcataggctttcataagatcaactttgattgcaaagaaaccctctctgctcttttacctattaaaagagtggatgatttcttgaataataaaattgttgtcttgtatatccctttcaagaacgaaggcagcttgagtggggtaaataattttaggttggatgggcttgattctatttgcaatgatcttggaaataactttataagaaacattgcatagagatatggcctaaaatggtttgtccttttcgggttttgtgtttttgggatgagaactaagtttgtagcattgatacccaagtgcatagtgttggtgtgaaaaaaatctttaatcatttcacaaaaatcaccaccaacaatttttcaatagtgcttaaaaaagagaatagacatatcgtccgggccaggcgctttattgatacccatgctaaaaagagttctacaaatttttttagtgttcgggattctgaggagct

SEQ ID NO: 248686 - DNA, 834 bp, Cannabis indica
atggtgaagcctaaagatggagacacgatttacatctaccttgcagtggcagcaatagtcgttagcgtcgttctcataagagaagaaaattgtaattaacaaccagtctattatgcatctaaaattgttttggatgcagaaactaggtaaaaccaactagagaagcttgccttggcactcattacagtaggaagaaagctcagaccatacttccaatgccactctatagtggtactcacccagtatccactccattccatacaacataaactagagcaatcctgaagattaacaaagtgggttgtagaactcagtaaatacaatgtcacattccaactaaggaccacaataaaatcacaagtattggctgactttattgcaaacttctctagtgatatacaggtacataataaatcaatgagtaacattaaacactatagactctatttcttcttgttacacagattatggctcctgccttctttccccttcacagtctgttgggactcaggcttggtctccactgccagaagattgggttaaaaacaactgtgatgtcaaagtcggaggtgaaactatgtgtgctatggcgattgcgcgggaccataacgaattagttttgttggtgccgacaaaaaggctacacttcactgacacactcactggagaagccgcggcctgtcttttagccatagagacggcggtctcattgcatcatccttttgttttgttagagagtgatttagagattgtgatcaagaaccttaaaggggaagactctatttgggggattgagaactatgtgcgacattgcaagtgttgggttttatgccc

SEQ ID NO: 248687 - DNA, 851 bp, Cannabis indica
tgaaaaaggaaatccagcaattagcccccaaaccaaaccctatgatagaaaaggggaatgggggtcccctaaccgctggaaagagcccccctccggatgcttgtcaaaaatagggaatccaaagattctcctaggcaaacatctagtgcaaacatccaaaaaacaaaaataaaagggaaaaaaagaagaataggagtgtggaagtcgcttcaaacaatcgatggcaaagaaataagaaaatcattttctagccccaaagaaaaatgacagtaagcatgcaaataaaacagcatacgaaggtggtcatctgacgccctctttttggggaggcaccaccatggcctccgccataaccaccgtatcacaaaaatcaagcgcgactaaatgagaatgtcaccattcttattttgcccagacgtacagaaacagtagagaaaatgtgtacacaaaggtgataagcgagaagttgatggcgtctggtgataaagtttggtctggcaacgatggaggaacaacagtaggaagtcagagatttcagaaattttttgaatatattggttgggttgaaaatcgcaaagtggtaaaagtaacccagcaaaggaaaggtgttggcttttataggccaaaatgggtgcaaggcagctgtgatcaaacaccatcgcacggtgagaatttgtagcgattctaattctgtgatccaacggattgggtgaacaggtgtaaggaggagaaaggatggttgaaacgtttgagtacctctctgacaccggcattaatgcaaaggtctatcaatagacgggaagcgaatcattgcctgcaaaaggaaataaaaatcaatggtgacaatcata

SEQ ID NO: 248688 - DNA, 717 bp, Cannabis indica
caagactcaacctgtgaggtgatatcatctaaataaggatcacaagattcatgaattgaggtatttcaacgttgtcgaatgttatttcgataaatatttaacatcttgcaacaaagatcttgtaggttctcgtaatacaaatatcttgtagctactcgtaagacaaaaacctttaatcacttcataatatacagcagtgatgaatcacctcgtaatacatagctagagatgaatcacctcgtaatacacatcagtgataaattacctcgtaatacatagtaatgatgaatcacctcataatacacaagaagtgataaatcacctcataatacatagtcagttatgaatcacctcctaatacataggagtgatgaatcaccctgtaatacgcagtattgatgactcaccttgtaaacacaggctgtgatgaatcacctcgtaatacacaaccactgatgaatcacctcatcatacaaagctagtgataaatcatcttgtaatacacatcattgatgaattacctcataatacatagctagggatgaatcaccttgtaatacacagcaatgataaatcaccttgtaatactcaatcagtgatgaatcacctcgtattacagagcagtgatgaatcacctcattgttggaaattcttttaccaggatcttagatctactcacaagtatgttgattaaaaccctaaatatgaacttctaaa

SEQ ID NO: 248689 - DNA, 566 bp, Cannabis indica
aaaaaaatataaattactaagataatcttattttgtttgagaaaataccaaagattaaagattatagtaaaatctcacctaagcagtgcgcaacaagtaaaaaaaaagctaatgaagttatgtataattggaaaaaaaagttaaaattctaattaaagtgaataataatatatgtacatattaaaagcatccctaataaagagctaaaagtgtggtgtagatgtatattttagtctatttttataaaagtgaactctatagttgtgtataaggtgattcaaatgttacacatgctaaaagttataccaaatttttcataaaatagaacatgatccaaaatttacacacaataagaccatctccaatggatggtgtatatctcgggttaaatttggcccaaaatatactataaatgtaatgacaatttaattttaatatgagagttagcaaataattagggtttaattcaaaattagacttttaattattaattatgcaaatgtggagatatatttaaattctaagtgtgctaattatattatatgtaaaattttatatttttcata

SEQ ID NO: 248690 - DNA, 2074 bp, Cannabis indica
ttgttgagttaaaaacaatatgactgtcatagttcattatcaaaggttaaattggaccggtatgttgagatgctatcagagaactatcattttttaaagtggccacaaatgttttcctgttgttcaacccatgagtcgttttcaaacaaaattattttgatatataatatatatgtattaaaatcaatgtagcccaagtgggagaatgttagacttttatttgggcttacattaaattttattggttttattaaaacttgggttgattggatagttctttgctgtgttagcccatgttgttggtgatcaattgttaatgggcttagcatctgtgtgtaaagtctaggtgaagcagaagtgtgggcttttctagttgactgaagcctttgatgagcaggcccagcccaactagggttttgtagctaagtcccctccctaactctataaatacatattgtctcatcacaattgtataccttttgataatcagataaataaactgcttctgatttagagatctagggaggaagacttagtctccttctttagaagtagaatttgagttttttttcgtaatataacttatattgatttttaaattttcgataattgtggattaatattatgtgctaatttatattttgacagggatgtattttttttttttttttttttggagttagcagatcattgagtagtcaaagatcatttttagtatatttttagtttgcagtttaattgactagtatatctctatcttggaagattttgctctaatagttggacataacaatttagtttcgatacaatggtgacatactaatgaaaaaagcttcaaagatatataagtttctcttgttaaaataataattgagttttatccttaattaaaaattcacaatatcatcattgtatagtgtgctaatctacattctatatctttttattttgtaggtagttttcgtcaaattagttgtttattttggatgcctcttgaaggtggtcttgagttgatttgtctaaattttcgagataactttgtcttatataaatcgttttgtttgtagtgactcatatacagactttgtatatctttgactagacaattagcttgttgactggaagtttctctacatctaagattgtcatagtgtgattttatcactctttcaaaaatataaaataaaaaaataactacaacttaaatagtaaattgatgaatctagttttttttaaagaaaatttgggccctttctatctttgggccctgtgcaatggaacagcctgcacgcgggccagctatgcttcatcatcagcgagggaaatttcttcaagctcccaatcatcacatgcaacaaatgaaaagatacgaatatgattaagtatatatttatcttgcttgctaattatgtattacaaccacctttatcaccattgccacaacttcaccactaccaccatcaccattgccacaaccaccccaccaccaccatcatgatcatcactattataattaccaccatcaatgcaataacatacaccatcaacaccaaaatagagatccacaagcgaaccttcatcaattcccaaaggtttctttgacctttgtatcattgcatctttgcgtgatgctctgagctgccaccagcaaaccttcaccaatccccaaatgttactgcggccgtcctctgcccatgaaaggtggtctcctttgagaaggttgttttgcctctactttcaatcctagatccatggttttagtctcagttcgaggtacttattctattttgggctgcgatggtttccgtgtttcctttaacaggtgtggcgtacttggtcaaggtctggtccgactacctcccttccatcggcgacatttattttcttagactcgtggccccggccctggacccggaccttgacttgcagccagactcgcaccgcggaccctaaaacctaaagcccataccctggacatggacacagacacggacccaaaccctggatcttggaacagagccggacctggatcccaaactcagaccccgcccctagacctgaattgggaccttga

SEQ ID NO: 248691 - DNA, 484 bp, Cannabis indica
tagaagcttagtggagttgacgatttgggttgtaaatgcagctcttagaagattgatgagatatcaatggagatttgataccgggtattgtataaacattagttgggtattaaatttatacgatgattttttaatcttctttgtgaaaactgaaaagttaatgaattttaataaaagaaaaccaaaaatttatgagtgtgcgtgtagctgagtggcatagatatggctgccaaggttcgttttacttcaaattcaggaaatatttcatggggttgggttcatggagtcatgagtcgttctgagaagaagaataattataattaatatatattatttaaaattttgtttaattagttttttattttaaatttttttaataaaaagtataaattaaaccaattatgaatcaacatgtggcattcttttgagctattaaaggagctgttaagtgggtactaacgggagtaacggaaaaagatgattt

SEQ ID NO: 248692 - DNA, 3306 bp, Cannabis indica
aaagcaacattagacaaactttttaatttttgcactcatcaacaataaaaccgaaaccagaagcaattatttcagcactccgaattgcctttacacaaaccaaactgtctgattcaatgactgcctgagtgtagttgttgcactttagccaacttaaagcctcctttatccccataatttcagctaactcggctgggactttgccaatgtagcagccagcaaagacagagatcagatccctttgcgagttcctcaccacacacccatatccatgcttagaatctcgatcgaaagtggctgcgtcaacattgagcttaatgcctgaaaccggtttaatccaatgctccgagtcgtcgcttgctttaagtggagacagcgaagggatattctccctaccttgagctttgagaaattgattaagactcgagttggcgaacacgaccacatcccgaacagtacgaacacgctgctgccatattaaatcatttcttgctgaccaaatagcccaacaaagcactacaattttacccaaatcctccttgctgacgagatttatccttttacttgcttttaattgagtttcaggtttgcattgtcttaccttcttgtataatcttaattcctctaatcatcatgtttccttttttattggtactgataacaattagaatactgaaacactcctgcactacttgcctgaatatcaagccaatactaatttttagattctcattaactcttccttggaggatagcctcatttggggatatcaccattatgacattttaactgataattcagcctatcacccggctaactaactccacatctaatccatcattgccctctacctcctgtgaagaaatgaaccttattccccttattttccatgtgctggtttatgtggtcctttgtcttgacaagtggcttctttctatttggcagccaatattgaagatcttagggaagatttttaccgttgcatttacaatgattagataatcattaggtgtacaaaagatttccttttcttttagaaatgaatacagctgtaatgagccatttaggctcctccttgtacacgcaggactttggcctggtttataaatagattttactcagtctccattttcttgagctgagattttacaattctaatatttctaatttttagcttggtatcagagcaaggttttcaccatgtctaccgaatcccaaaacctagaaaacaatgtcctgctcaatcttcaacccctgctgctgcatcaacaattttgggtgcaagctcaagcacttctcagctcccaaacccagttacacatcacttcagcacaccaaatcagccattctctttaaaactcaatagacacaactacagcctatggaaaactatggtttcaaccatagtgagaggccatcggttggatggttttcttaacggcactaacatttgccctcttgagtttgtggatgcaggtattgtaatggaaagcatcgacacaggagactctcttgtcatcaacccagcgtatgaaaactggatcataaatgaccagctactgattggctggctatatagctccatgatagagactatggcaacagaggtgatgggagttgcatcagccgctagtttatggcaagctttggaacaactatatggtgcacactccaagtcaaaaatggatgaaaccaggacattgatccaagtaacaagaaaaggcaacactctaatggtcgaatatcttagacaaaagaaaatttgggttgaccttcttgctcttgcaggagagccatacccagaatcacaacttgtcactaatgtcctctctggccttgatgttaattacttaacaattattttacagattgaagccaaatctaggacttcatggcaagagctacaagaattgcttctcggttttgaaagcaaaatagaaaggctacaagctttgtcatccaacaacaagtttagcaactatctgacagaaccacaggctaatttcgctcaaaaaccatagaccagtggacatggcagagggtccaacagccagtcccaacattatggtggcagaaactccaatagaggaggagcaaatcgaggtcgtggcaggggcagatttagtggtagatcgaatggttctaagcctacttgccaagtctgtggcaagtatggctactccgtagccatttactataatcgctttgatgaacaatacatgggttcagacccaaacagcaacacacaacacaagaacaatccctctgcttttgttgccacacctgaactgctagagagtgaagcatggtttgctgacagtggaaccagcaaccatttcacttcaaactctgcatcaatgacacacaagcatgattatggtggtaaggagaaagtcacagtgggtaatggtactcaactaactatctctcatcttggaaatgacattttatttactgattcaggacagcaactattgtcaaaagagatgttattagttcctgagattgctaaaaatttgttgagtgtatcaaaactcactcgtgacaatgatgtgctaatggaattttattctgattgttgtgttgtgaaggacaagcaaacaaggaaggttctttttcaagggatgcctaaggatggcctctaccaacttcaagcacctcagtccaaaaccactacccgaagcctaagtcaaatcgagtcaaataaagccaactgtaataggttttctggtgttgctgttaagacaaaaaaagtaccactcagtcaaaaatagatgagtccttagtgtctaaatgtgatgtgtggcataggagattatgccacccatcaccaagagtcttgagtcaagttttaaactcttgtcaaattaaaatttccaagaatgaaatgatacatttctgtgatgcttgtcaatttggtaaatcacatgctcttccttttaaaaattccaatagcaaagctgccaatgttcttgatcttgtgcttagtgacctgtggggtccctcaccaattgtgtcaaagaatggctttaaattctacatacatttcatagatgattgcactcgctacacttggatttatccattaaaaaccaaagctaaagctagtacagccttcttacaattgaaagcctttgttgaaacacaatttgaaaggaaaattaaaagacttaggacagattggggaggagaataccaagcttttcaaaatacagttgttgaaaatggaatagacttccatcactcatgtcctcacacttcagctcaaaatggtagagctgaaagaaaacacaggcacattgttga

SEQ ID NO: 248693 - DNA, 1492 bp, Cannabis indica
gccaaagccagcaggactaacaatcataatattcttatgaaaaagtctctacttcttgttgatcatgatggagctcatggcaaagtactgcaagaagatcaatatcaagattcggaaaagaatcatgatcacaataagatcatgaccaactctgttcttgtaaatattgatcattatcaagacactgccaaagatcataatgatgatgataatactgatcaagataataaggtactacccctatacatataaataatttgatgatataagttatttatttattttcatctacttgttaataattaatcatgtagctatggtattttttcccatgaaataaaacccagctagtctttttggcatatatatatattaatcaattatttaatcatagtcgaaaaatgatctttgttaaagcagggcctgatgacgacgaccacgaagataaattagcctagcacacagcttaattgcatgaatatgatatggagatcgatggagcataatagcgttaaagttactgttaatgtcagaggttattacaacaaaattccaattagaagggtttatatatagtcagaaagacaataaaaaatagtagacactattgtttgtttccaatatgcataaatgatatatctgatttaaatattgtaaatgtgtcaatctataatacaaatttgacaggcacaggattatatggtttgagtgttattaatgaaagcttattcttcttcttcttcttcttcttctctctatctttcttttttttttttttttctgttacgtacgtacttagtgatgaaacattatgttcaagaagaaacatgcatgtaatattacggtatgcttgtatattctatattctaactttagtgaattcctttgattaggatgtaaaattgcatattttttaagtgttaattgggtaaaataattataatttatgttaatttatttcatggttttgagttattttaatttcaaattatttaatttaatctaatatggtgtaaaaaaaattagattaaaaaaaagataacaaaaatgaaaggtagaaaggaataagcatcaaattgggcccagttctaatgtatttcaattggtctttccaatcactaactagttagtaggggtacacgtacatctggtgagttttaatgaatttcgggttttggggttcagattttcgggtttgagtgtgcgaatactataaaccgaacccacccgattgtgtgtgggttttcgagttcggggtgtgcggatactatcaacacaattgtcatgtgcgattgagcccacaaaactcacggtccaacttataattctaagctcatggaagccttcgctaaatttcagcaagctttcacttcacttacaggaaatttttaaaaattataccaaaattaaaaaaaaaaccaaaattgaaatatatatatatagattttatttgaaaaatacgtaatggtattaattttatttacaaaaatag

SEQ ID NO: 248694 - DNA, 1412 bp, Cannabis indica
atttgcaggaaaaccgaccactcctatccagagtccacacccacttatctttacctactccaggggggggtccccactttttagaattgtagccacagtctcccgatcaaaaaggttattcaatttgaagatattccaaccaccatttgaagacatcaactccatcactaaactgtgacccccagcagattgaccatttggcttgggccgaaatgtctttaaatgagggatccaagggtcctcccaaattcgagtatcccttccgtccgccactaatttgtacgcacctttcaataggatagccttggttttgaccacggttttccaaaaccaggaatctgagtctctatacccacaactaaggaactattttccttttagatatttcgcattcaacaccttacaacacagagactggtcaccatttaaaatgttccatccccacttagccagaaaggcgagattcatttctttagatttcctgaatcccagtcctcctcaagattttggaaaacacattttatcccaagcttttagaaacatgccatgattatctttctcgaaaaccccaccagaagtcacagaccatattgtctatcttagacgccagacgatttgacagcttcgtcgtttgcatggcgtacaacgacatcgataaccccaccgatttaataagggtagccctgcctgccttagacaaggttttttactttccacccctgcaatttagaagtcagattatccaaaataaagttgaaatctgcatccttatgtcttgatctgaacagagggaggcctagatacttaacgtttccttccggcgatcctattcccaaagcctccctgatctccctcatcaggccagagggagtgtttctactaaagaaaatagaggtttttagcttatttactcgttgaccagcccaatcacagaaactctcaaggcacttccagtagttcctggcttcaactaagttagctctacccaccaggattaagtcatcaacaaagaaaatatgagagaggatcggccctcctctacttaacctaatacctttaatcaagttcttgttgagggcatcttggaggattctcgataaaacttcagccgtccaaataaataagtaaggagacaaagggtccccttgtcgaagcccgcaagaagttttatttgaacccaccgaccctccattgagacatatattaagcgttgttgttgtgatacactgggagacccatgtgcgaaacttcaaaggaataccgcaacaactcataacctggtcaatagcgtcccaactcagccgatcataggctttcataagatcaattttaatggcaaaaaagcctttttcgcctctttttcggttgaatgagtggatgatctcctgcacaattacatcattatcttgaat

SEQ ID NO: 248695 - DNA, 575 bp, Cannabis indica
ttttttttttgaagatgatggagatgagaagagcaagaattaatggaaaacacaattgaaaaagcatagatcaatctttcaaacaaatgaagaaaaaaaaaagcttaagaagaagaagaacattttcaagatggtagagatgagaaaatcaataactaatgggtttagggtaacatgtattcaactatttttttttttgaaaaaaaaaaagtcatataacaacaaaacaaccattaaaaaatactaaaaaaatatgcatacaataggaaataaaaaatatcaaatacatagtaacaacaaaaaaattaaaatgagcagaagacaaagataagagaagaaaaaaacccataacatctacaacaaaaaaggaaaaaaatgctaaaacaactgaaaaataatatgaataccttcagcactttgggtatctcaaaatctccatcatcaagctcaaaatcagagtctgaaccttcaatgatcggtttcaaacgttttggttttctctttttcagagaatgaataattgatttccttttgggttcgaaactataaaaaagtagggctatgggttttttttt

SEQ ID NO: 248696 - DNA, 737 bp, Cannabis indica
cctccattaatgattcatctaagcttagatcactgtaacaaaaatgggtttgttcctctttagttatcaaagaagaaagttcatcacttttccaaaataaatcattttctagcaaaaccaatggaaaaaaattgttactttttctcacacccattatcacagttcttactctcttcttcttcttctttttcctcaaactcatcttcaaaatcttcttcctcacagaacaaggtatcaagaaccattgaaggattttgtaggtcttgaacctcatcaaaataggtcattttttattcttccaagaaaaataaagtagaataaaaatcacaactttactctttattagtatgccatgaaactgaaaaatgtaaagctttaaaagcctaaaccccaaatacccatattctatatctatatatgtatcggcaagccttacttttactttctctttctacaatatgatgagaaagtgagagagagagataaataagtcaatagtaaaccttagtcttatatatgtatgtatgttgaaaattatatataaaaagacagatcaaatcagaactatataaaaataatatatatataatcaaggtaattaagcttaccactactgtaaactagatagactgaccttaactcttggcatcatagtgttactcatatctatataataactagttaattatagtactggtactatattttgatgagagtactaacaaaaaactatgcaa

SEQ ID NO: 248697 - DNA, 3052 bp, Cannabis indica
attcctgtgagaggccctttcttttgctgtcttttttgatttggaaaggatgagctttgcctcttggggaaatgagcaattattttgcgatgatgatgatgatgtcattatatatacatatggaatggtatgggaagagttgtagataattaaggagatggtttgcagaagatgtgaagataccatatttatagatgtaggtttagataaaaggtcgaccaaaatgttttcttttctaggaaggtgttttatttcaaaagagtaattatcataccatgttgccagtctcaaaactcgccgacaaaagtactttttcttgtagtgccttttgatgcaagaaaattgatttccaccaacaaatgatggcctatgaggtggaactcaaattttatgatttccatcttaattgcaattaactctttgagtgttgaatgataatggagctgagattctttgaagtgaccactcttatatcaacatatttatctttcccctgctcatcttgctcaagaaggaaaacaccccaatgttggtcattggcgtctgtttaaagaacacattttttgtcagagggaatctataagggttgtagatttatagattctgcatgatttgcttcaaatttttgactgctatagtttggtcatatgaccattctaaactattcttctagagcatatagttgagtggtcttgtcaatacagaaagtctgagaacaaactctcacaaataattgatgatgcccaagacttgttggacttggactttcatgagattttcacttgagaatttgagtagttcatgggctatatgttattggggcttcatttggtcatttggataatttcatccaaaggaattctatttgcatctgtctaataattattttctttttagacaacatgataccatgggctttagtaataaaagaaaattgggccagttacgattgatgggctttttcaataggaggaaaaagcaaaatattgtcaatatagatgagatcctttccaatattaggccatataccttggtcatagccttttggaataaataaggagcagttttgagcccaaatggtaggatgatccattgaaaatgataattttgaatgaaaaatgttgttttgggccagtcatctggtttgatgcctacttgccaaaatcccactttttgatcgaatttcaagaaaaatatgggctttggataacctggaaaataataaattcttatttggtattggagatttatcatctgcaaagaactcatttagggggcctgtagttgatggcgaacctttgctttccttgagcttgctctgatcgattattgacataaaatgcatgacatgcccatggagaggaagttaactttattaaatcctgctgctataactctttacattcagtggatgccatttattgatgttctggattcatgcctgggtgactagactttgtagggtttatatcttcattaggattaaaagaaggcttatgaagaattgtttattttttcataaagcatggtcacatttctttaggaacttgagatgattattggcacatgagacgtcaatgagctctttgttgatttgatgaaataggtcattggacattaagaataagtttgatatggcttcccatggagcaaaatgttatttgtaaccaagtccactaagaagaatacacaaaccattcttctttagtgtaaaaatcaaagctgacaattaagtctttttggataattttgtgagtaacagaacaccctgggaagaactgcaaccaaattggtttgctgatgaattttgtgcaaaaaatacttccatttgcagcatgaaagtattgtttcccttttctccaatattctttagaaataatatcaaggttcgcgtatgacgctctcatgtcaaaaaaatgtttacacttttatcggcttgacatattttgttggaagaacttgcacaatgatgacaatggatggttgcatcgtacgaacaatggacatttaataatctgaagtgttcgaatcactccattgttcgaatgcacaaagagattctgagttaaattcatcatatgtgaagaagattgactctatgccatcttccttagagaaatcctagtcatttgttgaatatgtgagagaagcttgattatttttccttgaggacgtcgttttacataatgacccctttttccacatacatagcaacgatcatatttttttccaaaagtcacacttccttcacaaaaaaattattttgcgcccttgtactttgagagcttgaacatcttgaacttgtttctgttccttgggttttttgcaagaacacgaaaattcagaagagtatttgatgagtaaatcttgtctactacaacctttgcctattttcttaaattacttcataaatttctggagaaatttcttttgggagcacatgttttcaaggaccttactagctggaaaatttcaccaattgtggcatccgttaggctttttcccaatacaaagagtagcctgaaagtttctccgccaagtggctctggaatagaggaaaggaaggcttgctttagatttggatcatcaatgccacctatttggtaaaatcgttgaggcattcacttataatgttgttcaagtctcttttatccattgaacaacacttgagcttgaaaaactctacttggagtctttcagttatttgtgcgtcttggccacaaaacttgacatagagatagcttagggcatttgcgacatataggagttgcaagaaattcatttctctatattctcctaagcttgtctaccaatcttgaaaagtttcggtgaatcttgagataaaattcaaaagggtcatcctcgtttatgcctgtggattttatgtttccaggctaagccaagcttggaattcttgaaatttttctcgccacttagatgggagaatgtcatcaaaagtaaaagtttgaaattcggaatataatttactcatttgatgatgattggattctagttttattgtagctacttcttcttcactttcatcttcact

SEQ ID NO: 248698 - DNA, 613 bp, Cannabis indica
agctgcgaagtatccatcctctggaggcttataatcctttcccctccaaaccacaatctgctccttatcaaatgttaccggtatacatggcaccagatcctgtagcaatatcaaactaaatcaataatgtaaatgaattaatcaaataaaactttagaccagtgttttaactaaaatgaaaaccccatcatgcctctctataacaataacttcgcattacaaatctttgacagcataattgagatgaaaactagaaacctaagttatgacatcttggtatagttagaaatatgtggaagctggaacaatggccaggaacgacgcatcagtggaaattaactgaagaaattagagcatcaattttacaaattaaataagaagaaaagaaagataactgacaaacacacatatgagtggaatctgcaattcagtattcccaaaacttaacgggaactaggaattaaatcaccttgttttatcttaatcctacatgagacttctgtataaaggctagaaacaaaaaagggttgagatcgtataaggatatgtaaagataacatgcaagtctttaggcacaaggcatgttttagttaaaagatgctatttaccctta

SEQ ID NO: 248699 - DNA, 1772 bp, Cannabis indica
agtgatggcttagtctaatttaagattttttaagagtttttaaaagtttttcagtaattcaagagatgtccattgagaaaaaatagccttcctctttctctctatagccgaccctctctctctctcttttcttcttcataattttcgaaacaccctagtgatagagtagtgcccacacacagcaagtggtacctcaatcatagtttggaagatcgtgaatgatcaaatacaaagagaaggacattcgtgctcagatcttgataatactctgcgatagaaaggatacaagggttagagatctaagtggaaggagacatattatttcgctgcaaccaatgttagattttcttaactttatatgtgtttattatcgttttagaaagttcatatttaggatgttaaacaacatacttgtgagtcgatctaagatcttggtaaaataaattccaacaatatcatccttaaactagttgtcaagttgaaatctccaatagggaaataaagcacatcctagaaaaaacagtaaacccaactaggaaagattggtccctgagactaactgatgctttatgggcatatcgtactgcatacaaaactcccattggaatgtcaccttaccgcctagtgtatggaaaagcctgtcatttacctgtagagttagagcatagagccttttgggcaattaaacaactgaattttgctctagacaaagcgggagagaaaagaaagctccaattaaatgaattggaagaactgagaaacgatgcttacgattgtgcaaaaagttacaaagaacgtacaaagttgtatcatgataagaacatcttgcgaaaagatttctccactggtcagaaagttcttttatacaactctcgccttcatctgtttcctggtaagttatgttctaaatggactagtccatttactgttcatactgtttttcctcgcggagctgttgagattaaaaattctaaagctagtaacatattcaaagtcaatggccaaaggttgaaactatttttagaattaacaccacctaaagtggacaaaatgccccttcacggctcgatttacaaaggttagtgaattctttcactactggtcctatctttaattgctttctttatattcaacattttagtttattttctatcatttgttttttttttaagaaaatcaacttctatttattaatgtgcatattatatatttttttggttctcatctaatgttcttatcatatacatatttagacattaaggatactatctcattttagttggggcaactgagtatattcttgtgttaagttcgataaatttcttacctttttgaaaattttgagtcaaattttgctgctaattatgtgaataaataattattgtgttaaactagtttatactatatttagttacgtagatagtaattccagtacaaattacacaaaccaaacatatgatttgattgtttttaacaaatttaattgagaaaaatcttaagttaaaaactttcattttttgtgagaagtgagaatttagaaaacgactttttgaacatatattgatcttctggattggtaaaatcaaaattttttgaaatttaaaaatatgaccattactagagggatactttttgttagaatcgagcctaatgataaatttatacaaaaaaaaaatcaaataagagcaacatttctctatcaacgtagcttggtcaaaatttttttaaaatataccaaagaaaattttactacggtaattatttattgtgga

SEQ ID NO: 248700 - DNA, 909 bp, Cannabis indica
agttaagacttggctgtaaaggatgacatctaccatgatagtttgtggggttttaaagtgagttgaagaagtaaagttttgaaatgtcggaagtagattcacatatctgttgtagcagccttagttcatcatatttagattaaccgtaatcatgcatattggcatcaacaatttcaagtaccaagtgtaatgctcaaagctattaaagcagaatttagaagtaaaatacatattagaatttcaaagaaagtcaatactatagttattggttgaatcataaatttatgaaaagaagaagaagaaaaagtttgtgtaaatagttcttagacccaagaggtgctctagggaaaaaaaagtaaatactattttgcagaaaagatcaatcaacttcaccgtttttagtcaaatttttttcaagttaggaataaaataaaaattgaactacaattgttagagttagagaattggagattttagtgtttaaggagacgatttttttagagagaataaaatgtataatatttagctttataacctactttatttaaaaataaaaaaaaaactccatttataataatcagagtttaatatacaattgaaaagataaaaatattccatctaattacatttaacattcaccctaagtgcatgtacacctgattcatgggtacgaacatgaattagggaggaaaaactactaacatgttttgagatattggcagcaaaactttccgaacaatgtaaattttaacatttaaccacataaattgattttttaatggcaaaacctaccaaactcacattctgttttgctttttacacttccatccaaaaacctcagttaagtgtcatggtttactattttaatttacgtgtacacaggaggacatgtggcaaaattttagtggt

SEQ ID NO: 248701 - DNA, 1000 bp, Cannabis indica
ccccctcaaacgaaaggggtgaaatccatttgaagtttgctcctgagatactgaaacctttctgttgagagagctttagtgagcagatcggccacctgatccacagcaggaacgtatctgacagacaaagtttgagcaagaatttgatcccttacaaaatgtaaatcgatttcaatgtgttttgaccttgcatggaagacaggatttgcagcaatggcagctgcactttgattgtctacccaaattactggtggatgagtgagagagacttgaagttcagatagaagattgacaatccatttaatttctgctgctgtgtttgctaaagctctgaattcactttcagagcttgatcttgccacaacctgctgctttttggcagaccaagagatgatgtttcctccaagataaacaacatagccccccgttgatctacgatcatccacacagctggcccaatcggcatcggagtaagcataaaggtccatagtagtggctggtttgagtaataaaccatagctgagagttcctttaagatatctaagaagtttcttgcaagcttcccaatgagtaactgtaggagcatgtaaaaattggctaagcttgttgatgatgaaagccacatcaggtcttgtgagagataggtactgtaatgctcctagagtacttcggtagagagtgatatcagcaaaaggttcaccatctgtcaaagacagtttctggtttgcacttgttgggttgggacacttttggcaccatcaagctgaactttaaccaacagatcagttatgtatttgctttgagataagtacatgccctctgaatttcgatgaacttcaatcccaaggaaatagtgaagagaacctaagtcttttaaagcaaaagagctgttgagatcatggatgagtttggaaattaaagttgagtttggacccgttactagtatatcatcaacatatacaagtaaaataatgagattgctgcccgagccaaaagtgaa

SEQ ID NO: 248702 - DNA, 752 bp, Cannabis indica
aaaaataatgaataacatcaatggtacaatataacatatatgtaaatttttagaataacatcctcttctgtctaataatatagtatctcaatactttgccacataatatatccatctagtcctttaaatttttatcattggagatgctttagccaatccctaacttgtaatcattttgtacttatttgtttttttttttaaaaaaagttgtagctcatatgtctatttcttgctaaatttgattttttatagaaggccaccgtaagtacatattgtcttattgcgctctgatgtatatttaatatttatgaagtgaaaatttattttttcgaaaatatatcgtttatcttcattataactgttcaataacagttatttaaaagtcaaagtacattaaattttagagtacattcattcaacattaatcaaaatagaaaaagaaagcttataatataaaacaaggtaatgtattttgtttttatatataagagacaaaataaattctctatattttgtatatcctttaaataaaatcatttactaccctacacatacaacatatatattattaaggatagtctctattaacacataattttacacaaaactttttattaaagcattgaattataaagatgtaatggtcaagaatatcacttggggctagctcaagtggtcataggtgggtgtgtgagtgttgaaggtcctggattcgagtctcaagtaaaatatgttgtaatatataaacgctt

SEQ ID NO: 248703 - DNA, 840 bp, Cannabis indica
cgtctccccatacagagaggagagacagtccatatggtcccaaccctagtactatactgctacatccattatgaaaaactcgtgcccatgaaggcaaagatggagataatactggtaagttcttacctagaaagccattccagtattatactatggaaagagttttagacggtggcttgttccctgacgacactaaacgagagagagagagggagttttagacgagagagaaagaggtacctactgtcgcaggtgagttgttcaggcggtgcacgaacagtgggcggccgacttcaaaatcgtggacaaaagatgcacggctctgctgggtttgaaatgggggatgggtctgctagggtttcgaaaataggggatagtcacgcgtgaaaatgaaatttaattttgtgaaaattgagtcttacaaatgtattaatcattttgcttcagtgaaaactctagcaaatgttttagcctcacttttgaaccgaagcaaaagaaaattggcttcatttttccaccgatgcaaaatgtgaaagacaatttttaaaattttcacatttttcctcgggtttactttttgcgtcagggaatgaaccgacgctaattgatattttttagcttcagttatacactgaagcataaaatccccccttattttttgcctcggtcaaccattttggtgagacccgttgaccgacgcaaatagtacattttgtagtagtgtatcatcaaaagtttctctgcaatggcacatcctcaagcaaatggtcaagttgaagcagtcaacaaaaccttgaaggatacactaaagaagaaactcgaagatgccaaaggaaactg

SEQ ID NO: 248704 - DNA, 416 bp, Cannabis indica
tattaattatatatatattgttttaaaatctaaaattatttacttattttattgtttaataaaattataattgtatatattttttataaataaattcaaaaaactagattaaattttatatatttaaaattataattgaattgtattaaatttaatttttaatattattatttaaaataatacttaggtaatagcaagtttaatatctctaactagacatgcattacatgttatttatacccagtacacatattattcgcataatcaatatatctcttctgtaaaattaatagaaggtcatgtgagagagctttgattttttttagagaaagaataaatttaaccttacaaaaaaagaaagagaaattaagaaattgatgatttaattttaagagattatcattagatgcaaaatt

SEQ ID NO: 248705 - DNA, 554 bp, Cannabis indica
ataattaataaatataaatatttccagtgacggatatatatttatatatacacacacatctaaaatatatatcagtgaaaaagctttctaaacaattttgtcccctgcattgacataagttaataaaattcctctcattcacattagaagtaactgatcatgtaagatatatacatatacacacccaactgaaatagctataactataaatttgacaaattattaaggatatatgcagttgtcatgagacttcataaaccattttgagaatttgaagagatgatatatcaaaccagatattatatatatattcttattaattaacccatccgagtagaataattaatatcacatatctaaataattgaccgcactatattttcccttgaaaaattctaactagcaagaggaatgaacagtcatattaggaaattattaattgttaattgtcatcatgcatgaagccaagaataaattggggaacatatatatatataaatagaacaggaaatatatataattttatataaccacagaattagttgaaattatta

SEQ ID NO: 248706 - DNA, 1087 bp, Cannabis indica
attcaaggaaaatatggctctgtgaggatgctcggttgttccttcaaattcaaaattatatcgatcatgaggtaattagtttgattaattaatgtgaattaattaaagaactaatggattacttggagtttttgtgttctaacaaagacaacatatctcacatatatgatgtttgtaaagttttttatcatgcacagaaataagataagtctcttatgagttactttatggcatttaaaaaatcatatgaagagcttaatgtgttattactatttagtcttgatgtgaaagttcaacaaccaatgagagcagatggctattaggagtttttttgcatgactctcgtctaaatttaactctgcaaagtcacaagttctctctggttctgatgtctcctctttacaagatgtatttactcttgttattcccacagaaactacctcttcagttcctcttaatagcgccttggtgagtcgtaataattttgcaccagaaaaaatttctactccaagtggatacaaaggaggtgattcacaaggacatgataatcgaacaccagattctgggagcatcatgtgaaaatattatacgaaaccatgtcacaccaagtttgactgtaggaagttatagttcaaaaatcgacaacaacactactaatattgcaagcactagtgatgcatttgacaaatcagtccttatttttgctgatgaattcgccaagttctcaaggtatcaagaaacacttaagtattcttctccttctgtcattgtgattgttgattcaggtaactctaatgcatgtcttctttccaaatcctcaaaatgggttattattctggtgccacaagtcatatgataggtaattccaatctcttttccacttttcagtctcatagttccacttctattgttaccttagctgatgggtcaacatcttctgtacttggatatggcactgttgttcctacacctatgctcactttgtcatcagtcttacatttacctaatttgtcctttaatttgctttctgttagtcaactcactcgtaatctaaattttgcatctcattctttctcgatcattgttt

SEQ ID NO: 248707 - DNA, 662 bp, Cannabis indica
ttagttgatgagcatttattcatatcgaaaactccatcgataatctattaataataaccaaaatcctaacttttttgtagaactagtaaaactataacctgtctagaacatatctatattctgtcgatatccatcgataatccacactacaagaaaaggcctttttacgggcgcatttcgtcaaatgcgccggtaaaagtagtcggcgtaaagcaaaaactaaaatcccacttgcatttagggtttacttttgccggcgcattattacgccgatattaataagttttaccggcgcaataatgaatatgcaccggtaaaagtaagcaaatgaagtgccaaaaggcgcgagaagtttgtcgcctttcattttattttttctggcgcatgtttacttttaccggcgcatttatgcgccggtaaaagtctcaaaaaaaaaagaggaaaacttcccgcatagatttccttggtagatagggatacttttaccggtgcacatttgtgccggcaaaagtattaaattaaaacgcgtggatttgatgtgttaggtggggatacttatatgcgcgtgttaacttaagtcaaaaaattttataaatacttttaccggcgcaattggatgcgccgttaaaagtgtatatatgttacagggagcacgaaacccc

SEQ ID NO: 248708 - DNA, 1886 bp, Cannabis indica
acaatcttcatctgctcgctctcacggctcctcagctttagccttgcccttacctacacatagcaataacactgtgagtcgacagactcagtaagaaaagcataacataataaacatactaaaatcccgggttataatcaggcgcctatacacctaaccataaccctaactgaatcaggaacgttcttgaaaaagtatgactaactgcgaatccagcctatactcagtactctaatcgtactgatgtgatagcagttagtccatactgtctgatagcctagcatatatctgatggcatctcggtgcaactctatgtacacctcactgttgccctgatatgctaatctgatggctatataaaatttgcctaacatatatctaatatgttattctgacggcaactaacatgtacgctaaacatgtataagcatatgcatgacattatactaatcttaccttgattccgaattcaagtgtgccagccaacctgagtggaacaactgctcggcgaattacaggctcctaaatcacatcaatcataacgtaggtgaatgacatgctaaatcactttctggggacttaaacttgaaactaaaagtttccctatcgataaataacatggcaataccctaaacaacacgaaaatgggaaaaactagggttcccaaaactgccccaaccggtagactggttccccaaccggaattccggttctgggaaaaaattcttcggagccaaccggaatttcgattcctacaagcccctctgaaccggaattccggttcagtgcaggaaagaccaaaatttccatatctcaaccaaatcaaccccaattcaagccaaattttccagacctgttatttagaccataaagaacaaaacccaagcaacgaaacaactacagaacctcaaaatcaaatttcaccattaaagaccaaagtttgagttcaaaactccaaacttgattaacttcaaccaacaaccacaaaacctgcttaaatccatgtacctaaacataattaagctttagaaaacaaaactaaactctaacagcagccacatcaacaaaattacaaagcatgcataaactttctttccttatacttcaaaaaaccaaaaggaggttgcaaaatctttaccttggtttggattcacttgaaacttacctggaaatcccctagagctgttgaagataacccaaccctagttggttctatgggtttcgaaaatgagagagagaattgagagtgaaatgaattttttttttccttttctttaattttcttataaatgagataggggttttttaccaaacaatatcagccattacactactaaaaatcagattactaaatgtagctaagtccactaaaggacaaaatattttgcccctcccatactagcacaaaaggttacaaagggtattttgggaaattctaaattcccgactgttctcgacattctccatgtctaattaaatcgccccgctatactaaaatactaagatgtgattcaactacgccatacaccacgttccaatgttgccgaacactgaacatgtaaaaatatgaaatttctatatatgacatattaaattcattctgaattcaaataaaacatcatagattaataatttagaattaataactaataactaattttcatatttaaaccctaactatctgttaatttccaaatttaagctaagcagtctttacagtaatttagtccctatacaatgtatgactgagagtgcaattccaagctctatacgtcgatgcaacaaggaattgataagtcattggatttacttggtaaattcttgatctgcttattgaaagctcggttatataggcccatggtccgcatactagttgagaccatact

SEQ ID NO: 248709 - DNA, 659 bp, Cannabis indica
gttattttaccatatcatattacaaaaaggtttataattacatttaaatgttatattgtcaaaatgtcaatatatgaaaggtaatcaattttgtaataaaatgtaagagataattaaatattgattggaaacttttctatgaaatgtatatgcattattttttgtcatgaattaattttctttaaattattaaaatgaataattaatttctaaaacttacttagccttaatttgacttttgtaggtgactactaaaattgatttaacatcatagtatgtcaagtacattaccatttgaacattcatgcctaatgagaaaataaaaataaaattattgttaaattcatattttctaagactattcttaattattgttaaatcctcctttatgcctaattgagattcggtacaacatttgatttgaattttatattttgttttgttattttttaatatattattatactataactttaaagtgtgttttatttttttactaattaattttgccttttatatttttttttaaataatagattaccttacagaattattaggagtgtttattatcttattttaaggctaataaatcacataattaaagtactctattctaaattattttttttaactgaaataataaattggtcattaattaa

SEQ ID NO: 248710 - DNA, 1114 bp, Cannabis indica
gacttttaaattactattttctttatattaaaatgttatttgtatatataattttttaattttgttataaatatgtgtggattggattggatcggttacttttacatgtgaatcaacacccaatccgcacaagtgtagattttaaattttctaatctagtccaattcgcacaagtgcttatccgcactttgcggattggattggattggatcgtgcggattggattagattggttattttataaacacccctaatataaatattgagaaaaaatattactcatactcaacgctactacaagataatagaaattatatcgctattattataattaagtattaacttcactgtaaactatttgtaaggcgaatactatctctactcaaaaatatacatataaatataaaaaaaaaactaagaatgaaccctaaaaaataattgtacaatatacatctctattgtattttcagcagataaataattattattctattattttttttaagacaagttacactttaattattgagtttctatttatatatttcattctaaataattttaacgttaaaaatatagtattgttgcagttatacttgtttttaatattcctataaaataagttatttaaatcttattcttaaaatataaattactctaaatttcattctaaaaaatagttacataatattttaattgagtacacaatataaattaaaattcataaaaataaaatcatagctatataaatataatagagatgcgagtgcacttatttttagacccctgtatatcactctgtatatatatacataaaatctaattatataaattggaaaattgtgtggtccacctacataaaccctaattatatataaaagaattttgtggtgcacctaaaaataaaaaattacattaatattttaattagtgatagttattttctttaataatataaccatataaaattaatatatatttttggtataagaaattattcaatttttatcaaaagattgtatagcattgtaaatgtacatctacatttgcactgtcttcatttttttaaaaaaataattttgttgatatagtttatgattaagaatgtatagtt

SEQ ID NO: 248711 - DNA, 800 bp, Cannabis indica
aaaacatgaaaatcgccttcccatcgccaaacataaaataaataatgtccccagtgtgcaataaaattaaaggagagaaaacaaaccagagcaactagggctacgggtccatagttgtattactgccatcagtagtaggtggaacgtcatcatgacacccaggtggttgatatgaacatcggagctcatcaggaaattgaggataaccatgataccccgagtgataggcaaacgtagcataaaacttagcctaaaagttgtgcatcatgaactgacgatgttgcaactcctcgatgttttgcatcatcacttgttgatttcgttcatacgatgcaaattgttgctcaaagtcaccaaactgggtgctctagccctcagtaacttgagatgaggatggcctagaatgaggtcgcgatggtggaggttgtgaagaggacgaggaatgtgtatcttgttgtaacggaaaaaactcctccagttgctcctcgaagcctaagtcagtgggtcgagctattccatggtaattagcttttaaatgcataacaatgttatgatcaaggacccccgatgcttcccaatgctcctgctcaaacataggcacacttactcttgaacataagctagtgatcaaacaagcataaccgtgagcagtagatttagaccccctagttatagtacaaatgttggaatgaatcagtttgccaacattgatactttttcctgaacaaatgtagtgcagcagatacaacctctcaatattgatctccccttgttgtgaagaaggaagcaagttattaatc

SEQ ID NO: 248712 - DNA, 1030 bp, Cannabis indica
tataagtggttgatggtgcttgcagttaattgaggtttcacagctgcgaatctagtgaatatgttattcaaaaattcgaacttcacgctcacagatgtaggtgcctctattcctaatttttgacatatctagagcagaaaaattaaatttgcaaattatcaagattaaatgtccctccaaatgataattactaaggtccaatttaaattttgatttgtgtaacaatcaattatgaatacttgtatgcaagtaaattttagatgaagggaaagtaacccattaaaagttgtataccttcattgaatcttgaattgccattggatatggatctaggtcatccttagcgacaatgagatggtgtggcactccatagctactttctactcatttcctagcaatctccacaagcagttcttgcaattttatttatgaatattcttttgaattgaagcaagaataataaagttagtaaaacccaaatagataaaagattttacaatatataattaccgagaactaggggcggagccagcatgaaaaattaggggggccaaactatattgtaaatttaagtgtcaaaaatttcaatgttttattaaattcataattaaaattaaaatacagaatgtctttcttgcatatcacgaaaatcatcgataagtgaatctatactaaattttttggcaatttctccttcaatatacacaagcaaataatcacttaaaattcatcttccatctttttacgaagtgtaatcttcactatattcatatctgaaaaagatcgttctgtggtagctgtagaaaccgaaagtgtaagaataagagttatcactttataaacaattagaaaaatctctgcttttctagtttttaccaaccactgacataaatcaaaaatagctgccaaaacactaaaatcatgaagttatcgtacatgagcaaaatgttcaaattgcgtccttagttgtaccatctcgtattctgtaaaatctcttaggtaaaatatttgtaccaacttgcaaatatca

SEQ ID NO: 248713 - DNA, 509 bp, Cannabis indica
cctttttttttttttttgagagactatatataccttcaatacacataatattaacgtaatataaaagataaatgctaaaatacatctttattagcaaaccactaaaagtgtggtatcaatataaacatgtaaataactaaaatcttaactctcaccctattaataacatcatcgattatcaagtggctaagatttcgtattaaaggactgaatcagaatccccttaccataaaaaattatgctatgcccaattcaattcgagatgaatcagaatcttataagtttggtttgatacactactgcataatatatacttatgcatatatatacatataagcatatatagaccggagactattgaggtacaaattcacttttagtgttacaattttgaaattcacactccataaagccgaagtggggttggccggccattaatggtgcatgtattcaaataataaaaaaaaggttctactaaagatacattcaaattgctttttttttttttt

SEQ ID NO: 248714 - DNA, 701 bp, Cannabis indica
atgtgacagagtaaacaccagtggttaactttaatacttcagtaagtgtgccgtaataattaaaacattttgttcccgccacaaacactccactattttgcttgctcctcttctcatcttgtttggtagccataaatcgaactccattcacaatacaaccttcatatagtaagtacctaagtgatcagacccggatgctaaagctagtaactattcgtcattctctaatgatccaaacttgtgcaagtcatatatctataaaaataaatacctcattagagaatgacaattcaaacaccacttaagataataaatatttactacacatctatattcaccttcttgtaaaatcacgaatgaaaatgtttttttgtgtaaaacattatgatctccattcgagtaattttgtcaaatcacttccaagtgttcactgtaaaatcaaaagatttgaattgattgattgaaattttaggggaaaaaaaaaaagaaaaaattaataaaaaaaaagaaactcactctaagtaaacttgaattttaggtgaattgttgaatatataccactctacttattcatgagatgcgcgatcaagaggccgtagattggcttttgtaatgggtcgacattgagattgaaacacaaaaagctttcgtgggacaaccttgcaatcaagacagttgaaccttgtttcaacccccttgaa

SEQ ID NO: 248715 - DNA, 653 bp, Cannabis indica
ttcttctttcttcttcatttttctacagaacccccagccgtctctttctctctctctcccgagtcccccaccctctgcgatttcctccgacgacggctccaggcaatgcagttttaccacggcgaggcactcagggcctgaggtgacgactgcagaaacctccgtcacgccgactccgtcaaggccagaggtcctctggcactacgagacgtgagctctgtcaggttggtggttccttcaaaacgccaactccgactcctttcctcaggtgacggcagcaacgacgttggtaagttctcccatctcatttttctattttcagcttaagagttctacatcccaaaatctttaacctcttaaatttcatttcttatttttttttaattattcttaaccattgttgttattaattgggtgtattgtgatgaagttaattgaaaaaaaaattgcatgtttggctgatttttaagttgaaataatactaattttttatgttgggtgtgttttgtgagattggaactctaaaaattagatcactataaacatgtcgagtgatgacataggtcaattgagttattttgggagataagatacgacttatttttgttttgttttttgtaattttaagggaccgtgcgatcaaaattttaccc

SEQ ID NO: 248716 - DNA, 631 bp, Cannabis indica
aatatcaaaagtacgaaatttcccctcgagtccgtacgaccttcatcgccgtggccaccaatggcctcaccgcgatgacttcacaaagttaaaatgggggtttctacctatcatctcgctgtagccataagttatggtcagtgtggtgagaagtcctattcgtagccctaagcttcttcatcgtggccactgtgaaatcctaaagtagccctgttctgccttaatctcgccgcaaccataagtcatggtcgttgcgatgagaatatatcaatttgagtgtttttatttctcattgagcttgccttgaaccttttgaatcttgatgcaattgacattaaaaatcacaggaacctgaaaacatagaaaaataagcatagttccatcctaaaggtattaacaaacactaaaaatgacgttaaatgtaacaccttaactaagttaggcatgttagcgtgatttttaatttattgtgcagctcgttgctaatcaacgaggttatcgaaaatcgttattaattaaaatgttacttatttaattaaaaacatataatagcatacatataaaattttgggatctcgtttacaaaagcatttacaaaagtttcactgtacaaatacaaaagtctatcgcc

SEQ ID NO: 248717 - DNA, 554 bp, Cannabis indica
aaaattgggtttaagtaaaagttatcccattttacaaattatgtatagttttagattaggataccaattttaatccctaatatgcatataatttcaaatttcccatgacaagcatgatttgctttcaattcagtaaaacagtgagcattttgctcattaaggccaactcgatggaagcagaaaaacttggtgagggagacaatatgcacaaacaaaattttagagggcaataataattttttaaagaaaaatacaaaaaatttacaaaacataataaaaaaaaagaaaaaaagttaattgaaaaaggccttggccccgaacttcaaaaagctctgtccctaactccaatagtaaaaaccaaatttagtattggatcaaaatatataaaatagaagattttagcactaaatttttatttattttaaccatatcactaaaaattacattaaaaaatatattccttattattatattattttattaatataataataatatatattacatcaaatatatatattacaaataatgtataaacattaaattataaaaaa

SEQ ID NO: 248718 - DNA, 580 bp, Cannabis indica
tgttctctgctgcatttcctcaacatcagaagcgtgcgaaagagtttaaataacattactatttgttttcactcatttactgtactgcgtttctgaactagaaaagtaaatgcaatggaggaaaggaatatttgcttgttttatcaagataatcttcatagcagaattagagctcagtgaagaattttatcaagcagatggtagctattcctaaaaggaaccactaatttcaatgattttaacatttgataaatccaaactaacaacggtaaacaacagatgttgaaataagaaagaatgttaccagatgttatagtcttccgatgctcggccagaggagatgattggccggaagccattttaagccagagtagatgatcggagtcagaggaaatgaaccgtggcagagtagacaatcaacacagtcaaacggagagtaggagaggtgggtggagaaaggtgtggtgggtgtgggtattaaattttggtattttttttttttttttttttttagtttttttagttaagtagaggttaggttattttaaaagtttttttttttaaaggttttttttttttt

SEQ ID NO: 248719 - DNA, 860 bp, Cannabis indica
aaaattctaagttacgccgccacaccggatttccctctctccacgaacccctttgtttgccgcaccaccaggagcaatacaagccaccaacatgctcacgcacgataggaaaggtatttcatatctttgatttgatttttctagttcatagttttgtcactttatatttattttctctttttagtcatgttttatattattttattttaattttctatggttttagatttaaatctgattgtattgttaagatagtattgttttatttattttacttttgatgatttcatataacagtgtattatctgtattatttttttgtttgagtttggtcttttgaaataattttttgttttttttcgttgttaaatatcttataaatatattaatatgtgttatccaggaatatataaagttaaatctgagtattttaaaaatttggattgtaaaaaaggatttataatgttagaaatatatattatgttatatcttattaattgttattacattttgggaaatcataaagtaacagtttggatttcaaatgtaataattgaaaatgaaagatatgcaattattattattttgtttgattgaatatttggaattattttataatttaattactatgttattcataacaatatatccattttttaattgtagatagttatcctaacaaagaagctaatgctacagcaaatgagaatttaggagatgcctatacggtgaattctatcattttagttgcaattgtttaaagttttattcactacaatttttttgaaattggatgactgtataataattttaaatttatgtttttgtgactgtaacattttggatactaaactttgaca

SEQ ID NO: 248720 - DNA, 1148 bp, Cannabis indica
ccttttatccagctaagagcttctttattcccaatgcttcaattacttcagccggatagctacctgaaaaatggctagtcttggcttcaaggaacttgaaactgttcataatgttcataatgttcattgttgttgtaagatgaaactggtttcggtttattttttattttttgtttagatagaatttgattcctccagtaaggatgcaacaaaaaatgttgctaaagatttaagtgttgactttgagaagaaacttcctctaattaaaattaaaattctaaggaaggttattcacaaaaaaaaaaaaagtaaatctaatccaaattttaatgattcatcttttggtatgtattatttttgaagtatattaattttgttttaaaaaaattatctcttgatgtatgttcaattttttagttgtttatactaaataactggttttcgtgtttaattgttgttttatgtaattgaggtttaaattttattcttattttaggaaacttgttttaatgtgtcagatttacttaatttgcttgctttttgtaactggtatttctgtttcactttttaattaattgtttaacataactggtttcagtaatttaaatttatttatatgttaagaattctcttgtgatatgctttaaattttttttttttaatttcctgtttagtttgtgtttcaatatatctttttattgttttatttaggcatcttatgttttttttttcttatattaatgaattattagttttatttaattagctatctaatatagctggtttctctattttataaagaaactagtttttatgtttcaatttatttaatgtaactagtttttacaatttaattattagtcttttttttaaaaaaaaaaaaagaaagctagtttttatgtttcaatttatcttttgattggtttaagttgtattggtaactggtttcccttatttagttattatttttgttgttttacataactgactttaacattataattttaattcagttgatttaattaattagttctctagttataagttttaaatagttgtattgttgtaactggtttcagtgtggcaaattccaacgtctaacaccagtgacaactcctatgtctaactctggtgacttttcagcaatg

SEQ ID NO: 248721 - DNA, 617 bp, Cannabis indica
agaaatggaaccagactgggacccgagattgggatccggatctagacctagggcttggaaaaaacccgtagtcggtgtctggatttcagacccaacccttgaccagaaccctaacaaggaccagaacccacacccagacctgaacccagtcctaaacccaaaagtggacccgaacctgtaccctgagacccaaatttacaaccaaaaccacatgttgaccgggactagaactaggacttggacttggaatcataagtgaaattggacctagatccagaagcttaaccaagatccaaaaccttaaccttaaccttaacctccgaattggaagccgcacctggatcccaacccaaacctggcctcgggacccgaacccgaccctaactcagacccaaacgtggaaccagactagggacacagaacaagggtcgggacttagaactgcaccccaatctcgatcccgaaccccaactcaaaaatgggacctcggagctgaaccataacaagactgagacccgtgacagtgatctagatctcttgacttgggatttgggtaacggggcctgaaacatacctgtagcggtgtctagatctgggactcagactaggaccaaaac

SEQ ID NO: 248722 - DNA, 4534 bp, Cannabis indica
ctgttagtaaaggtagttagagttagttactttcagttacaatgttagttattgagctgtcggtttaaagaagagttgctactcttacacagctcacaataacagaattttgttatattgtataatgcttgttctgtataaataaaggattcaagagcctgtaacttcttacagctcatttcatcaatctcaacttggtatcagtgcacttgtttttttttctttctttgttagattcaagttcttgaagcagtctacaatggcgtcttcctctgcagctggtcttaggcctgaaggctcctccacttccgttatcaacaccactactcaaatccctgccgttcaagtcattcctcatcacatggtgcctctgaatcttcggctcgatcgaaacaactttttctactggcgctcacaagttttatcgactgttcgtgcacatcaacttgaaggttttatcaatggagatcgacctcgaccaccagcaaccattgtcgatccctccgatggcacaagatttcttccaaatcctgacttagcagattggattcgtcttgatcagttcctcctgagctggctgttcaattcgatttcagaaagtatgcttggacatgtcgcacgatgtgcatctactgcagaattatgggaagtacttcgacaacttttctcaaacacttctcgtgcaagaattcttcaactccgtggtctgcttcaatctacaaagaaaggatccacaccaattgatgagtatatcctcaaaatgaggtgtctcggagatgcgttaatggcggctggacacacaatctctgacgacaaactaatcttgtacattcttggagggctaggcggtgagtatgatcctgcaattgtcaatctcacctccaaagaaactgttacaattcaagaggttcaattcttgttacaaactcaagagatcagaattgaacaaatgaactccattgctgccctggatctgcaaaatccaactgcaaattatgctgcaacaaataaaaaaggacctccaccacaaagttctaacaccaccagaggaagtcgtaatcccaacaatcatggaagtaatcgaccagtttgtcaagtatgtggacgatctggtcatatagcactgaaatgctatcatcgtttcgacttgagctatcaaggtgaaggaagctctaacactcaagaatccactcaagatgaagcacaagccatggttgctacaacttcaactctcacggatcctcaatggtatctagacagtggtgcttcccaccatgtcactgcccatgccacttccttgactgatacagtggactacaaaggaaaaggcaagctgaccgtaggtaatggtgcctccctttttatctctgctattggaaattgctttctttcttccttttctcaccctttgatactcaaaaatgtcctatatgttcctaccattcataagaatctcattagcatttctcagttttgtgctgataataatgtcatcatagcatttgacactaacaattgttttgtcattgacaagatgaagaggcaggtccttcttcaaggaactcttagccatggcttttacaagttgtctctccccactacaaattgtccatctgcaacatttctttctgcaaattcttggttgtattcccctactgtttcttttaacaattcgaataaaatggcctataatgtttctagttcttgtaccaattcagattgtattgccacattgtggcacaatagagttggccatccctcctctgtaattcttaccaaagttcttcaaaaaataaatacaaagttgtctaaatctaatttacatttttatgatgcttgtccatttggcaaaaaccatttaatgcacttcagtagttcttctttaaaaacaactcagctcttacaactcatacattctgatgtttggggaccctccccaaacccaaccgctgaaggttacaagtactatattctatttgttgatgattttactaagtacagttggatttatccaatgaaagttaaaacagaagcttttccaatattcctatcttttcaaactctagtagaaaagcaatttgacacatcaataaagggattacaaactgactggggtggggaatacagaaagttacaacctgtcttacagcaattaggcatcttgtttagacatccttgtccccacactcaccaacaacaaggtagagtagaaagaaaacataggcatgtgactgaaatgggattaactttgttagcccaagccaaaatgcctctaaatttctggtgggatgcatgtgtttctgcagtatatctcataaatcgattgcctaccatagtcaatcaatacaaatctcccttccaatgtctttatggtctacaacctgattataatttttttaaaacttttgggtgtgcttgcttcccatttctcagaccatacaataaccataagttccaattcaagacctctaaatgtgtctttcttggctatagtccattccataaaggatatagatgtctccactcttcgggtagaatttatattgcaagaagtgtcaatttcaatgaaaaagaatttccctataccactctattttccgaaacccaatcttcttgctcctgcctttgtcattctacaaactcactcctctgtcagttcccctcccattcaatttggctctctagatattgatcttgatctaaccccaaacactaccaatatttcttctccatcacatcaaaatactcatccacctacacttgcaacagacaatcttgctgatcctactacatctgctgagtttttcaacaatgatgcagaaacagaaacaaaaatacctacacctgctattccaccatctcttccaccattacctcaaggtcacccaatgcagactcgatcaaaatcaggtatatataaacccaaagtgtttttggttactgcttccaaacaggaaatttatgaagagccaaaatctgtcaaacaagcacttacaatgcctcattggaaaaaggcaatggatcatgagaaggcagctttgctaaagaagaaaacttatattctggttcctagaacggctgacatgcacattttatccaataaatggatttttagggccaaatataacaaagatgggtcattgaataagttcaaagcaagattagtggtccggggatttgaacaaactccaggtttggattttcacaaaactttcagtccagttataaaagcatccaccatcagaatcattttttcactagctgtcacttatgattgggatatacaacaaatagatgtaaataatgcttttttaaatggagagttaaaggagaaagtgtatatgcagcagcctcaagggtatgaagatcccactaaacccgattatgtatgccaactgaccaaatccctctatggtctcaaacaagcaccaagatcttggtttgacaccttaaaaggaaccttaattcaatggggattcaaagttttagtttcagattcttccctattctataaaaaccagcagggttcattacttcttgtcttggtttatgttgatgatttgttaataacaggtgctgataacactgccctttcacatctgatatccaacttgcatacaaaatttgcattaaaatctctgggctcggttagctatttcctggggtttgaggcctatcgaaatgcatcaggaatttatctaacacaatcaaagtatgccactgatcttctttcccgcacaaactttgaagaagccaaggactgtaacactcttatggtttcagcaaataaattagctcaagatgacagtcctagcatggacaaaccagaaatttataggagtacaatcggggctctgcagtatctcacattgacaaggccggaattgcctattctgtcaataaattgagccaatatctcaagtctccaacagttaaacactggaatgcttgcaaaagaattctgagatatatcaaaggaacccctcatcttggactacatttcagaccatctacattactcagtcttgaaggatactcggatgccgattgggcctccagccttgacgatagaaaatccgcaagtggcttctgtgtcttccttggtggcaatttaatcaattggagttctcgcaaacagaaagcagtggcaagatcatcaacagaatccgagtacagagcccttgcctctgctgcaacagaactggtatggatacactcgcttctcactgaaattggcatcggtctacacaaaactcctccagttctctggtgtgataatcagagtgctcaatccctggccctcaatcctgtcttccacaccagaaccaagcacattgaacttgatgtacactacattcgggaccaaattgctcagaacaagctgcaagtttgctacattccaactcaagatcagactgctgacttgtttactaaacctctgtcctttcctagattccagttgttatgtaacaagctttacttagaacactcaaagtatagcttgaggggggctgttagtaaaggtagttagagt

SEQ ID NO: 248723 - DNA, 677 bp, Cannabis indica
attcactaatacatgagcatgttatttaattaactattaatgaacatttatttattagccataaataaataatgatgataaaccgagtaataattgtgtacttctaattttacaacccttaaaaaataaaaaatttaaattacaaaattaatctacattgctgcaagggtatttttataattttataagattgtcgtaagcctgaaaaattaattaaaatatttttaattaattattcttaaataaaccttttatttaagacatcttttaaaccctttgaattaattaaaataattttaatgaatttattattaaataaatcttttatttaagacaactatattattatattacttttgtcttaaaataataacatttattattttatttaggatcaagacaacttttttcttaatattgttatagattttgaatttgaatttcaaatctataactaagttatatttatttgattcaaaattaaattttaaaaaataaatatcccacaaaactatattaggggtcgtttggtatgcaggtttcatttcatgggaataggtttgatattacttggagagtgatgaagggaatgataaaactaggaaatcaacattaccgtgtttggttgacattggaatggaatgtgacaactttttttttacaataataattatttt

SEQ ID NO: 248724 - DNA, 740 bp, Cannabis indica
ttcgagcttggctgaatagaggtaaaaaattgaggcctcatttcagtaattatattagtttactgaagtttcacttataggttgctaagtgttttacggataaaatacattgaagggtagaatggtaaatttgtccttatttagtgtagatcatctatagtggatgcttgacaattaggattgtaacaatggataatcataacatatctatatcgcgctacgtaaagagtgttctatataactgagagtatattcaattccaaatctatagtttagcaaggaaaaattaaaaagttgagaatttacttggtgaattcgtgatctacttattaaaatctcggttaaataggcctatagtcccctcaatagttgagataatactgcttgtagactcagttaattgattttaattaatcaattataattctaaaatttgtctttgtcttatttatgaattttcactaagcaagggcttaattgttaagaaaagaggttttgggatcaatttattaattaagagactttgtatggtctaattaataaattacataaatgacaaatacttgatgcccttcagagtaaattgggtcggacagaggtggttgtaatctataattctcttgaagtacgaaagcaagggtaacataggaccctgcatagtgtgagtgcccaaccaagtgtagtaaccttcccttggactggtcaccaacttgtttggggggggggggggggaggggggg

SEQ ID NO: 248725 - DNA, 1314 bp, Cannabis indica
ttaatgttggggaacttgaaattaactggttttgttaaattctgactggaaaatggataaattccaaaacaccaatactaatttcatccacaaaattgatgattaaagagcagatcatatatcatgattcatattattaaatagatatagatcacaaagatcattataatatatataaactgtaataaaaaaaaataaaaatatatataatatatttaaattgcgggttggtgggcgagttggcgggttcaacccgaaacccggtacttctaaaaactcaacccgcgaacccgcccgaagggtaccaggttaaacccgacccgcccgaatatttttttttaaaaaattttgtaggttcaccggtttggtttcggacgagttgctcggattcgtgtcaaacccgctcgaaatgttcagtcctacctgacgctggacttgctgatgaaattgaaatgagtgtacttagtgaggtacttggtgaaaggcgtggtcataatcgtggagtggggcgaaaattaaaggggcaatcttcgtcgcggaacacacaacctactccgacttaagatatgcctgtggatccaagagtggagcaaaaatttgaaaaatttaccagactattgttgtggatgtctcaaaggttgggacctgatgtttgtctacctactgatgaggagctgtccggaatggcaatgcctcaaatgtttggaggagggtctgctttatcttcatagcctgggacttcgcaatatcaccaagcccagcagtcgcatccttttatgtatcctttgtcatcacctccgcaaatgtccccttttccttggatgccatcgccgatgtcgcaaatgcaagtgatgaacatgcagtagacaccgcaaacacaacagatgcaatcgacacaatagatgcaacaacatccaccaaaaatgtagcagatgccatcaatgcagcagacatcacaactgcagcagcattcaccacaaatgcagcaaaggccatcgatgcaacaaacatcacaaatgcatcagtcttccatgcaacaaatggcatcgatgcagcaaactctatatagaagcagcaggcttccatgcaacatatgtcatcgatgcagcaaacaccacagatgcagcaaccttccatgtagacaccacatttacaaccatcttccatgcaacacacaccacatgtacagcagatgcagtagatgacacatatgcagcagacaccgcatacgccttcaatgccattgatgcagcatatagcaccaacgtctcaaatgcaaccattgtcatcgatgcagcagatgtctcacataca

SEQ ID NO: 248726 - DNA, 932 bp, Cannabis indica
tgtttgctttctctctctcgtctcgtatatgcagattttttagttcccacttcccaaaatcatttaggaaaaaaaaaagaaaacgcattttttggactataaaagaagagagaaccgacctaaagagaatgtgatggccagttgctgagttatattattgcctaactcactgagtgtgtcattgccctttataagagaaaattaaaattaaaaacacaactgagactcggtctttgtcttcccctcaacctgatcacccctcaacctgatcaccgcatactcatatacattggtttgcttttcttatcgaatttgtcttctgggttttgtttgctttcttgttttaaattctgggccattgttttgtttcttctttctaattcatgcttcgttagccagtttctcgttttaaattctgagcactagagttagatccaaacaaaggcgtttaaagtgggtttgttgttggttgtagtctgtctttatgttaatttgttttctgggcgtttttgttttatggttgatcctatatttaagtttttgatatggtgggaatttttgttttttgtattgaaacttttttgttaaaggttggggttgcgagtgtatgtgattcttgttttgatcaaaactcacgctttctatccgtatgcattttttttttttttgtggttctaagataaaaaatgtgatgccaaagtttaatggatatacaatgtgtgtgattgagtttggataatggatatcctatggcaacttcttgacaaaaaattatagtcaaggatcgtataggacaaattgcagacaataacgtgtgaatttgaaataattgttgcgtttataaacaccaaggtatgaccaattaatgaaactaaacttaatgagaagtggcttggtgaacttttagacgacaaagcaaattagtaaaagtt

SEQ ID NO: 248727 - DNA, 2090 bp, Cannabis indica
atccacaggtgtggatcctgcactacaaaacccaggaaacacaagggttccgccagtctttaatcccggacagccatcaactacgggtcgcggtgtgacgactcctgtggatgagattgcgcctggtgtgcaagagactgggaataccagttcagcagccgaccagggcgttcatagtacaaccattccacccgccaccaatattcaaacaaccattggagatgacactgagatccagaacctccctactgctcttggactcatgcagggtcataccaacaccctacatcatgatcaggaggaactccgcactgcggtaaatctcgtgtttgaagagcagaggtgcatgtttcccgaatggagggacaaagagatggaagcgttaagggctcatcatgcagtcgttgacaattgtagtcggcaagccactgtgctgatacgaaaagcctatcaatctatcgggcataagccttcaaatgtcatcccctagggtgaaacagacaaagatcccgcgatgaatacttcccaaactataaatggtcagccgtcaaatccccggttacaggttccgcctgtgggcccagtggtaggtgggcagactttgtctagtaattcatcaggagaagtcataccaaataattccaaccaggttaatggttctggtcagcacattagccaaaccaaccaatcactgagacagccaggcgcttccatattcgataggttggggacgactcatgatgtcaaaaacgatctgaataggaggagaggagtagacgatcagcttgacatgttgatcgtgcagccccgaacctgcgctcaaattctcgctcagaaagatactgacgtgactcagatcggctaaaatgtcgaacaggttagtccagctgtgcaggcacaacttgatgaactaaagagtatgctccaaggcatggcctgttagaggaacaatgatctcgagttggaccgagcacgtggaacccctttctcctccgagatcaatcttctggagttgccccacaagtttaaaatgtcaacctggaagatgtacactggtaaggaagatccattatcccaccttaagtatttcgagatgcaaatggatctgcaaggagtacgaggagacgtatgttgcagaatttttcttgccaccctctcggaagccgcctagcaatggtatttcaagctggcacctggaaggttaaactcatggaaagctttctcctcagagttccatgcacaattttcctcatcttgccaacttccgttgcacctgggagacctggttgaagtcaagcaaagaccaagcgagcctctccgagcctacatcagcagattcatgacggaggcgactaaggtttcacgagtaaccgaagacgaaaagttgtctgcgatactagggggtatcgaattccttggtgagctctggaaggacataaggaagaacggtccggtagactcaatgagcaattcaacgagcagaaggtgagcaaaaacctagcaagtcaaaagctctttccacttggaaatccgtccagctccaccattacccaagcaattcaagctcgaacggtaaatattccagcaacaataataggcaagggaatgggaaaaagggatatttaactggcaaaatcgaacaaggtccctgggagaatcaagccaagtataccgcatttaccatcttgactgaggatatataaagtgtttacatggccactcagtcactagccccatacaagaagcacgcacccatgaaaaaagatgtcagcaagagagacatgacaaagttttgtcaatttcatggagactacaggcacgacacctatgaatgcaacaatctaaagcgagaaattgaattcccataaggaaaaataacccgcatgtacaaaattatgtcaaggtcgatcagagtcagaggggtgataataaccaagacctgctacctccaccagtagatggacatctgcaagtcatcattggaggcccgcgcatagttggcgattcgagcaaagctcaggaaaggtatgcctgaacagcacagtacgagtaagaagaatgatcctcgccgtagaagaaaggaagcctaa

SEQ ID NO: 248728 - DNA, 1800 bp, Cannabis indica
ttgatctcagtcctgagatgattaagttctagcttaattgattgcacaagttctttgatttgttctttaccagcttacccgtaggactagcccatacttatatcttgagaattcagtaatgcaattgagtgggagtgttaattatagatatatataaacatctatagtttctatgtctattagaagtgaacgataatttcctctgagcttggctaaaggcaataaataatagaggactcatttcagtaattatattagtttcttgaaatattatttacaagtagctaagtattttaaggataaaatatattgaagggcaaaacagtaattttatcactactcaatgtaaactgtctatagaagatcaatgattgttgtttgaaataattgataattcatagtgtatctatatttaatatatagaatttctatgtaatcaagagtgtgcgatgctagattcatagtggagtcatgaggaataaataagctagaaaattcacttagtaaatttcaagatctgcttaatagggcttggttacataggcccatggtccccacactagatgagatatttaatattattttgtagtctcaataaattgatttatttacataagcccatagtcttatttatgaattttactaaaagaggagatatttgagaaaaaaaagagaatttagcatttatttattagttaagagattttggaggatctaattaacattaaatggtaattttgtttaataattaattgtaattgttaaatagataaaactagcatttaaacaattagaatagaaaaatgatatttttgaaaaaaaagaagataagtttcataaaagaaacaataaaatgataaaattcaaacccattgacctcaataataaattcggccaaggcttgaattttagactattctttttttaattctatttaattctaattataacactagtgaacactataaatataatatgatacctttttataacaattgtgacttaccttttgtcggacaagtagaattaaaaggagagctattatattatatataaaattttcgaaattttcttggtttttctcctcaaaatttcgtgctccttaatattgagtgattgttcacacatgtcaaaataatactctgcatagtgcaaaaggttgtattgctcgtttgtcgtctgaaggagaatccaggttcagatttgcgacaggaaagatcaagagttagagatctgaacggatagagtcatatcatttcgctacaatcaatgtaaggttttcttaactttatgtgtttatttatcgttttaggattgctcatatttagaatgttagattatagttattaatcaaacatacatgattagtaacactacaaaaaatcttatttttagtcacaacaaaatttgtgactaaaattaaagtgaaaaagctgtgactaattataaatcatcattcctatattgtgattaaaaagcccgtgactaaaagtattagttacagaaattataatttattgtgattaaatgtgtttttagtcacaatacttgttgtgactaaacctaaattatagttaccacttgtatctaaatactatgttttagtcacatgtaactttttgttgtgactaaaatattatcactaaagataattttttttgtagtgtaaattaagatcttggtaaataatatcaaatttagtatatagttagctcattaatcgtaataaaaatataaaaatatagaatacaaatttaaattcgtataagaaaacaagttagtgtgtttgagaaaataaga

SEQ ID NO: 248729 - DNA, 956 bp, Cannabis indica
tatataaaaaattgaaaaatgtacaacaaaagagtgtattgatgcattcttatttatttttgtatttgatttttttttcatcaaatatatttttttttctaattgtgtatattgtagttatttaaattgaaattaaactatgaaaaatttacatatatatttgtgtttatatgattatatatataatctaaaatctaattattataatttatatttgaattgcagatatgaagaaatattatccaatagttccaaatttatcacatcaaattgaaccagaggttgatagaagttcaaagagacattgtaattcaataaatatggcaaatcttccaactaatcctggattacgagctccgatttctgattataatcccaatattcaagatgaaattcgaagacattatttacaacaagggccttgtcaaccaagaagtcacaattttcctcctactttctttggaaaacaaaagcgttggttcaacattgcatggtttgatcaatttcctacttggctagaatatagcattagtaaaaattctgcgttttgtctatattgctatatttttaaaccaaacaatggaaaacaaggtggcggtcaaacatttgttagtaaaggtttttcaaattggaaggacagaaaaagatttattgttcatgtaggagatcacaatagtgatcattatcaaagttataagaagtgtgaagatttgatgaatgaaaaacaacaaattcaacatatatttttgaagaagaataacaatgatcgaaatagctactatgttcgattaactgcatcggttgacagtattcgatttcttctacgacaaggtcttgcatttcgtggtcatgatgagtcccaaaattctactaatcaaggtaactttcttgaacttttaactttttggctgatcataatgaagaaattagagctgttgctttgaagaatgctcctg

SEQ ID NO: 248730 - DNA, 1224 bp, Cannabis indica
gttcagaattataccagaattttcagtagaagaacttggatcatttacaggtatgttaccatgttggctcgcaagtagattgagtaattgttgatattgagtagcacttagttgaggcaaaagggtgtgtgaatcttcgttcttggtgctggtgtctccactggtgtggacttgatttgctgcagcatcctttggtttgttaggcttgttgtacccaggagggtatccatgaatcttgtaacatctttctatggtgtgtccatggatgttacaatgggtgcaaaagggcctccctttcttggatgtttgaggttttgtgccttgttgatcagtcttgtttttgtcaccttggaaagcaaaggcatggctagtattgatatcggtttctgcagaagggttccctttttgattttcttcctgagtaacgagatggaaaactcgattgatttctgggagaggatccatcagaagaatgcttccacggacttgagagaatttgtcggatagtcccataagaaaagacataatgtattccatatggtgatgttcttggagtttcttaactcctccacaggtgcatccgttgcaagtgcaacttggtctgtaattggccaattcctcccaaatttttttcaacttggtaaagtacatcccaatgttgagtgtttcttgcttaagattcatcaagttcttccttaggttatagatatgaggcccattcctctgatgaaaacgaactttaaggtcttcccaaatgtttgcagctgattcattgtacaagatgctggaggaaatttcttttgaaacagaattcaatatccaggagataatgatattgttgttccttacccaagcattatacagagtataatcggagggggatggttttgggatagacccatcaagaaatcctaatttgtttttgacagatatagagagctgcatagctctactccaagaaacataattatcttgtctagtaagaagttgagagacaagaatgttacctgggttatcgccacggtgaatgtaatacggattggttggatcttcgagagggttttttgagttgatgaactgtaattcttgattgccgtgtccaatggaggttgaaggacttcgagcagttcttggtgtttgatcttcaccttccatctgggtttcagcttggttttcgctcgacatgacacaaaacaagaaaagaacacagcggacagagtatcg

SEQ ID NO: 248731 - DNA, 583 bp, Cannabis indica
tttatttttatttgataggtatactttttaggaatatgaatcgaaagaaaaaaattaaaacaattgaagacataattaatttttaaaataaatgaaatcgctttgttcatcagattattttaaaattaatttaaaaaaagtaaacatagtttaatgaaatatattcaagataaataatatttttatttttcttatttatttaaataaagaaattaacaaaaatagcaatgttaaggtatgagttggatgtttcttgttatccttatgatgagcaagttaaatttataagtttattttattagttactaatcagttatatatttaatttaaatctattaatatttaatttattaccttcgcaattatctcaaaacttaatttatatcaccttcataattatttaaaacctaatttattcagtttcacgttattatttatcctttcaactctaattaatttatgaaattaatttacttttatttaatttaaattttattgatatcatatagttttatacatatatatttccattttatagttttagatacacttgatcttaggtgttttgaatatttaaattttt

SEQ ID NO: 248732 - DNA, 2083 bp, Cannabis indica
aagcaagctatctcaggatcaaaatctatagagatacaaagcggagaatattagaacttttgcacgcaacttattttgataaggtgctcaaaagattcttaatggagaattctaagaaaggacaacgtctagacatgaaattattctatgtaaggatcaatgtccaaagactcatcaagaggaagagggaatgagaaagtatccttatgcatcaacaatttggagcttgatgtatgcaatattgtgtacatgacctgacatatactacattgtagggattgttagttgttatcaatctaatatatgtttggaacactagattgttgtaaaatacattctcaagtatcttcgaagaacgagagatctcatgcttatatattacagtggagagttgaatcctactagatatactgattatgattttcaatcagacaaagatagtcaaaaattgacatcagggtcagtatttactcttggtgaaggagaagtagtttggagaaacattaagcaaagtcgaatatatagtagcttgcgaagcagctaaggaagcaatttagctgaagaaattctacactactctggaagtagttctagaagtagaaaaaccagtagtgctctattgtgacaatagtggagcggtggccaactccaaggaaccaagaggccaacaatagaggcaagcacattgagaggatgtacaatctaataagaaatatagtagagagaggtgatgtgatggtcttgaagatcacatcgaaacataatttggtagatccatctacaaaaatgctactagggaaatcttttatgggtcatgttactaatatgtgattaatggagatgcttagtttgattttagggcaagtggaaggttagggtttatgctctgaaaagcttgtaaagatatttctaattattaataaagagttgaatatattgatatatgcttgaatgtgaaattattaatattcattattgaataatttatattaaatatcttaaatttcttatttatatatgaggttgtagcttgtagctgtacatagaactaagaccacttaactatgattataatcatcaacatattaaagatatagaatctttaatcgatggttgctagtacggctcactgatgcccattctttggtgcaagtaatctttagtcggattacgaatatagcatgacatcaaagtgaatgtgctgtgtataatagatattatatatgacaaggaccaatatatttaatggtactaaatgttaaagaagtaatcagtagagtaaaatggtaatttgatcaaaactaattacgaatcaacacatgaagtactaatcactagaattgattatattaatggatactacaataaaaatcactaaataaagttctataattacttcaattccatatttttagtggagtaattatggaattaataaacaatgattatttggttgatgagactcaataaataatctagtttattggagcttagaattataggtccatggtccccaaatcaccaccttgaaatattgtcaaatgaaggaataaatagtagtatactatcgttcagaaaaaaaatattttgaattgaaaaaatagtaattatttatttttgtaataaataaataatttttcaaattaattaaataggaaaaagataaaaattgttaagacaagatttattgagacaaaagttgtcaggacaaaggacaccattcttgtcataaactgacaaaggtaggcgcctactatgtagctgtccctatggagtttgtctttttggattaattgattcaattagataaatatttgaatttaaaaagtggttaaagatattttaaagtggttgagatattctctcaagtagttaggagattccctcataaatgtgagtaaccgaatttgattatagattttgatttgtttaaataatttaatatgatttaattaaaaggttctaactactataaatagaagcctgatttgagaaattataacacttactttgaaatatatattttttgaaatatagagagaaaagaaagaaataatttttctctcaattgttcttgctcatg

SEQ ID NO: 248733 - DNA, 652 bp, Cannabis indica
atatgatgattgacgagttaaccatatcagtaatatagttggcgaaagcctacttagccattttatgagctctaaagttacaagtttgaaaataaaagaaaaattacaacttaaaaataaattagagagcatattttattggtgaatatagttaccaataccccaactggatttggttccatttagcgtcttaataactaggggtgttcatcaaaccacttggaccgcaccaaaaaaaaatacggtttaaaattctttgaagtgcagtcgcggtttgaattttttctaaactgcgcggtgcgatgcagtttgtagttttgaattgttaatatgcggtttaaatcgcaccgcacattataaaaatactaatttttatatttatttaagtttaatatgtgaacgtccagcccaaagctcactaattattgtattgttaaaacttaaatttttttcatatttattttcaagccttatagtatttttgagaagtgttgctgaagctttgttgtatttgtgatagtttaattatttagtgatagtctaaactgcaaaaaccacagcattgcaccgcaccattttttggggtgcagttttcggagttttttagttttgtagtgcgagtgcagttcgggaaattggaaaaactgcatgt

SEQ ID NO: 248734 - DNA, 579 bp, Cannabis indica
ctacattgttaatagtatttaagaaaagtagttagttgagttaacatatttgaattagcttaatatattatgggatattaattttttaaaggtaatttttattcgaaaatgcttagtgcatatatatcaagatatgtactcgcgcgtttttaaggaaaaaaaaaaaaaaaattaaccattaatgtgttttctgtgaaaacaaaaaaaaattaaccattaatgatagcgaatacttaactgtaaggtccacaacccaaatataatttttaacagatcgatgataaataaaaataaaaaattgtgttagtaaactagagtttgtacgtagtggacgtaagagcactgatgaaggcactaatacaaatataagaatatataataaaattgagatgtgaaaaggaaacatgacaaacacagatggaattaataggtagtttgtaaaattatgtataccaatatcaattatcctcagatgtgtgattgatataaaacaaaaaaaaaaaaaatggtcttagtatcctataagtaccaatggccctattcctattaattaccatcatacgtgtatatatattatat

SEQ ID NO: 248735 - DNA, 603 bp, Cannabis indica
tgggtccatgggtcgcggtggtcgtggaggaaagggtcttcagtctatgggtgacggtggtcgtcagtcgctatggtcgtggttcgtgaagaagggtgggggttgggacacctgaagtctctagaggaaaaattgggggggggggggggtttgagttttcagtttagagaagatgaagatgaagagaccgagagagggaaagaggatagagagatagtggttgtttgaaaatttggaagatattttgggaaaaagaaaatgtagacctatttggttaatatttatatataggtttagtagattaatttgagaataatatgcatgaaaaatctaattttttttttctttttttttttaaaataaatccttcgattatgaaatcagaatacaaaaaatgaccaatcacacttttagaaattattcattaagttaaataataaattatagaaattaacatttaaatatttaattttaaaatcagaatagttatttgagaaagaacaaattattattattattttatttaatggagaagattagttttttttttatgatttatttccttgttttttcaataacatatctgtatggctagatttttat

SEQ ID NO: 248736 - DNA, 797 bp, Cannabis indica
aatatctaaatgctctagggttagttgtggtgaactttaattttaattctagtggtggatattcaagttggatggttgttatggtcatttaaatgagttgatatgctgctgaacttgatgtggtttattttggttaatgatgttctgttgatttgtgaaatgtgtagcagatatttttaagcttattgttgtgagattgagccatggcaaccaacaaatccaagtctcgtaagcgtaaagctccggccaacacctcgcccactcctcaaccgcaacaaccaatcaacacaatcccaccaacccttgccttgccttcccccactccaataccaaccattcccgaacctacacactcaccaccccgcactcgtacccgtaaagtctcatcacctaaacccaaagctccaaccgccaaaacagctccctctacctccaaggcccaaccaaagcctaagcgcaccacttccatagtcccaccacctacacataaccccagtactagtcccaaagccaaagccaaccccgtccgccatcaagagcggtttgagatattgcaaacccgcaaccagttggccgagcgaggctttctccctgccccagaggctttacctgcctatattacaaatttgattgcggagcacaagtgggagatattttgtgcaattcccaagcctgttgtggcctctattgtccctgcaatttatgttgcacttgatccaaagtatcctgatgtcgtttgggtgaagggtcagagtgtccccttttctcctgatgtgattaacgacttatatggattg

SEQ ID NO: 248737 - DNA, 546 bp, Cannabis indica
tgtttgtggttaatgaagatttttctacttcttgatacaaaaaaaaaaaaaacaatcacataacaaaacataacactacaaaagcagtaaaaaacattgaaaattatacacaaaacttacgatgtgacctgctcgggtaaaccatccacaacaacaatcaggaacggttccatcgtgctaaacttagattcattgggaaggcctctaaagtctaacatagagaaataatagggtaaaataacagaaaaaggcttgcaagcctctttggcagctgtcatataccttctagaatgcaatgaattgtacagatatatccactgctcagatatgtttaaacgaccacaaatccaatgatcctgtaatttgacattaataggcataacaacatgatcaaccaagtgccaaggagtggcacataatattttaccaccacggatgtactgggccacattatgagaaacacagatatatcattgtttttctcaacaaacttatcatacaagtttgttatgatagaacaaaaagaaaatcagttgtggtgacttt

SEQ ID NO: 248738 - DNA, 683 bp, Cannabis indica
gaaacaacactgtttggaactcttaacagtcttcaattgaagaagtggtgtgaacagcatctcttaactttgtgtcttggaataatgctcagaagaagtcctcaatctctcctactgcccacgttcaacaagggagatttattgagcattggactaaactgaatacaactttcatcaaagttaatgttgatggtaccaatttttcagatgaggtttgtgacgggtttggattagtggctagagatagcttcggcaatgtattggaagcagtataaatttgtagaaatggagcttggagcccgttaatggtggaagcaatgggacttaaggaagctctaagttggataaagagaaaggattggcaccatgtcattattgagtctgactgccttacgcttatcaatgatattgagaatgttaaaactttagcttctccttatggctttgttttacaagattgtagagggttgttagcctctttattttctattgattgttgttttgttaaatggtctgctaatgggcttgcgcatgctttggcgcaaacttctctgtttaaggctgatcgtgttcttagtggggattttttacccacttgttactcttccatatatagctttggaggattttgtaacgccctgatattttgccttactttacacaaaaataccattttaaatgca

SEQ ID NO: 248739 - DNA, 933 bp, Cannabis indica
caaaagtcaacccgaaagtcagctctcgaagaaaattcaactttggatcaaaacatgcaaataaatctaggaagctcatctatattaagaatacccacaatcaaatggtataagtttactttagtcttgttaaagtgatttgcatagtacactagggtttttaagttcaaattttggcccactcactaacttgtgcgacaagttttctcacctaatggttcaaattttttttttgatttaactttttaagtcacatttcatttaactaagagaataaaattagaatttttgaaatcgaataatcgagtaaagagttatgcacgttttagagccgaaaaatacaggatttgtctttgccttgttttcgatctacaatttggccatttttcctagaaacggtagtctgtttagaaaacggtaggctgtttttcctaggattctttttgaaaatcgtgctaacggctatatttcaccccaacactatataaacttgaattttactcaaaaatagtagttggctgagcatttatatcatatacctaacatattcaagtgagtttattaatgagctcccaagtctaaaattcaacaaacacttttcacacactttgagccaaaatttgtatttaattcttttaagtttgcttgctaatcactctaggtttgtctgtatcatcatacttctaaaatgaatttgcttataatttcaaacatatttccatattgtgattgaggtgaggttggcaccggtattgtaaacaattcggttagagtgagattgccactacaacaattcgagaaagaggttgatagtccttggcggtgcaatactattgtaagagatttagaaacactttggtaaaaatttcccagttgtaagggttactcaagcccgtgaacttggctcgatattggaactcaaagctaggtcca

SEQ ID NO: 248740 - DNA, 773 bp, Cannabis indica
aaaattatatattatttttaaattactaaaaaatttatataaatattttaaaaaattaatatttatattaaattagtgtttaagataaacaattttatattattcaagtatttttatcttactattttattatatatttatgatatattcttaattatatatgatgtattattttttttttctacgaattatttatttttatttatttattattatatattttaattttaatttattattatatatttttatttaatttaagtttttctttttctaaaaggaaataaataaaatagtccagtccattcttaaaccaaacacaagattactttcagcataatccaatcttgtccagtccagtccaatcctgcgtaccaaacaagccctaggattaagagaatggattagcaaaaccctagttaattatgtattattgtgggattatattattatataatttaatatgtgagaatttatatgatttatgacatgttgagaccccgttggtaagctaggggcattttggtaattttgacccgagaagggtaaaatcctgaaattaatatatttacgtgcttatgggactatattattatatagtatacttgttttgtcctttgtaggtgttttcttacaagttggcgcggtatagtcacaattgggtattttaggcagaaccatgactatgttgtccttgttttcatatttgtgatatattggtcttggggggtattttggtcatgtgaccaattattctttttttgaacaaaaac

SEQ ID NO: 248741 - DNA, 633 bp, Cannabis indica
tgctccttctgcctctgtttcttgggaccctaatctattatggttattatgaaggaagtttgcactggtgaaacgactgtggaagttgacactatcgactcgggcacaagtaacattatgcaacgggatagtaatatggaagtggaaatgatggaactttttgaagaccttactcttgaagatattgtggccaaaaaagcttgtgtggggaaggtgatagggtgcaaaacgatggctgcttcagttgtgaaaaagatcttactggggatatggaaccttgacaaggctggaaaatgaagaagtttgaagagggtgtgcttggttttttctttgactcagaggaggactgccaaatggttatggagaggagaccatggttggtcaatggagtccttctcaatctgcgaccctggccgattgaaggggaggtatgtctggctgagtttgaggtggcacgtttttgggtggagttccacggtttgcccacgagatgtctctcggaagataatgcccctatactagctaagaaagttggaactttcattaaaactgatgggagaagaaaagaagatgtggtccggcgagggttcctccgatgttggatagatgtttggatatctcatccttttccag

SEQ ID NO: 248742 - DNA, 918 bp, Cannabis indica
tgttttttccatgtgagtttctccatgagtgtttgtgtttctccatgtgagttttaggttttctttaagagatttgagaggatttcgatgtactgttatgagttgagttttttagaactgagtaattctgattatttataactctattcttgaaagcaataaagaagaaagtttagtacttattcacccatcgagtacactcatttgagttcgaaccacataatttgagttttttgtttctagttccatatgtggaattcgtagtttcatctaacaatactattctaacttttgttcattttagcatcagattttaattttgaatcttgtttgattcattaatcggtgtgatttgtctttaatcacaacaaaaagtgactagaaacaatgattatgtatctcactgaacaaagaataaagctccaattcattttaaaactcaaagaaaggttggtgacagtttccatataaatatgtatgttgtttttacgtctcaccgtatttttgttaaatttttcttatttttgtacaattgtaaaaatttcccttcaaatttttggggtgtactaacgcaaatgtcaattgaggcccaagcccaaaccaggcaatcagcaatcgctataaaaacctagtgagtttcttacgcctctttcctccattttgtctttctatatatactaacgaacataagcttgtttattaaatcagcgactcatctacagcattcgcctcttatgctgctgttgtttaaagtctatctatttttatttatttcaatttcattcaattttcattcgtcttatatgctgctgctgttgttctttggaagcaagagtgtggtgatgatacaattttgtggactagagtttctgatctgggaaatctcagaatctgattacaaacccttggctgtctgag

SEQ ID NO: 248743 - DNA, 814 bp, Cannabis indica
attgtaattaacatttttatgagtataacaatgtaatgagaaacttgtgagcaagttattcattgcaccattaacccattttaccattcatttttagcaccaatgcaatgcccatcttagaatcaacattaatgactttcatgtttaatattagttccaatataaaccttttgacttctatctcccactttttaacaaccaattgagctgataacttagcatttttctatttataaaacaaaaaactatctcctgtgctggctgcaatcaaaccagtaaggacattacttatactcttcttttttcattgtagagttgaccataggaagagaagagatgaaggtcacatgtccatgagtgacctcctcccaagtttattaatagccctcacttagttatggcggaggaaaaccgtggttacatactagcaaattacacaacaacgatataaagaaaacacctgaaacatcataaataataagagaaaaaaccagacaatagtaaaacacaaaacaagtgtaagccaaccatgaatattaattattataacaaaccaaattacaatctaacacgaacactgcttagtcaggaaagactttttagaaactttactgaccaacaacaccttctcagttctcacacaatcacacattattattctaatttatatgataagaaaattgttattattcttttttatctaacctgtaaaagctagaaaagtaaaaaagctttaactgagaaaaaatatggtgtaaattctaatatttaaagagaaacagcaaaaacatataaaagaattgtgaaattggaa

SEQ ID NO: 248744 - DNA, 711 bp, Cannabis indica
gagctcgaagtcaatgtattatcagtatttaccctattagtaagaaaagttgacgtatgaaaaccctagctctataaatataagaaaaacccatttgtgtagagggttagaatctgattcctggagtgcttagacaaattctaaggttcaaacacttgacaaaatacttgtgtacacatatcaaatatattgacttggattagaggttattaatccttgaaccacgtaaaaactcttgtctcattctttgtttttaatctatttctttagctttaatatattttgttagtttaatagaatattttaataatataaaaatattctgttaaatttaacgttgttagtagggttagtttctaaaatatatataaatattagtattatttattttagattactttaaatatttatatataaatagtaatatattatttgtaactttattattttttattattacttttaatattaggagtatgttcaattttaatatttttaaattttataattattttttaaaattttaaaactttaaatattttttttaagtggtttctattttatttataaatttttaaaatacacataacaaaataaaaactaaagatataacaaagtatacgtgcaatattatacgtaacaataacttagtatatacaaatagcacgaaagcactacaataatatccaaatcaattcatcttctatgtta

SEQ ID NO: 248745 - DNA, 612 bp, Cannabis indica
gttttatgcaattttatgcttttacttttaatattttgcaagtttagtattgaagaaaaatggatcaaacatgagaaacaagaaggttaattaaataaagtcttgtcgctaaagtatcatgaaattaatctaagaaagaaatctaacagatctagtgcgattggaccttctaatgctaaggaattgaaaaatatggagtagcgcctcaacatgagaattcaatgtcatggcgctaaaaaacaaaatttggcagcaaggtcatatttgacaagtttataggcgcgcctcaacattgggatccaatgttgaggcattaaaactattaattcttctctgctaaaaattttgcttcaagcgtcgcgacactaccttgtagtgtagcggtgttcctaaaagtcctaaaattcctaagcatgcttaaaagacacgagctatgacactcaataagtaatatcgtggctcgcctgttttaagctgtgaaaattaggggttttaacttctctagagctatttaagtgatctttttcggaactttggaagacgcaattagagagcagaagcaacctacagaagtcttttcaacaacgttttttttcgacgattccttttgtt

SEQ ID NO: 248746 - DNA, 3010 bp, Cannabis indica
ttcgttttattttgagaatgagcagataattagagtttatttatgaaatagacttattattattattttgaaagttatggagatatattttaattctcggtgtgctaattatggtaattatgaattttatatctttcatatttttatgctcgataacagtagaatgcaacgtttggcctatagagtcagtagataagattttgtctcttagttttagcgggacattgttgttggacatttagaatgttagattatttttggggttatggtttaagaccattttatccttatgtatgttggtcaccttatatttagcaagagggtagttatgtcattttaccctacttttgtctcttatggttagtggattattactaatccttttattttaattttatgctgaaaagtgagttaccttattgataacacttacaagataaaacacaaactaagaaaaaatcaaacctaatcctttctctctctcccttttgctcggccacacctagaacccaagagaaaccaacattttgcttcttcaatttagatcagttcttgaggttttatgttgatgtagttcaagtggtaagatctttggtccatttcttttaagtttattcaagaaaatttaggtttttgtgcataaattttgagttagggctgttgtacaaattgcttaggtttaattctgttttttgaagtttttgtatgctagattgagtgattttaaattttgcttgttatggagcttaggtaaggtttgagcttttgagctcaaacttttccctttaatggaagatttcattttaggggctttataattgtttttattgcttgaaatatatttgttgtggcctaattaggtggtttgaagagtttgatacgatttgtggtaaaattgagttgttagtgaagtttttagggttttctacaagaaaccaattaactggttgggcagccttgtagaatcgattaactgtttccccaggcaaaaccctaaaaaccaattatctattttggaaatctggcttactggttatagtagttttggaatcctagttttttgtgttttaggatatttagtatattttcacactatccatcgatagggaaacttttaattttgattttatgttcccgaaaagtaatttagcgtatcacttatcaattttgacaaatgttgtgacttaggggcctataaatcatcgagcagcaatttctattcaagttgatcaacacacctgaattcagaatcaaggtaagattagtataataatatgcatatatgattacatatttagcgtgaatatttatgaatgcctgttagataacatatcaataatagcagtattagtgtacatagagttacaatgaataccaacaaatatatgtttggcaattgattgatgctattacatcagtacgattagattactgagtataggctgatattgtggtcaatagtattgtcgtacgaacgttttagactcagtactcgtgggatgcgggataatattatgattgggtgcatgagggccttataattcgatttaagcttatgttatgattatacttttcttacggagtctatcgactcaaagttactgtttacatgtgtaggtaggggcaaggctaaggctgagtaacattgagtgcaggcagataaagattgtacatattttagaactggagtgttcgatcttcggggtagcaggctttattttgacagttgtaaggcgaaaacttttgttgtgatatgttttgtaaaatagttgtaattgtttaaagacgggatcccgaattatgtaaagtttatttatgtaagtttaaagttaataatgaaaagtgttaatcaaacacaattttcaataaactcgttggttagcaacagatcgaacagttagtatttaaatcacgataacacgcctaatctagtagggtgttacacaacctatggggcgaaggtgatccttacgcttggggaccacgagatattgactgatggcatgcatgcgtcttctttgtgtactgttgtgtcagaatagtggtcgtcaaataaaatggggggtttcctattggtggtgtacacacacttagggtctaacataagagacaatccctaatttagtgtcaaagggctgccatgtcatcctggactaggtttccgggatgcctcttggaatacccctccaaatgtatcccagatgctcatctgaaaggtctcagctgcttctttttattcgtgcaagatgcccttctggatattcagagagatctggtctcagatgtaaatatcttaagcctcggatgggcatgaggcccattcttctgtgtaggttgtgcccgttttcttggtagggattttgatagagtcttagatggtgaattttgaattggaaatgccacgtgacctcttacaaaaatacgaataaaaatacttatgatcaacacaaaaatctatttaaacacatattttattatgatgaaagactatatatactataataatatttatatataatttttttttcatcaatttactttgttaatttttttgggatttttttttatattttaaagtaattttttttttgtattctcacgaatattcatatagcaactcacataacaaccaatggagcaacctaaatcccaattaaaaaccacatagtaatctacatagaaattaccagagcaacccaaacaataaattttaaaaaaaggttagaaaataatatataggataatttcccattgttgttcttctactccaatctctaaggtcctctctagcgcatactatatttggtgctaaaattcactttatcattttaaatgtttagctatagtacacaccaaatattatattatatttaataaattttaaatatatagatatattaggaaaattttataggtgctcttcctaaaagaaaagtattgatacatcctcgatctgtttcaacataaaagagatttttttaacatttttttttcttatactgttattaag

SEQ ID NO: 248747 - DNA, 603 bp, Cannabis indica
gggaagctaaggtaaagcaaggtagatctctgcatacctctaagtaatgaccttcttccagattagtgaagtttctccgtgactttgtttaattgaagggttttaatttatgagatggtgagattattgcttctttttatgccacatgtcacttatttagaaatatgaataacaattgctattaggttttagtgatgtatagcaaaactacaagatgacattttaaaaatagctaacgttatttcgtaaaaatcattatatttaattatgtaggatcagatatttaattataataataacaatgtcacagttcaagtggtgctaagtacctagttgataatttatagtcaaaatgtgactaaaaaaagctgactataattattaagctattagtttatgattaattttcaaaacttttaagttgttggacatttagaaagtaataaatgtagggatatattcttatatagtcttacactatataataaaaatgatacgttgtagtaaattttacaaaattttaaatattatatactccctatcgatcatagattttcacatatctatctattctatataaagtgtgcctatataactgaaatt

SEQ ID NO: 248748 - DNA, 922 bp, Cannabis indica
tgtggggtttatagcctagtgcaggttctgttattactgttttgacagtttgttataactgttagttttcagttatgttagttaagtcagttgtactcttattttttctcagcctatgtatattaaggctttagttttgtaattctattttttgagagcagtgagacggagagagaaattgtgagctgagagtactttgtaaagggcatgagagattgatcttatgactctcgagtgatgacttgagtgggagcaagactccattgtgtactgagttctggtgttcaaatcagttgtaatctctgagttttactctaaaagaaatcaaggcaaagcctcaaggcagttcctcccaaggattagatccaagtgttattcacttgtgattgaaccttgtaatccttgtgttcttattgattttactgctgcattactattttcttgttgctggtttactgtcaattaacttactggtttatgttaattgtttttctagtttatttgatctgttttaatgttcttgaatggtgattgaatcaccacaattttaaaataaattttattttacaataggggattccccgcccgtccccgctccattagagaattccccgtcccgtccccgatggggaataagtgggaatggaatggggatggggattaaaatccttaacagggatgtgggcggagagagcactccccgctaatttcccgcctcgtgtgcatccctaatgatagggtagagatgtatatatatatagatatattattgtcatttatgaataattttctgattcaccattatgttttataattataatgggttacggagagataaaatggtaaatagtggcataagtacccaaagttttaagtttgtaagtggcataattccaatgtttatttttagcgttataagtac

SEQ ID NO: 248749 - DNA, 698 bp, Cannabis indica
tttatttttatatataattaacattaaaaagatataaataaaaaaattatttttatttttattttttataatactatataagatttctgtactcaattaaatagtgtaattcaattaacgggaatatgattacatattaccctacacaaccaaacagagtttacacatttctctataattatattctccttcataatatttcttataatcaaattattttgaacattttattccaaacgccccataagagcactctcaacagcttctctatcctatcttttaaaatacatcactaaaacacaacttttttttttatatattttaatatattttatttattaaatatataatattaatatatatacacatatattctcatacaaaataattattaaaacccaaaacaaataataaaatttgtatttagagcaatgaatagtattctataatgtagaacgtgaatagtaaattttaaagaaactttaaaatgaaagagtttagagcatatgatgtagtgtgtttttagtatggttctttaaatatcttaagcttctttattttggaaaagttgttgtgagtgctctaaattatggaactaaaaagaacaacataaataaaaataatattaagtaaaataacaatttaataaacattaagtgtgattttatttaagtttttttttttttgaaaaaaagtgt

SEQ ID NO: 248750 - DNA, 551 bp, Cannabis indica
atacctacaaacttattgtatcaggaccaccaacagatctttgtttttatttttatataacgatttcttttttttaaaaaaaaacaaaataaacaaaattacaatcaactaatacataatataatatcaaaaaaacattaactgacgattaacattccaagtagcaacgttttatcactgatatcgatccatattccttcatatcatttataaggcattaattttttcttcaaataacaactacatagtgattgttatactactactactataatttattatccatttggtgataacaagtcaatactgaatactgataggaatgaaattaagaattttgatttattttaaaactaggcaattaagccgcgcttcgcgcggtcttataaatttttatttttattattattgtgattacaaaatattagtactgaataagtggtatattatacgatatactattattattttctcaaaatcatgtattttttgaatgaaacaatttgcaataatgaagacattatacactatacatatactgttatacaata

SEQ ID NO: 248751 - DNA, 762 bp, Cannabis indica
tacatcatatttaaactaactaatggagataaatagtaccattcgaaataaataaataaaataaaacagaatcgaagaagagaagccacaaaattatttagagggacaacgaaatctctgtataattaaaatatgaatactagtacgaaagatagacctgtagtttcctattcactccttagaatcctcataaccacacccgtaagaaaagccaatttatattgtatacacaggaacgaagaaaaaataagacgagtcagatacacaatttttctggaaccaaccctcacaagcagtgcccaaaattcatacctgtgagtaaagtaatgattgtttatcagcgcataaggtgatgaacccaagctcgacaacccaacgacctctgctaccaaccccgtatctatacgaattcctcttctccgataagtttgtggcagaagaaacccaatgaggtccacagagagatttgagtaactgaaagagatgttatagtagaagctaggctcctttgattgggctatgagaaaggaagatatgaaatttagaaggtaggttttctttggggggttttagtctgctagtgaagaaaccctaacaaaatgggtttgggcttatgtactgtgcttcgtaaaacaaatacaaaattggacttaggataaagcaaggctgcaagggctttttcaagaggaatttaccctcaatgtgagattttaacaaggctatttataaaaaaaaagagaaaattacactctatattctttt

SEQ ID NO: 248752 - DNA, 494 bp, Cannabis indica
aaaattcaagagaaaaaattgctaattagcctatttttcatgaaattagatgaattgaatatttatatattaattttaactttttggaagccttcaaaattatgagatctgaggcttaggactcggcttctccatcctctaatcgaccctagttcaatagtactatttagtgactagtggtatgattatcccagctatattaagaactttattataattgagttcattgttcaatgatattcttagttcttggctccttcaagctcttatttttttaaaaaataataataacaaaaaaatggagctttttcatttttacatttcaaatagttttttttttatatatatatatatttacagaattttacatagaaacttctattataactaattgaacaacttaaatcgcaaccaaaatctgtataacaacccacatataaattaccaaaaaaatcacttcagaaatccaaattgtaaatttgaaaaaaaaatta

SEQ ID NO: 248753 - DNA, 903 bp, Cannabis indica
ggcggacccccgccgctaaagcccaatgccggtggattacaggattattaccagcggactgttccgcccctaataatggtatttgttgtagtgacaccagcatcaccaaccattgattcaacacctacaacaaatcagaattcaagaaacaaaaacccacgtctcatgtgttctcactgtcaaaaacttggctactacaaagacaaaatgctatttcctccatggttttctccttggttatggaaattgaaaaccagttgaatcgagcaacaccaaaaaaatagatactgtttcatctaatcgtaatcctcagaatatgcaagtcttgacccccaatcttgatctttcccagtcccatcttaccacttctcaatgttaacaactcatttcaatgttggctcaacagttacaacctacaactgatgcctccacatcagttgacacaccaggtgtcaacaactttactggtaaaatcgatcctctttctttcaattcttggatcattgacaggggtgctaggcaccacgtttgccaaaactgtcaatttgccaaatggcacttcagttaagatagaaaatgttggaactgttgtaatcaactcaaatttgacactctttaatgttttagatgcccctgtattcaaatttaacttgctatatgttactgcactattggaatctacttctaattacatgtattttacttctaatgaatacttcattcagtgaccttctcggacattgaggatttggactgctaagagatagcaaactctattacatacaacaagacatcaactcggcttctcaaatttcaatttcttgtaatgtagaaacagatcacaaccaatggcacaattgtctcagtcatccttatgtaatgatttccaataagatcaataaa

SEQ ID NO: 248754 - DNA, 821 bp, Cannabis indica
agtattgtaatttgatggtagttagtttttttttttctttttagtaatcatatgatggagattcgaaacaaactaaaataaaaaaataactcttagagttttttaatttaggttttttttttttttttttcctaaattaagaattttaatagctgaatgaactaaataattgattaggacgtgtttcagcgtgcataggctaaaattaacgaggacattacatgcattggattaggttagtttttagcatggcctcgcttgttgtcaatcaatttaattaccttttctatattagtgatatgtgtaagtatgggagtacacagttgaaaaagacttaaatagattgattgctactacatatatcaacaaggtgtatcttgtttttcggtagtccatcatgaaagtgcgagtgaggacaaagcatgctgaaaacacttgtagtatactcgtgtataggagctattattctgtgggtgtaaaggcccaatggaagcttgaagcgaggacgttacaataatgcacccccttaaaagggatacaccgatacatctctatctattttagtatctaaaataatattctagtcaatttttttctcatggtcatgtaaattatagtcatttaagacatcctgcaaaattttaagaaattcataaaagtttaacacgccgaaaattgtgttcaaacagtatgttgcacgcgtgactattttattttatacacgtgtaaaatagactgtttgaatattatattgtatatttttcaaaattttgtaagatatcttaaatagttataacatacatgaatatgaaaaaaattag

SEQ ID NO: 248755 - DNA, 600 bp, Cannabis indica
tttgtcaatctttggactgtacacattgttcatatggaaaccttataattgtcacacatttatcaccacatgtatatgtgcactcaaaataagtataacctttctttgggcccatcaatacttacatgagaaatacacacacacaaacatctaacattcatcatgagcaatctacacaagagaggttgcttttgcgacatcatgtttcaatcaactcatttagaatgaaagataaattttaatattttagtatgccaaatttaaacttaaaataatacaaatatatatatatatttaatttggactggaatttttatcatgaacctcatatacacagatattatatataattatatctttccaatgcaactcatatataataataatagcccatatttaattatatatattagaaatgtataatatatatgtgcctataaacaaaaatcttaaaattaataataaatacctcatatataactatgaatatttaaccaaaactatgaaatgaaaagttttaattaaaaagaatcacacccactagtaatggtgaacttaatccaaaagtctaaaagactcaatatatgagtgaaacttaga

SEQ ID NO: 248756 - DNA, 609 bp, Cannabis indica
tttccttcttggatggggacttgacaagctttggactctgcagcctctgaggcttcatcttcttgaacttttacctctggtattctttcctctgggacttcgagatcgtgactgcaatatagttgactcgcgcttctctttcaccctttctagttcagctagagaatttttgattttcttatgcgcctcagccatggcaaagaattctaccaatgattctggtcttcaagcctgcaactcttttcgaaaatcagttcttcgcaagacacttgtaatcaacatacaaactaacaaagagtttaaggccttttcgaccttggttactttaacattaaaacgtttaaaataatcctataaggactcaccgacttcccgcttgatgttagccagggttgtataaggcgatttatacgtgatcgtggcttggaagtgtgttaagaataaatccacaaaagtctcccaagtcaatatgaatgcattaggcaactggctgaaccaatcatgagcgttctcctccaaggttgctgccaggatgtgacacttcgctagttgaggtatctggtctacttccataattgtattgaatttttttaagtaatcaatgggatt

SEQ ID NO: 248757 - DNA, 2594 bp, Cannabis indica
gtaaagttttaaaattacatatatacattttactcagcaaaaatactaaactactaaaaaataatgagaattcaaactcacggtaattataaataaactatataattaacaagcaaaattaactagaaaaacaacctcatgacaaaataataatacaatttataaataaactacataaaaaaaatggtttaattataatttttgttgaagtgttatttttgtaaataaaaaagttcagagtaaaaataatttttttttgtgtccatatatttttgtaattattttttcaaatttttagtcaattatataaatttttaaattaatctgtcgaatattgtaataagattttttatattattaaaggaccttattattaaattaaataagtagattttaaatatattgtaacaatagcaatttttagtttggaagaaatattttaatagtctaaataattcaggagatataagtaatacatgtcaaaatttggaaggaacaaaaatagaaatgaagagaaaattttatattattgatctcaatatcaatacatgagttaattatttggcttgcctaacatcatatattgttatggtctgaaggaccctgcttagtgctacagtgtttgaactgcaatatgatcgatcttttggtattactgatgtgtatggctactggaggatgtgggggggatctgagtgagacggtggaggatatagtatcaacgacaagtaagatgggagttaacagtgaggaggattgggaggagaatgaggaggttgcttcatcttttggtgaacattcattggtaggaagaatgattgctaagagagaaattaaggaatcattgtttacaacaatctttagtcgtatgtggaaaggtattggaggatgggaagttaaggttttagcagaggaagaagatgattcttttgtggggataacgtttaagaatcaagaggaagctaagggaattctgagtaagcaaccatggatctttaatggtggactcttattactggaaagatggcctagttcaggtcagtggagagaggcaaagcttgacaaggtccattgttgggtgaagatgaaaggttggcccattaaagctttcactagagctaatgtgactcgtttgggggagatggctggagacattcaggaaattcggtggattaatgagagtaggatgtttttgaatggatttgtgagaatgaaaatcggctttcctttaaatcagagtatttttgtgggaaggtatattccgtgtggaggaaggaaatattggattcagttgaagttcgaacgattacctacactttgttttgcctgtggagtgtggggacatgaaaagagagaatgtagtaaggaggtttcaatggaaatgtctgtagatggacagcaagttcctcggtatggacaatggttgcgagatgacgatcccacacctcatggctttagtgcttttagccagagtcaagcacaagagcatgcacaaactaggccgattgtggaaagcagaggggaaaggatgacgacaatgaatagttctgatggatgctttgaggtggtgccgccagcaagagaaactgctggggagaaggctctgagagaacatctccctgtaactgtcaagagtagtggagcggttatgtatgacaagggttcaatcgtgggggagggaactaattcagctaatatgccaggtggcaatggagtaaaggtgacgtgtttaagtgatgtgaatcaaatgggccgggtgggggttttgaataatactcagcccaattcattgggccagtctcacacaaacaatattaatcacctaaggagggctgctataacagaacatgatggtcagctaggggactcgattcatgagcagggtacagaagggactgagaatgaagcaaagaaaaggaaaaatggagggtctgctagtgagactgaggaggagagagaacgtcaggcacttctaaaagggaaacaaattgcttgtgaccaggggattagttcggcttctggggtagtgaatattcataatggtgagggagagaagttgggcaaatcgagtgggcaaggaagtaggaaaaagtttcgattaagaatagggcacgtaatcatggcaaaggaagagcaatggggtctggtgtgatctcgggtatggttgcaagctcacgagggggtgtggattttaacacaatggggcagccatttgttttcggtgctgaggctgtcaatggttcaggtgcgggggagattaacgctgaggtgagtatttctaattgtactgatttctcatctcaattttcaaatgatgaagcaacgagtcttgctaggcaagaccgccgagagcaatgaaaatgcttagttggaatgtccaaggtattgggaatccttggacattgcgtgctcttcagtcccacgttcgggatcatgacccgagtatcatttttttagctgagagtaaattaacaagaataaaagctcagaatttatgtttaaagttaaattttggacagaatttttgggatgtggatagagttggtatgagtgggggtttattactattgtggaaagaggagataagtgtgaga

SEQ ID NO: 248758 - DNA, 513 bp, Cannabis indica
taacctcaaaacgaccccaaacttcctacaaacttctagatcacctaatagcatcataatagagagaattcaagtaataaaatttagaaacaacctcttaaactaaaaataccatttaagaccaatgtttgagttctaaactcaaacgttgtcttacaactaagccaagccccaaactaacttcaaaccatctcaaacaaccataataaatcatcaaaacacagaatccaacaattctaaaatcacagaaccctatttcccataatcacgcaaaggaaattaacttaaaactaaagaaaccataacaagatgagataggaagcttaccaaggcttgaaacctcaaaaatgatgtaacttaatctctgaattgctaaagaaaaaccttaatttcttgttggcttctagggttcacgagagaaaggagaagaaaatatagattttttgataattttcataatttaataatatgggataaaccaaactttatctaactaagttatcaaagaataat

SEQ ID NO: 248759 - DNA, 761 bp, Cannabis indica
aaatttgagtgagaatcaatttttatgagaaataaattcttaagggcagaatagtagtttctaaaattattattttgaataattataataagtatgaattgtatagacttagttttattagataaaactatatttattagttaaaaataatattattcttaaataatattaaagatagaaatatattattttagagagaataatatttattttaaccattgtaaaataatagattaataataattaattaattattatttaatggaagaataaataataaatcttatttgtagtaaaattaagaaattaattttggacctttaaaatatggcccatacgtgtaggcctaacccacacgtgtagggtgacatataaagacccatgataaattttttttattaaaataattcatttaaattaattaattatcttttaattattgaattaaacatataattggacaatttatttaattaaaaagataataataaaataaaaagatttaactgatttctgttaatgtgtcattagatatttatatttaaatttgaattatgaattcaaatcaaattagatattttcttttatttaaaggatcaactaaaggctttatttataactctacatatatatatattatatatagtattagaaactaaaaatctgagataaactagacaagaggtgacaagttgagagagattaggaattgatttttcactccatttctctcttctacacgcctatctctctctctctct

SEQ ID NO: 248760 - DNA, 808 bp, Cannabis indica
tgcaataaaattatgcaattttccagttccgatggacatccctacttcttgatactcgagtataattttcatatagcaccacaactacaaataggttgtggtctatattcacgaatctaattccatgaggacttcaatcgagtaaagtatgtagtcacactgtttgatccttgtgtaagattctgcataatcttcttagcttcaaagattcttggagcattcttttcattgaacctttcatataattcaagctaaatttctgtagcattatcatgatacataatactatctgcgatttctctagaaatcgcatgaagaatccaagatatcacagtaattttgtatctacaagacaactaataattttagcttcaataagtgaatttgtactaaactatatccttatttaaacataattaataaaagtaaaatatataattataatccacaaattttgacgagatgcatgtgatatgtactccacacataatatatataggaacatgattttgtcctgtgatgtacggcagccgttagatgggagagttatttgatctgagggctggggttgatctaggggtaattagggttaaaaaatggtaacgtaccctgagacccatctaatgtaccacgaaatagattccgtaaaagtacattacgggacaaaatcgtgtccctatatatataaaagtaaataattaaaacgagtttaataaaaagaggagagagagagccaactttaaaatatcattttgcaaccaagccataaaaaaattgtattaaggactatagtcgaggtcaatgactt

SEQ ID NO: 248761 - DNA, 537 bp, Cannabis indica
aatagttcaagaggaattttttacgtcaaaaatagttcagggggcacgatttagcaagtgtcatagttcggggagaaaaattacaaattagcccttttttttattaaaatgcacaaataattttttgaataaaaacttatttgaactttaaataacttttttactttcttcttcttaatacatctctaatagtaaatatgcaataactaagaaatataattataagttgtaattatatagtctaatcattacactataacttttacattacaacatctaatctagtaattacattataatttttacattatatggtctaatagttacatattcaaatataaactaataaaaactagagagatataacattgaaaatcctctaaaagtgccacacaacttttcaaaaaaaattcttcagctaaactaatctatcttggaatgtgaataatgatggatccccagaacatagttttagtgtcattatgatatccatttttagtgttttattttagtgaaaatttttaatattatcacaga

SEQ ID NO: 248762 - DNA, 599 bp, Cannabis indica
caaacctaatgcatttaagaacctttgggtgtatagcgtatgtacaccaatctattgacaaattagaacctagatcatataagggaacttttctaggttattccttaggtaccaagggttatagaatatgaatttccaagaagggtagaccaaaggtagtagttgctagaaatgtggtctttaatgtattggattttccctacttgatagctgggaaaggtagtgtgtctccgtgtaatacaagaaaatcaagaaataagaacactacacatggaaatggagcactgaacaaaacaaccggaagagggtttgtagccagaagctagggtggaatcgaaagagggttcgtagacaaaacctagtgctaagccggaagataactgtgacagtgagtagtcccgtgattcgtaaggggaaacaccgtgtaagttgtgcaatcccacatcgcctagggaaggtcaagtgtcatgactctgaggctgtgaaggtatgggactatacaattgaagaaggtttaaatggattgatttgtactacctatatcaacaaggtgcatcttgtttttcggtagcccatcgcgaaagaactccacagttaag

SEQ ID NO: 248763 - DNA, 978 bp, Cannabis indica
gtaaatcgactctctagttgtttttatatcggatttttctctaagaagctaacatttgaagttgagatatgttgccgaccataaatttcatatttcttgccaaggatctcatatagttttgttggttaaggttcaaataatataattcaacttctaattttgagattttgattttgaattttgaatttttctttcagtcatataaaagcttgatatgtgttattggaacaccatagctaattttttttctccctttgcagggcaactttggtcagataaagaatgaataatattttcagagatcttaatggggagtcggtgccttctcagcaagacatacttagatgtccgtttctgagaaacatcaatgagcctacaagtttttcattttccccttcaatgatgttcccacagcctgtaagtagtttatctgtatcttttgtatatataggttgtaactgggcttttatctatgaaatgtacttgtcattttatctgggtctcacataagacataaattatacttaaaactgcctctgcagattgtcaatcttacagtaaaaaaaagaagtcaaattttatcaatttgatgtaagcatgtgcaacctaggatggcactttacttgaatcgttgcttgccaaccatgttaaacctaattgaaatactaagtacgactaatatatatatctgtctctttgccaggttaggggaaataaaggtccaatttttgaagatggccctaattttgatatggcatttaggctcttccatgggaatgatggtgtagtccctctttctggaggatcatatgtgcctctgaggaaagttgaaccacagcgagccccagcgcagtttaatcctttggctgcaaaggctgctacaatcagtctttcatcttttggagctggaggcccatttggcttctttgattctttttctgacaaatggaagaatcagaagaaatcatccaacaaaga

SEQ ID NO: 248764 - DNA, 1748 bp, Cannabis indica
ggcccaattacacaataggaaaaatatgaagacataacttttgggaaatttacaaaaatactggaatttgggttaacttttacacaaataccgttatacggaaatcttttcaaaaatactgtgcttttataaaacaccagtaaaacacaaagcagaacaactcaaaacaacagtaaaacaactaaaaaataaccagtagaacaccagtaaaacttaataacagtatactgcagtatgaaacttataaaaaaaatgtagtaaaaaagtaaaaaaataaccgccagatagtatttttaataaaaaaatgacaaaagttaagtataccatgtaaaatctccctacttttttatggtaatattattaattttttatttattaattaaaaatatttttatattatattttattaaaatatattcattttcataagtgtgttacctaatatactctaaaatacgcaccacttaaatctaaaataaagtgaatatatagtgcaatgagaataattctctctccattgaactagtctcactcactttgattgtaagttaaagtagtttaactttttacaaaactaaatatttttttgggacttttatctcaagtgtcaaaattacattttatatacccttgtaaaaaaaaaagactcatatcgactcattctatttcatacacactaaagcactttcattttataaaaaattcattaactttctaaaaaattccaacacactattcctttaaaaaaataataaaaaaatcacaattgaaaaaataaacaaaataggtaaccatctctcacacatccattacaaccgtcaccctccatttatctagtaaattttctattccatgaacatcattgattgatattgattgatcttatcttttggtttctataaattaaaaatacgatcaagttctgtaattaacaaaactcgtacgatatatttgttcattttactaactttattgtttttgcttgcatttggaaggaaatctagattgtactttgagttatttatatatttactttaaactgttgcttgatagaatgtaaataatgacaataacaaaaagccaaaaaaactaattcataattcattttcttcttttctttccatatataagctatttcaaacttaaaatctcaaaagtcagaaatcatatttaagcaactgatgacacacatacaaaaaaaaaggactttttataatataagtgcaaaatctaaagtctccaattacaccaatccatttttgggacaacttgaagtcactttcatggcatctaattctaatgtaaggtccaaaatattaaagtgttgaaatgttcctaattccaacccttgtccaatgtgtagagtcatcaatattcatattcaacccttgtacaatattcatattccctttagtcttcttcttgatgacatttaacaaaaccaagtggtaggctctctcaaagtcttacaaacttatttatatataccaaaagctattcagggataaggatgttggattccagattagtatacattaaatgtgtggataaccctctattttgccaaagagaaatgttaaagggttctatttgtgcttagtactttctttgatgttaatatcgctattggtctaattaagtattaggtttcatataatttaatataacaatttttaaagaatatcactaaccaatcacaagacgacacatgtaaaaagtaccaaacaccactgatgactaataacaat

SEQ ID NO: 248765 - DNA, 593 bp, Cannabis indica
ttcacatatacttggctcgctcagcatttctaccggaatgagatttagtttgtccagatcattctgcgaggccagttttgctaaggcattggcgttgaagctccgttctctcagattttttttttatttaaagtaatcaaatctttccaagttcttctgaactttctctaaatacttcgccattttcaagcctttggcctagtattccccgaggacctggtttacgatcagttgcgaatcactatgacagatgagatttttgaccttcaaggcctctactatctttaacccgccgatcaaggcttcatactcagcctcgttattagatgtgtcgaattggaatctcagagcatattgaaacttaaaggcttctggcgatattaatataactcctgcaaccgaaccttgctcgttggatgcaccatcaatatataacttccaagttcccgcatctcgctgatcagatgggatttcttttggggttataccttctatcaagaagtcagctaaagcttgacccttgatggatgtttgaggatggtattgttgagttttatgccctaaataaaactcacttcaatataatcagattt

SEQ ID NO: 248766 - DNA, 1656 bp, Cannabis indica
ggttaaattttgtcaacaaataagttactttattctccttttaaagtacgagttttgtaagatgtatattattagtgttacaatttaagattgggtttcagttattttactttaattaatattacaaaaaattactaatcaattataaggcgacacttcatcgtaatgctaaacatgaatgtctcatatattaatgctctttaaagtacaaacagtcatgaagcaattaacttgacaagtaaacagaaaatgttggatatccccaacaataatcgctacaaaactttcacaacaacgagagatggcgatgatgacattttgacaatcactttcaagagaatgaataacaataccttgatgatggcaccagtttaaagcttttaggatggccaataattaagcaataaaagaggtattttgtgctgtatatttctagcaagtgaagcatcaaaccacctgtccatatcgccaaaactcaacattggcatgcatgaaggagcaacacagggatgacttcgtcggcgtcgacacaaacatccttctttagcaagggtggtctctatgctattggttcttctcatatctactctaccgacactcaagtttgatccaagagtgtttggtttactttgtcataattggttattctcacatatttttaatgatctattcatgtgacaaatgttgattctcagatatatactttataatctgaattgagatttcatattttgtactgttgaaaatatttaatgtactatattaccatttggatatttgagggattacttcttcattaatgaatttgttctgtttttcttcaattattttgaacttatggctctaattgtaatatattttacaaaatataaaatctaaaataattttttttaaaaaaaaattagtccattccgaacaaagtaattggctaaaatatgaagttcaaaaatggtttttttttttttttttttaaactttttattggcatttggaatacttgttactcttggtgtttggttgttgaaactttacctaaaaaaataactttttacctttatggtatgagaatttcaaaaataaaatgatcaaatagaatattaaagtgaaaatataattatctcgaaactcataattttatttggttgtgcactagaatatttaattgaattatttttttttgggttaaaatatactgttaattgaattatatatatttatttattttgtcaaaattattgtgaaaagttaatttaaaattattaatatgctaaatctattgtatcatgattgaggagaatatttaagatctatatttttcaaagaatttaatataacttaaggaataattttgaagagaatatatatatatataaaaaaaagaagggaaaattaatctcatatacatatatagtttttttaattttttttttaaaattttaattgatttgtagtttcttaaataattgtaccgctagttgcataggagtttctatactatttttgtttgcaatttaaattacggcactagttgcaataagagttgtcatgtagaattctataaaaatgtaaaaaaaaaaactaagctttaaaatagtaaaataaaaaaattaccaaaaaaaataacaattcgcatgataggaatgtgtaagattagca

SEQ ID NO: 248767 - DNA, 793 bp, Cannabis indica
taaaaactaaaaaatttctaataatacgatcataacaactaactacacgttttatataatttttctaaccacccattcattttttttttcaaatttttctatatattatatatatggttgggactaatgccctacacgttttgggcactatcatcatggggaattgtatgttattatagtcaacaattaattttcatatttatattttcaaaatattctgaattatttaaaacaagactgttatgaataatatagtgttaataactagtaactacttggtagttatatagttaattatgtttagaattggtattgtttgttagagttagttacaaagttacttcttgtaaccaaatgcctatatgctgccataatgtaaactctttcattcaatctatatacttcatttgaataattcgtgctttactccattggactttgtactcttatgatatacaacttcttaataatattatcaaaatataattttgtatggtaatatagtctttttaacataatttctttaattttattggaagacattataataatagttgataaatagataaaaattaaatacatttgactttttttattttaataattaaaaaattaaaactaaaaatatgaattattaaaaaaatatagggaaaaaaacaggaatattctaaaaatggtaaaatattacaacaaatactgtgggccggcccaatcaacatttgtacagcccaaaatgaaaatattacaaaaataccacttgcccttaccttcagccgcacgtcacaaacggaga

SEQ ID NO: 248768 - DNA, 560 bp, Cannabis indica
aacgaattacatcatttaaaggacagaaatgagaagaaggggaattgattttctttgcaattatttaagcatcatttcaactttagtaataggcagctgaactactacccaccattcaagagcaatttcaaagaaaaagcttctgctgttgttgagttataagaacccagaaaatttgaagtacaacatgttagaattaatattgtggactaatataacgataggtttaataccataaatacaattattaactatgtgcccaataattgtcaacaactataatgggatggttaataattaaaaaatatattagaagcacatgagagcaccctaaaactataatgggcccattaaattatagtctaccactaattatactcattagtccaataagcctaataaaaccacttaggtagtgtttagtttacatgaatgaatgtaggaataaaattgctattcctaaagaaagatcattcaagtgtttggtttggtttacatgtcgctaaatgtttcacgacatttagcgatgtttcgcgatatcgtcaaaaaccagaaaaaaa

SEQ ID NO: 248769 - DNA, 928 bp, Cannabis indica
gaaactgagaaagatgagtttgggaaggtaataaaatgcaaaatgcagaatttaatgcatgatcttgctagaaaagtgggagaagaaccttatgcaattgtttgtaataaggaagaaaagtttaatggtgtaattcgtcatgtttctttcgattttcatttagattcatcttggcagattccaatttcattattgtctaaatcaaaaatgatttggagtttgattttgcctaggcagtttcgatgggcaattgaaggcagatcaaatgatgactcaatttgtgatgttattctaaaattcaagtggttaaagatgttggatttgcacaattctggcattaaggtgttaccagattctattggtgagttgaagaatttgggttatcttgatctttctcaaaatgttaatatcaagtcattgccaagttgtattggtgagttgaaaaatctgcagactttgaaactcaatcattgcagtaatctcagagaattgcccagtggtattactaagctaaatggtctgagaaatctcgaaaatgagtcatgttctttgactcatatgccaaagggactgcacaaactatctaaacttagaagattatcagaatttgtgttggataaggggattgaaagaagcttaccagaattggtgttggataagtgtattgactctctccctaagaaaatattaccagaatctgtgttgaataagtactctgtctcaaagaaaagtgggaagctcaatgaactaagtgatctaaatgagttgagaggaaagctcaaacttacaaatttgagatttcacataagtgataagacatcacaagcatatttgttcaagaagaagcatctttcatccttaacattgagttgggatattgacgaaattgttgaggaagatgattgcgaaaagggactagaagatctta

SEQ ID NO: 248770 - DNA, 603 bp, Cannabis indica
gctactgaggttagaagttttttaggcttagctggcaactaccgttgatttgttgaaggtttttcaaaaatagtgacatctttaacataattgacaactaaaaatttgaagtttacttggactaatcagtgcgagaaaagttttcaggaattaaagcaacagttgatcactgttccagtgttgactcttccttctgataagaaaaaaatttgttgtatattatgatgcctcaagactgagtggatgtgtattaatgcaagctgaaaaagcgatagtctatgcttctcgacagttgaaagagtatgagctgaggtatcctactcccgaccaggaacttgcaacagtagtatttgcactaaagatttgacggcattacgggagcgtttggtataagggatttaaaataatctaattaaggggaatattatgaaggagaatatgattatctgtaaacttaaaactgtgtttggttattcatggtaatattaattagattactgttaattaaattatagtgtttggttgagcacatgaatcttatataccatttttgaatagtgaattaaaataaaataaaataataattattatatctctttcaac

SEQ ID NO: 248771 - DNA, 924 bp, Cannabis indica
atcaacattcattttttcttagtttctctttttcttagtttcttaatatttgactcttgtatttgtgtaaataggggttcaccccattagaataaacaactgataaattctcattcactttttctttttctttttatctttttcttctttcttctcatctattttatattattttataacaataatatcatatttatatttaaaaaacaataaataattatgttaggaaggataaaattgtaattttagtaattcatttacattctcaattcaattccacttgttctaatacttttgaaggtgtttaatataaagtttagatttgataggaatgtgaatgtcaaactatattaaattttaataaccacggagtttgtgtttctaagtggattctactttttaaattaaaataatagtaatattaatccgttccaacacttaggtggagtttagttggaggtaatgaaatagaatagaatggaaatgaaataattttcattctattttttttttttttttgtttggttgcattttaaagtattggaatgacattccaatagaatgctctttctaccattttggtggaatggctattctattttaaagaggaaggaaagattattccaatgtgacaaaagaagaaatttaatgaattattatcaatttttttttttttaatgtattttaaattttattccattcctattactattactattctcattctcaatgttatattttcattcctcccaaccaaacaccaccttagtttcatattccctctaattctactccttccaactctactctctagtcttcaactcaaactcacataacaaacatcccattaaggcattaagtgttgtttggttggaaggaatgaaaacatagctagaataagaattatattccaatactttaaaa

SEQ ID NO: 248772 - DNA, 660 bp, Cannabis indica
atgaaccacaaccaataaattaaaaatcaatggagcaatggtcaatgaagcaaaaattcaactgtgtaatctaaaattatcaacaaaaacaaaaaactcaaactatcaaatatcaaaagcggaaagaaaacaataatctttatatccatcatatttttctgatatgcccaacaaaattattgcactgatttatatactaaatagtatataaatgataatttccaatataaaacacaataataaagatatggaaaataacaaagaatatatatgcatataagtaaaatattagaactaattaaaataacgtcatcacaaataatgataaagacattcttataaccttattaaatattaattagggaacaaaaaaaaagttttttaaaagatttataattaagtcatccaaatttcaaaacatgtagataagaaacataatactaaaatgaaaaattgtcttcacagtgggtaattttcacactttttgaatctttctaggccgaaagataggaagattttggcatgattttctgttgtgtcctttcccttgacaatgactacgtctatttgtaacttttttctccaatcgactacgatatctttgctctctaggtcttcctggttgacgccttgtggatggtggtagtatctccattatct

SEQ ID NO: 248773 - DNA, 1547 bp, Cannabis indica
taagttttaagttaaaaattaaaacgtccaaactttaaatacaaaatagtttaactaataaatgtaatttatataatataagatatacacttttattaaaaaatatataaatcggtttaattcggtttattcgggttaattgggcggtttagaataatttgtaaaccacccaatatattcattgggcggttaggattttcattgtattatttcgggttgtattttttatcggtttattcggtttggtttgggcggtttattcgggttggacagtttgtaaattttattgaacacccctagctgcttgggtccccaagtcgagcatccacatcttcatcctcgccttcggaggttccctatttagcaatgttttttcccttgtccgaactctggctagaggatacttcctttttagccttggttatgggaaggttataatattcccgagcaacttgctggtttcctcttaggcaccccactctattctttgttgggaacttaaggcatgaatagaatattaacgtaatagcctttaagtcatatcaagctggtcgacctaacatgacattgaatgctgatggaacatccaatactaagaattgtgccattatagttatgctcttcggagcttgcccaacagtgaggggtaggcgaattttccctagaggtgcgacaccttggtcggggaaaccatacacgggctagaggcagggagttaaatctttgagttggagccctatcttttcatatgttgtcttgaataaaatgttggaagaggctccattatctatcatggttttggccaccatcttgttggccatctagacttccacgaccaatgggtcgttgtgtgggaaactaattttgacaacgtcttcatcattaaatgttatggtgggctcccctgcccatggtatctttggttttctttcctcgacggccagaattacttcttcttgctcatgttgtactgttcgggcatacgtttcccgggctttgcctgaatttccaactatgtgcggacctccaataatgacttgtaaatttccatctactggtggtggtagtaaatcttggttgttatcgcccctttgattttgatcggccttgacatacttttgcatgtgcatattttttctaatcagaaatttaatttcccgcttcagattgttgcattcattggtgtcatggctgtaatcccaatgaaaatggtaaaatttggtcccgtctctcttgcttacatcttttttcatgggtgcgggcttcttgtacggggctaatgactgagtagccatgtacacgctttctatatcttctgtcaggatagaaaatgcagtaaacttggtaggattctccctgggagcttgttcggttttactagcaaacttttcctttttcccatttccttgcctattattgttgttggaccgtttaccacccgagcttcaattgcttgggtactgggggagctggacggacatcccagcagagggagcttttggctggctaggtttttgctccacctctgcccgctgaatggcttcttc

SEQ ID NO: 248774 - DNA, 973 bp, Cannabis indica
ttttttattgttatttttctatactcgaatttagagcttgagatctctaattttatttatttattttctataaaatccaattagcttagatggtggaaatatgccatactcttcacacatcatgtatattattaaacctatataacaaaagctagttcattactgctaataagatattttcaatagagaagagaagaaaagcttagaacttcggctatggcggagtacaggagtattctcaagtgaagatcttggtgaagcagagtatccatggatgaaaagttattatatttattatttttaccaaaaaaaaaaaaacataaatgataatattttttaattcaactttattaaatattgaaggaagaaagataaaatgtggtattgtttaaaaaaaaagataaaatgtggtatttgatatattttttacaaaaatgtagcataaaaaaattcaaaaaaatgtaaaaaagaaccaaaaacctataatcttaatacataaaaaaaaagtatatcataaaaaagttggggtgccgtttggtaacacttttgctttttaattttaagatgcatagtgttataaatacatgctgaattttttgacacgacacgaaattagcactagtctataagctacgagcacgactaggtacgaaaaaaataatttcagcatgacatgacatgaaaaatatgtacttaagcgcgacacaacacgagaaatacaaaaatataataagtaagcacaaataaactagctcaaaaggcctggcttgcgacaaaaccgaaatttacgatacgacatatataaaacatgtaagaaatcaagctacctgtaaattaattataaatttatatttaatattttttttcatttactaggtgttcacattatattatatataccatattgtatatactaaaatatatcttcagaaaataaaaattattttctttcattttgcttcatggtattaga

SEQ ID NO: 248775 - DNA, 672 bp, Cannabis indica
tacttgggccaaattgggaaggaccatacgaagttgaggacaaaattggctctgggacctacaaactaaaaagaatagacggaaccatggtgcctagggcctggaatgttgatcacctccgaaagtattaccaatagctgaaaaataaaagtttatgttctgtaaagtaaatttgtaccggacaaatatgtgcaacctctaaattaaagtttgtaaacagaccaaatttaacaaagttaaaatctaagtatatattaaaccgtaaatatagtgtttggatcccaaagaaaagcttcaaaaagataggggccttgggacgggcctcaaaatgtctcccctttaaaaaaaataataagtaaattgtcattgagaggggagaaggatcaaatatataaaaagaaaaaaaaaggaaaataatgattatgataatggtggtgaacaactggcttaatcaattcgaggtatatggcgaggatccctgcgctcctcaaacaaggcatcaactctcttcttcttacatattgggatattagatatagaacttgcgtggaaatgatgaatttcaaatcgtccggtacgtcgttatttcctgaatccaattacgccaccgtttacgtacttggttggatgagtataagcatttagtgaaatattttcctgtacaaacaaata

SEQ ID NO: 248776 - DNA, 726 bp, Cannabis indica
aaatttataaaagttggtgcagtgtggtttgaatttaaatttaatagtaattatttatacaagacgtagatgaatatgttttgaaacttaaattaaaatttacttagatcaatatgagttattatataaatttataaaagttggtacaatatggtttaaattgcaataattaaaatttaaaattgcaaatccaaccaatctgtgtggttgtttagcaaaaatgtaaactacaaccagattgcgaagtgtttcaaactacattttttatgcagtgtaatgtggtgtgggaagttttatgaaagcttctaattttttctacaaaaatttttaaatttttttttttttttttttttagtatgaatcaggaaaattagtattagctcacaaaactttttactatcctaatagcaacctagtaaaaaaaaaacaaggcctaagttatgtatctatacaaaatgtacaacgaaaaacaatcagttctataacaatgacttgaaccattctttgtctacattcgaaactttttaggtccaaataattccactctttgagtcacaccagcctttaactctttacacattctcatgtcatcttgagtttcatcatcccaataggacgaatttcgcatcttccatatgtggtaaatcaagcttgcaacagcagcagctattacaagcttctgaaattgctctaactcgtacctaccaacgccactcgtaatacgta

SEQ ID NO: 248777 - DNA, 658 bp, Cannabis indica
aaataaaatttattaattaataatgaaaaaatagataaaattgtatctaataatcaaatttaaattcaaatagtatatatttttaattaacttatttaatttaattttttataatcatttaataaaaaagttatcttcaaatattatagtaaataaaagattaaaaattgaaattgaaagagatatcatcatatgataacaaaattacttttatcactatatctcatttgtagtcgtcactacattcaaagtgacaatttgatagataacataaaaattaataaaattaagttaaaaatgacaaaaagaataagagatacgaaaaattatatatgtgtaaggcaattttataatttactttaataaattatttgataaatccttacaatgaaaatttgacaatttagaacacaaacactattcatgattaaaagagttttatttatttatttaaaaaaaaaagagtttatgatcatataatatacaaatttaaaatatttctaaaaatatatagttatattgttctacctaaacattaatttgagataaataatatattaactataataatattctaaagagcaactttactgaagatacactaatgtataagaatgtatactttgacacataagaaaaaaaaataagagaaacatat

SEQ ID NO: 248778 - DNA, 1098 bp, Cannabis indica
cacaggcggacctacacgcaagtgagggggggcaattgccccagctgactttttaaattcctatctaattgtttattaaaaattaaatcataaatacaattaatacacaatatacatgtactgtcccccctcaaaattcttaaaagtagtaactgtcagttttattattttacttttacaatacaataaattaaatatattataaaatttaaaaatagtatcagcttttattattttataataaattaaaatattaaaatataataatataatcaaatcaacttttgggattctattccatttctctctctcaatcttcacattaatttcgttcctcactttctctctctctatatatatatcactattatacaactctcttctttttactttttattatcttttaactttttcatcttctggcaaagaatgaaagatgaagctttgcctttagtgaatagtgatcaatgaacaataaagaaaaaaaggaataaggagtaccattttctcaaggtaaattcataaatattattatatattgattatttatatatattatatcatgtagaaattaaaatctgtttctattattctattaaaaaaaatattattattcactgttatattatactattattaaaaacttggaagagaaatgaaatgattttattttccaaggaatgatgattgagagttaaaattgaaacaattaaaaattgtatgtgtaacaaataacaataattcccaaaaattaaattacaaaatgtaatataatagattaatatacactttttttttattgtttgggaattaggattacaaattgcaaatttgcaattaataaaataaactatattcaaattctatagtttttaaattggaattgaaattcctatctatataatgaattaataatcaagtttagttatttaaaaaaaaatacaaattagtttctttcaaattacaaaaagtattttatagtttgtgttttttatttttttttattgtttattgtttattatcatattatttgtgttgttagtatatacattaaatctaatttctcaaatatatttgaaataggtatggctcgtatag

SEQ ID NO: 248779 - DNA, 858 bp, Cannabis indica
tgtcccttctgctcaagattattctcgaagtaggcctatagaatttgacggacgtctccttatatttagaatgccccctacccgatggggtgatcatgccaagggcttttatttttccaacttaggtcattttctaggccggtcccagatggggttcggtcctcccgcacctatccttctggatcattcagcctatttgtcctccaactggtttctcccatcagacagctttcttggggatgacgaagctagtattatagtgcaggactttgctagggtcgaattagattttctgggtaggattagttttacttctttgttcttgtgtgcataatttcccgtgaccgttctgacacttatttgtttgtttcttgaagcagctaggccaattgacgagcttttggcaactcttgcccagatctacagtcccgacccaaccttgcccagtcaccaaccagacggtgactcctgggaggtcttcttcgagcattcccttaggccaaatcttcttgatcaacgaggacggggaggttgaagaggaagaagagggcgagattcttacccctctggaccggaagcgcaagggcaaggtggtggaggtcgaggctaccaagaagctgaggagggtagatactccgactcccagctctgatttagggatcctgctcgaggcggatgagtacactgtgcctcccggtatagtcctgactcccgttcctgccgatgaagaaagacagcaactctgaattgccaagcacaactatgctatggaagagtacacaaaggggaacgcagagggtaggccttgaaaaaggtcctaagggaggcccaggacaattcctcacgcagtgagtactt

SEQ ID NO: 248780 - DNA, 1097 bp, Cannabis indica
ttttgccgcttaggtcggctcatgaaatagacatgtagtatttttgtgaaaatatttacaggatcccgaaacatgtatcttttcgttatttgtaaagtttaaagttattacaagtttaattttcattccgtttcaaataaagtttaaatttctcgcgcttacctttctagtaatccttttcttaggggattagggtttcataataagttggcgtagcatgcctaatttttaggacgttacagtttggtatcagagtgccaaggtatttatacttcctgtagaccagcagaacatgtacaatcatcatagagacaagcttggctcgtggtgcagtaagtgttgagagtaaacgcttaactgcttatgtgattatttattaaccgctttccattttaggcaatatgtgagcatctagtgtatttatgtgatatgatgccatgcttagaatattaattgataagtgtttatgaaattggaatgaaatagttgagttagggtttaaaggcaataagtgcataagtgtggtattggtgcctgactcgccgaagttgttgattctagggttgtttgtaaaaaatggaccctccgcaatcatttagaccatagggcaagaaagtagagcctagtgtagaccaaaccaattcaccggcactgcctgcgcctccgcagaatatggggaatactgcgggggttggtaatgttaatccgcctggtgactagcagcagatgttttaagaaatgcgaagtatcatacttcgtcaacagaaagaattgcatcgattaaggcaaccagcacaggcagcccttgtagagcaagtgttaccaccagctcctgtgccagtagtgggtaaccaggggtttatgttgccacacatagattcagtgtttgagcgcctcctaaagttgcaacctccaacttttctgggaggtactgatataatcaaagctgagcagtggatgagtaatatcacccgcatcctcgataacatggggttgacgggaacaaagagagtgaattgtgttgccttcatgttacaagatcatgcatgcgtctggtgggatatagtggggcagactcgagatgttagtgtgatgac

SEQ ID NO: 248781 - DNA, 823 bp, Cannabis indica
ccaacacaaaaatgtgctggcaaaagtgacatttattgtagtgaattctcatttaaacattatattttaattcatttaaatattttatctcattaacaataatgtatttataatttttgttgataaatatataacatcaaaatataattatttaattttctctctttatttaatatttttagaagataattaaataagtcttaatataatattataatagaattaaaaaaatatattatatctatattatattaaatatggatatataagagaaagtgttgttcttttttataacattacaattcaaatcaaagttagactcattatgcatatttaaaattaaaaatattataaaataaaaagtattacggttaaattaaaattataattaacagtaaattttgaatatattttttttttataaatagcacttaaattagatattttttaatacaaaataatgacgtttattgaataatattataaagaaaattatataatatataactaaaaatatacgtaacaaaaagacaaacataaataaattttttacttttttgtttttttttaaaaaaaattactaaaattgtatatgctatgcataattttaaattatatatgatatctatattaattaaagtcctgcttgcatggttttcaagtaaaaaaagtcctgcttgcatgagtgagtgtcttcttggctgtttttaaaaccgtcgagaaattatatgaataaaaaaaatcaatttaaaattatgtttcttgtacagttaaaaaaaaactcaaatttttagtggtgaatatatgtattttgttggtttag

SEQ ID NO: 248782 - DNA, 757 bp, Cannabis indica
taacattaatatatttactttggacttgtttgaggaggcccacaattattgtgagaatattagagtagtggactttcactcaaaaaaggtgatcccctctttgatttctcaggattcttgccagaaacgtgccatgcaggatggttctcagacactcattcgctcctagacacctcttcgaacgaatgcccatcctggatgactcctgtgggcatccatctccgtttctttggatgctcgttgatagagcaagtgtttaagttctgagactatacgtttgaccttactcatgaattgggaggtcactccatctcggctcagtgaatgagtctattaggcaaaatggttcaatctaaatttacacgtgtcacctatccaaaaatgcagataacatttatccaccaagccttcatggctcgagagtcacaaaggcatgcaggcatcatctggattcgttgcggtgcccagggccatagacaatttgagtcttttgatattccaaagtggaaggttgtagaaacttgtgagcctttcatattgtattagtggaccacacatgtcgaatgttctttggtctatgtatgtcacgtggctcgcagaagcgcgtgtttccatgggttatggattgatagctggttatatcaacaagttgtctgaagcaaatatcatagttaatgtgcatgtccatcattctgtaaatcacattaatggcaattgttgacaataagaactcatcaacaaagtcaatggatgaaaa

SEQ ID NO: 248783 - DNA, 686 bp, Cannabis indica
aatattacttaaacttacaattgatatgtgtaatattgcttctaattaagagttatacatataagtataattacttcaagtttaatgtttataatattgttggttttcaaaaaaaagaaaaaattgtttacattgttcaatattatgtgtcattggtgtcatttgtgtcaatgtgcatacactaattttataatttaaaaattcaagatgacaaaataaataggagtgcaactgatgaatctatttaaaaatatgaagctaggctgttgcgatattttgcacacgcaagtgtacgtatcgttacaagtagtaaactcaccaggagtgaggtcgatcccacatggattgtagttaagtacgttgaaattaaatttttacttctatttggttaaataaaaattaagaaatgatagttaataaaaactaggacttcgatttcaattgtttctattgattatggcctaatttgattattttcctaacgttaatttctatgcaaccctctgaagaatgtctccactttgcagttaatttctgctgcatcgactgatagtattttgaccataactctctcgatattgctcggaattggacgatttaagatgttccgaaaagataaagagatatctagaacttttatgttttgacttttttcgaaatctaatcagaagatagtcgaattcagg

SEQ ID NO: 248784 - DNA, 582 bp, Cannabis indica
aaacactattattgcttcatcaattggaaacagttttctttttttctttttccaatatttgtaatatgcaaatgcaaattaaactagctagctagctcatcatcatgcatgacaattaataaagccaaattgatcatgtcgatacaaaagcttattaattaatgtatataaaatatatatatatatatatatttatgacatatgtaaattaaaaaggtaaattttatttgcatgctttacaaaagtatggttaggtattagtggtgtctaatacttcacgattgattagcgatattttctaaaagtttttatcttaagttatagggaaatatgcggcaaaaatactcaaattatttgatttgttgctaataaatacctaaattcaaaaattggtggcataaatacttatatcttcaaaacaaactattttgttggtacccaattcacagctccgttagtttttcatttggatgccatgtgtcaatattatattagtctggtaaaacaaaattaattttaaatgattttttttataagagatttatttttctttttttatggaacaaataaaaattgattaaa

SEQ ID NO: 248785 - DNA, 498 bp, Cannabis indica
agaaaactgtgacaaaccaaccaggcaaccaccatttttctgtaaccaaaaaataaaatctattgttacccaatgcttctccctaatataaatttctcattttatcatcagacttactagacaaagtagtgaaactctaattccccatgacagaaagcatagtacttcacaaaatgcaaaactttggtcaattgatcttatttttagtaatggcatcaaagacagcagatgaagtagaagtatatttatgaaaagaatgacaaaagaaagtcttcaaaggtttaacaaaataagacataaattacctaatagaaaccaatgctgagacctaaataaaaagactaaaactatcaccaactaacaataaacctaaaacaatcctagttaactagataatatgaatatctataaacattaattacccaaacatctcgttccactgtccacataaccaagtgctatgatttccaaaatgcatctctccttatgctttctttc

SEQ ID NO: 248786 - DNA, 979 bp, Cannabis indica
tttctttttgtttttgttttttcttattcttctcgttcttttacatttttctccatgtaaccgtaatttccaccaacactccctctctcttccgttctccttctcgcataactccgacaagtcacctccaaccaccttcaacccaaacgaaccccaaaaccgacttcccgaccttacaaatccaaccattcaacctccctcttaaacccttttttgaagtttccctttctcacctcgacctcgtcgaatctgattctctctctcccgcaactctttgctgataccatcacagttggagggatttgttgggctcgatggttcgtccctgggttcatcgtgatctggtaggtttgtcgcaggagaaaaagaaggaatggagagaggggagatctaatggttttaatcgcatagcacttaacacaaccttttgaacgaaatgagtaaatagctaatagaagtgaggtttggagggttttaccactaaaaattggtttatgtggttaagtttcactaatcatataggcaagtaatttttctaccaatagctcatgctaaaaatttaccatgtgtatacttgtgtgcattgtggcatatccaccgtgacacttaacaaagccttttaaaggaaagagtaaatagctaacagaaataatgtttgaaaagttttatcactagaaaattagtttatatggttaagtatcactaattataaaatttaagtagttttgtggttaatatctcatttaaaaatgatgtttgaattcttaagattgtgacttactctttcgtggacatccttgtattactagtgtactgttgttcaagatcttaagttaatgggaattaaaattgtgctctgattgagtcttttctcaatgagtatttattttaatacttgtaaaagttcaaatatagtttcactatcaataacaaaaaatatatatatatatatatacggtaatactatggtaggacctag

SEQ ID NO: 248787 - DNA, 586 bp, Cannabis indica
atgtggcaagaaagatgacatccggagctgagtagtctcgaatcataacagtcaacttgggagagatccctagctctacgcccgtgttaactttaggaactctaaaatgagagtttagactttgataacacatttttaactcattatctttcatttttctctaccatgaagacatgcaataatcatatccaggccccgagagctgaaattacgtgactttgcaactcgaaagttagcctgggcacctagggtttcacccaacgcccaagttgacatcctaactagggtttcaatttttgggaccgacttagtgaaaatgggtcaaacttttcattgacataccactaacacaattgagccatcaaaattagattcagagaaagttcatttcttagcatatagagcacccggtgcctgggcacccaatgtctaggttgacaatttgtcaatatgagcgacttccaagtatcaaatcgaagatccaactcgtgcattttcttcatcttcatgaaaaatggggaaaagagtgcttctaaagaagaaacaacactacacaaagtagcaaactgatgagtcgacagactca

SEQ ID NO: 248788 - DNA, 471 bp, Cannabis indica
cagcctttatggatcgctggcctttactttgtaaacaaatttaagacttgtattaatataataatacagtacaagcaaaacatacaggataaaatcgtaaacgagaaaactaaacaaaacaaaactacataaaatataggtagccattaaaaatacaaaatcactacccaatgtctaatcctttcccattaatttctttgcatcatcttcaaccccatcaaagattctcttgttcctttttctagccataatgcgaatagccacaaccctgtcctctattttctggtttttttttgcctttgctagtgatttaataaagttgtttgtgatgcaccacggaaaattaatttctttaaagaatctgtaccatattcttattgagaatgtatgatccaagaatagatatttagtatctttttcttgcacatatcacactgtatggtcttctctgtgattaaataaatcaaactt

SEQ ID NO: 248789 - DNA, 864 bp, Cannabis indica
aaaggacccctggattttccagagattgttgacagcgtaaatcagatcattacaatcaacggagcgtgttgagatgaccctacccacgatcattttggccaccaccatcacaccttcatccagcagcgactggtcaaccacatcaatattaatatcggcctcgtcatcgtcgagagcaatttctttgtagaacatcgcgagatcatcctcgttcatggtgctcatcacgtcacaacccaaagacttacaaagcacgtcactggagaagaaagactaacgacattggagatggaaactggacacaaccaccgaagccctaacaacctgtagagaaacatggggtcaatcgtttattaaactttggaatttgtcttccattgtaggccatccaattgatgtgggatcttcattctgagtgattgacttcagtgacaaacaatatcacttattgatcgacctctctctctatcgttaaatgatcgatcaagacacctaggcatacctctctctttcaccggacctttgcgatctattcttttacagtactattattattacatcttttaaaacgaactttggagtttgtcaccatcaactttataattaaatttttggggtaaaattttctaaattttagttttgttttagtctccactatttcgtccattttgatttgttaaatactaatataaactaccacaatatacaaaaacatacacgtgacaaattttcattgaactacataatattactaattaaaatattaaaaataaattaaatatttaaaaatcataaaaaaatattcttcttcttcttcctagaaatcgaattggtgttagagacaagctctggcaagtcattcca

SEQ ID NO: 248790 - DNA, 961 bp, Cannabis indica
tggaggcttaatgacttaaggttttaaggtttagctaatgctctttatatagtagagcttacatgcctaatatcccttagaaataggtaactaaagccattatttacataattaattaataaattataaataactaaatgtccctcaaaaatagatattttccctctatttttatttttcaaggcccaaaccgttgcttgacgtgctgtccacgtatgagagctacacatcaaaatcttgccatgccaaaggctggctggccatgcacttgcatgatgcaggctggctgcccatacaattcctgcaggttgaggtttggtcggtgatgtttcagtcagggtctggcaggtcatgttcctgccaactctattaagactttgcatgtgttggccagccttagtaggtgatggccagcctttgtgatggccagccttggtgatgaccagcctttgtaggtggaggctaggctttgtaggtggaggctaacctttgtagggggaggtcagcctttgtacaccttttccttgtagaggtcaggcttccttggtcgaatggtccctttcttggtctgaaagtcaccttttggctagccagcttgtgcccaagcccaggctagccatataagctcatcttagctagcctatatacgccccttatccggccagacatggtggtacaactccttgacggcttgcttaactccttttacttactccttgacggttttgccataccttgtaaggagactttgccttgctatatggaaaagttgtattccatgtgtacttggtcttggcctatgtgcacatgccacgttaggtggacaaaatttaggataatatttaccccccaagttcctgttcaaatatctggttagatagggactttccagctctcgtattgcttgtagtagcctttctaaccaattattggctttttgcatggcatgcttttagatctt

SEQ ID NO: 248791 - DNA, 529 bp, Cannabis indica
ttaagtatttaagtatttaagttaatattttactatacacggacaacattgaacaaaaattataattttactatagacattaagtatttaagttaatatttgcctattatttaatattgaacaattcactacaataaaaagagtttaatgattcatttgagagtcatttaaaatcacttatactaatctcgataggtttaggacatgtctctgttaagagctgacagttgtacaagttctgttttgttagttacctaactaatactacttttatgttagttagttagttagctttcagttacagctaatcttgctttagttctgtaatccttgtatatatattttattgtggggcggaacttttttcaaaaatactatgagcccgtttggtacgcatgactggattggattagacagtttaatttgtccaattcagtatttgggcatgttagaagtctggataactaatccagctaacctcatctgtctgggataaataattccatgcaggtgagatttttttttttat

SEQ ID NO: 248792 - DNA, 434 bp, Cannabis indica
cccaattgtataattagtctttcataattctagcttacatatacaattaggattcacattcttcctcttgtaatgcttcactaaatccttgcataccttgatgttataagcaataaatgtctcttttataaatcctcctttgttttgggcaactaactctggtagaatattccacaagcaagcataaactatttttgctgcaatttataaataattttacaaaaaggaatatgtataaaatcacttacattatctggacatgtggtcttacgaatgagagtaattgtagttgaatttatttccttaataattttccctctgtgtaggaaagataaaatttcctcacatacttcatcacccactgtattccaattatattggtaaaaatagttgctaaaacaatctcgtctaggagccttcaccctcggaataac

SEQ ID NO: 248793 - DNA, 559 bp, Cannabis indica
ttatatttgattttgtacacccaacgtcaacctatggcacgtttgtttggaggcaatggaaccacagtcaatgtcttgtttttgatgaggacaaaaagctcagtttgcatagtgtcgttccatatcttgatatgcacagcttggttgcatgttgtgggttcgaagagtgccgtaactgcaagtataaaagccctatgagaatcagaaagtttatgataagataagaatttatcaagggagtgaggtgtagaggatctgtcatgaaggacagagttacactcgtagtctctaaggtatccaggaggctttgacactctgctggtgcgtctcaaatgcgtaggagaagtagcagcagtagtgatgtcaatggttgttggtgtagtatttggtggaacattctcggggcagtgatcaacatttattggtgtaaaagaacctgactcaggtgtgctgatgttgatcgaaggaattattgctggtgtgcctgaattgatagcaataggagtgtgtttctgcattattgctggtgctgatttttgcattgttgctggtgtgttgg

SEQ ID NO: 248794 - DNA, 703 bp, Cannabis indica
aaagtttcaaattcattgttaatcatattgttgtgaaataacaagaatttgtcaaaaactaaagtatgttaaagaaaaatctgttttgattttgcaagaattagagcatagctcactggtctttctatgaacaattgacttgtactccctttgttatccattattttacaggtatgtgtgttttagctggttgtgatttcctaccttctgttcctggaattgggattgcgaaatcgtatgctattgtatctaagtatcggaacctagaccgtgtgagtgcattctattcactcctttgaatttcagctttagttgattgtccaactaaaactcctttaattttttgtgcatatcgccctcttagtaatgcctgcatagtttaatcttgttgtcttatctcaacttttgataagaaagttgaaatgcattagaaacttcttgttaaagttatttcgtgagaaattcataagggcattagtggtgcccaacaccaccatgaggtgtcatactacaattgatgttattaagttttcggtcctaattattatgaaaaattgctaactattcgtaaggcgctatcttgtagtattgtttagcaatactctttcattgtgtaaacattttcatgagggcttttagtcgggggtgggatttagtaaaggtaggagatgatggagtggaattattatgaaaaattgctaac

SEQ ID NO: 248795 - DNA, 956 bp, Cannabis indica
aatgtctcttcttcttctccggcatgtttttggaaactgggcttatggattctctgttaacaaccctaagaaaaagatgaacatcgcttatgatgagatcgactctgtcgttttttttacagatcaacgtttttggcggagaatcgaattcttcctcctcatcgacgccttcttcctcctcaccatcggagcagcactatttcaccacagtgcccagaaagagatggagagaacctcctccccatcaacgccttcttcctcctcctcatcgacgccttcttcctcctcaccatcgaagcagatccagatctagtttttcaaggattgcgaacctccatttggctttgagaagatagaagtcgagaaagagatggagagagagtaaagaacgcgagggtctctgattagggtttcttcagtaagaaaattaagaagagtaggaagaagaagaagaggacgaagagatgttttagtttttgggttttagttaataatttattttatcttaagttaatgaaaatatgaatattaaatatttattattttattttgattttaaattattttttgttttatttttaatattttaatttaatttataaataaaaaataaaaattaaatgatatggactaatcacatagtgacacgtggacactaacatggcacataacggccaggtacctacggaagttccacactagtgacggaaggtatttttaccgccaaaaatacgacttaggtatttatctgctactcggcataaaacttaggtatttatgccgcaaattactctaaaatctatcatggtgtgacattttatttagcaacctagtccattttaattacaaaattaaatgggctacctatatgcatataagcccaaagcaaacatataggctcacacatgcacacagatttggatggatcctatcatgttactgttggaaattatttt

SEQ ID NO: 248796 - DNA, 958 bp, Cannabis indica
caaactcctgcctatgagatcaacacctctcccaacctagtctgcaaactccataaagccctttatggattgaaacaggctccaagagcttggtttgaaaggttgcataagtctctgtctaggtttggctttgtttcatcgaagtctgatcattctctgttcattcatcactcacctcagtccacaacagttatcttagtttatgtagatgacataattataacagccaacaaccctgagattgtttctcaacttgtcagaaacctgaataatgagttttctctcaaggatcttggagaactcaactactttttgggaattgaagttaaatacaccaccaatggcttgcatctatctcaagggaagtacataagagatctgttgaccaaaactcaaatgcaaggagccaaatctgcctctgcccccatgacaagtggactcaaactattagcatatggtagtgatcctgtggacaatacacaactgtacatgtcagttgttggagctctttaatacctcacaataaccagacctgaaatttcttttagtgttagcaaagtctgccagtttatgcataaccctttgcaagttcattgggtagttgtcaagaggatattgagatacctgagtggtactatgaactatggcctgcatctaaccaaggctccacagagggagattgttgccttctgtgatgcagattgggctgcagatgttgatgacagaaggtctacttctggctatgccatttactttggttctaatcttgtagcatggtcttcaaagaaacaacatactatctcaaggtctagtactgaagctgaattcaggtcacttgctaatgtggttgctgaaataacatggcttcactctctcccgtctgaattacatgtcactcttccaagtaggggtgttcatccgatccaatccacacttttttggtcaaacaatatctaat

SEQ ID NO: 248797 - DNA, 1799 bp, Cannabis indica
ttgggtccgggtctaggtccaggttcggttcccgggtcctggttcgggtcctgagtcagggttcgggtctcggtcccgggtctcggtcctggtcccggtcctggttctgggtctcgagtctgggtcccaggtcccggtcctagtctcgggtaggtccgggtctgggtccaggtcccaagggatccgagtcttgaatgaagttttttttttaaaaaataaattgaaatcggatcggatcagatccgatccagaaaaaaattaggcggggcggagcggagctgatccaagatccaataagtatccgaatgtttcggattagaggtgatccgtcggattggagctccaacccgctctaactaaatggatctttttaacatgtctattcttgttgtgtttagcttccatcgactcctccactctactctctttttgtctttgagaattttactttgatttttgaggaagatttgaagctatcgaagtggattttggtgtgtaattgttgagttagtttggagaaagcaattgaggtagttaattttactttttattacttttaattttgaaatctcatctttgattagtgaagcttgtatgatgttcttgtttgatattcttgaaataaaattatggtgttaattttatggatgaaatcaaagtcttattatagttggttgagttagacttaaattctgagagttaggtcaatttggcgttgagtgatttttgtcaaaatgttgaatttcggtaatggatttgaattagatttcttagagctttgattatgagaatcatgtgattattgagtttgattgggtgtatattaagcatgtgttattttatgatgttttgagattgcatacattccgttctgccatagaaaccaattgcatacattatgtgagttttgagtgtgttttggtgcattttcagagtgaaaaatctagtttttattagatctgaactaagtgccgctaccctgttcttgaaggtcacgacctgtgatttttgagcaatttttctctctgtaagggccaagatccgcaacctttgttgtacggtcgcgaccctctcggttcagtagaaccaaaaaatttataacttgttttgaccataagttttgattctgaactccgttttagatgttctttatttcgttaaaaagcttgtgaagagatctattatgtggtctagtatgcgagtcttaattgtatataaatattttatggaattgaggatttactctattatgtttaaatttgagattgtgactaagattaccgacacctgctcgaaatcatctgtgaactaaaatcttccacatactttggaattcaaataagaaagtgaatcttacacttagagttagcgtcatgacacacttttatgctatatggatagctagatataaatatatgttcgaacatatacaatccactgtcaagtatgctagacatgagttcgagagcttgacagtggattgtatatgttctggccaaactaaaccgcgagagttggattctacatagagcttgttataaaaatctcatttcgcgcttaggtcggcttacatgtaaacgacttctaatactttgaaaagattttacgagatcctagatttgtaatattattaaattcaaggtgtaaccaaaaccaatatttaatatgatattgaatttatatatgagttgcatcacttttttaaaaagtggtgaaataaataaataatgaaaaatgaaaatacacaaactttggaataaatacaaaatgagatggtccttttcttttttctttttctt

SEQ ID NO: 248798 - DNA, 973 bp, Cannabis indica
tgtatttgtttttttttttaaattttaaaataaaatagacattatattaaaatagtagaaaatacattctattattaaaatgatattctattactttaaaatataactaaacaaaaagaatataataaaaattatttcattcctattttattttattatctccaattaaaaaccgcctaagtctaaaaggttatttcgttttgataaaaacaaaaggacaaaactacactaatccaagtaagaaaacaatcattttgtacatgttttgatcgaaaatatataaagaaaattcgagtaagagactcaatcactacatacactatactaatctaaacatttttttttttctacaaaagaagaataaacttatcaaataatcaaatcgttcataaatatatagaaatgaatttcaaaggagcattacccactcgtaaaaataggatcatgcttgaatttggattaagtcaagttaggtcacccaaattcaaggtctaaaatttttatcaagtatacttttatgctttaaaaaatggtattatttttaaatttttgtgaattaggccaaattatactcacactctactttaaatataatacgtaaaaaaaattctctggctcgactcaggactaaggcaggttaggtctgtacctaaagcccactaaaatctagatttgacccaaaaattcaacacacgtatatatgatccatgtttttttttttaaaaaaaaaaatataagaacttaggcccaactcaggtggcccagtagcctatttatttaggggtttttacaaaatattagattttggacaaaagtttacaattttactatcacacgaattttttttacaaaatattgtctttttattagaaaaaactgcaagacaataaaacagaacaattaaaataactgtggaacaactaaaaacaaccgtgaaaacttaacacagtacacaatatgaaacttacacagt

SEQ ID NO: 248799 - DNA, 521 bp, Cannabis indica
tttcagtaccctcacccacctgctatgactcttttggatgttccccctgtcaatctcaatatttctgctagtggctctttgggttctactattcgattcccttcatttcttaactttaatactacctctgctttatcatttactcaccctcagcagtctactgaaatcatgatcccaactcctgtgaatcctaatctgcatgagatgatcccacccttccataggtctggtcttggtttgtccttgagtaattctgcttttactccttattccactgattctgtgattgttactgccactgttcctatggtaagctctgagcctttggtggagggttctgtttctcaaaatcctatttcatttctcatgatgggagttttactcttaactctcattctatggaaatggaatttggtctcaatatgaatcaacctgatttctctgttcgtggtaagggtttggcctctgcttcaggggttaagagaccctccttccagcatcatcaggctgttattggtggt

SEQ ID NO: 248800 - DNA, 520 bp, Cannabis indica
aaagtccgcttatttcaaaaaaaagaaagaaaaaagacagtaggaaatgcaagaccaaatattatggctggaataagtgaaactagttgagatataaaaaaggtgagaatttataatccagcttttaagattcttttcaaattaattaatttatatttctgaacacaatactttatgtccaattgaataaaaatgtatagcaaataaaacttctaatgacaatatatagatagttaattaattactttaattaggagatctgtatattttgaggaaaaaaaatgagatcgatattaaatttggcagtttcaaatattcaaaataaaaatatgtgtcctattaaagtcacaagttagatggtttatttttttttttcatttatattatatacatattaaagttttattgtcctttttcttagcgaatatcattttacagagggaaactcctctattttatgcataacttttaattttagttctagtataaacttatagataaccgtattgatatattagac

SEQ ID NO: 248801 - DNA, 568 bp, Cannabis indica
ccttggaacattgttttttagttcatccaactgtgcttgcacggatggattaacttgttcggtctcttggccgactagagtcatgtcaggatctctttgagctagattttaagcatgggccccgggctgagtggctggcgagacgtactgtttgtctagccctctccttctgtttagattatcccttagatcatgagtcgttcctagtctattaaatatagatgcattaggttgtcttagtgactggttggtttggccgaacattgggccagaaccattaacctgggtggagttattaggtataacttctcctgacgaattagtagataaggtctggccgcctaccgtacggtggcctgtcttgatcaatcatctatggctgcttgttgagccctcaatgtttccacctctttatccctccatgcagtgaacagacgcctttgctcttcaaatgcaaggttcactgtagcacagagctctccctgatcatggtgcagagtattagtatggccttgcatgagttcaagagcattacgaaggttctattggaatttatgccctaaataaa

SEQ ID NO: 248802 - DNA, 692 bp, Cannabis indica
tcgaaattcagttctatttactatagcataatcgacattcacttctcagatctcgcatcgaaatcataaaacagttaatcgatggccagacaattcaaagtaattaagcatgaatgaaataaaaaacatagaaattagggggaagtaaatcatattaaaaccataaagcaatgccaaacaacatccatctaaaccctaataaagtgtttagctacacatgttcatggaagcaaaatcacacatattaactttaagaaagagaagaagatagagaataaagtaatgctaaaaactctctaaagaatacctccattattgccttctgtctctgaaattcgtactcctttttcccttctaaattgcttccttgaaatcaactccagttcaccctttatataagctttcagggactaaaaagatataaaaacgcacatgttaaatgcctattccaattgggatccaaccaaaacccacgtgagagaaaaagacaatttttgtgcagtttacaggggaaggtcgcggcccgtgttggagtttcactacatggcttcgtttcgacggtgatttttttcctacgtcgactgatagtattttggccataattctctcgatattgctcgaaattgaacaattcaagagaacgttgtttcaatataagtaaccaagagagagaatatggacaaaccaaattt

SEQ ID NO: 248803 - DNA, 766 bp, Cannabis indica
tttgtatctgttcgtattaagcattatcttcaagttgtgtattaaaaaagtgtcaaaattagctcagggtcctattttaactaatttaaaaatagaggtccattttgtcatttaacaaaacacatggtccaatttgtaacttttgcaaaatacaagctccaaaatggtatttacccattttataatgatatttgttatcgttatattattctcttttaattaattttttaaaacttttacaatatcatagatttaatgttatctaaatacgcgtgttaaaataaaaaaaaaatcatgaattcaatttttaatactataaattattcataattttttaaaagtttacaaagatgacattgtaactataggaatgctaattacaacttcctattacaacctcttagtcaacctctacgttcgaaatcacatgtcggaatatattttttcataacgatatttattatagttacagtattatttttgtaaatttttgaaaaatttcaaatagtttacagtgtcaaaaacataattcctgatattacagtttaccacgcgtgttcaaaaaactataaatgtattttcaacactataaactattcgaaattttttaaaaatttatagagataatattttaagcataacaaacaccaccgtaaaaaaaataaaaaaaaatattccagtatatatttttaagcgtaaagattgactaaaaaattgtattgagagtctaattagcacccccaagtgtattttcaaacgtgagtcc

SEQ ID NO: 248804 - DNA, 1229 bp, Cannabis indica
cagatcggatggtaaaatctaatatccaatatataatttgatcggatatggataggcctaaaaatattggatgtgatacaatgaacactcctacctactatgttgtaggttttgttgtttaggtggggttagttaattaatctgacctttgataattaataaataatatacaatttaaaaaaatacttatgaataaatataaacaccattgaaaagttgttcgaagaaaaaaaacgtagaataaataataatattttatcaattatttaattttatcttgactatgagttatcaacataaacctgtatttaaaaatacaatcttttacgcgctcaagtgtttgtccatatcacatctctctccaaaaaaaaaaaaaaaaaaaaaaaaaatgttttccacatctattgtcaactttatattgacactagtttatatatataaatgaaattatataaatttatacatatcgatggagtaattcattgagttaagggttgtatccaaaaattatatatttttatatgtattaattatgtaaaaaaaaacatataattattagtaatttgcacccctaaattaattaatttatttgtaattagctctcccattttccaattccttatacacaataatatacaacattatcttgtacaataagttttgcataagttaggtatagatttatttatatgtacgtatatggatgaaaatatacattttattttcaagggatatgctaattaagttcgaacctttatataaaactaacacattatattacgatattattattattattattattattattattattattattattatgattattgatgtgtagaaagtgatcaaattcatggttgagttgaagaagtgttaaaataataaaatttaataacactagcatattaataatctgtacatttttttcaaagttttctagttaattaaataatatgatttcatatatgtgacaagattcatcatttgacaatttcttacatgaaaggggaactaaactaattccaactctcttcatatatattttcacatatattcagtactaaacagtgaataaatcaaactatatttgaaaaaaaaataaatgttaaagtcgacttaatttcaattatatatatatttattataggtaatgactcttggtaacattattaggtcaacaaactcaaactacccactaaagtatattatatagtataataata

SEQ ID NO: 248805 - DNA, 858 bp, Cannabis indica
gcttgcttctgcaatcaaaaactgaaaataatcattaaaaaagttaaacaagcaaagtatttttctgtgatacttgattgtactcctgatgttagtcatcaagagcagatgtccttaatattgagatatgtggatgtttcttcacattcggttaacattgaagaatcttttttaggatttttaaatgtgaatgatacaactggtcaaggactttttgatgttttacaaaatgagttgaaaaaacttaatcttgacatatttgatgtgcgaggacaaggttatgataatgggtcaaatatgaaaggaaaacatcaaggtgtacaaaaaaattttttagacataaatccaagagccttttatactccttgtggatgtcatagtcttaatttgacattatgtgacatggctgaatcatgtagtaaagctagagatttttttggagttatccagcgcatatatacgatttttgccaattctactaagagatggcaaattttgaaagataatgtgaaaggattgactccaaaatcattgtcatccactcgttgggaaagtcgtgtagatagtgttaaagctataagatttcaaatatcagactttagagaagctttacttgaagtgtcagaaaaagatgaacttgattctaaaataagaagtgaagcaaaatccttggcaacaaatgagcttggagattttgagtttttaatagcaattattatttggtttgaaatattatctgctattaatttagttagcaagcttttacaatcaaaagatatgcttattgatgttgctatggaaaaaataaaagggttaatttatttttttgaaaaatatagagaaacaggtttttatgat

SEQ ID NO: 248806 - DNA, 1059 bp, Cannabis indica
aatttccaacatatatatatataaatttcaattacttttatataattattcaacaatagttacacacaacatatagtaaaataattataattattaatttgaatatttattattatttaaattgatttataattaataaataaatatttttattattatgcttatcaaattatcgagttttcatatgtgtcatactttcgggctactttatttgtgcttacatattgtgtcttcaggcttgtcttgtcgtgtggtgcttaaccccatagtttacgccctttgtcatgctaatttacaacatcgtgtcatatcatgtacaactttatatttttttgtgtcagattgtgctcatgcctcttgtagggctgaacaacatcgtcccatgattaatctctttgaatgcatttctttgaatgcatttctcagattgtgctcatgctaatttacaacatcgtgtcatatcatgtacaacatcgtcccatgattaatctctttgaatgcatttcttttatgttcacatgtatttattttatgtaaataattaatttacaattgtattttttttaggttttggtatgtaaatattttttattttgtttttatggatatgtgaaaatggtatagtggatttttgtttctcaagtattttatggaaacggtatcttagatttgggctcaagttgtgaatactgactgtcatgaaacattcgagttcagcccaataacacctgaaaaatgaccacgcccaactcgactatgctcgacccgaaacccgacatacctgaacacccaaaaaccaagtttggttgtacattttcaagacccgaaatctgaaaacccaaacctgaacacctaaaaacccaaaaactcgactcgtgtgcagccctagcctcttcgtatcgtgtcaattccgtgccatgtggaaatcccaactcgcattacaacttttgttgtggaacatttttatccgtttttcatatttatgagttttttcagtgaattttatttttttcatgatttatgttgtaattatttatgattatccgtaaatttgtaaaa

SEQ ID NO: 248807 - DNA, 1137 bp, Cannabis indica
tagcaattgctagtgaagaagcaggttggttaagaagcctgctagctgagattcctttatgggaaagactgatattagctgtgttgatccactgcgatagtatcgcggctattgcaaaagttcagaaccgttattacaacgctaagagacgacaaatacgtcataaacataatactgttaaagagttcctctctattggagcagtaagagtggatcatgtacgcactgatgaaaacttagccgatcctttgacgaaaggattagctagagagaaagttcttaaaacctcaaaaggtatgggactattgcccttagaataaatgagtcatcactcataatggtaacccgacctataagactggagatcccaagaaataggttcaatgggtaataacaagttatgatgtgataaggatgagatcatgctatgtaaagcatgaaatcctgaagcgatagaaggttgagataatagaaactcttaatgagatctatactctatgtagagtggagtaccgagctacaggagtactcttgatagactcacctacgtgaatgtggaagtggggtcgcttcctatgaaatttgggcaaatttctagagcgttcactacactgggatagacgtgcatggccattaaagcacgggcttttggattacacccaagaaaggttgtgcgtggtacatcgttagagatagagttcaagactacgagtcactctagtatattctaagttgtattcacaacgcaaaggttcaaatcgaaagatacctttgcttatgctcaatcttattgcttagaatactgctcgaatagatattttttaaaaatttcaagtgggggattgttggaactttgtgaaatgttaaaaaatgatgtgtgtgagtaggagtcccacatgggatagaaacacttcatttgaagtgtataactagtgcaagtttgagatatgggtttgggccccaaggggtacccagttttgcgcgcatgggtgaggactcacacaccggaccacccacacacgcgcgcgcgccgccgccgccgaccgaccgtccgagccgagctggcgggcgggtgtggtgtcaccttattttttggagaaaatttatttcttaaattattatttatttaattaatta

SEQ ID NO: 248808 - DNA, 1221 bp, Cannabis indica
aaaaactcatacaagagagtttcctgaaaaaacaataatcataaatttgaataagattgactcgtggactatgcagaattttaactgcaaaactatgtaaaagaccatgtgttcatatattatttttctatagcttttattttttctgtgtgagatcaatattgtgaggctcaattttagttaacgaaaatctgcgttaacagtttggtgctttcattgagagcctctgtgaaaaagctcagaaaaaaaaaaaccctcctttcttttgaagagaaaccatctccttcatggctgaaaatccagaaaatgttaacaccccacatgaggaaattcatcatcgttctagaaaagagcccatgggctccagaagatctaccaacccgcagtcttgaaggaccacccattccaggagggctcaacctgagggtggccccagtgcgcggaccacgcgttctcagagaactcgacccaacgttggtcccagtacacggacaacacgctcgaggagaactcagcgtgggaatggtcaaaaccccaggacgagggatgaagagcacaatcgtggaggtgcccaatctgtgggagaaagaacctatgaaacggaaacccgctacttgaggcgccgtctagaagaggcgcagcagcgatacggagagttagaatgcgatgcggcctcggccatagcggcacaggggacgaatgctcaaaatcaacctgaacctagagtgagaagaccacgaggcaaacctcgtggctcacaaaccaggagataagaaaaggcctcggaagaacaacccggggaaaatgagacaccccctgaaaatcaggatgaacggccaaatgggagacaaccggaaattgatgaacgagaaattccttacggaatgaggaagatcttgggactcaacttggagaacggaggtcacctgctagacatcaccaacgttcttcccaaacccagagtacggaccctggtgaggaaaatacgtcaaaccgctctccgaaggaaagaatagagcgtgaggaagtaagcgtgacttcgaggcggttgagaacccatagtcgatcaactcgaagaggataaagtactgaacaagctaatgatcaagaaagtgtaggaactagtaaattcccgagccactcaaagacaaagtcaatgagtaagacgcgatctatgagtaagacaagatctgtcagcaattactcccaactggatctgca

SEQ ID NO: 248809 - DNA, 1017 bp, Cannabis indica
cctgatactctagaagcctcagccttccgtttgtgattagggttgccattgtcggtccccttactgacattaccactagcaggaggattcgatgccatgacggcatcctttacagtctgctctttctcaacatgtttctcagcctcctcagcaatcaaggctagctctaccactttcttgtacaaaatgtcatgtgaagtggtaatcttcaagtcgtagctgattggggcattcaatcctctcacatacttctgtttcctggtgaaatctgtgggcaccaaatcaccagcaaacttagacaaccgatcaaactccagagtatatttggccactgacatcttcccctgagtaagcttcacaaagtcttccttgtgtgaagttctcacaacgatgttataaaacttttcctcaaacaaacttttaaattcttcccaggtcattacactgacatcccaagttcagcccacgatatcccaccagacgcgggcatgatcttgtaacatgaaggctacacagttcactctttcagttctcgtcacccccatattatcgaggatacgggtaatagtgctcatccactgctcggcctttatcatataaatacctccaagaaaagttggaggctgcagcttcacgaaccgctcaaataccaagtctcggcataacaaacccttggttacccaccactggcacaggtgctggtggtaacacttgatcaacaaggcagcaagttgccttaatcgtcgcaactcttcttcttgacgaagtatgacacttcgccgaagtatgacacttcgcatttcttgaaacatctgctaccaatcagcaggaggattagcattaccaacctccacattatcccctggattctgcgaaggtggaggcggtgccaggggattggtttgggcagccccaggctctacttgctcgctctgtcgtctagatgattgcgaagggtccattactagtacccttgtaattaacaaccctagcaagttaagtaccaataccacactt

SEQ ID NO: 248810 - DNA, 1371 bp, Cannabis indica
cttaactgattttgtgtatatatattaaaccataagcatgtaaaatacatgtaaacataatcacttcaaaattcttaaattgataactatcagactctaatgggttttatttagggcacaaaacccaacatccataatttccggctccaattgaggtttgaagttcttaggaacaaatggaaaatggttggtgcgtctgagtattatgtgtttggaagggtgaacttctgaactcagaagggacattctggtagaaaatagatgatctattttgaaaacggatctcactaaaatgccagagctttgtgaaaaatgacaagcttgagccgtctttttatacacaaagtccagtgacaagaaagctaaaaattgagaaatccaacggttgggagtagggaagaatatgaacagacgattcataatgaccctcgaaaccgtacaaccgccagaatcaaaggatgcattttttcaaagaaaggattttggcaaaaattccctttgtaattattaaaaagctctttttaccgaaaaagaactttttcaggggcaattgttatacccgaaattcggctaccatcttagtggaggacacgtgtcacgataaggggaatatagatcgatgcaatcgccttatatgaaataactcattaattatgtgagtatcagagtatatttgtaacctgtagactgtaaggtcttaggcgaggaactaatatacaaactggtacttaacatattagcgagaaactatatgtcactgaatgtaaattgcgaggcattaaagacagtacacattggaagatgaaagcgacatttatcaattgtgaaagttcttagaatacaaactaagtgttacagacgaattgactcaagaacaagtaagcgaggtgcccgtctcgttatgggaagacctcatataacttcatcccgttagcatcagtgaggctcacaaccctcgcaagtgagaagctaacattcaaatgagtaccaaagaattctttgtaaataagaaccgtgatcaacaccagacatgcatcgtcgacctcggaaggaagaatgaccccaactcgctattgagatcactggaaccaagtttctgttgagacaactccagaaacaacaattaaagacgtgatttaaaacacgatcattttgatccagttaagtggaaaaatcacagctatacgattttcaaatcataaaccgcatttacactacgtgatatgtaaccaaatccaatgattttagggatgattgttgtagacatattattgtcaactttgtaattaactgtccactatgtaattataaatagtgacaaagaagatcaaaaaggagacgaaaaaactcatacaagagaggccctgaaaa

SEQ ID NO: 248811 - DNA, 506 bp, Cannabis indica
acatatataaattgtaaaaattgaaaatatataacaattaggctgattttacaatgtacccctataaaaaaagtacactgatacatttctgtctgtttcggtattcagaataattttttaatcgattttttttttcatatcacgtatgttatgttatagttatttatttaaaatattttacaaaattataaaaattttaaatagcttataaaatacaaagcaatgttcaaattatttatttcatacgagcataactagcataactaaaagagtttgttttcaacgtgttaaatttttctaaatttttcaaaaattttgaaggaaatctcaaataactgcaatgtacacgatcatgaaaaaaattagattaaaaaattttgctggatgccgaaacagataaggtacaacagtgtattacttttaaacggtgcattgtagaactaaaaaaaactacacttcgcatacggttgtattttattttaaaataattaagtcataaaattata

SEQ ID NO: 248812 - DNA, 1672 bp, Cannabis indica
ggtatttataggccaactttcttgcatgggccaccttggatggctcatcgtagggatgaaatcctaccgttggattggtaggtggcatatttcccatgtggcttttatgggtgtcaaattgtaccagttgtacaggctgggcttcagacgtgtgtcacctcaaggtcattcacatttgaatttccctttctcctagccgttggatcatttagcccaggatacaaggacacacatgctttgcacgacagcgtgtcgtgggggacaatctctgacattgtacatgaaaaagcctggtcactgggtccgtaccctgacacgcgtgggctgaacctctgcgggccaaacgcataccctaaattggttacgattttatatatatatacattatttatattacataattaattataattaataattatttaatatttatttaattaaaagatatataagtatatatttaaatttatggtggtctgatattaaatctcaaccacttaaaataatttaacctattattttaattaaataaatattttaaacctaaacctattatgtgctataaagaaagagaaaaagatagaaaaccctaatatctcatcttctcttttctcttcactttgtatttttgaaaatagctttagtcattagagtttgaaaattctatttctcttcctcattgattttagccaaatatgactctacgtgacttgagtaccagctcacactactctagattacactcagaccattgtggaagatcatgtagaatgctacatgtcactcattaatggaaaagaagattcgagttcattacttgacaataccctgctacagaatgagaatcaatggttaaagtaattgaacggaatgagacatttaattccgatgcattcccaatgtaagaaaatcctaatcttcatatgtgtttatttatcgtttttaggttgttcatatttagaatgttaaattataattttaatccaacatacatgagtaataaattaagattctgataaaaaaatttctaacaacaacaaccctaacacttaattattagacaaatcatccttcataagaaggaaatacgacagttgagcactgaatagggatcataggtccctccaaggcgacaaacacctgtgctaccctcccgaaggtgaagatagggctagaagcaccacctctagcacccaagatccaaactcatccaactcccaccaatcaaggaagctaattgaggtgcgaatttgtgcaataatgctgattggagtgtagattttgtgtaattaatgttgattgattttttttttcaccataaatattagatttcatcaagtggaagtaagttcataacttttgtaagtagaaactctacttaaatacatttgtatttctctctgctttcaagaaactcacttgagctatcttgtgatcttgggttcagcatacggaaaatacaattgaaagagtagtaggatattaccattaaaattggggttgaacctctataataatattggtgtaacctttaccgtctttgctttcttatcgatttttacttagtttttatggctccgcatcagttgaccaaaatctaggttagcaaaaattatttgcaatgaaataagaaacatgtagaaaagattttgaacgtgcatttggagtattg

SEQ ID NO: 248813 - DNA, 1498 bp, Cannabis indica
atattaactaactgctgttttaagtttactatgctttactggtttctgttagttagttttttgacagttagtttctttaactaactctcttgtatcttgctttgagtaatataaataaagggtcttagctcattttgaaagctaagctattcagctaaattcctctgtttcttttctttctctgagactttctttctctctgttcttggtttctaccattggtttctaccattgtcaagtttagcttgtttagcttctataatacatgtactactattttatttattagtagtttttaaggcgctaaaaatatgtgtatatactatattgattgagactttctgtaactacttaatctttttattataacttataataagtgtttaggatgaatacttttaagtgattagggtgttaatgaactttaatccacgtcacaaatcatttgtatttatgtgttgaaccaagttacaataatgatgtttttgtttatgcaaggatcatttaagagtctttttaactcttcgtgcccaaaatccttctaatccttttacagtaaatttatctctctatttataggaaaaatggatgagtcttttgaaaaggggcttagcccgctcctccaaccagctgtagtctactaggctatatttcttaacaaggaaatgcctttttgttgcgggtttgttggataggctagacaagctatagtatactaacttctaagtcagagaagctgcttgaagagctggccggagaatggccagacaaagaattacttgcctggggtacgggctggtcttcaaagagaagctcgagcaggtctagatctatctggtatttacctccccaatggttgcgcctattcatctgtgcaaaaaggaaagggaggtgaatatctggacaacacaaggagcatccgaacaacatataaccagtcagccatggtgaaaacaccttggataggccagctagggttcctaacaaatttaaaacaaccttttctataaaacggaagccattaaagtcctggttcttcatgttctttgaaactcaaagtccaaaatgaagaaaacaatgccaagattcaagttttctttcctaaaattcctacattcatctatcctattgtatccgtgcaactattgaagctggggtttgtctaaaaccacgatgtgaaggttttttgcatccaacaatggcaaaaaaagaagacattaattgcaaaaacataaatttccaaaagaaaaagagaatagataaagggacttactaactgaacaatgttgattcgaggtttggacaaggacaattagggtggtgacttcctctttgaacgacggtggaatcatcaggtttcttgaagctttcttgcttctcctctctatttttctttttcaagagatggaaaatgaaagtaaaaaattgaaagagagtaaatggcctttatataggcttcaatttggtttctccccaaaaaaactaattaaaaaattaa

SEQ ID NO: 248814 - DNA, 854 bp, Cannabis indica
gaaaaatggaaagaaaaaattataagaggacacatagacactctttgtgctttcctttatattaatatattgatttgaatttatgctttattcaccaaataaatattaattaataagaaataaagaaggaaaaaaaattaagatgaacggttgtaatatagagagtaattataaaatcaactgatttttcattaaaaaaacattatcaatatttaatgatttcttagttatataatataaaactcatatgcacttttggtttgcatgaaaagccaaaaggaatatttgagaaaatattaaaaaataattacaagaaatatttgtatagttaataagaaactacttttatcacatacatcaatatttatttaagaaaatttaaattaaaataaaaacaacagaaaatacattatcaagctataatatatttatatatatatatatatttctttttgtagaaaaaaaatcaatatttctcattttatactttgcacaacataaataataataaataaaagaaaacattgcaataggagacaatctctgccatgttttcattctcaaatctaatacttcttctaacctaaaaaatattgtgttaattctctcaaaataaaaaattaaataaaaaaagtgtgtttaagcaagattccctccctctaattaaactcttaaacaaattgatcactttttatattatttttcaaatgtgaacatagttctaattattatagttttttattttttcttaggaaaatttcttatagcagttacatatacaaaaaaaaaaaacaaaacagtgatacttttttagttataatataatttttttgtaactaaatgtaatttttagt

SEQ ID NO: 248815 - DNA, 563 bp, Cannabis indica
tccccacttggaagtcgcattccaaaagttctcgtgtagccctgaatcaatggctctccgaacttattgccatagtcagatgcaccattactagcatcaataagaatctgcaaaggtgacgccaaattagatggataggtgaaagaaggatcttcccaaggagcatatgaaccctccatattgagattgccaacacagtaaccagctgttgaggcaacaacaaaagaccctctcccagtggcatgtgtgtcccttatacgtccacctgcacccgtttctgcaccagggtaaggtgccactgcacaaggaaaattgtgtgtttcagcagtgaacaacacgtcaagatctcgaagagctgagtctaatggacatgttgaaccaggacgaactggtctcaaatgcttaactggaaaccccttgattgcactcgagttatccttgaacccaattacagaattgtttggatttgcttgcaaagtgctcttcacaatctgcattagtgtcctatccatcggctttccatctataaccattttaccagtgaaaaaccaatgcctgctatg

SEQ ID NO: 248816 - DNA, 677 bp, Cannabis indica
agaaggaggcggccaaggcgaagagagatgctctcctggctcttgtcacttgccagtactgtaagaagctctttaatgatggagtcttcatggcctggcaatctaatggtcagaatcttaacctcagcttttatcccaagcctgaagaggtccttattcgcttttaggagaagaagaagaggctggatgcagtgttggaggagcgcaggggtcctcgtcttcctcctcgggctgattaaattgttttcttatctcctttgttattattattatcatttttttgttatatatcctatccttcccctcacttctaagacaatttccttctcttttttttttcttaaggggagacatttatggcccgttcccaggccttttccttttaaggtttttctttatccaaacaatatatattatgttcgaatgtatttagtttttaacttgatctgtttacatttgtccgtgtgatttgccttagtaccccctaagtaacatgaaaattagtttttaagtcacttagtcttacaaaattaaattagaggtcgcatatatttatttggtaaaaatttcctttatagaacataaactttgttttttagctattagtaatacttttggaggtggtcagcattccaggccctaggcattgtggttccatccattctttttagcttgta

SEQ ID NO: 248817 - DNA, 634 bp, Cannabis indica
attaacattaatgtaaaatactttcttaagattaagtaatcatattagagataccataaaaaatttccatgaggattaggtattttgcctaagtcattcgactagacttaaaaaaattttctatcttatcctcattgttttgataagttaattctatccatatgaatggttagatttactttctcagttttattctaaagttcctatcacgatcacaacatagcaagcaatcactagtgtcatccaaataatgatgggctaaaattttaaaattctctcactaagataaggtaccgtgatactatttccaagaacttcattggtatcaatttctattactacagtaacatgttaattgggacacttataatatcaagaataagctctaatggtttgctagttcgtttattatattatattcgtgtctattcaaaatatatgtgccatagagatattgtggtgtattgaatatagtctagacttcaaagttaaaagtgtttgaattacatatatcaataacttcttccacccctaagtgtcatagagatcctttggagttatgaatatagcttagagttcaaaagatataaaaaatctttgaactgcatatgttacttcttaacatcctccaccc

SEQ ID NO: 248818 - DNA, 527 bp, Cannabis indica
agtgcgtttaaatgggaatatatttttttcattttccaatggagtaaaaggtattttgggtaaaaaaattctctttccagaatgaattccagtaactatttcagcatcaataatattagagccaaattgtcgacatataagacgtgttccattacaaatccttcagaagtaataatattacgaagtaatataattggacaatttaattttagtgttaattcatgagcagagaatccacttggtgttaagctattcataaagtcttcttgtactccttgttcatttttatctatagtttcaccaaaactataactttttacggagttaccaggaaatcgattaataagaattttattaatatggtaaacatactcatttttaggagttaaaatcacgcgattgagtattgtattcatattttctatggagttattaatatctggaaagacgaaatctattaagttgttaagcgaagtatcatcgtcctcataaggtaaaatcatagatgagagtagttgtatctttcc

SEQ ID NO: 248819 - DNA, 4184 bp, Cannabis indica
ataagggtccattaaaaaaatcacattttagtaaaaagtatcacctattttgtttactacgattttaaaccgttgggaatactaaatttttcccgacgattttaaatagttacttaattttagtgacggtccccgaaaaaaaattattttcaggaccatcgcaaattttgatatttgtagtagtgtacgtataaaatattgtgtgtcattttattttctacattatatttttgttctgtcagattatgtgtctaatagaatcgagttaaattatgttcaaacaattttactacatttctgtattatttaaattgtttgaaaattttacttggtaataaaaatagaatttcaattggtatcagaacagttcactaaactcttagtgagatcttgtatttaacttctgtttaatttgtttcttgtgtgaaatgtctttctttgcagaaggaggctcagtatctcatccttcgtttctaactgactctaactatccttattagaacattaggatgagagccttcattaaagcataagatgaaaatgtatatggaaagtaattttatatggatggtcacctcctacagagaaaaatgatgatggaagcacaaaggtaaaatctaaactttattgaaatacaaaagaaaaaaaaattgtctagttaaaataataaagctctagttgctatttttaatggtgttggagaaagttttatcaagcttatttctacttgtgtttctgctaaaggtgcctagacaatcaatcaaacccagtttgaaggaactacagatgttgaaagatctaaatttatcatgttacaaactaggtttgatgatcttagaatgtctgattctaaaatactatctgaattctatgaaaggttatttgaaatttctaacaaatattttgctcttgatgagaaacttgatgattttgttttggtaaaaaagatagtgcgagtacttcctgacatgttcaatgttaaactcacggttatggaagagacaaaggattttagtattatgaaagtagaagaattgatggggccttcttcgtacctttgaattgaatcaagagattcatcaaaaaaaaataaaccaagtgcctccaaataaaagggaagaccataactttcaaaagctctgaaaaagaagcatcagatgatgaagatggtgataatgaaatgacaacaactgcattaaactttcaaaaatacatgatgatgattggaaacgaaaagttcaatggaaagtcatcaaaaggtaattcttctcctcttaaaccttttcaatataataacaatagtattcagtgcaaggagtgtgaagaatttggtcatatctagtcaaaatgtgcaaataccttcaagaaaaataaaaaatttatgatagctacttggagtgatcatgactccgaaagtagtgaagatgaggaaggtaatgttgcattctcttctatttttccaaattctatgtctaaagctgaaaattttgtttgtttgaataatatatcttttgactcataaatttaaactagacttttaagtcacactcgctcgctagattagaaagaatgaataagtatttaagtaagagagacacaataaatttataatacttcactccctgtattgtgatagtaatggagctacatctactttgagtttttatttctcatgagatggcaattatagaaaaatactaagtgtcagaagctctaatttctagagagagaagctctgaccttgtgggtagttttctgaatgtgaaaaatgagcttatagagctctcctttataggtgaatgaggcccacaaaaataggaaaaaaaaatacaaataagatatttatgatagttaatgatgatctaatagtgaaaattagctcttggtggtgatggccatctcttggagcctgatgggtcccactgtgggtaaccctgagcttatttttgtaactcccttgagtgaattttgacgatgataacttcagaattgcgtccgagtgtgagacatgacttgatagagcattgaattaacttcaaaatgcaagttgaatcgtgtttatcaagtcataattgagtgagttattgatgttttattgaaggtagttcatgacccagcgcccaggttgacatatgacgtcaatctggatgttgggtaagtataaaaaatcaaagggatgtactttaagatgcctaagtgatattttgatatcacttagtcagtttctgtgttttgacgaagtctgtcactagttctcagagatgttgctattttgcaaaaatgagagactcgaaactcttcatttacgggtgagctagaaatgagaaacgcaaagttgtaaacttgacttctctgacttcatagatctttgtcattgtgaaaaactagatagacgatcaaaacggcatcagattcagataagcaaaacccagcgcatcccgtcaatggtaccacaaatttcatcaagtgacactctcatttggttttgagatgaatgttgttgatgatcgtgtgtatcacaagtttagtgggtgtaaaacatgttttccaagttttgtatgttgatgacatactgcttgcgacaaatgatataagtatttttcacgaaaccaggagacatttgtcaagaaattttgagatggaagatcttggtgatacctcttttgttttaggaattcaaatacacttagatcattctcgaggtattcttgggttatcacaaaagatttataggtctctctcttctctcgcaatgaagaagaagaggatatctcaaaagcatgttacgcaaactcgaattgaggagccctttcaaccaaactacttgataatggtgtggaaacgagtggagtaccatagaaattggatttactccctgagatagatgtaattttggagatgttgaagaatcaggaagagattgtaagtaagagggaagatgtggaggaagtgatgaaggataagttgccagaggtaattgggaattctagttatgataattttcctaagaaactaggtagttatgttaaatcttgggtggtaaagactgagcaggggccggggtttttcattcatcaatttagaaacattgagctaaattaaaagagggccaatagactgattcagcagctaagattcactatgcatagctaatgatcaaaaatggaaagaagtagggtaaatggaaattgtagaagtcaaggagcaggcttaaaattggacctctgctgtgatttgtatggtgctaggggaaaatcctccatttgttgtttttgaaggatttgtcaagcacatttggggtcattttaggattgaaagagtggtgagaatgaatatgggcctaacaatattcaaactcaatgatgaagttacttgggatctggtgttggagatctggactggtgcaattcgatcaaaaacatgtgatcatcaaaccttggactcgtgatttgaatgcagtcaagttagtttattttgtccctccctggattcatttaccaaatcttggcttacaatactgcggtcaaaactgactcagtgctcttgttagcactattggtaaaccagtcataatggataaatttacaaatgagagatctatgataaggtttgctagggtactagtggagatgaaaatcacggatgatcccccttacattattcattatgtcaatgaaaatggatagattaaggaaaaaaatttggggagtggctttctattaaatgtaataattgcaaaggctatggccataatatggcaaaatgtaagaagactaataccaaggagtgggtgaagaaaaccaaatagagaaatctgtagaagttactagagaaatgtctgatgtaaattggttgagaaacttgagaatgaagtggaaatacatgcggatgacagtaataagaaggtcctaggatcttcaattaagagtggaagtgatcatcactcactcaccttcacctaataagggtaaggaaaattgggaaactcctaagaaaatagggaatttaaagatgaaaaggaaacctattactactggttctgcaagaatccaaaatacttttaaagtattgcaagagcaggaaaagggagggatcttggaggattcaactcagaaagttaaccatggactgatgtagcataattagtaggaatgttaagggaatgaatgagagagagagagaga

SEQ ID NO: 248820 - DNA, 755 bp, Cannabis indica
accgttttgagaatttgcatgtgttctgattttctatgggtaggaaatgcatgaaatagtaggatttgttacttattctttgtaagatagaaaaacactatatttttctagaaaatacagccctgaaacttaagtaatcataggtttcagggagagcattttgaatgtttgcaggtttttcgatgggtactccggataactgcattcaaccaatagctaagctttttgtttctacgtattagagtccccaactcttagaccctttaatttcttgattacttacatttttatttatgaaaactatctgggttctcgaaatggtgggagtgtcccattaccacaatgttcatgcaatcttcgcatgccccttgggacactgggatacgcccaaccatttccttagacatgcggttagttttcattttgctctcattttattcattgtaggaactggctagattctcgaaatggtgggtgtttctctgtgacttaatgttcatgtatcgacatgacccttatgacactgagaaacccccagccatttctagagatacatggccaattctatgaacttttatgttttaatttttgcacgggtgagggcactttgttaaaattgcactttcaccacactgaaaagatcttctatcttttagatgagtgacctgtcagatagtcagagatatgattctggagaaggggcattcgcaaatgaataaaaataagcaacagcttcatacccacctcgatgtctg

SEQ ID NO: 248821 - DNA, 719 bp, Cannabis indica
ctaatttttagcctaacagtaattataaaggggacttttttttagaaaaaaagatcaatgagacaataattttttttaggagagtttaagagtctaagattttttgttgattattcttccattaaaatctctaaatattacatttggcttttaatattttgttgacgaattctcatcgtcaataaccacttatgtatatgactaaaattaaatccattttagaagtttgttcttattcttgtatctccgatataataattaaatatgtattttataatttttactataattaaaatgtatgatttttcgttgattgttctttcattaaaatctctaaatattatatttggttttttatatttcgttgataagttctcaccgttaataatcacttatgtatataactaaaattaaattaattttagaagtttgttcttattcttgtatttccgatataataattaaatatgtattttgcaatttgcactacaattaaaatgtaaaaattaaaatatatatatatatatatatatattttacaattacttatgaaatagaaattaaatatataaaggtataaataaaatgaagcaagaagagttagacacatgcattatacgtgctagcctcacttaataattatataatatatatacattttcttataaaatatgattaatgtttttaataaaaaatattaatatatataataaatatta

SEQ ID NO: 248822 - DNA, 784 bp, Cannabis indica
tccattcctattcctattcccatcctcattcctattcctatattttcattcctcccaaccaaacgccttagtgtcaggaggattatatataagacgacagtaggtttcgagaagaggaagttttagctttaggtttaagaaattttacagctggagtatctctaattgagtatcaaaaacaaaaagattatattttaacatacttaagaaaaattactattataatagtgttctaaaaagtttactaaatttgacacatatttagcacaagatataacattgtgacaaatttaacccacaatttactacaatgtattgattaacttttactcaactttacattttttattaccatattactattatttaaataataaaaaataaataaaaaaaaattgtatattttcaatcaaatattaaatgaccatcaatataattaattttttttttattattttacatcttgtctattggagtacaattataaatagtaggccaaatatatagtacaaacttatttgttttatcaaatttaacacaaattttagatatctattgaaaacaattttccactaaaaaacaacaaaattgaagagtattattatatatttttattttgtaaaatatgaatataaattattatttaacaaaatgtatggaccgctcaataactcttagtgcattttcagtggagataaaaataagtgatgcaaatataaaatatagttaatttttgttaaaaatctactctaatagtataccaaattgtgatgtaaatatgtta

SEQ ID NO: 248823 - DNA, 1154 bp, Cannabis indica
tctatctcgagccaactagtaagtgcttaatctaccatgagttgcatctgtgtgcatggcagtttcaacttctattgcatcatccaatggaacttttgtaatttggcaagattggagacattactccacctcaaattgcaagttatgaccttgtgtctgttatgtaccagttacagtaccccctttgacttcattaccatttcatcttctcttaacaccacatctttgtttatgagacatttcttatgtcctagtttaaggcaccacaacttatagcctttaacaccatcaagataccctagaaatatccactttagtgcccttggttacaacttgtcttgcctaatacgagcataggcaatacaaccaaggactttcacatgctcaaactttggtggcttctttgtccacatttcttgaggattcttgaaatttagtgcaacaaatggacatttgttcataagatagctcactattttcacaacttttccccaaaatagtctctcaagatcaacatcctacaatatccatctcactctttcattaaggattatgttcattctcttagtatgttcattttgctgagggttacccttaatgtctaaaaatttgttctttgttatagaattcctttaacaaatttgagcaaaaatccaaaccattatcagttcttagcttctttatcttgaatcctacttgattttcaatgagcttcttacatatagtaaaggtgttgaaagaatgatccttgttctgtaacagaaacacccataccttccttgtataatcatctacaatgctcaaaacattgtcgttgttggtgttgaaaggtggggtattctttggttccttattgtcgttgttgttgttaccgccattaccggtattccccctcttgccattgtgggagccatttcttgccatcgcctccttgagagctttggctatttgagcttgtcccattcttttttctcatagcttggttgaagccttgagcattttgctcggattcttccaatttaatgaactcatcagccctgtccaagaaatctcacatggtaggagttggttttcgccttttatctttccacaactgacttcccactaaaatgccctcatgatagcggcctgttttccatcatcacttagatttt

SEQ ID NO: 248824 - DNA, 956 bp, Cannabis indica
tggccgaccagcttagggacagcaccatggctagccagcctgtccaccacagggtcctggccggacaaggagtgctttgtaggccttgatggacacttctacacgtagacaacataatgggttgtgaattgggccctaaaagcccagttgaatggctgaataatatctggaatcaagggcactttggtcttttataaatatctaactaactatacaattgctaagggatttgaattgtaaacctagggtttaaggcctcctatataagggccttaacctttgactgaaaacctaagttacctctaagctagaaacttgatctcaaaccctaagtgtctaacaaactctctctttctccctcattctctctctcacacgcctaccttaggttgtccaacacttttcttccaagcattgattcatacattgtaagcctaagggtactatagcagatctcacatgtagcgatatggatagtaattccctcagtataatacaactaaaggggaagtaggtcgttacccgctatcacaagggggtcgaacctctataacaaatcatattgtctattgcctttcattcttatttgtacacacacgtggcaagcatcagatctgcaggaccctagtgtctgttgatcattttttgaggtcaacagtttggtgctttcattgagagcgtgaatatcgtgatctaatcaaatgtcatggtgaacacaagaagaactcctattgcaccatctagatcttcgagtctccctcaagacccacagatcatagattcaaatacccaggttctattcacaattggaatcctcatgaatactgcagatgtggtgaatcctgtcaccacaacatgcgcaacaagtccggccaacacagctggccaacctgatgtgagcatctcggtggatccaagtggcaggcccacgcctccaagagtagatccaccattgg

SEQ ID NO: 248825 - DNA, 882 bp, Cannabis indica
tatatatatatatattatattatgtaaatttaacttaagccactaagcctatcttagtggtgagagaggaggtagaaaaaaagaaaaaaagacatgaattttatgacctaaattaaattgtgtggtaaaatcaattttttacgggtgggtcggctccaacccgttcattttcatcgggtaggctctggttggttttctacaaatgctcaggttcaagttgaatctgtatctacctaccaacctgccactttaattgttttttaaaattttcctaaaaacctaaaataagatctaactttttatgtatctttttaagaatttacatattacatgtaatccaagtttttatctatgtttgttatttaagattattgtaaagttaacttttaaaagtttcggtgttataccagaaattataaagttatattttcttttattttctttataaattttttttattctattctttttagtaaaggttataatttacaattgttttttctattttaaaatataaaattaaaaaaaagttgacaagtctactgttctgctcgacccgaacccgccaagacgtgttcaagtttacttttttttttttttctactgaaacccatcaactcaaaacctaatcaactcgctcgatattcagtccttacaaatagggaccatctcaacacaatcccactatcgatttgttacatattagaatttagagaggctttgttacaaatttcaaagagtaaaacttaaaaataataaaatcctaaacctagtcaagttctcaaccatgtatatataatatataaattatttatttatacttgaaaaataaaaaaaaaaaaagaaattatttttatttacatatttactcatttgtctttt

SEQ ID NO: 248826 - DNA, 569 bp, Cannabis indica
ttaacacgctgaaaaataaagtttaaatttattttatagacatataaaataaaatagtctcaagtgcaacaaactatttgaactaaaatttcttaaaattttacaaggtatcttaaataattataagatatagaataattaggatttttacttccgaactttgacatgtaccaaattatgtacttgaacttttaaggtcgttaaaaatgtctctgaactattgagattgttgtatttaaggaatgacttttgtctaattttagtaaaaaaaagtctaacatgtatgaaagttcaggggcatcatctaatatatgtcaaagtttgaggggcatgattcggtagatatcaaagtctaaggagcatagtttaatacataaaccatcatcgaaatagtaaatttgaatgaattaaaccaaaattcttaataaatttaacaatctcaataatttggatagcataatttgatacatgttaaaattttcgaagtaaaaatcccaattgaactaaaaaattttgtgcagacgtccaaaggtagaagcacccaaagataagtgatggcctttcaaaaa

SEQ ID NO: 248827 - DNA, 704 bp, Cannabis indica
aaacgttgtctcacaactaaaacaagctaccaattaacttcaaatcagctcaataatcataatcttaacatgagaacacctcaatgaaaacaaatcacaagaacatcaaccttaacccaaaaatcatgcaaggttccaacaaaaaacataagaaaactaaagagaaggatatcaaagctattacctccaaagaattcaccaagaatcaactatgaattagtaaaaccagatgaagatcacaacaagcttctgattttttcccaagggttacgagagagagaaaaatggagagagagaaaggtgtttttcccttaaatttctattttttaaaaaattagaaatgattttggttttatctacaaaattaaggaataaaaatcagattattcatttaactaatgtccactaaaggacaaaaattcaattggggaaaatgaccattttgcccccacttaagccaaaaagtcataaaatcacttagaggtattttcgaaaactctaaaatcccgactatttcggacattcccaatgtctaacttattgtcccgctatactaaaattactaagatgtgattctaatagccatacaccgcgttccaatgttgtcgggcacaataatatgcaaaattgtgaaacttctatacgtgacataaaaatgcattctgaattcaaataaatcatcataaataattaattcaatacta

SEQ ID NO: 248828 - DNA, 510 bp, Cannabis indica
gtgcattgttgggggaatcgaaattactcactactctgcctgaaaagaaaagaacagagatactcgaaaaggcacacagtgccactattctcagcttgggagatcgagtacttaggaaggtttcgaaggagacaacagctgctggaatttggctcaagttagagaatttatacatggtaaaatctctagcaaatcgattgttcttgaagcaaaagttgtatgcttttaagatgatttcaggcaagactgttgaagatcatttagatgatttcaacaagataattcttgatctagagaatatagggatcaagatagaggatgaggatcaggcaataattgttttgaattctttgcctacagagagctatgagcactttgtagatactatgttatatggtagagagtctttgacattagaggaggttcaaagtgcattaatgtctgaagagatgaaaagaaaatcagaacaaccagatgagactgctggagatggattgctggttcgaggaa

SEQ ID NO: 248829 - DNA, 1118 bp, Cannabis indica
attattattattattattaaaggtgttaatttttgttgtattagcttattatgttagtttttaaattctcatattaaactatattatttattaattatatatgagagagattttattataactattagtggtattagttgttatagaattttagttcttggttaatagagttataaagttattgagttattcaagttattaaattgtttaagtaatctgtgtctaggatctaatgccggaaccaactgcaatttgacaagataagttttctcttttttatatagaacggatatgtttaataattttcaatatgattatttattttgtagtgaaaatacattgtaaaattttcaataatatttatttatttattatgattattattttattttttcttcactaatttatattttgtttatttgcagttaattttttttctcttttcgaggaagtcaattctcatcagcaaagctcttctccttcatgctggttagacgatcccctctcgtctagagttcttcgttgttggtttttttttttttgttattgttgtttgtttgttttttttttttttttttttttcctatgagtagatggtttctgaaggtattgtgttttttatccattctttttctgaggagggtgtctctaagtggggttgttgttagatcttttaggttcttgttatctgtcttttctggtgtatgtcttcaacattttatgcgaaatggtaatatcgcagcatggtgagtatgatatgcactacaaatagaaaatgagatttcttggttagaagaaatttttcattgtttaataactaatgtattgtttgactctctacaataaaattggttattatattaaaaaaaaaaaatagcgtggctcactattagcaaaatttaatctttctttcaataattactatgagtggtgacctgactaatctgattatgttagtttttctttgcaggtccatctctattgattaatgatatttcccaaatttttcctatattcagcacgctcaagagattttaatgaagtaatttcttaaaaatttaaatatatatattaaaaaaaaatatttaggcacacactaaatattcattgcatctacg

SEQ ID NO: 248830 - DNA, 780 bp, Cannabis indica
aattccttgaaaaaacctagtatcactggcacggaggagattgaaatgattgacacatcatcaaattggatgacgccaatagcagcctacctcaacactggggaactcccagataataggaatgaagctcgaaaaattagaagaaaggatgtattgtacatcatcatagatggagtcatgtatagaaggggattctccatgccactactcaagtgtgttacacaagaagaagctgtacgacttttgtctgaggtacatgatagattctgtggcaacaacacagctggggaaagtttattcaagaaaattttaaggcaaggttatttctggctgaccatgattgaagactccaaggcgtatgttaagaaatgtgataagttccagagattttcaaagatacctcgtgcaccgcccaacaaactaactcaaatgcaaagtccttggccttttgccgtttggggagtcgatctgatcggataattgcccaagggtaaaggtggagtacagtacacaatggttgcagttgattacttcactaaatggacagaagccaagtcgctgacaaccatcacatccaagaaagtgcaagacttctttgtgaaaaatataatatatcggttcggactaccgtacaagagagtctcggacaattgcaaataatttgacagtcagtccttcactaatttttgtgtgaaccatgggatcataaaaagtttctccgcagtggcacatccccaagaaaatggtcaagtcgaagcagtcaacaagacactcaaagat

SEQ ID NO: 248831 - DNA, 778 bp, Cannabis indica
attctaatttgatgcaaagcaattttaagttatggtaatgatataatttttacatgtttgtacttcattgaaattatttaacaccaaaactttatgatttgtactataacattataattcacaacaaaggtgatttcataatgatttgaaaaagatcatgttagttctcatatttcgaaaaaaaataaaaattgagaataaatcattttacaacttcacatatctctaacatgttaaatttgactttgaaccatacttaccaaatctttgtactcattgaagtttaaacttagttttgacaacatattaaatttcagattgaacccatacttcacaattatttgtacacaatgttgaaaacatatcaactcccatttctttaaccaaatggaaataaacaatagccctccttagcaaacttagtaaatttgcgttttcataacatattaaagacaaaacatattaaatacataacatactctttttgctacttcacataacaaataccaaaatgtgaataacatatcattttgtaactacacattgaacccatgtagaaatatttctacataatgtagaaatgtagaaaacatataattttgactacatagtgggatcttttaaccaaatgtaatttttaccattatccatacttctctattatgttctacacaattaagttaaacattagttttgagaacataagatatacaaaacatactcattttgccacaacacatatctttaatgcaataaaagttggacaatgatgaaaagg

SEQ ID NO: 248832 - DNA, 1197 bp, Cannabis indica
ttttaattttaaaaagattgtcgaacttaattattaaatttcatttattactatactttagttatatactttaattagaagcttcaaagtagataatgattaattaagaataaaataataaaataactgaaaaagtaaacagacaaacaataattttaatcagaaagtaaagacctagagcattaattattctatgtcgaactatgagtttcagtttaccgattatcctaatttattctataatttgtagcagttttaagaatcctaatataatctattaacctctttcgagtgatgataaaattaattttaattaactacaagatatctctattcaatgttaatcaattaagcaataataaagcaatataattttctttaaatgaaactcatagaattagtagaatctatcaatctcacattttttctatgtcatgcaattctaaatctgattttagaatattacctctctcaagtgtaagatctaaaatctctatattaattaatggtaatcaagcattaacaagataataattaacacaaaattatattaacaaagtagcaagaacaattatgggattaatctaaaaactttaatccatcataatctaaaacagttccatcaacactctagcaagaatgtttagtttataattacaaatatgataaccataataatcatgttcataattaaataactaaacaaaagaataaaaaagtataagaagaaattgactctaatgatgatagtggatgataattgctttgaatttcttctctcttgctcttcaatatattttctaatctcaaagttgcttgtttgtatctctccagtcgtccaaaagttaatttacatcattctttatataggcccaatgatagaaagaatccatttagaatcaggatttaaattcaaaaatacgcggtgctatagggccatacttgacttcttgatatcactaccccaagtgctaaaattatcttttttttctcaatttgtttttttaggagcggcgctacaacgccacacttttggcgccacaaaccattttttcgtccctcttttactattttgatctttgctcggtaaatcatgcataacttttgcgttcagactccaaataagattatttaacatattttgaaactctaggaacaagctctatcattttgagtttcataagatccttgagaaaa

SEQ ID NO: 248833 - DNA, 780 bp, Cannabis indica
tcttttccattattatatcaagaaaaaaaatactattcaatgtattagtacctaacaaccatataaattgtcatttttaatgcaatgaagtaacccaatttaatgcaagatgaaactaattaagattgggattatttaattttctaaactcttgaattttggagatttcgaggctgattttgtcaaatattactttgagaagtgtttgttttgtatgatttccttgaaaaaatattatgtttataaagaacttcatcaacttcttattctaatcaaataataataaaaaaaatcacactaaaatatattttttagtgagtaagatctcttttgaagtagattattcaaaatgtaactaaaaaagttctttttttttgtctttctacaagtataaaagataaaagttctattatttgtgatctcatgttatgaacataatcatttccaaaaaataaaataaaaaaagattatgaaaataccatgaaatatgataactttaatgtgttttattcctccactcctcaatagtaagatgacaaaaccaaccactgcaaatttgaataggtaaaaacaatccttattaaacaatgaaaagtaagaagctaattagtaataaagattaaaatatgcactaaaatatcacatccaaagacttacactataaaaaaaatattgatatttttagtacatattttgttacatatatcattattataatagattgaaaacatacacaccaatctaaaattgttgtttttgatcaaaatggttccaaataaa

SEQ ID NO: 248834 - DNA, 1514 bp, Cannabis indica
tatttttacaaaggctttgaatggggtacgggttgattatctttgtaacaagcagggcatgattaacatctatgctctagcttgagggggagtgttagaatattagctgtatattagttgtaaaagaattagggtaactgatatttagtagtttcctattttgttattggtagtttcccatttagtctcctagctttgtataaaaatatgtactagtatatgaaatatatacacaattcgattcactattatctacataatttaatgaatgctctcattctgaccttccaacatggataatttaagtcattcaacaagattggttgagtaatagagcttccttctgcaaacaacgacatcgcacaaaagaaagttaacagaataataatcttaagatctcactaagagtttagtgacttcctctgattccaaataaaattctgtattttagtattaccaatttattatttaattaatcaattaattaaatgtgaaataataaatatagtattgaaacaattattctgtagctatagaacacaactctctaactttaaaataaaactagaaaacaaacagtgcaaagaaataaaaatagacaaggtttttgtacgtggtagcaacaatccttacagattgttagtagtcaacggggccacacccagagataagattcattcgatagatctcaaaaatacaaagtaattgacttatgcataaatagacttccttttattatatgtcgcaagcttgatatattctaccttctaatcgaatcttgttgaaatctcaagtgctcaaactaccttggatctccttaaagagtacttcctttctcctgaggcaagacttgaaaagctatcttccgaaaggctataaaatcttctcctaaaggtatcactgttgttcttcttcttttataaacttgattacagactcaagacaatacaaaatacataaacatagagaaagagacgagcacactcttctctaaaaatacaaagacactctttcttacaagatatgaatgaaatacaaagatgtgaaagagatactaaacctagctactataaggtgtattaatacaccttattgacagttcatactctaaacaagaccataactcactagatactttcctaaaataaatcttcaatcagtacatgaatttttgtttctgtacttattgaatcatagaaaattttcttcacaagaaatctgatcaaactaaataggaaactcatctatgatctgatttacacgactagaaatgtagaaattaatttatttacaaaacttactctgataattttttcaactttagaaaaattaataacttttcatacgttatataaatcaatcaattaaatataaatatatagaaataaagaatatacttcagccaaaattaataattaaataataaaatattttttcaatttaaagataaaaaaataaattaacagtgtgacttcaaacaagtgtcacattttaattaagtgagctatttattt

SEQ ID NO: 248835 - DNA, 640 bp, Cannabis indica
ttttagacaagtacacatctcaataaatacatttttatccatccgtaataattcataatatgttctctcgtgaccacctaataactctttgacaaaatcttcaccacttaaaacagatgttctttgaagcagtttttcattaaatgtctcattataatcatttaaaaagtataacattaagaaatatgtgaagtcatcaaaatcattttctgaagaagaagatgagctagagtactccatttgattagtcctacaaaagttatgttgacatacaaaattactttgaaaaacgaagaaaaaaacgtgtatataaagtttataacaaagtctttacttgattatcttagtataacatattgaaataaggtcaatcacacataaaactataactcagctccattatcaaatatcctaatatcaattattaaactaatgtatccagccaagctctccttctaagagtaaacatattaataaaggtctctctccaaacaaaattatgcaacttctccacaacttcatgcaggcatcatcactaactccttctattccttcaagttacttgcatacattttgtgacagaaaactctattgggttttatccctaaataaaactccatttcaatgtaatctattttat

SEQ ID NO: 248836 - DNA, 852 bp, Cannabis indica
ttataggaatttcttctgtgactgacgatgcgaaagctaaaactgctaagtgttagcgtgttgttcggattgctcactgcccggttaagaaggcttcgtctgagcgaatatatgtggtgctctgtttggcatatcccttgcgagaagccatataaagttgattccacgtgtcacaatcatgtgatgctacggcagagtacaaaaattgggataacatttgcccccaagtctgtacggaatttctgaagttgcatgtagaattcatctgagctgcccttgcatttgaatgtgtgacacgtgttaggcgtgtctgttcgcgattcgatgtgaggttggccaggcgtctctttagtttttggctaattaatgctctgactcaattaatgcctcgagacccagttttctctcaccacgtttgacggttacacttaattatatttaatttcccaatatttgctttttggggggaaccgatgcgtctaggacattttaaatgattgccttttttcaccactttgcctataaataaggctgaatatccttcacaagtttacatttttctccattaaacaaaactcagagcaaaaaaggtttttacttcgagtttgttgtgagatttctaccaaaagcctccgagcagcttcatctggactgaactcaaacatcgaacaatgagtaagtttacaatttcctcctctttttactttgcatgtttaacttttgggtttcatacatgggtttcttacatgatgttggcctttgatcgcacattgttcgtctttcacctcgctcattcgaagtttcgagaaatataaccttaaacccaaaaaatttcaaaactttgggttttga

SEQ ID NO: 248837 - DNA, 592 bp, Cannabis indica
aaaaagtaatacagtaaaaccttgtcatgttcatctttactagagccacgcacatagaaatattgttctagtttttaagtttatatatgcgtagttgcattgtagttgcattaacattttactagcactctgaaactagacatatcaatgattacaaattgatagtgatacaataatttttatgatatttgcaggtgtttcatatcaacaatccaacacaaagttatttaaaaaaattataacatggttagttttattaatatattcatttggtcgttataaagttagtttacagaattctaaccattgtttctccatataatattattaaggtacaattgattattgatcagtggcaaaaaaaatactgacagaatttttcttgacgattctcatttaaattttctatttctagttgcatttaagttgtattttagtcgaataatagttgtgttagtacaatattattattttaaaaaataggactccaaattggcaatacacaactcttacagagaaaacacaattgcagtaagttttatatgtattacatagggacattattagttattttaaggtttaatattaattg

SEQ ID NO: 248838 - DNA, 916 bp, Cannabis indica
aatgagaagtagcaaaccaacttctaggagagacataatttactgcattgatctcggtagctacaccacccacagaatttagagaacctaagggagcatgagtcatatattctgcagaacgccattcttgccaaggatatatgtctttctttagcctactcaagtccaaaccattgggaccccttagaggttctaaccagggagctcgtagatcccaaaaatgcatagtttcccctccaaaaattacttcccttgaagtaagtctaagcttatgagcttattatcctaggtcaaaacaagttgataggatccccatttttacgttgccatgtccctcccatgtggcgacgtgggggcataaaaaaggaaagagaaggatggggtgtctctcgcttttggcataatgggcccccagcgggtcgatcactgatccaatttgagtacctctacaggatagacctcaacataaaactgaagagtagtggcagcaagtgattgagttcagtagttcctcatataaaattattgactctagagatatagtaatatggagaagacaaaattgtttcgagcacctacataaccaaccagaagcgccccttatttcaaagagaggaggacgagttattcacatttcatttgatggtcagaggtgaattgaaagttaaaaagtgataattctaaggattccccaggggaaaaatagagatgtctcctatgttacctgtaatatgtggaagtatcgatctaatttcatagagtcatttagtctgaaagctacatgacaaacataagccagatgagggaatgggaagacctaggatgtagaagatcataacatgattgattcgaaagatttcgattcctatatatccactcatgtggtacttcatcatatcgtatatataagaattat

SEQ ID NO: 248839 - DNA, 507 bp, Cannabis indica
acgacttgacataaaataaaaatgggtcatacacaacacgacttgtttaacacgaatttgacaagtttgacaatttttttttaaatataatagaataaaagataattaataagaatataatatataaaaacatagatttagtgattcaatgttaagttaaaaaattttaaatttaattttctttaacatgaaattgaaaatattttaaaatttttattatatgtataacaaactatatatacattttttttttattagaacaaactatatatacataaatgtatttaagttttctaattgaatataaatctattatttttctttacaatcaagcttcaataataacaaaacaggtcacaatgggtcgttacgaacacaacacgatttttttacgaatagggttagaattgagaaaattaaatatgaatcaaaaaatacgtcaaacatctcacaagaaatttagtaacgagtcacatataaaatatgacacgtaaacacattttacca

SEQ ID NO: 248840 - DNA, 963 bp, Cannabis indica
gactataatgagatattctcaccagtagccaagtacaagactataaggatcatgttatctatagcaaatcaatttgacatggaaattaatcaaatggatgtcactacagctttcctacatggagacctagaagaagagatctacatggaacagcctaaaggttttgaagttaaagagaagaaggacatggtctacaagttggttaagtccttatatggactcaaacaagctcccaggcagtggaataggaagtttgatgcttttatgctaaagcatggatttaacaggagctatcgtgacacttgtttgtactataagggaagctctataaaagatgtcatctacctattgctatatgtagatgacatgcttattataagccaagaaagggctagagttgacatggtcaaaaatctactcaagacagaagttgaaatgaaagatcttggaaatgctaccaagatccttgggatttctatcctaagggacagggacaaggaaaaactgattcttagacaagaagactacattgagaaaatcatagataagttttctatgagagatgctaaggttgttaagcaaccaattactagtcagtacactctttctaaagagcagagccctaaaacagaaaaagagatagaagcgatgaaggatgtaccctattctaatgttgtagggtcagtcatgtatcttatggtaagtataagaccaaacttaggctatgctatgagtgtacttagtaaatatatggcaaatccaggaaaagttcactggttggccatgaaatggttgtttagatacctacttgggacaactaaggttggattagtctacaagaaacaaaatggtaacactataattgaaggctacagtgattcagattatgctggggacagagataataggagatctacatccgcctatttctttctaattagaggtaattgtgttagctggaaa

SEQ ID NO: 248841 - DNA, 521 bp, Cannabis indica
tttttttttttttaatttaatctaatattaaaatggtctaatttgttgtaatgaaatattatcaccaaaactgaaaatcagcagaaaattcatgcagataaaaggcatttatcatatgtaaaaaataaaaattgacatgtgtttcaaaagcaaaataagactacatatttttatatatttttgtatttatcatatgtaaggacaactaattaactcacctgaattaattcctgccttctctctctggaactttctagtggtttgcatcccgttacagtgttctggttccattccagttttgatctctccctcgtggtgcttctaaatctcctctcagtttctttcctttacttgttttgcaatcttgtgtaattgatcttaatagtttctctttcctcatttattgtgatttaacccttaattaattttactgtcttctcttttgcgttttctcttctttctttctccttctctcttatttaagtttttcagagaattaagctccagggatttctctcctt

SEQ ID NO: 248842 - DNA, 2140 bp, Cannabis indica
gcttgccaccactctaggattcggaatggcccaagctcaaagcttgcccaagtgatacctagacaggtacttgaagggcctatcatagacgttgaccgcccaaaagggatgcagacgtctgccttgaggataaactttgatcgcccaacgacggttatgctttttctctgacacaggatcagatcttgtccctagtgccagaacatagtagtgcatggacctcatacatctttttgcgagacagttattcaaggtatttacttttcaaggttaaaccttttggtgacatgcatcctctacgaatggtggtcccctattgtccagctgcttcaatgcacgagcacaagtctttccaaggggcccaatagtcagctcactttacatgtattttaccccattagtgggctttttgtagaaatcctagccgggtcatggacaagtctatacccaccctttagcctataaataccattttattttcatacaaaagggggatcaaaatcaagatagtcgaagctctgttaaaattactctaagctttcctatttttcaagagaaaccaagagtgcagagttagaatgtcttgcataaacactgtaataacatcaaatacgcatgtaacgactattagactgactcgtgacaaaggctcattaacacctaaactacgtaaaaatctacatctcttttgttattgttttcttaagctcttattatattagtttatgaaaatctcaacaaatgttttttttgctttcattgatagctgaagaaagacctaaatccacagtgctactgcaaccatggtgtttactcgaaaaacagtaactaagaatactcctcaaggcagcctcgatgttgtcatagaggatgtaaaccctctctctctagagcatgctcagtcgagcgatgtgagaggtggagatgcattcaatgctgataacctagagagtaacctaaacaagcagcccaactgaatcgatgaagattgagatgctaaaaatgaagaacaagacagcaataggtttatcaaagacatgtactacaaggatggctattattatgagcaagatcttgaagtagtttgagtatccaaaaatgacttaaagcccatgagaagttagcccgtcaagagaagttgtctaagaggatggagagaatgatggcttgcctctaagacaatttggagatctagacaaagaagaatttgacaaagaccctttagtggaatgtgtcaatggaaacaacaaggaaaaccttgctgatgttggaacctctgctcttgtataggacaagggaaacgcaaaagtgggtaaccctcagaaccctacaactcttgtacctcctcaaaaaagtgtaaatctagccaggagacctaccctggcacagaaggtcatcgatgcctctgggcttggacgccattctgctctaaaaggtaatatagtgaaaaaaagggactggtgtgaaagcacccaagcccaaggaaggaaaaatcaccccaatcattccattaaatatgatggtgggaccagaggacaatattctgatgatagttggtccacagtagatctttgaaggcgtcttgacgccaagtacaaaatagcaaaaagagaaaaggcgaggccatgagggaatggtcttatgaatcatttaaatgaaattttgcggacaagatctctagaatactatcacaaaatacttaacaaagcttgtttggaagcaaagtgggccctcaccgattctaagaatgaggacccaaagctgtgtgtcagattgagttgtacaatgggcgcacagatccaaggactcacctggccaaatacaacaagatgatgcaagtagctagggttagtgatgatgacaagtgtctgtgtgttctccttaatgttcaccaagtttgctgaggattggtggaaaagattaactcttggatcgatccatagctggaaagagctgcaatctaccttccaaaggcagttcataactgcctaggacaacgacatggaggtgggatccatcacaaatgtcaagcaacaggtgggagagatcctgaaaacattcattcagcgaatgatggaggcagcatctaagatacaggtgaatgatgacatgaatcttgttgccttacaatcttgactta

SEQ ID NO: 248843 - DNA, 670 bp, Cannabis indica
ttattaaatataaataaaaagtcacactcatgaatttctcataaaccaagaatttagttatatagacacactttatatagaatagatttgtagacacttaaccccttatgttattttttggtggtaatactattatatatttacttctcttggcaaatttaaagtataagttaattttaacagttaaatgccacataaaattgccactgtgtatacttatttaaatgtggcatatattaattggtccaaataaatttaattatttaaacattataaaaactaaatataaattatttatccattaaaattaataaaataaaaactaattttattcatatttcactctgcttcgtcttcttctccgattggaaaaaaaccaaaatatatctgttcatccattatctttttatactaacttaaaataaaatcagcattgatcctcttcgatattatatgaaccatattgtcgaacttccattatttaaaaaaaaattgtaattacatcttaagctgacctgtttatacacttaacttctcatattgttcaaaaaaaaaaaaatatatataaaaattatagtaatgttaaaatttttcattacacccgccgcaaagcgcgggttgttaactagtatatatataaatgagaagtatgaggcggtgatgtgacact

SEQ ID NO: 248844 - DNA, 1812 bp, Cannabis indica
tttcattaattgattctgtttttatagatagtgatttatgattagttagtgatatttgttagaaagttattttcataatatattaatttaatacttaattatactataccgaaaaatatactaaagtactagtatattagtaattacatttatatttatagtactatagctaatccaagtatatatatacataattttactttttaaataatttacaaataataaactaactagctatatattaattatataattttgcatgcatgcaaaatattatacatattatgtaatctatcatctgtatgaaaaagaagaatatataattaattaaccaataaaaacaacaatttttttgtatggaactatgaatatatgaagctacaaatcaaattacatatatagttgtctatatataggtagaggggtctgtctcctgaactgtagtacgtactgtaattaataacaagaaattattaattatatataattctcgtacaaataattgattaatgtaaaggcttagttgatcagactaggcatctgactttgtgatttgactaaaaattaaagcaaaaaaagaaaatatcaaatcaaatggcaaatcaaagaatagagaagctatatagtatatagtacacataaaatgtatatataaatttatatatatatatatatatagacagctactttgtagctagcacaccctcaagccacacaattcaatgattggttcaaattaaaaccctaatccaaaataccctagctaatcacccattttcaaaaatatttactataattgatgtttggatttgtaatgaattttactttttagttcaaaaaggtttttggctttagcatcttctttgagaaatagttttgtaaaagcgtcttcaaccatgctctctaaatacagtttttagtaaaataaaaaataaatgaaaaaaaaatacaaatacagatagctcaatataaagatacaaagttaaatttgtggctaaaggcttgtaattgattttagctagactttcattcatcaagttatcaaaccattcgaattatcttgactcttgttgtatcaaggaattaagaaatcaagcagtaatgctttcttaaatgaagagaaagatgtgtacatggtccaaccacttgagtttgaggacaagagcaatcagaatatatctgcaaattgaacaaattatatatggcttaaaacaggcacccgtacttagtttgataaattgaggacactctaattgattgaaagctctataattctaaggttgattcttcattattcaaatacatgacaaatcaaattatcatcctagttttgatctatagagatgttattattgtaacagggaacaattatgaatagatagctagtttcattcaaattttgaaaatggaataattttcattgaaagaccttggattacttcatttctttattggcatggaagtgtatcgagatgaaactggtttgtacctaacacaggccaaatccatcaatgatctgcttgagaaataggatacgttgaacttaaaaccatgtatctaattccaatgattctgggcaagccaatgtccaaaatagatggtgaactattgtcaaatcatatagtctacagaagtgtaataggaaccttgcagtacttgtgtcacacaagatttgacattgtctttgccgtaaacaaattgagccaatttctgcaagttcctactactagtcattggagtgatgctaagagaattctaagatacttaaaagggacaatgaattatggcctccatattggatatagtgaaaga

SEQ ID NO: 248845 - DNA, 3082 bp, Cannabis indica
aaaaaattgcaacggaaggaatgaagaatcgcaacaaatgaagatcaagaatatgcataaagtagttttgattttgagtttgagggagaagaatgaggaatggactctgcgtttaaattgaatggcaatagttaacggaagggttagcctccgttaaagttaacagaataaaaataacaaaaacgttaaaccaagaattgccgttagataggcacttttaatatataaagatattctcattttcacttgacccttattagcttcttcaaccaaattgatccgaaaaatgaacactaacaaggcaagcaataatcccagaacaaatatttgagcacagtcaattctagtaaattaggaggtcaagacagaaaaatttcaacagagccaacaattcatttgagcacaaaaagaaatgcccccccaaaaaaaaaatcattgttatatatgtgtactgtacaaataatatcttcgttcactttatttgtcccaaaattttaactactttctctagagacaaaaaaaattaccctatcctgaacaattccatctattataacctgaatctgaatcttattcttattccattcttttctataaaaattaatatgttccttcatcttgatttgtcccaaattttgaaattggaaagcaagaaagaaagatacatacatacaccaaaagaaaaaaaaaagtatctctagaattaaaaatgtttgaaaagatttacttaaaacttaattgagtttacaagttattttagctgataaagcttgtttgcatatatgcctatttttttacattcctatggctactctagaattatttctctggtctgcagctgcatcatcaaatgaaggcgctcgtacttgaccattgttaactgcctctgcagtttttatattctcattttcactactgttagccaggaattgagccttattagcttcttcatcccagttgatcctaaaaatgaaaaccaacaacaatactaagcaagaaataatccccactaagaaccccatcaacattccacctagagaaagctcaaccttgaaggccagaaccgcagccagtggcaaagcaatgaggtaaaacccaacaatattggaatacatggctaaccatggcctagctgttcccctaacgattcctccacaaactgctaatgggaaattcacaatttccagcaaagacattagcagcagcatcttctttactcctcttacaatcctcttattatggctgaacaaagcaccccaagttcctctgcctgcaaccataaccaagctacatatgcagcctgtgatcacactcacagtcagagatacataggccgagtagcgagcagcccctggcctgttggctccgagctcattcgaggcacgaattgaggcacatgttgctaaagaaagcatgacagcaaagagcaaatagtcgaaatttaggacaatggtgagaattccaactgcttctttggcattattaaggtgccctgtcattagaactaagatctcataaccccaccactcaaggcatgtggtgaggcaacatgttccagaaagcttaagcagcctaatccaatctccatagctttggtctaaccaacctccttccttccacctcccttcctttgtgctttccatcatgattacatatatggccaacagagttagaactatgagatcagaaatccaagctgccatggcaactccctcaagaccctttgctttggccaaaaagatgttgattggtacatgaagggcgagagccagaccatagctgaacatgataggaattgttatgccttgtgagctcaaatatgctttgagaggacaaactattgctgtgatcaccaagtcaggaaggagataaaaaaggtagctccttgcaactactgaaaggtcttcttgttggccaaaatggatgaagattttatcaacatggagccacaagaaagaaataggaaccgttactagcagtaacaaaaagattgtcatgagaagggtcttgtgaaggagtttggaattctttgctccataagcttggccacatattggttccatggcaccactgagaccagtcaagacagaaaagccagtaacattagcgaaagtgaggccgagcgcgccacctgctagttgaagctcaccaagacggcctagaaatgctgttgtgatggcaatctttatgaaccaagacaaattcatagccaccaatggaactgcaatcccttgctgtgttttcagctctgatacaacccttttggcaaagttggctggccatgatctgcttttgttttcttccaagtaagatacacatacactagacataacttttgagccaaatggcttggtgggtttctttaaaaattggattttggcccttcttttttgcagaaatataaagaaaaaaaggaattgaaaacttgtggcctattgagttggtaagagtgcacgggtctcgtgagcaaattatgtaactgacaattgaggaagagtgttaagtgatggtggatttatagtgcaaggagggccatattcatgtttttagtgcttacatatccccacgttggaatcttgcaagtgagattttggtgcttgaaaagatctgataagaattaagaagaaaatactcttttttaagtattataagatagaatattttgtaggttgaacaatttctaaagaacataaagttgtggatgtgagcatatagatagatgcattaagtagagccattatggttatttgttatagatttttctacattaacaatgttgttcacatttagaaaaagccattagtgaacaagttaacgtatcctcatccaaattaaccaatagtatcaaccaggaattttagtaagcatcttggaaagcttatatagatatttatttattattattattttttgtggaacgaatagggctcatttatttaatcaaatattcaacaactgaattaatgaatgaatactcaatcataaatatgatgaagaaatagataaaacaatacgctaaatatttaattaaagtataaacattgagcaatctgatcaaccaagtcgctttggccgagtggtt

SEQ ID NO: 248846 - DNA, 573 bp, Cannabis indica
ttaaaaattttattaatttttaattttaattataattattttttaaaagttaattcgaattgtttttatgtaggtgtttattttcaagaaataattttacttacaaattttgttatcaatttttttatgttaatagttaactataacaaaattgattacttaagtactttcgtcattaatttgcttacatacataattctactataattatattttaaattaatttgttttaatatttttataaaactatgtaataatattttgatttgaaatattttatatttttttattaagaaagataatttctattaatcaaaccgagtcaattacatccacaaaaggattccccttcaaaagagaattttatctctgctagacaattttttttgtacaagattaagtctacttttgaggctctctttaattctactacctatacaactcgttttcatacatttttttcttttatatagaaatttcaatttagccaaataccataaattgtacctgctatcacattcttaagaacataatatatattttttatgacacattaatattttttttcatttt

SEQ ID NO: 248847 - DNA, 943 bp, Cannabis indica
gttgtagttattgtcatatatatataaatgtgattaaatagtatatatatagacacatattattttgcctttattcgtaaattttcattttagcgaaatgtagtaataagacatgaataatatataagttaacgaataatatcatgcaaattaaaaaaaaaataaaaaatactcaactaccctcgtttgcatgattttatttgataaaattaattcttatttcaaatacatttaatgttatctgtctttgattttacagttccacaatgacaagtcttacatcaatgaggagataaagaatatacaagatgaatggacatttttgtgaagtctgaaatattgaagaaatgagtacacagttattactttacttttttgttatgatatatgtagaatatataacttttatatgaccattatttttgtttatacttttattgatatattttatagttatatcaattttttgttatgacgtgtagaagacaacttttatgatcgttactttggttatattagatttcaatggcacacttcatggttatattaattttttggttatatgaagaatattcttgttatcatattacaaatgttatggttagtgcataaaaatattgttacccaaagcgatttttgaaatttaaaaacgtaggtggagaaaatcgcaaagaaatttgtaattttcccttacatatgactatgcgtcattttacaactgacacaaaagtaaaaagaaaatatttgtgcgtacacctatgcgtctgttatgaactgaaccaaaaaactaatttgcgttggtttcagtttgaagctacgtttcttgcttcagtctagaaccgacgccaatagagcgtactttctacttcagttctcaaccaaagaaaaaaaaagtttagcgtcagtttagaaatgaaagcaaataacttgactatttgcgtct

SEQ ID NO: 248848 - DNA, 557 bp, Cannabis indica
cacaataatctctaaaccatgtgaaacttttgtgaagtggctctcatatataactaaaagcaataacaaaaaatagtagaaaaaaaaataagtaaaaataaagatattttacaacaaaaactaataatatacaataaacattcaaaaattatatattatttttatttattaaaaacttaaggtttttttaagaaaaaaaaattaatatttgacaaaaaattaaatagtgcaaaaatatgtaaaaaatacaacacacatacatcatttgcaaaccatgcggaacttttgactaaaagaaaaaaaaaatcacaaaattatactaaattaactaattctaataaaatagatatatttatacattttatattttataaaagttaataatgttatacatatatgtatataaaattatacaccacctaaaataatttcatgaacttattattttttttattctgcctaatatttgttcttattaatgtagtaaggatatgagaatatcacaatctaatttattttttttttctaacttttatcttatatgataagcacatgat

SEQ ID NO: 248849 - DNA, 1522 bp, Cannabis indica
tttggtggaaacaggcaaaaaaaaaattctttgaaatcaatgtcctctctctgactatagcctttagccacaagtcgagccttgcacctctctacttgcccattttagtcacgtttgatcttatacacccatttgcacccgatgggtctacaacctttgggtagttcaaccaactcccaaacttcattttgtgacatagaactcaattcttctttcatcgcatccacccataatgcagatttaggactattcattgcttcttggtaactggctggctcagaatcatctcccacattaaactcatgttcctgcatatagagaagatagtcatcaggaatagcaggcctacaagctctttgtgatcttctcagcacaacctcatcgtcccccaaatcaagatttttatcttgtcttggatcttaaggttcaccatgagcttctatcggaacttgttcaatcacaggttcccacataataatattttcaaagtaatatgtattgtacatagtgagtgagaatatatatatataatttaaaagtcttcatgttttgaagtgaggttactaacttagctagttctttcactgtttgttttctcattgtgttataggaacttacttgtaatgatgcattctagcttacaatggttacataattcacagtataaagatatatctaaactgaaatcttcttagggatgtgtgattatataagtttgttggttgattagattttggttattcaaacttgatggagctccccacaccacaaagacctaaactgccttcacgtcagcctccatctgctgctgaggtacctgtttaaggacagtctgtacgaggttgttgttctccatttgatggtgcgtggaatgaatatgaattttgggtgggacacttatcattgtcttagcccattccattacaatattggctttaatgggtcttcagatgcttgcttttagattacatcatgtttatataactcacactctatatgcttatgtgagtcgttaccttagtattagtgatgctgatgatactgatgagtgaatatgtctcattcttcgccattttcatccaccttctcaacctcatctttgagtttctctactttaattagtatttgtctttaattgaactagctttgaatttgaaccttattcgtggtttattttgtaggcatttacatgacacccttttatgttttctgattagatgttattccatgtttttactcaatgtcagaccagattgggacataattttattgggctatttacaactttatgaccaatgctttaattcttatttttttttttttttgggtgaaacaattttgattagaggtgtttataaaatattaactcgattactactgtatcgactttgaagttttactgttacatatacacaagtgtatacaatgatcatccagatgatatttaacaataatattaaactggcgtgtcaaatttagcaaaaaaaaataaacataagggagttttgctacaaaaaaaaaa

SEQ ID NO: 248850 - DNA, 633 bp, Cannabis indica
tgtaagaacacaagcacaaaccagagagaaaacagaacaagaaaaggcaattggtaaagaccaagattagcatagcaaaagctaatcaaggtaaaggcagagactttatttatatatgcagagagtttgttacaaaagattaataacagaaaactaactatttactaccttaacagacaactaataaaccagtaaaaaaaactaacataacagaattagttgttaacatactttaccattttttctctttttcttggtttattattaattacttagagttgtcttttatggtgcaccacaaagcaagttactactaactctcttcccaagtataattaataacatttagatatagaaatattctttctaataataccatattttgtatacattttatgttgtcaagagtcatttaactaattaagcttttttttattgaggtgttacctttctctttttttttttattaattaatttttaaattaatcaaaattgataataacatataatgactattgaaacttttttcatataattatatatatatatatatatttatatgtgtgcgaattggacttttattaattattttgttagaataaatatacgcattttttagtctaatatttttta

SEQ ID NO: 248851 - DNA, 545 bp, Cannabis indica
aaaatttcatactaaatacaccataatatggggatcccctatttctaaatttcttttacaattggttacaaatcaatgttacaaactaaggttacatttccaaacatagaaaagaagtcgatcctgctcctcggaagccaagacactacgactgatatgtatatcgctagatgacctctgactcatggccgaacacagcttctaacttccttacctgcatcacgagcaccagtgagtcagaatgactcagtaagaaatgttactagataaaatcatagaatgtgctagcaaattccattacaatatcatatacgtactaataggtcgtacacattcaaggtgcattaacccttgtatcctttctattggagagtatcaccaagatctgagcccgattctccttctcttgaattggaatcttcacagccttacacactatgattgagtaccacttgatgtgtctgggcacttactctatcactatagggttcgaaataatgaagagaggaagagagaagaaggattctgttgacctcgcttttagc

SEQ ID NO: 248852 - DNA, 672 bp, Cannabis indica
acagacttcctacacccattcttcagggaaaatcactatttgaaattcttttatgcagaatacctggttacaagcaactcaaggtttttggggctgcttgttatccacgcataagaccataccagcaacataaattccaatttcactcattgaagtgtgttaatctaggctataatgattcttatagagattataagtgtttgagaactacaggaagaatctatatatctagaaatgtagtgtttaatgagactgatttccctttccaatctggttttctcaacactcatgcactagaaaaagagttaattattcacaacgagtcttggtctcaacttcccaatataagcttcaaacatttcagtgcttttacaccaaatttacccactactgtaccatctcaagcacctcctaaatccacttcagcagcaacatcttctcaacatcaggttaatgataacaactcagcttactctatctttgatactcttgaccatggtgttattcttccagaagcagacattggtgcaacattaattgatgcagaccaggatactcaagatgctactgctgaaaaccttgctgaaactgacaggaatgacacaaacatcaccactattgtaactgcaataggtgtgaaagcctccagtaatttactgttgggttttatgc

SEQ ID NO: 248853 - DNA, 520 bp, Cannabis indica
actctaaaaatatgaacagaacagtttctatttcaagagtttgatcatgaaattgataattttcttcgaagtgttcctaattcataacatctcaataatcaatcaatatatatacacacatatttatataacaatacctcaagaaattgcttccacgaacggagaccaccaccaccaccacaaccagaggcagtagcagcaaaatagcaagaacgaactatcttaaactgatccaaatcaagcttcttgttaataaatccaacctggaagtaaatactatccgaaggaggtaaatcgactctgatctcatccacactaagccacaagaagaatcttctgacctgaataccttcaagctcggtaatcgatccatagctgagcttacccttgatggttttatcgtaatagaccaagtaatcgaactcgatgtagcatgggttgttcaaaacgacgacgaatcgaccgtcttcggagagcgtgtagttgattactgagtcgggtaagagcccactcggaagcc

SEQ ID NO: 248854 - DNA, 940 bp, Cannabis indica
ttccgtagttaggacagacaaatatatattattatatgatcaataattaatataagataataaaataaataattttttaaattttacagtttttaagtccaagttttttatatatttttacagtattttattaaaatataaaagatataatataaaaaataataaaaaaataacatacaaaataatataaaaaatataaataacaaaaaattaacaacaagtatatataaaaaaaaaaataccaaaagattatattttatgtaaataaaatttaaaaaactgtaaaaatattaaaaagtctgtacatatcatatttttataattttttttttattatttttatatattttttttaaaattatcccttaatcatagcatttttattaagcacctgaagacacagttaggcattttctaaattattattaaatcaaaatacttaaatttaatattaaattacaccaataagagtaccttaatggaaagtgtagtataccaaatttacccctccttaattattacatttacaactagtattggtattaattagtaattttttttttgagaaaggtattaattagtaattagaaattaggtcaaagttcaaatttattgggacacaccatattgacggaggctgttattgagttagggaggaatgggagactatagtctatagccctgccaaaaaaaattatctatttttgtatatattaaatatgtaaaaaaaattaaatatatataataattattaacaattagctcccgaaataatttttttcacaatttgccccctacttgcaaactctccctccgccattgggacattttttagatacattttttttactcatccattaaaataataataataataatagtttcaaatcaaatctatcgggatgaatatatatatgtaatatccagattaaaatagtat

SEQ ID NO: 248855 - DNA, 2788 bp, Cannabis indica
attttttttattcttcttcttctactcctccatgcctacacaaccctaaaactaccataaccaccatattccttcctaaaatctcaaatttcttcacctaaaacactccctaaactttcttaaccataacccgttatcaatttcttcatccattcctaaaatttcacaaaatttaaccaatttttcaaagaaaaaaaccctagaatctgaaatagattggggtccttggaaattcttgcaatttcttagtggatgagcatggaatcaatcatctcaatggtttcaagatacatgtaagtgattttagtcgtttctctttgaagtttttgaattatttagtgtaaggtgtggttggaaggaagatattgggtattattgtgaaatttttggattgttgtgaggtttgtggattgttttggattgaagttggtgtttgtagtgaattgtgaatttgtggaaagttaaaattgtaggggaggtgctgcccaatttttttgagatattgttcagaagaaattgtgttttttggcttgatcttattaatcccgtatagttaaccgagcccgaagacctgagcaaggttcgtcgtaccaaaacccaaacccacaacaaaacccaccactaaaccaacctccacgaaaatttgttaatgatgaggcgattgagagttataagaaaaattagaagtgggatgattagaaaacgggggtttgaattccaggatgagccttactctcgtgataggggttatgagataattcggggaagaaattgttcgaagaaatgggtaaaagttttgtgcattcgagtttgtacaagaagctaattttagcatggtgtgtgagttttttttttccaactatcctttctggaacgacaataatgaggtgaatgttcagggagtttgagtcctagtgagcatttgttagaaattattttaccaagatctagatttactaacacgtatgtttgattattaattataatctaacaccctaaatatgaatttcttaaaacaataaaataaacacatataaagtttagaaaaccttacattgataacaacagaataatatgtctcattccactcagatctctaacccttattcctctctaagttaatgaagggtaagaacctaacttcccatctaaaaaagatgagtgtttgaaataccttggcttgaggatacgacttaatagagaattatgattggaaaagatcaaccatgcttgcttggccaataaagcttcgttgaaatgaacaaaaattttaaatcccattccaccttcaactttcgattgacaaagagctttccatgttttccagtttattccaggggatgaagaattagacctcgagttggcggataagagatttagatagacaaaagcagctcatagcgtatgttggaattgattgagcaaccgctttgagaagaacttctttgcctctaatggaaaataactgttcttgccaagcagagaggatgttccacaatttctctttaatttcaccaaacaaaacttttttatttcttccagaataagatggcagccccaaatatctctcatgacatggcttgatcggcatttgcaatatctggtgaaggtttctttggatagctggtgtagtgttctgcgagaaggaaaggacagattttttagcatttaaactttgtcctgaagctctaccgtaaaaatcaagagatcgcttaattgccatagctgatcgttggttagcacggcaaagcactagaccgtcatccacaacaaataagtgagacaccgtaggggcaccacgtgcaactcttaatccttgaagattacccagttgttcttcatgttgaaatagccatgaaagtccttcgacacatataataaaaaggtagggtgacaatggatcaccttggcggattccacgggtaggcataacttgtccttgtatgttgccattaattgagaaagagtaagtgacagtactgatgcaacaaagaatgagattcacgactgtagaatcaaatcccatagcagtcataatatattgaagaaaataccattcaaccctgtcaaatgctttactcatgtttaacttaatggttgcataaccttctttcccttgtttcaaatgtttcagagaatgcaggagttcaaaagctactaacacattgtctgtgattagacaagattgaagaaaagcactttacaattctaagataaccaaagagaggtaaggcttcaaacacaatacaatgacttttgaagccagcttataaagcacattgcaaaggctgataggtcgcaattgagacacagaagttggattcttcgttttaggaatcaaagttattaaggtgttattgaaacaagaaggatccccaccttcgttaagcacttccaggatagcttttgtaaccaattctccaacaatatgttaatatttttgtaatttcaaaatttttaaaaatagttttttctttcaagaatgagtatgaaattaagggaaaaaataagaaaaaaaactccaataattatattattttttaaaaaatcactaaaatatattggactaggatttctttattgggctcttatttaaatttagatggtatttttaaaaatcagttaaataatatgtgtattttgataacaaaaacttctttaatgggctttggactagataagttctgagcgcagccctagtcgtatcttagcccgattaaacaaataaataaacaataatactcatataacaaccttgaaagttggatttatctaaaaaaaaaaaaaa

SEQ ID NO: 248856 - DNA, 733 bp, Cannabis indica
atggaattcactaggtgatatgtactttttggaattcactgtggtctgttcgatcttgacaatttctctgcactccaaatgggatacatctgttttcttgaagctgaataagtaggatatggattgatcatatgttgccttttttttaagcgctttttataatctttggattgacactcattgtacaatatgattgggttggttttgtttcaattagggtttgttgtatccatagaaattgttggctttcatattaagttttatgaatgataaaagttgaaaggttgatgtgttatgtaccagagttcactttgtttctaatggtttctatggtcgattgattttataggtttagtattattttaacaatgaaggcactgtttagtattatatattggtattttaaagtagtttgtttagggaaatgatggggccttcgtgaagcacaggtccacgaatgtggaatttccaaagactcagtaattgaaggcccaaaatcaagaatttcacaacgtgcaaaatcttgttttggtaagtctaggcaatttggcccagcacacaagagtgccttgccctttaaatttcctgctttagcattgcgagcactgttgggttttatgccctaaataaaactcatttcaatataatcagatttactgattaatatagatcagaaaatttaatgttgcatagttcacatgatttatttcatgtacataatgtataaattcgt

SEQ ID NO: 248857 - DNA, 535 bp, Cannabis indica
ttaaaagggcaaaatttttttttttgggcccctggactaggtgggccctaggaacaagcctagcccgcctatgcccagggccggccctgatcccatacccaaatctgtatgcactctcaaattttgctgcatctacattaatcttgtaattatcacctaatggagcacaccattgctcatccctttccccaacctccatcgaaaaatgagaaggattaaaggagttattttgagcaaataacctttgttcaagatcacctttagcaaggcaacaatatttttaaaagtattactcttcccatttcacactttgttatatcgatcatgatatattgcccaacataacataacacccattttcctatcctccttactccaccgttgaaactgattttgaaacctagacaccaaaatgaggaaaacacaacattcccaggaacgcaaaccaaacttcacactagcaagcagacgcaaaattgcacaaaactaaggcaatggctaattgtttcagccgattggttacacctggggcaaa

SEQ ID NO: 248858 - DNA, 982 bp, Cannabis indica
tatatataatttatatcggttgagaaattgtattaaagcatgtaagggttcttattcctattaaatctatcgatgtatgttgtgtgatttcatattgaatgttatatgaagggttatattgtgtgttaatttttttctcttacatttttcataatatatgatgttgtgaagtgtattgtagtttattttttaatcactggattgttagttgcagacaagtatattataacctcatcatgtttttggatcaccatatttactgattccaaactctgaaaatcagctcattctctctcagcctgtggaagattatttcattagtgggaatcggtacagtcacagttattgtcatattgcgtctgctctatcaattttaccggcagaatcgaatttcgcgtgtggcatagaaaagtaattacacgcgagatgagtgtaactacgggcataatcaccaacaaaacaatgagcaatatgttcagagaatgttctttcgtgaacaaattatacattgcttgtcatctccattattttcaaattttatctgaaaagtaagaaaagtaatattagattaaagaaacaaacgaatattatatgtatatactagttaatttgttacaattataggtgtgataataaggaaactaacaaactaataactaatagaaagagaaaagaccaattaattaattacattgctcaatccatctaaactaattatagacttaattagtgctgtagtagaaaacttgtatataaaagctacataaaagtgagtagtttctttctataaagcttagaatttgactgctatcattactattttagaaggcaaacacaattcttttaatatgcaaatgtttatatttaatgtttttttattgttgactaagaagtaagtataatgagagtcgtctcaatcttcgaggggcctaggacgaaatttttaaatggagcctaaaaaaatactttatacaattaatta

SEQ ID NO: 248859 - DNA, 778 bp, Cannabis indica
cactttgtgaagtaatccactgtaactactacatattttaccccacccttgcctttgggcaactgtccgattaggtctattccccatatggcaaagggccatgggctttgcttcttaattaattcattagggggtgcacaagcgatttttgaaaatctttggcacttgtcacacttctttacatgggcctttgaatcttccatcatggtcggtcaaaaatatcatggcattactattttttttgataaactttgccatgcagcttgattaccacaaaatccttcgtgtactttggacaagagatgtgcagcttcttcttttgttacagaagcttagcagtggcatggagaagcctcttctatacattacacatcattctactatgatatattgcgcaacttttctcatcatcttctgagtctcatttttattgtttgggagttttccagtgttgaggtaagctgctattggtgtcatctagtttggcaccgtatctatcaactttagcacagttgatattgggttcttccaagaattggattgggactaagttgatcatatctgtcactgtgctgctcgcaagctgtgccaaggcatcaacaattgtgttttcctcccttggaattttcttgagggtgtaacccttgaattgtgcgagttggatcttgcttagataagcctattgggatttatcttaccaacatctagatttactaacatgtatgtttcattaacaccctaaatatgaattctcaaatacgataaaattaaacacata

SEQ ID NO: 248860 - DNA, 1207 bp, Cannabis indica
tttgccaaaccatgtgctgtagaattctaagtagctatcaaaccaaactttataatagggtttcgtaattttataaatgctactttattatcatcaaatctaaggttgatataattccggtttaaagtacaaatagaactttgaacttaatttgtaatattttttttagtacgatcaacttgaaaaaatttctaacataaacaaatgaagaaaatataatcagttttgtcataacacttctaaattgagttattattaagttttattttgataaaaatcaattcaaagtactatttttgaaaaatataatatctaatttgttatttgacaaaataaaaggttcaatcactaacttttgcaatatatgtagtttaaaatagtattggaaaattttataatgcacccctataaaaatgagtgtattgatacatctttacctgttttagtatttgaaataatttttagtcaatttttttttatgatcatgtaaattatagttatttaatacattttgtaaagttttaaaaaattcgaaaaagtttaacacgccaaaaactgcgttcaaatagtgtgttgcatgcgtgactattttattttatacccgtgtaaaatagacatgtttaaatattcaaaattttatatgatatcttaaatagctataatgtacatgaatatagaaaaattagactaaaaaattcttctggatgctgaaacaattaaagaatgtatcaatacgtctattttaagatggtgcattgtagaatcacccaataataattaccttttaatttattatcaaaaaaaaattatatatacgatatatattgtgagtgattggtaatacaaacaaaaatagttgcaaactcaaagcaaatgataatggagctaaaaaatctcaaaatgataaagcatagaatgagtttgttttacccacttataaatttttaagataatcatctacaaagtttaatttaattataatatatatgtgcaatatattatttgaatttttatttttagcaagttaaattattctaaaattttaaataattcaaagaaaaatcttatagaagagaaaagcaagatttgcaggaaaaattaaaacgggaaatggctattccaacattgatgcaaaaacaaagttatttgaacaagactccatactaaaggtttttgaacaagactctaaactataaaagttttttca

SEQ ID NO: 248861 - DNA, 573 bp, Cannabis indica
taatatgtggaaagataataaaataagatgaatgggctactcctttctttgccaattggtttttagatggaactccatgcaccttatactatacactcacctatccatacttcctcaactatacacttctgtattctaacattgagattcatttggagtcactacaaaaaaaatatttttttagtcacaactaaacttgtgactaaaagtgaaaaacttatgactaattataaatcatcattcttatgttgtgactaaaaggtccatagataaaggtattagttacaaaaactacaatttgttgtgactaaataagttgttagtcacaatacttgttgtgactaaaattaataagtgacaacttgtatctatagatactatgttttagttagaagaaatttttttttatgataaaaagtcacatttagtcacaaaaaatttatgttgtactactactattttaacatttagtgaaacaatttagtgacatgggtcactaaatgttttaattaatttttagtgacgtgtattgatagtgagtaaaaatttaaaatttgtattttgaaatgcggg

SEQ ID NO: 248862 - DNA, 754 bp, Cannabis indica
tctcttgtggctccttggttctttggagttggccaccgctccactgttgtcacagtagagcaccagtggtttttctacttctagaactacttccagagctgtgtagaatttcttcaaccaaacgacttccttagctgcttcacaagctgctatatattagacttccatggttgaatctgcaaaactggtttgcttaatgcttctccagactacaactcctccaccaagagtaaatactgacccaaatgttgagttttgactatcattctctgattaaaaattagaatcagtatatccggtaggatttaactctccatcggaatatacaagcatgagctctctcattctccaaagatagttgagaatatgctttactacaatctagtgctccaaacctggatttgattgatagcggataacaatccctatagcatagcatatgtcagaccttgtacacaacattacatacattacgctcccaactgctgatgcataagggaactttctcatgtcctcttcctcttgaggagtttttggacttgatccttgcatagagtaattccatgtctagatggtaattgtcctttcttggaattctccatcaagaatttttctagcaccttatctatataagtttcttgagaaagtgttaatgttcttctctttatatctctatatattttgatcttgagaacatagtttgcttctcctaaatccttcatttgaaatttttcggctaaccacttctttacat

SEQ ID NO: 248863 - DNA, 973 bp, Cannabis indica
ttaaacaacatacttgtgagtagatctaagatcctggtaaaataaattccaacagttatacattatgttttacctgaaaggtacccttgggtactgctaacttgaatgtatatgtagctttgtcaggttgctcacctcccgttatttcttccattcaggtagtaccgggcgttgaataggggaggtgatagttgcataggtccctcacttactttgcagttatggccagaatgatacagactcttcgtagggcgcctccacatgaccttcacatggctagggtgcctaaggggtcgagttaggatggtagaagagaccgctcagccccctgctgatgttgacttagagattgaccaagggttgagagttttgatgcagaatctgatctagaagtggttgctctagtgaggaggaggaggtgtaggttttgttctgtcctcccagattatcccttaggtcactatgacactaatggtaggccactgaacaggctcggtgagccttcagagcttacactggatcatgtcctagaggatagggctgcacatgggctgggttggagatgttttaatgggccaacccaataactgcggtttggaaaaactatgaaccattcacatttttttaattgtacaacccaaccctacttactataacgatataagggttgggttgggttgggattcatattttggactttaatatttatattacaaaaatgataaaagttaattgtacaaagtttgattttaaaaaattgtggatcattggtgagatattaagaagtaattattattaaagcctatgaacatgataacattattaatacttatgtatcctaacaatagaaataggagcatgcatcataagataataatatattcaaaccaaacttatcatttgtagtcaaccataaactaaaaataaaaatggtgaatgttaaagttctcaagtctccacaataaaaataaag

SEQ ID NO: 248864 - DNA, 662 bp, Cannabis indica
tgtggttccaataggaatgccactaggttttgttgaatttgtttgaatggactcggaagagttcaacactgcagtagcctttgatgcttgagcaacttccctcttaatagatttagtttgtctcttctttaggtctttggcgactttttcttttagagcctccgcggtttgatgagcccctgtgacctttattttccttggaacatcagtttgagtatgggttccaatagaaaatgtcacgagaaatttatctttcttcttttgccccaattcatgtgtaagcttccggaaaagtattgttactttcggtgccattatttttcctgtaaaatagcacacctaattacaagagtgtaatatattaattctcaacgtaattggagatgaaaaggagaatgggtctcaccgagcgtgccaaaaattatgctaagcaaaaattttacatttagaatattaaaaagaaatgcaaaacacaatttcacctatgccaaaattatagcataacagtttattaattcaagctcaacccattcaagattataaaaataatctcttaattacagtcctttcgtttaaaggaaatgccatttgattccaattacgatgatattaaatgatttgaaataattttgggaatttggggtgaatttggaattgcagct

SEQ ID NO: 248865 - DNA, 1028 bp, Cannabis indica
ttgaaaaaatagtcaaaaaccgcacctcccgcaccgcgaacactcatgttttagtacatcaactgagaattatatgttcactctattaactgtaattgtcatgcattattatagctttatggattaaatcactatgttctcactgttagaacataagcatagaacaattcaaacataatcaactcaaattaaaaccaacaacaatgaatttttttttaaaaaaaaaaccaaaaacttaatcttaaacaatagtggagaaaatgaaactttattaattgatttggcacattacgacaacagttttatacctcaattacacttatcaataatgttcaaccccagttacaaaatgcctcacattggaaaaccttgaacacacacaaggaatccttatacaacccttcttcactcaataattttctaggacagaatggacttgagggagagagagaagtctgaacagttgagaataactctaggtgttgaagtagtattcagtgtagagctgaggagtttatttataagtggatagttatgatagctgagcagaaatagagggcaactaaattaactacccatctcagtcacaaagatattagatgtgctgatgtggacagtgagtggatcaaatccacaacaattccacctaatttagtgtacttaaggagcgtgggagtgaggacaagcatattgaaaacacttgtgttgatttgtagggcccattattattccaagaagcatccaaaatgagaatgtataagagtcataaattcataggggaaggcccaatagaagtttgaaaaggggagtgttacaatgtgagatctagagagagactagaggtttgtgcatgaggggaggctaagttgtgtagaggttagtgcttttctttgggaatgtgtttagttaattaattaaatatatatattactaataatgaggagtctttctcgaaagactgccaaaaagagaggagcagctcgacaaaatttggtaacgactaaaaaaaatcaataatatatatatat

SEQ ID NO: 248866 - DNA, 715 bp, Cannabis indica
  modified_base (619)..(619): a, c, t, g, unknown or other
aatacttactcattttttttctccttatttcttttcttttgacttcattgaatttgacatgtgatttggcctcctctattgacccaacaaacataaccatcaaatttaattaataaaatatctcttttcatactatatcaaatatatatatataaaaaatatacttaagtcaaacttaaattttttttttgaaaaaatttattttttatttttatttaactgatgaaacaatcctagcccataatttaaaaatgagagatttttctaattaaaaaaaaaaaaattaaacataaaatcaaattttcttaatagtacttattcatacccatcaaatagttatgcactatttagaaacagaggttttcagtttagataaatatgattagttaaaaaggtattaggttactgtgtgtaatgttttgattaatatattttgagtgcacatattattactgatatataatataccatgtgcatcttatatatcatgctttaagcaataattaaatgtggtatttttgaatcacaacataaacataaagattataatgatatttatgatatgatatgattatgcagggaggatctggttatggagaaaacatagtgttccaaaacntagcaatgcacaatgtgaccaccccattatcatagaccaatactattgtgatcagaaggacccttgtccagaacaggtgatagaggaggccaaatc

SEQ ID NO: 248867 - DNA, 1075 bp, Cannabis indica
aagattaaggtaaatgttgatggcgcaatctttgcaaatgacggaaagtttggagcggctggcgtggctcgagaccatgatggtcggttcattgaagccttcacggccctcttggaggggtttgtggacccggccatagctgaagttgtggggttaaggaggctctgagttggataaagagacaccaatggggtcgggttgaagttgagacggattctttggttgttgttcaagcaatccgaggttcggttatcattccatctccttttggtcaacatgtgtctgcttgtcgtacattgttggcttccttacctttagtcacgattaattttgttaaacgttctgtaaacaaagctgcacactgtcttgctcgtagctcttgtttgtattcagatcgtattttcagtgagagtaatgctcctgctgatcttttatctattgtaatggttgaaagttcattctaataaagtttaccattttccttcaaaaaaaaagtgtagaaagctatattaaattggattatggcttgttttgttaagttaaaatatctattcttttaatccattagtggtttagttacacgatctatcaaatatctattcttatggtaatattttttttttgtttaattaggttaattaaatttaataaatataactttatagttttttttttttttactaaacctgaaattttattgaaaagaaaagaaatacaattaataatatcagaactatgacaattagttgtataaattttgtcaacaaaactcttacaatccgattgaagaacagtgacaggaagctttgtcgcctgcaaccaggagaaagcagtcaaaatggctttagcttcagcaacttcagggggaactattcccacaatgggaacaatcaaaccgacctttatattgtcacaatcatccttgaccactattctcagactatgtttctttgcagtgttgctaataccagcattagtattaattttccagcatctagacggaggagaggatacctgttcatcacctactgaagcacaaatatcaattttacaaccagtgttagaagcatgctca

SEQ ID NO: 248868 - DNA, 998 bp, Cannabis indica
tgaatggacttagtttgaaagattcacctcctttgagtccatcaagtaaagaaactaaggcttataactcaccaggagaacctgtatatgaataccttgaaactgaatcaccatatgttcgtaaacctttatatgatcaggtaaggccattttcttggagttttatgtattgatttctgcataatactttttttttcctgatatgatattatgcttgtgcctctaattctgctttgattgccaactgtatcagattttaaatcttgcatctaaatttcctgggctcaacgtgtacagaagctgtgatatattgccgactacatatacacacatacatatatgtatgtatatatatattggacattagagaggttcataagtggttctcttattctctgattttctcatcttttttttttggtcgaaaatggagatattcttagtctatatagtgatgtttagtctctgctttgttccactcattcatggaggaagaaaaatttcaaagagaacccaagatgggtctgaggattggggttacgttgaagtcagacccaataagctattcttccaaagttgtaaacttttcttcattttcttttttgggtaagaaaaaagattgaatttttatttttaatttgtttagaattgaatttcgtttgttaaaattttctcacaagcccacatgttttggtggctttacaagagtccttagagagttgagaatccatctaagccttagcgtattgttctctgtcttcaaggaggacttttaaatttatatgtatgattcaggaatgactcaatttcatcatcaattgtcaaaagagagtgcatacaagagatactcaagatatcttagtgtattgaaatcattatatattgtattcattatttacttttaattgtcaaaattataaattatattatttaaataaaatagaaaatacctagcataaaatttaatatacgtgcctcgcacgtagatttttactagt

SEQ ID NO: 248869 - DNA, 750 bp, Cannabis indica
tccagtatttattggattagaaaaaaaaattgtaatcatagtttttcatatatgcacatatattttaagtataacaacataaattcaacaagatattgaaaaatagcatttgatttgattcgatctggtcataattagatatccaatatttgattgtcagttgtaattagatttgatcgatttatacgtacccctagtacacatattgttgaagattttctcattacattttgagagaataaaaaattacaaccaaatacataaaatacataaaaagtattacattaagattacatgggaagaagaagagattacaactctttgcaataataataatgcatatgagtacaaagaagagaagatatatatctcaaaagcttaaaccaggtcaaagacctaactttgtcctaaaagttattttctctcttacatggacacttagagaaattctagaaatgttcttaaggatttatcaagcctcatatgcttaacctagtatctaatgatgagctatatgctcacaaggttgtaacaacaacaagtgatttcaactacatgtatcacaagtgagcagtataatatgacttctatttatagagttttcactcccatataaacattaatgactaccataaagttcttggacgttaccaatcatacattagacattaattgtattaattagatgattttgaggagtttcgagctattaaaaaggctccaaaacgttcaaaaacgcatcccattgta

SEQ ID NO: 248870 - DNA, 1146 bp, Cannabis indica
ctgaacttgccattctccaaaaagatatatccaaagtctctcgaagacaaaggggagatgattcagagtctgattgcaaggatcgagaaccctgtgccagaagcatacttaaagcggagctcctaaagaatttcaaaatgcctgaaatgaccctgtacgctggagactcgaaccccagtgaccacttatctaggtttaatcgcgtgatgacgttcatgagagtcagcaatgacacaaagtatttgtgcttcccattgacattaggagggtctactgaggagtgatttaaaaagctggaacctggatccgtggactgttggcacaaattacaagttagcttcagaaggcagtttgtggcagctaggaaaataaaccttaaagtcagtgctttaaccaacatcaaacaactaccagtcgaaaatctaaaacaaatcataaaaagatttaaaaagcttccaaaactaaaaaagtggatgatggatagcagttggcattgctgcaagctataatctggacgggattccctttctagaatgagctttagcaagaaggagctgttagccttcaagacttccagaagagggttaaaaaatacatgaatttaaaagaagcacaaataaactgctttcggatgatattaccctactggcggtccagggtatgctcttagagtgtagttttctataattactcttccagttgcaccaaagacaagcggaatacccattgtgcaattctcagcaacactaggatatacccacaaccttgctcttactctagctcaatccagtttcagagtactaagggtaacctggcttccaaagtgagccagcagtatctctctcaatctacaccacctgcagcaagtgcaacagatgttcctcaaacctcccagagcaagaggtcatcgaaagaaaatatgcggattgagaacaagaggtagaagaaaggctacacctcccagtatactttagattaccaatttagtggacacccaagaacgtatatacttagccatgagataaaacatccactaccagaggctgcctcctctgtattggcatagctcgcagagggacccccatcaaaagatgtgatatcacaatgacatagtcacactaccaatgaaaagcaaaaaatttgaaa

SEQ ID NO: 248871 - DNA, 787 bp, Cannabis indica
gttggccctaacctctttaccaatctcattgtcttcttccatcacagtcttaattgcttcgaagacactttctttagtaaacaacccttcttcttcacttttcttcacttcaataccagccttcaatgtcttcccaaatatccttgcattaaaaatctgatcacttctattgggtattaacacaagctcacatttggatttggcccccaatgcctcaaataaagatccccaaccacaatgtgtgacaatgcaaccaatagaagggtggttcaagatttgtggttgctgaatccaacctccataaaccactccccttcctccagttcgctcttgaaatccatctggtaaagcttcctcaatagaattagcccctgaaggtgttcttaatgaagccaaaaatggcaacccagaaagctccaaacccaacaacaactcttgaaattgagatttggtcaagatcacctcacttccaaaaacacagtatatgacagagttgggcttgaattgacctagaaagtcaacccatttcttttctagaggttcacttggtgagtctggtataagtggtcctgtaagcaaaacaggcttcctaaaatctttttcaagaaattcaacaaacatgccatcaatttctctacaacccttgatacctataacatcacactctgcgaggctcatatacaagcggtcaaacatattaatggccccaatgtcactaggcttgacacttctcattataagataccatcgagcctcatgaaaatggaggtgaattgatggatctgga

SEQ ID NO: 248872 - DNA, 710 bp, Cannabis indica
gggatctatgtaagtgcttcacgtgtagttatataagacccttttctctcgttcacacacacgaatgcaaagtacaatggaattccatttcatcaagttcaaatcagacttaggttgatgggtttctttaagcagatcaagtacacaaaaaacactagccttatttctgtcattttcttttaattattttactcttccttcactggaacgtacatgaaaaagctttgagtttaggggtatatttttttagtgctgggttatgctctcctgataagtaaaataaaatcaaaatagcagaatgcattcaccaaatgttttaggaaaaagattaaagactcattgaccaccctattctcgagggcttgtcatgagcataaagtggaagttttgtagttagtacatattaatttcattccagacactactattcttcaagtagaaaagaaaattcacattgtgttttattacttgtaaaacttgatcatgtgctccctctgttgcagggatatcatatgcattgacaagacagggacactaaccatgaacatagcaattatggttaatcatattgactgctggggtatgcccagagaaaggtttatgttatgccttctaaactcatatttaaacggatacagaaatatcccctggactgacgccattttggcatatgtattcacaaactggatacaggtttcacgcctccaagt

SEQ ID NO: 248873 - DNA, 619 bp, Cannabis indica
ctcaactatagtgatacgtaatagggtggcttccttccaactttaacagagaaaaaaaaactatagaagtgaagagttttttcttcttttacttttgcaatttgcttttattttcttagcagggaataactctctcttatatatattactaatgttagtgtaatatgtgaatgtaatttatgatggagagtgaatatgaagagtcatgtaggtgtattagtaaattgtgagtaaattttatttatgatatggatggatgaatagtgaatatgaaaagacatgtgagagaggtggtaatgatgatgagtaaagatatttaattaaataatgtgtacattaatcggtaatagtaaaaaaatttaatttaaataagtagtaaacacatgtattttcttaaaaaatgaaaagtcatctcctacgtaattaataaaaattgtccagcatgaagtaaattaataaccacagttattatgtaaatttatgttaatatatatattagtcatatcggggcggtttcggggtgggtatcaatacccccgccccgacccgaccccgattcaagtataaatacttaaacttgcccctgcccccgccccccaaaattgacccccgcacccgc

SEQ ID NO: 248874 - DNA, 736 bp, Cannabis indica
tgcggcttccaccgcaagcatgcaacttcttttccaatgaggggatccaagaaaggaaaccttttgataactgccttacaaccgtaccccaatggttatgagccaacaccgccacacacctccctcccaacttttacatcataattaaataaacttttttagttgttaaacataaacataccttagaatataaatatataatttattttaatttccattacatgtgtgagaaaattacaactagtgtacagaatcaaatcaattaattaaaaaataaataattagcaatgaccagattaacaaataacacacaacaaccggagattaaaacagggatgaactaagcatctaaactagaaatgataaaagcaataagacactcaccaagatatatactagttcaagtcctatagatcgatgtgatctatggctctactctaattttgaaacaccaccgaaatcctctttattgattgagaaagaataagatgcaatattgttgagatcaattctttgtggattctctcgaagtgtttatctctcacactcttacctaagattcttcttcatctacaaaagattttttatacaaaacccaaacctaatctctctcttttctctgtaccactctctctacctctcaatttctctctctcaaaatttacctctcgaaactcatatgatctctttctttctctcatgaaaatgctaaatgatggtggaatttacaggttca

SEQ ID NO: 248875 - DNA, 829 bp, Cannabis indica
ctcttccacaacttgaaaagattaaaaattacttgaaatataatgatgggttatagaaatcaaaataaaacagagaatgatcaattgctaaaaataaaactaaggcaacactagtgttctagatcgttttcccatttgtagcctcacggagtatacataccagtattagctctgctcactatacacacttcatttcccctgtctactacctataagggaaaagcaaaaaggtgagctaaatggacagtaaaaaaatatttttcatacaataccatacatattataatatatatcattaatgtactaattaaattctagcaaattcatataaattatcttataactattaataaatcattctacatatggaaatttttatcatatatgtccatgctaactgttcataccacacatatatagagattatcacaccaatatcatactcatagcagttgcatatatatactataaaataatcatgttcattactattacattgtcatatcatagtcattacatacataacattcttgatataaaaaatggtcaactaacgaggaatcacaaaaacaacaataaaatgacaataaaaagacagcaaagatgataacaacagtgacactagatttttataggaggtttagtcttgatttctacagtagtagtttactccccctttagttgaatttatctttagttctacactgaagatcacaagagcaaagcaaattacaaatacttttctatagagtttctgctattatgtatcccttccaaggtgatggaaggttagtatttattgggaaggagaattaatcagtattaattg

SEQ ID NO: 248876 - DNA, 978 bp, Cannabis indica
aacgagttgttccatgctaagcatacttgttgttttcgtgttttgagttcttcccagctcgacatgtgtcctccactgatgtgcttaccgaacttcaggtataacaataaataaataaataaacaaacaatacaaacatgtaacagataattggaaagtaggttaagatatttctattttaaaattaaaatatttaaaatatatcttaactagaatttaaaatttaggttgttagagaatatttaaaaaatttaaaatctaacaaatctcctaaatatcgtaaattctaattgaaattcaaatatctaacaaattttctaatttttagtttatttaaataatttaaattaattaaatatctaataagataatataatataatatcttaatttaaaatttttatatttctaagcttaaatttaatgaattaaatataataaaaaaaataatttgaaaaataagatatttgatggttaggatattatctattttatttaataattaaataaaacaaaatatcatatttttgaaaaaatttatagttagaaaacctaaaatttctattcaaactaaaattaataaacttttcataatttcatgttattttgccaaaaaataaattttaattaaataaatatttaataagattaaatgtcaaaaataacgttttcctaatcttataatttaatttaataaaatatatttaaaaaataacaaatttaaaaaaacaaaaatggttagtaaatttgaaattttaactagattatttctaaattttattaatattttaatatccaagtaagatcattttaaatttaataattaaatagtaatatatgatcttataattaaaataaataaaataaacataagtaataaaaaatttcaaaattaaccataaggctagtttgtggaaaaatcaaattttcaaattcaaaggatactaatatctaaaactaattttcattaattaaaaaa

SEQ ID NO: 248877 - DNA, 545 bp, Cannabis indica
tctctttctctctctctctcactctatttttttctcaaactattttttttatataaataagtatacatttttatatcttatttaattttaacaatctttctctctcttacaaaaaaattaagagcactcttcctctagacttagaaatttggacagagattttcaagccacacccactcgttaaattgacaaaaataaaatatttattaagtataaatgaagagagacacaacaatttatgttcactctctgcatcgcaccagtaatagagctacgcctcatttgagattttatttctcatgagatggtattacagaaaaatggccaagtgtttcaactctaatttctagagagaaaaactagagagagatgctctgatattgtgggtagttttctgaataagaaaaattgagatagaggagctctccttttttaggtgaaggagatccttgtatcgcgaatttaaatatttgggtcaaaagttcatcctcaacaaagttgcaatttttcccacaaataacccgaaaacaatctaacagaagaga

SEQ ID NO: 248878 - DNA, 851 bp, Cannabis indica
ttatagtaaaatttaaattttatgctgaaatagactagttggatcataatcccacttattacctggttaacccataatataaatataaatcctaattatttaccattaggcttatcgggatattacagttcataaccgaagcaaataattaattagcgtcggttcataactaaagcaaaaaaagatcactatttgcatctacgactatagtgtcgggtacaccaaccgaagcaaattctttatatgtcacttaaaaactaaagcattataccagtgatgggaacaacctcaatctgatggcgtcatcactaactccattcaccttaaatgtctgacaaagatcttcaaagttagtgagatgcatgttgggtcttctgttggcagccccccaaactggactgtggattggaccatctatagtatggccgacttgatctcaaaattgttggcatcaatggcaggtagccttacacaggatctatcccctgttaagttagggagcaaagagtcccttacgctacgatcattttgattgcgagcattagcttggtcttctacaaaacctccattattaccattgttactggcattgatgttgtcagccataattacttcttgttcaaacccctgttacaactctttccaatcttttcctccttctattctgtctgcaagtcttctcaattttagggttaataggcaatctgaaagttgttccttgacatcgcataaactaattgttcctgagaaaagagaaaaatttgaaacaaacagaattagaactaaattgaaaagaaaaaaaaaccaaattagaccaaaatataatttttattaatattaactaacaatcc

SEQ ID NO: 248879 - DNA, 1796 bp, Cannabis indica
taataaaattaattagttgttttattttaatttaggtaaaattctaaaaataatacaggaaaaaatagcagaaaatacagatttttctacaattaatggcagaaaaatctgtattttttttctcttttcttttacatttctaacggtttaaaactgtcgcctataccctgttataggtgacggttttaaaccatcgagaactccacattagcaacggtttttaaatgtcgtctattttacctgttttacgacggtcatataggcgacagttatagaaaccgacgaaaatactttaaacgactatttaaaaatgtttggaaaaaccatttttgtagtagtgttagaattcaagaaatatagaagattcttaatttacattggaatctaatatatgctcaagcatgtatgtatttgtacttatacatattaagaatgttggatagatatttaagtaaccatataaggaactttcggtatgcagccaaataagctataaggaatttaaggagaacaaatactatatgttcacttatcagaaatcagaaaacagaaaatgttggagatcattaagatttctaattctgatcttataaagcttttagttgtgagattttttgtcacatatggctgcaaaattaagaatggtattgaaagctattaaagatatatgttgtgacaataaatcaatcaggttgcattttagtaacaacatgaactctataaggtcaaaggcacattgactttgagctaattgttattaaaataaagttcagagtaataaggtgtctatagaacataataaggacaaactccatattttgtgtgatctggatcattaagaatataccacttaaggcttttcaggagcttattgctcatatatggatgtggtattatttaagattgtgctggtttagtgggagtttgtatttgagatgttctatcaagctgatacatatttatggtttgattctgcagataaagtatggatttaagttttgagtactctgaatgtattctttctattgaggtttaagtataaggttagaaagaattaataaagaattgatctcaattaaggaggaccagttggaaatagacatgctaagatcacatttgcatgtaatttccatgctacgcatccatgattgatctatgtcatttggttatattgatatacgtgaccattgatgggtttagctacgataaatgttgcgaaggccgctttgatcctatgttagtataattaatggacgagattgttttgaaatacctataattatgatagcaaaagttaagcgcttataaggttacacactatcagaaaacatatgtagcccaagtgggagattgttggattaaaatcctcaatatgggctcatatgtatattagtgtattgctatttgaagcttggcccaaaataaagtgatcattttagtaattgtgggtcattgggtattaaagtgtcatgggctaaatgtgtagataccctaagcgatatttctaatttattgaggggctaaattagaaatacttaaaattaataacctagctatgaggttataaattggtagtggtccccaagaaacaagagccaatttctattctcatcttcccccatcaagagagaaaattagaaaacctaagtcttgttttcttggaagatcattacccaaaatcaccacaaagattatctctacaagatggattaagatcatcactatctatgaattaaggtacgcttccgccatttgaattcttctctttgaatcaacaaaggtattctttagatcta

SEQ ID NO: 248880 - DNA, 946 bp, Cannabis indica
gttatccaaaagcagcccaaagtagtgtttctttgtgagactttgtcaagagctgttacattggaacgagttcaggtatcattgggttttgaaggtgttttctcggttgatgccagggggaaaagtggaggtgttgctatgttatggaggcagagtagtgatgttcagttgctgggttatggggtgaattttattgatgtttctattgctggagaaaatggcattcaatggcggctaactggtatatacggtgagccaaaccgtagccttcgacgacatacctgggaccaaattcgtgagcttaaggataggagttctctgccttggtgtattgttggtgacctcaacaatgtcacttcccaatccgataaacaaggaggtaatccttatcccaattggcttattgatggtttttgttcaatgctagatgagtgtggtttgtgtgatatggaattgtgtggttatccctatacttgggagaggggtaggggtactagaaattgggttgaagttcgaattgatagggcgttggtttctcagagttggattgagtgttttcctctagctaaactcattaatttagaggtgtcgacttcggaccactgtccgattcagttagtctttgaagtaatgaagagaacgggtggaatgaaacaatttcggttcgaaaacatgtggcttcgtgaacccgcctgtttgcagttggtgaaggatacttgggagattctttcggggtcctctgttctggataaaattcattattgtggggagaagctttcggtttggggaagagattactaaggaaattttaaagatcgaatccaagcttgcaagactgagttacgacgttggaaaagaggaaaggatgcaagctcagttgatcattataaaaaggctgaggctcggcttcaagaagtcttggttcaaaaggaggtgttttggcgcc

SEQ ID NO: 248881 - DNA, 660 bp, Cannabis indica
agttctaaaactcaatgcttgcttaatcgacactacagccaccaaaactagctcaaaataacatatctaaccacaatttaacttcaacaaacattcacaaacaacagcaacaaccatagaatccaaaaacccaatttatgcaataaaatctttaacttaaaacccaagaaatcataaggaggagtgttgggatctttaccttggtttgagatcactaaaaacttgctgaaaatcacaagaattgctaaagaaaatcagaaccctagctggttctaagagagttcgaaagagagagagaatttcggagagagagtgcttttccttaatttaattttttgtaaaataaatgagtaaatgaaattggttttattaaattaaaatcaatctaaatatcagcatattaatcacaataaagtccactaaaggacaatgagttaattaggcaaaatgaccattttacccttcccataactaaatagtcataaaatcacttaggggtattttggtcaattataaaatcctgactattctcgacattcttaatgtcaaaatatattgccccgctatactaaaaatactaagatgtaattctaatagccaaacaccgtgtttcaatgttgtcgggcataaaacaagtaaaaatataagattccatatata

SEQ ID NO: 248882 - DNA, 772 bp, Cannabis indica
tagtgtgtaagactgtgaagaatccaacacctgaaggagaatggggctcagatcttgataatactccgtgatagaaaggaagaagagttagagatctgggtggaatgagtcatttaattccactgcaatcaatgtaaggtttcttgaacttaatatgtgtttaaatttcattgttttagaaattcatatttaggatgtgaaacaacatacatggtagtaaatctagattctagtaaaacaatcctcaacaactagactcagagccatggtaatgatttactttcatgaagtatggattaaaaacaatgattttgttgatttggatgtgttcatgttggtttatgtgcatatttgatgattgtatggaatttgcaattttacgacgataaataattttagtttcattctgaaagtattttttctggaaaataaatgaaaatttaataaatttagatttttacaaacctcaatttggatttttgaatttggaataaaatatcccaaatcgggtgcaccatgcacgtgcgcaaatgatagggagctgctcggtcatgaccaagttcagacaacctcgtgtctgaggttacccagacatcctgtgttcgaagcctccagctgaccgaggttcctcgctcaagtaggctgcttgtagcctcctgtctcgcacatcagcccacaatcgcgcgcgcaggggtgtgcatgtgctcatttttttgtttctgatattttttgatttagaaatcatttttcagtgaaacaaaattcaaatttt

SEQ ID NO: 248883 - DNA, 1848 bp, Cannabis indica
tgaaaacccaaaaacttactactactctagcgagcatatatcttattgataagaagaatgataataaataattaatgctactttgtgatccattagttatataaataatgggttttgatgagatgatgaaataatatgtcattgcatataaataagaagatatatttataagttaaagttgaagattacattaaaattagctgaatgctagctaataattgatattcatagttattaattacaaaagtggtgaaagtcaagtggaggggtggagtaattagtggagagtattttagaaacaaaaagagcattagcagcctctgagtagtgaactccatcccagcttatgaattttgacacacatcctcacacatgttgtaaccagccacaccacacgctcggccccgcacgtagttgtgaggtggtccaccatacccacaacatgccattaatggactctcaaaacctatatatatacataaaaccccaattacatataatatatacacatttgaaaatcatgtacgtatacatatatatatatatgtacgtaccatagatagagggattggtaatgacaccgtatttgatcgagtacatgtcaacgtacacaatggtagtatccttcatttcagatctgagtttttgggtgagagcgtagagttgtttgttgaatacttttgcaacattatttagggtttgaatgcatccatacttgtccatatcacccctaaaattttggccaagtatagatagaagttgtggtaaacaccctagtggtcctgtattgtgtatccaaaaattctttcctccttgttcatacaatatctactccatatatgtgcaaaaattacatataaaagaagtgatgacgcaatgaattttgataataattgtacaataaatcgataattaatgatgcactgaataatataaaaattttatgactaaatctccaaaataattataaaactcattattagttatatatattatttatgcatatatattgtatatttatttacttcatttaaagccgattatcttcttattttgagtttattagtcaacagagacacaagttttccattttcattcaatatgtatgggtcgcggtattcttgagtccatcaattgctttgatgtatttaaatatttgaaattcttaataaaaaaaaaaagttttacaccaaaatttttcatttttttaatttttactttggggtcaaattttttaaaaaatattctgcttttttttaaaatatagtatattttttacacagtgtactgtgtaatatttttagtattgttgttgttccacgattgttttttttttaaatgttgttttaattatttggtgttattgttttactgtgcttaaaagtaaaaatctgaaaaaaaaaaaagaaaactttaagaattgatcagtatttctcattagaaactccactcgatgctaccaatataattataaacgggccaggcctacatcttgagcccaaggaaacaaattcaacacaaaatgtctggaaattttaaaaattgtcaattaattttgaataactagataagtgttgtattttttgttgcgcctctaccatctacatttcactaactcataaaaacatatgtatatagatgcaattcaacatgagtgtaatataatgatgatcattgcatatgtatatttaagagagtattattaattaattaatactaacccgaactgaagtttggatgacagtaatgaaggatggaatattgtctacaacttgtgcataggttaggttattgaaagtgaaggaacttgctagatcattttggccaatgtctattatgtagagtgcc

SEQ ID NO: 248884 - DNA, 659 bp, Cannabis indica
tcgtcgccgtggaagtggtggtcagcggaacaagcaactgctgctgctcctccaccccaaaacaaccaatgaaccccaaacccctgataataataatacaacaacaaaacctagaattgggaaacccacttcttcaaattccatatactcctcggcaagctctgtactcaagcgcaactcaggtaatctttctatctctgaattacgtttatgctttgatgagatgattcggatgaacccctttcctccagtgtcatcatttgaacctttgattgttgttttagctaagaataagcactactatgatgtttttaagctttatagttggataaactcaaatgggttgttccctagtttcataatgattaatgttttgcttaatggcttttgtaatttaaattgggtttctgatggttttgtggcactgggaagcatgataaggagaggttatagtccaaatattgtgacttatacatctttagttaaagggttgtgttttgagaagggaaatttacatggtatactaatttttaccatttttttacaaaaatactgccagattgtattttttacttttttactatgtttttttataagtttcatactccagttgtaacgccctgtccaacagggacgccacgtgtgtgcaatttaataaa

SEQ ID NO: 248885 - DNA, 652 bp, Cannabis indica
aaagctaaacaagaccttcaaaagccttcatcttcggccaaccaagaatccgccaatgacaatcgaagatgtaaaagcactggtgaagatgagatgacgcgagcaaaatatgatatattggctcatctaaaacgcatccctgctcttttaagcgtttatgatgcactgcaaatgtctcctgagcatagaaatgcacttgttgtcgcattgacaagtcctgaattttatacggagaaaatagagccaatgaaacctatatcacttgagacgcatacctcttgtatggcatgcataactttcgatgataaagatcgtcagttgggagctgccttacataatcgacctctgtacgtgacgggtatggttgctgataatcgcgtgagccgcatcatgttggattgtggatcggctgtgaatgtactccccttaaaaaccttgagagatgttgggttacacccacgtcaattgtctccatcatcattgactattcaaggttttaaccaagctggagaaaaagtaaggggaagtatcacactaaaaattgaaataggcgagttaaattctgaagccttatttcatgtcatcgattcagatacatcctacaatgtgttgttagggcgaccatggcttcatgaatatggagtcattcctt

SEQ ID NO: 248886 - DNA, 1172 bp, Cannabis indica
gagaagaagcagaatgaaataaaaatactgaaatcaacacacctctttatacttaagggaagctatcgtttagaccaccaagtggtgtctggacaaccatatgcctctatacggcgggttcaatggtgagagctgagaaagtttcaccccagtgggagtttgtgtctttgtgatggtaactaaattgtttacaccaaatatgcagagatatcaaaagtttacaaaagtcttacaatccattaaaagtttgatcaggagtctttcaatccaaaatctccataaacctttcatacacccctcatgcactaacttcaccacttaaataaagctatgtgggcataagaaggtaccctaaatttgcaaattgcaacccttttaaacacagtaggtaattcaaatagggagaacgaaacctacctgtaaacagcaccaaatctggctgcatttcaacacagagtcgtattagacatgtaaagctttaactaaacaaattaattagcaaaaataaataaatcaaaacacaattttagaggctcatgctttaaccaattaaaatatttacattatcaaaattatcatttctaaatcgaagaaaattatacctgtagcaatcgaagtgctttcgtatcttcttctagacaccaatcattatgcttgaaaattaaaaaaaaaaaaaaaagacttgcataagtacgaaaccgtaattctatgaaagaaataagcaataaatcatccgaagaaaaaaacacgagagagaaaaagtgagaaaaagttacgacgtcgccgacgacggcgatgcgagcggaggaggaggaggaggaagccatgggaggagaagaaagagtggacctgggcttcgacagggaaagagaagagcccatgagggagcagagagttggggcgtggaacaacgcgcttggcatcagcttaagcctgcgttaattcgttctcctgttgggtctggtcaatggcgaatggtcaacgcaaaacagttgcttttacactcctattatggaaaaaaggaaatctgcttactgataaactatttaaattttatttttccaattatagagtataacctttatttaagaatactctattcaagaataacctctaatttattataaaaaaattaagtcccaatttagaccagttataaataagaataacct

SEQ ID NO: 248887 - DNA, 665 bp, Cannabis indica
aaaattataatagaaaatgaatgaagagttctatacatttaagaatctcttaaacttttttaatagtgttttaataatactcacctttttattatgttattaaataagggtatatttaacaaatttaaattatgaaaataatcattcttaattaaagtagagatgataattggagcaatatatatagttctctatttcaatagtttaactattttagctaaaaataaattgtcattagagatgctttcttatgaatacttgaatgtgctaaatatcacaaatagaaatacatattaggtagggaatgctttcccgtcctcattccatttaagaattttaatatacattcctatttattccatattacggatgggcaaaatattattaagaaaataaaatattagatgagtctctgtcggggcgggatgcgtcatctccgtctccgctttgacccatttaatatttggaaatgaaaaattcttcgtccttatccatttcctcatgtagatggggaattcttgctctattagagacagtattctatgggaccctatccacattataaaagtatgcatccctaatcacaaaggtggcacaatataatttaataaatggtatataaaaataactaatcaacttgtaacgtgtcaatcataatacagtat

SEQ ID NO: 248888 - DNA, 836 bp, Cannabis indica
tttaaatttatttaccgcccccctcactttaaattttagttctctcttggcatacgtggtatattcggaataatataaaacatgatgacattcatccaaaggcgattgacatagtagaatactgtgctaattttatttcagagtataggggagtgcatgctactacagcgaccagcaataaaaagcaggctgcaagatgggctgcaccagttcagaatttgttgaagatgaatgttgatgccagtgtcaagaaggggaatagtggatcgagtttgggttgtgtggttcacgatagtggtggctaagtggtgtttgcttttgctgtggactcccgcaagctctctctcatttgcatgttgaagtgttagctattcataatggtttacatgtgggaattcaatggcgattgccccatttttgtgttaaatctaattgtcttgaagctgtccaattaatccatagtaaggaggatgggtgtagagacatagatggggttgtgggtcatattggggacttattatctaatcacaatgttgttgggattttttttgtatatcgtgaagccaatgaggtggctcatgcattagccaatcatgctttgttaaacaaagttagagttatgtggataggggtttctctctcttgtgcgaggcttgctttaccgcatgactcacctctttgtaatttgggttgctgaatgaagtttattttcaaaaaaaaaaaaaaaactgtaatgtttaaatttatcacaaattattttgtcaaatgatggttcgctaacattttatttattttggtctttgattttttggctgaatatgtcctttgggtataca

SEQ ID NO: 248889 - DNA, 999 bp, Cannabis indica
ctatgcctttgggattggaaaatctaattcagtcatctattttggatgagttaatgtcaatctcgttaaaatccccttggctcaggagaatagatcagtagtgtggagtatgtctccccttaatgctccaagactagatggtatgcccgataaatttaacaaggatcactgggaggttgttggtagtgacgaggttaattttgtccatgatttcttttgtataggaaagtttattaagggagttaaccacttttttgtggttattattcttaagaaagaaaatacctagaaatttgatagttttaggccaatcagcctttgcaatgttgtgtacaaagtggtgtctaaagtatattggcaaaccaactgaggggtgctctctctaatttgatttctcctcattgattggcctttgccccaggccgatggattgtgaaaaacacaatcatagcctaagagattgttgacactatgtctagagattagagaaggaaacattttacgggtataaagcttgatatgtgaaaagcatacgataggatcgaatggttattttttgatagtgtgttgaattggttttggttttgctgaacacttcaggaaactcatcgctcaatgtatatccttagtatcgtatttgatgctcttgaatggcgggccattgaaatcatgtcaattgaagcgttgtttctgccaaggcgaccccatttctccttatttgttcatatgggttagtgaagttctctctagaatgctttccaaggttgggactagtggagagttgatgggattcaaagtgaactgacgtagtccatctattttccacttatgtccgtagatgatacgataactttttgcgaggctaatgttaacaatgctgtaaaagtgaaggctctcctagatttgtattgtaagtggtctggctaattgattaatgagcatatgaccaattctttttttcttctaaagaaacaaaaaatcaattgcaagaggaaatca

SEQ ID NO: 248890 - DNA, 1371 bp, Cannabis indica
gtccaggtccttcacaaaacaacatttggcaaaaaattcaacaaacacattattttcagatgtcagttgggaaatactaagcaagttcttagtaatatctggtacatgcagaacattatttaggactaaatgactgttatcaacagagagtaaagagcttttaccaacatgggtaatttttaactgattaccatttcccacagtaagagtatcctcaccattgtagtcagtcttgtgagtcatattgttgctgtcagtagtaatgtggctactagctccggagtccatgtaccaagccccatcttcaaccatctcaggtgtagcaacaaagcagaagcattgttattaccagtttgctgacctttgtttccagatgtagaaccagatgcagtaggatctgaacccatgtagttttcgtcataacgattgtaacagtacgctgcggaatgaccgtaacgaccgcacacctgacatgtaggtttagtgttgttgttccttccacctctgcctctgaatctaccaggacccctgcctcctctctgttgaggctgacttccacgatttccaggaccaaaatgacttggctggttgtttcgattgccagaaaaaccaaaaggttttgttgcagcaacatttgcagaaggagaggaaagattgagattctttgtagctcctgataatgttgtcaacctgtctagtttgctatcaaagcttaaaagaatatcctgcaactcttgccaagaggtagaaactctggcttcaacttgtagcacaataggtaagtattctatatcaagaccagaaagaatatttgagacaagttgtttttcaggatatggttcacctgcaagggccagaacgtctgcccattgtcgtttttgacgaagatagtcagccatggacatggatcctttcctggctgtctgaatcttagtgcgatactcatccatcttcacgcgagaatgagctccaaacaaagtttccaacgcttgccacagacttgaagctgaatcacaacccattacttcagtcacaatggtttcggtcattgacccgtagagccacccaagaagaagctggtcattaacaatccacgtttcgaactctgggtttatcacaacgtttccttctcctgcatcaagatccccagggaggaactcaatcggcttcaccttggtacctttcagatatccgtccagccgatgaccacgaacaatggcagtacacctattgttttccacagagtatagttatttctgtcgagtttaagggcaaagggttggttaaatgtgctagcaatatgggttccagcagcacttgctgaaggaacagaggattgagcaactgcacttgcagcactctgttctcctg

SEQ ID NO: 248891 - DNA, 665 bp, Cannabis indica
ttagtatgtaagtttttaattagtttattaaaataatagtaaaatataattttatagattttatgatataataaaatattaaaaatgagagaattaaagagtagagaaaaataacttttagagtgattttgagagtgccacgtcatatatatagatatatagatatctaatatcagttcaaatatcagttcaaatattaatgggatttgttttattttttattttattattttattatatataaataatattttactattttattaaatataaataaaaagttacccatgaatttctcataaaccaagaattcagttatataggcacactttatatagaatagatatctgtggtatgtttacattagtttttaaaatttcatttttaggtgtacatataccaatctcagctgacaaattaataataaaatttaattagtatcttaaattcgcacaaaaagtaaagttagagagtattgccaaaaaaaattaagaatataaaaatgagttttttgcggctaaattttttcaaatataaattttgatggtaaaaccctccaaactacttaactgtttacaaatttaaggtgtcatccacttttcacagttaactaccaatatagactgcttatgtgtacactcatgtacacgtgacatgtttatatt

SEQ ID NO: 248892 - DNA, 1237 bp, Cannabis indica
aaaataaatttatattcgattctttgtatttcttttcattctatactatgtaaacaaaaatattagaactaagaaaaactcgtggtctatgtagatttaactacaaaactacgtaaatatgtatcttgtgtttattattatattattgattattcttcaaaagctttattgaaattattttattaaattcataaaaaggtcttattgttaacaaaattctgagttaataaaaatgattatagtagttgtttccttaaaattcttagataaaaattataactttaaaataatttttcttatttaaaatttaattatatattttgtttttttagtagtttgtattattattgtttaggctaattgggatttttgctccgtaaactttgacatgtaccaaatcatgtctctcaaacttttcacgtcattaaaattttttcctgaactagtgacattaatggattcaaggactttggtcaaatttcttttaattttactaagccaacgattgtctatgaactaaaagtgcctcttgaagtttgatatcaaccaaatagtacccctaaactttgatatgtaccaaattgtgccttctaaactttcatccacgttcgatttccgttagtaaaattgaattaaaatccttgagtccaacgatctcaatagttcaaagaaaatttttaacggcttgaaaacttcaagaagtataatttggtataagccaatgttagaggcaaaaatcataaatattctactattattatttatgtgctaattaaaaaatcataaaaaaataattatatattttgttgataagatagaaaacatatattaagtattaagcactaattttatattttatttattttctacttacattttgttatagagcattgttattaggtattagtggtgcttatcactatctaggtgtgtaagtcttatgattggttagtgatactctctaaaaattattaatcaaattatatgatacatgatacttagttgtgccaatagcaatatgacacctaagaaaatactaaacatcaataacaattttagcattactctaattttttttaattaaaatgtatattatattaatacaaaattattactaatatgtttacgttttttaagataaattataattaataaaatattataatatatataatttttattttaaaaatcaaaagagttaagaaattattcattatttgtctataaaattggaaaa

SEQ ID NO: 248893 - DNA, 1872 bp, Cannabis indica
ttaatggtaataaataaaaaatttggacatccacataattattaatatttataataagtttcacattttattaagagaaatggtaaaaaacatatttatataaaattactattagtataattaaatataaagtttgcatattagtacctataatattgctcttttattaatcactaagaaaatctgtaaattgagatgtctgactaaatgcaaaattaaaaatgaaaaaaaaaaagaaaaaaaaaaaagaaaaaaagaagagggcttactctactatgtaacttctttataatttaatcaatacatattaatctaaaaaaaatattaatatgctggagtgaaagatggagtaaaattgatgtgagttgatgacaaggaagtggagttcacaatggaccagatttttaaacaattttttggcagtaatggtttgtcttggaataattttgtgctaagggcagttagcaaggccctagagtatcttcgagaactcattttccaattcattcctgttcccatcattgctttaaattcatcataactgattctaccatcctgaattcaccacaaaatcaattaataaatttatatttatatctatgtaaatattaccttactttataagaagaaataaataagctagaacagaaacaatttagtaacattttgtagagattttgtaatgaaaattattaccttatccaagtcgacatcaaataagatgtcatggataacctgatcattggcaaaatcaagtttgtgatcaagcaaggcttctttcaactcatcaaactcgataaacccactttcattcttatcaaaataactgaaagcctgagatagattttcctcattacttatcttcttcaggtgcactgacactgtaacaaactcttcacagtttagtgtaccagttccatctgcatccgccttccatttataaataaaaacaatcattttagttgtgaatgaagatatcatattcatcatggtgtattcatcaaattattcagcaatatatactaaatgaaatacaccatttgaacaataaaaaaaaatcaataaaaaattagtatactgattctctaaaattagtatgatcctacttcaattataggaatcttttccatcttcttttttctctagcacttttatgatgtgttattccaatcaattccatttttttcttttttctttggaatggctagattgagaaataacatttgatgccaaaatctcacttgtgaaattaatgattagataaaagtaagaaactgaaagaaaaatataactcacagcatctattaacatctgcacctcagaatcagtaataggatgaccaatggaacaaaatccctctttgagttcttcaaatgttaaatctccatttttatcagtatccatcaattcgaatatttgtttaatcccatctatttcttcttctgacaagtagtcagctaccacctgaaataaataaatgaaacaaatgcttgagagagtgttctaacataatacaagaatatataacagagaaagtaaggttcaaacacttactctaagaactctcttcttaaatttattcattaatgaaaactgcttgatccttattctgacatgttctccaaggctaacattaggaactcgatccatattttgtatccaagggtgttcttcatattgcatggtaaagttgtaatgcatattagttcagaaatgcttgctatgttaagaaacatagatgatcttaagtatgaaatttaatgaaacaggtgaagaattttcacaaacaataaagattacaattgtgaacctggacaaaatccaattctaaacaatctgaaaattattgcagttaatctagatccaatttat

SEQ ID NO: 248894 - DNA, 543 bp, Cannabis indica
tttaagctcaatttcaaactttgtcaagtcttccctcttgccagatgaatctgcatcatgtaacacactgcctttctcgactttcaagtgagaaaaatcattttcattaaacacgacatttctataaataatcaccttagattttccactctggtttatgtagattctataaccttttgtgcctataggatatccgaaaaacgtgcctttgacagatctagcatcaagcttatcatcatatcgatgtacatatgttgcacatccagacactctcaagtgttttaggtttggtatcttcccgtaccacatctcataaagtgtcttcaagtctatgactctattaggactcctatcaacaaggtaacaagcagtagttaaagcctctccccaataaggctttcccaaccccgaactaagaagtgaacacctcattttgttcaaaagggttctattcatatgctcagatactccattctgttgtggagttttcacaattgtcctatacctagttatcccatgctcattacataatctatcaaactc

SEQ ID NO: 248895 - DNA, 686 bp, Cannabis indica
attgactaagattaagaaaaaaaactaactaattagtatatgattagtattatgagtaatctaatggtgtttttgattttcgaaataacgaaaaaatatatgtttccctcatcttacaatgtttacattgaagcgtagatcacaataatatttttttaaggctcaattgagtaacaacgtgaccatcaattcctttttaaaatttaaagataagagagagaaagagggaaagagaaaaagataaagagaggggaagatggtaaatataaactggatctatctatgcttaattccacatgttatacaaataaataaataaacaaaaggaaaaaagaaaaaaaaataaagaaagaaagaaaggaaaaggcatcagcttagtatatcatgcattcatgtttggtaatacaattaaaataaaaacggtataaaacacacggtaaaattattaattaaatgctgtacaatattaccgataataagatgtaaaaaaggactgcacatgtaaatttcccatggactctcaccgaagattcaggaaattcaaaaccggaggaagaggaagaggaggagtcttcctccggcaactagcataaaattaataattgattgaagtttctggtttatattagtataagtatttttgtgattaaatttatgtattagctaaaaaattttgtgggttttgt

SEQ ID NO: 248896 - DNA, 745 bp, Cannabis indica
agaaaataatttaatgaggacatcagattaccacatattttggctagttaagtattcttcgcacaggctcacccagcaagtgaaatccaagccaatagagtacaattacaactaagagacttgaaagaaagacaaaactatgaatcattgaagaagataaagaagaaaactgttcaaacttgaaagcacatctacataacataacataccagagtactgaatttgacaaatgacacttcacacttccatagttatatcaagatctagatcagattaaccacacagtaactagcacacacgtaataaatccagcttcaataattggacatgtttcaatatcttttgacaaaccccatgaagaataaactatgaaatcacagattcataggagcaaagcaaataatggaggagctgactaaaacttttaaaaaaatatatgatcaaacagcaaaaaaaaaatgattaaacagcaacaatacgacttaatacggcgttctaaacgagcccctaatgatttatttgaaactatataccaataagaatatgatgctctcaaactcaaggttgaagcaaagtcacaacctgtcaaaaccaaagtaagaagtaaattctgtaggaaaacacgtgaaaacataattatttttattattgcaaaaataattacactaaaattttaatacttttcttaattcacactacacacgaaagctctcactattattttattagatactcacacttaaat

SEQ ID NO: 248897 - DNA, 552 bp, Cannabis indica
tcgattgccatcctgaccgtacggtgatggtcgatcacagctatctcacacctgtcctggcctataaaagccagccttcttacttcatttggttactttcagcattttaccaaaatttcttaaagttttctcagagagaaaagaaacttcaaacaccatagatcacttgcttctattctttcgtcgttgccagtcttcattctactggcaatcaacaccaaccctcagccttccaacttcatgtaagttcttcgtataccttatacttgcttactgtttatttatatagcatgttttatgttttctgggttggatgtcgaacttctaggaatgagtttgcctgagtttactgtatgatgcgttaaattcctcttttttgcgtcttgatggctccttttcactacaactctattgaggaatcatccttatcttatgtaataacgtctttacggcttagaataggtcttgctttctcggctttgccctttttttttttctctttttttcttttttgcaatgtcactgcctttgggatttttgcacccgattctt

SEQ ID NO: 248898 - DNA, 676 bp, Cannabis indica
taaatttttaaaacaaatatatttttttttataaaaacaaaattaaaaattaattagttttctcgagctatgtgtagacggtctttcttgagctcaccaacccccatgaataatcttgtgttatttgttttaggaaaatggcttaatagtttgcccctagtggcatttttgtaaagacaaatttgtaagccaacttgggttttctcttatcttaaatgccttaccatattcctctatttataagttcttgcaagaaacaaaaggagcttggagtgtggatggcaatacatgttttcagaagactttatggtcgttgaatgttcctccaaaggtcagtaacttttttttggagagctgcatcaggtgtccttccaacgtgttttcagcttaaaaaacatcatgtccctgttaatgctgcttgtcctttgtgcaatgttgctgcagaaactgtgcatcacgccttggtggggtgtgaggttgctactgctgcctggaatcgcagctcggtggatgttaggggcggctctgcaacatttagtagctggcttctgttattattcggtaggggacgtgttagtgagatggaggaagcggctgtggtgagttgggctacatcaaatattgttgcatcagcaaaaaacatgcttgatcaatataaatgtgctcaaggtagaaa

SEQ ID NO: 248899 - DNA, 1217 bp, Cannabis indica
aaaatggacatcattctagtaactttttatttgatcaaaaagagaatccaacgttacttcgttttagtcgagagtcaagatcattctttcatgagcttctaccattatttcatactttataagtcctactcttaggagccactattcggatggacgttactaaatatagaatacttgcaataatacttatcttttgagattctatagtgttcaattgctaattagtgtccaaatctattgaggatgaatctcactaaaacaagaaatatgtagaaccaacaatggagattgaatatccttataataaagctcattatagtaaaccaaataaattctcataataagctttggacaaagactaataattataataaaaaaagttatatccattggtcaatatttaaaataaagatctttaaactttgagaacatcctaatatatttttagctctgaaaatatgtaacgtatggaaagtattcttataaaaagagaataatggactttgaattattttcatggtcagagattagacgcagaaggtatgatatatataaggatgtgctttcaaaatggaatgattaacaattgggagatatattagtatgtcacatgaaagaccaccattttataatgaagttagtgtctaaagataaaagtgagctcactgctaatcttgctatacttagaggcacccctaacaaaaaaaaatgcaatttgtatatatgcatatacaaatcaaagtaaatgagaagatattattattctcttatctcaagataaaaatattaggtcattcggcaatttaattcaatattttgtcatttattttgatggtatttaatactgaaaacaataactctcagcgtatctttatactaatcgacattataaagtaagtctttttggtagaatcttacttcaaccgacaagaaactacttaaaatattaagaacatgttcttactggaagattatgtggagatatttactattcttagttatacaatctaaatacggtttttttttaatttttgtgaatgttctctttatttatatttttatggtttttggttgtttcatcattgttttcatgttgtagcaacgttatcttatatttctacaacgtgaaaataacgtgtgaacaatgactcttttaaaatgtctatacaacagtctgtaaagaaaaaaaaaaattcttaaaaaatgtaaaaaaaaaa

SEQ ID NO: 248900 - DNA, 562 bp, Cannabis indica
tagtgtcatgtgaagttacaaaatattaactccacctcttatatgttacaactatatgtaactcccaatcacataatattgtgattattacatgcatataattcccaattatattatatgtaataatatatataacatatcacaattttaatcttaaacattatattatataataaataatataacattcatatcacaataatgatcattagactattaataaagtaaatttcaactagtttaacgttattaaaattagattaatcatcattagacttagactgtcctactaaaaaattatatgtgtgactcattttataagtaaataaattatattaattaatgtaatgaaatcaaaagtaatttgttaattattttaaattaatcacaaataacgatccaatataactaaaactaatgtaaccatggttaatatttgacatatttgaaacatcttccatagctagaaatcaaacacagtttccctcaaatttatcataggtaaaattctacaaaagtcaagagaaattttattttttttgtcctaatatttttttttttc

SEQ ID NO: 248901 - DNA, 6072 bp, Cannabis indica
gttcggtctgggttcgggtttgggtttgggtttgggtccgagtctggggctagggccaggtgtaggggatgcagttcgggttgggacaggggtctcaaagtctaggttggggctagaatccaaatattgattaagaaaaaaaatgtttaaaagttgtttttttttttaaattttaattctcaattaaaaaatgaaaattttatagaatatatttttagaaaatatttttacttattgaattaaaaaaaaaaacctaattaaaaagtgttaccgaacacatcaataatatatgatttatttcattaagtattatttttttaaaaccacattaattatttataattttatataatacaatagtataatttattttctcatttttgtatataatgcaagcatattcaatatttaggtgaggtggtaattagagttatatttaaaatattgtggtccaattaatgtgatatttgacaccttatttgacagtaaacattaaggtatatacagatacaacaaaagtgtaacacgcacgggtgaaggaaaaagttaaagtttgggggcaaactgcaagaaaaattatttaaaggggtcaatataaaataactatccataataatttttttactatatttcatatgtaacattgtgtaaaaaaatctttttgggtaagactacaatcctcatgtgtgtgagtagctccgtacagtagtaccagaagatatttttcctctcaaattttttacttaagtagtaaattgtaagtgaaagttatactgtaaattattttttattttcaatttaaatttgttttttttttttttgaaagggataaaatttttttttatataagtatttaattgcaaacaaacaaattatttgggctcgtttggagcgccgaattagatcatattaaattctattgtattttatgcaatatttttatgtaaaattatatatgatattattattaactcttatggacatttaaatatataatattttaatataaattaaagtttaacataatattatataaaaatatgatcccaaagtaatacaatacgacttaatatgacgttataaataatgtcaaagtaattaattatgacaaaattcagagcttaaatatttttgacaccaataaactgcaacaaataaaactacaatatcctttcaaaaaacaaactacaatataaattttgacataattatcccatttaatgataacttttttaaaagaagaaagtagctagcgagtggtggaagtgtaagttatgtgtaggcatgtgaggttttaagtggcttgtctagcgcaatccaacatctttcattccaaagctcaatttgctatttagtatttactgtttactctctctcttcattcaaaattttcttttaaattttaaaatttaaataaatataaaaaaaagtctcttcaaattaccgaactctcacacactgaaacacaaaactcaagactgtaaaacagtcagcgcagcgagacacaccaagaagaagaagaagaaaaagatagataatggagaaaactacacctgtgtccacggtcaggaagcctaactcttcaacttccgatcttctcacctggacggaggcctctccttcctctgcttccaccgccccacctacctctgctcctcgctctcatcaggtattcctttattacctctctctctcatcatcgattcatttctctttcagctccagtttagcttcgttttcttcttctccattcatttaatttatcttttgggtttgaaatttgattgttttcgttaccagccgtccgatggaatgaaaaaagtgttgcatgggggtcaggtgacggacgatgaagctcagagcctcttgaaaaagtaagatctgcgatattttgaacgtttctgctatgtgcttttttaatttattattttttttatgataaaatgccttatttatttattgattggtaattatttgtaaatggcttctattgaattagatctactaatgtatgtgtttttatttggggctataagtaatagaacccacaactgggattgctttatttgattttgagctcagagaaatttcagctctgaaatacccacgaaataaaaacctcttaatttcaaattcttaagtttaagtgaaatttgtggcctttgtattatacccacgaaatgggggcagttgaattgataatttggtgagcattgcttctaaatttatggtagtatcttagaaaccatgctaacattttttaaaaggattttagcttgatgttaaaagcaacgaggagaacgattttgattatgatgattttttttttcattaattaagccttgatatttcccaatctttgatccagagagtggcattgttttcatttaacttttttttttttctttttttttttgctgtgtttttatcagcttgttagtaaattttctactaaataattcaaatgtatgtttttatgtccagttaggtaataggaaattacattaaactgttagtgagtgagaaaataatgacaactaaaagttgccgaatttggatgccttgaacattctataatgagctattacaaaaaattttgatgagtaaaaaacagtgaaaatattttggggatgaaactttttaatgtgcctcaggaatgaatgcttcgaaagtatgtgcagattttttttttttttaaaaaaaaaattttcactttacttgtgctactttcaggaagccttgttcagggtataaaatgaaagagatgaatggaagtggtatattcactgacaatggtgatggtacccctcaatctgatgcttccaaatctggttcgaaaacagggctgcgagtgtatcaggtatttggatgaggtttctgaatttctttaaaaaaatcccttatcattgtcatggtggttgtgtaatctgttaataattgcattttcagcaaactgtgaacaaaatgagtcaaatatcattcagtgctgatgggagaatctcccccaagaagccaagctctatcccagaggttgccaagcaacgtgaactaagtggaaccttcctaagtgatgctgattcgaaggttaaaaagcaggtatcaagtgctaagaacaaggagcttactggacacgacatctttggccctcccccggaaatagtgcctcgttcagtggtatctgctcgtacccctgaatcaagagctagtaaagacatgggagaacctgcacctagaaatttacgaacatcggtcaaagtttcaaatgtgagtttgggaatatagtttctccaattcttctaatatctggacttaaagttatgttccttctaatttagtctcctagttttctgtcataaatataatatcataaactgaagtcatttcacttttcatcgacctagcctgctgggggtcagagcaatatcctgttcagtgaagaacctgttgtcaagactacgaagaaaatacacggacagaagtttgctgagttgaaaggaaacaacatatttaagggagatgttcctccgggatcagctgagaagccactgagcgtggccaagctcagggaaatgagcggcagcaacattttctccgatggaaaggcatcatctagagattatctaggtggtgttcgccaagccccaggtggtgatagcagcatttccttggtttgactctctaatcgctaacatgctgtgatacattagaatctatgcttgagcttgatcatgatcagcattccatctctaggagttgtgacatgtgagtgagtagtgataatcttagaaacttggcatggtatgtagattaaattgtgtgcactttaggataattgggaatttggggtttgcgttttgtgacggtgtgttttgatgctgttatttaaagttcgtttaccctttatccaggattgagtatgaataaaattgttatttacatttaaatttacacatctgactttttaggttatagttatcgtgaaagcactaagcattgatttagtaaagatcgttcaatttgtcctagatcaaatgtggcgtaatccattttggctggcttttgtagattttcaaactttttagtggatcaaatgactagattgtttattgttattttgcccaaagatttcgaagtaagaaaaattcatgttcaaaacgcaagaccatactgatttcacaaacaattaacttagctcaaactgccaattattaaataacaaaaggtccacaaacccatcacaaggcagataactatgacaaacaagacacttgtgataaaagcaacatggcagcaaaacgcatgcagtctgcacgccctcacaactagtctctactagaatctagatcctgacaatgagttttaagcattgccatgaccagtgagctcaataagaagtttctcatagtctccagaagtgtctttggcaattgcagttgccaatggaacgctgttccttcgatggtattcctctttgatacgacacagatcaacctcagctctggtagtgataaccctagtaagggcccattcgtctgtcccaaccttgttgatggcttggcgcagaaccttctcaaagtacttctcaggggtggtcaagcaagtaattactgctctcagtaatttgaggtattcatctttcgaaccatcagccttcaaatcctgcaaatggatgcgttttggtattagttcgaagtttaaatagtaattcagattggttctggttgctgaaactcagactgtataattaatctatataaatgattcttgtaacagctgaaaatctctcataccttgctgatggagtttccataagaattgttgtagtgattgagggttgcattcagctgtgccttgctcctagtacagagaatcctgatgaaatcatcgtcattacaggccttatccgtgaccttttcacggagtatcttagcctctgcctttgccaatgttgtgttcacctcatctccctcatatcgcaatgtactcacgagaggcaacagaagctgtatttcaaacaataatgatatcaaatacaagtaattgatgaaaacaaaggtagagaaagcatcttctcatgcctctgtaagctaaatttgaaatcggcattactatcaatatacacatcaaagttgtgcatgttttgatgtcgccataaatatatagtacacaattactgagacacaaagcacaatcacagcttatttctgactttggaggtttatgccaaagggttgtacctttcggatgtctccatgtgtatgatgagcaacatcctcttcaatgcatctcttgtaacgatcattatatgccttcctcacaagaatcagttcatgagtagatctagtagtggcaatttcgacaagaacccattggttagaggtgaacctctttgtggattcatacgccaaatacgcatcacgctcagcaggttccattgtccatagaagtaaagccctctgagaaacattagaaaacaatcaatatccttccagttatatagcatactcattagcatctcgaaatgttctgtgtatcttagtaaagtatatatgtaatcttatacacacgaacatcaaaaactgacctggaagtcacctgaaatctcactgtctagtgctttcaaaaggtctttgccataagcatccgcataagcctgcctaatctgtgtgcgttgatgagcattcctgtgagccaatatggatatgattaaaccctcatttgtcccccatcctgtaaaacaaccaaatggaaaaaaggttatttaaggtcaaccaaaacattaggaatcaatctactcttaaacccctttgattaaatttctggaatgggaaattagactatattatcttacagaatccgtttcaacaatttattcttaggagctatcaaagaaatgtcgatgatggcttattccaaatgcgttatcaaataatttgcgaagtgagctcaagaccgaatcaaaatcaagagaaagtagcaacataaacctttgttctattgctaagaaaattattgtgcattatgctttgaatgtggtaatgaaactcagattgactaagttacaataatcaa

SEQ ID NO: 248902 - DNA, 1631 bp, Cannabis indica
cgttttttttttaatttttttttgttaaacttgttccttggtaaatttggacaatttgaaatgatctcacatgcctcaccagactccccggggtactaagtgagtatgaaaaatcacaattcaaatatttctaaccaaatgaccaataagtaaaataaattacttattttgaaggaacaagcttggttttttttaaatagtaataagtccaaaaatgtaataagacaagggcatacacaagaaatattcccaggccgattgggaaggttgccaaggtaccgcttcgtcccacactttcctagacagaaccaaggttcccaggaaagtgtagagggtactctatcacaagccttaaaagccaatctttctagacagaatactctcagtttttaccacttgttgcattacactttgttcctaatactataaagttttatgaataattttattttagaattttatgattttttttttaataataaagaggtggaacctaaattaaagctaatctaaaacctaaggttacacaaattaagggactaaacctaataatttgaaatctaaagaagtaaaaaaaaaaattaaaatgaatgataatttgaacacaataaatgaaaaaaaaatgaataaagaaatttaatgactaatatatatgactaatatacatattatataaaactaatactatatatataattgaacgaaaatagaaaaaagaaaaatatatatacaaggcatataataaataatgacaattttttttaagttatttgacacaaagaaaaaaattaaaaattaaaaaaaatacaagtactatatatacatgaggaaataagaattacaaaattaacaaatactatatatacacattatagaatgacttacctcttggctgaatattccactaagttttgatttcaatctccccggcaacggcgccaaaatttgattatgcccaaacttgtcttcacaaagcggttgttgtagtgtagtatgggcggtcgtgtccacagagagatatcttatcaaaaagtgattagtagaactttaagcgcaaaaagtaaataaatcgttggtgatttttgagaaaatattgaaaataaaattggttgaaaaattcaataacaaaagtgataacgtttcaagaatcaccgatatgtttggctcatttatttagattttgattcacacatataacacaattaaatcgttcacttcccaacaatttaatcggaagataaaacatgaagaacatatataataaaatatattcgagtaataataattctcacgttaggattatagaaaataattttatgaaaaatctaagaacgacaatataccttattggcaataatgcaataaaagactaatcataaaattataatatcaatatatttgtcctaatcatattcacatagaaaaagctagactatttctataaaatactaaatagataaatatattgatattgagatagagaaaaatagaagaaaagtatattactcaaatgtataaacttgcatttggtgaattaaaatacaaataaatttcaccttgcatataggatcatccttcaccttatctagaaaactagccaaaaatgctagtcattctcacaatattctaaa

SEQ ID NO: 248903 - DNA, 1822 bp, Cannabis indica
ggggtcaaaatcaaaagcctccgattggggaggggaatatagaccattgaaacctatcctagctcaattaggagttgtctttagacactcgtgtccccatacacaccaacaataaggtcgagcggagcgaaaacatagacatgtcactgaagttgggctcactatgcttactcaagcaaaaatgcctttaaactattggtgggatttttttgtctcagccacctatttgattaataggctgcatgttcaaagaaattcttacatctctccctttgaaacattgtttcaccaaaaacccgattatagttttttaaaaacgtttggttgtgcttgcttcccattcctaagaccctacaataaacacaaatttgagttcaagacctctatttgtgtgtttcttggttatagtccttatcataaaggatatcgatgtttgcactctactggtcgtgtgtacatagtgagaagtgtcaaatttgatgaggaaacttttccttattctcaattatttcccactattacacatactccctcatcaacttaccaaccaatcacattacctatacctccactaattctccctcatactccacccacaccagatcctaatcccaaccccattactccaacaaccaggtccacaggaaccacatctcccactgatataactcccattcagccacaggcatcaatctcagaccccaccagagacataatatcaacaccacctgctatatcaccaactcaaccacaacaaaccactttacctgatcacacccagccctatcaccccatgcaaaccagatccaagtctggtatacacaagcctaaactgctagctgctacaataactagattcaataataattttcttgagccaagatctgtcaagaaagctctagctgacccgaaatggaactcagctatgaccacagaatattatgctcttattagaaacaagacatggattcttgttccctatattgatggtatgaaggtaatacaaaataagtggctgtttcgaacaaaactcaacagtgatggctcggtggaaaggctaaaagccagacttgtggctaaagggtttcaacaaacagaggaaatagactactttgacacatttagtccggtagtgaaaccatctaccttaaggattatgttcactcttgctgtaacaaacaattgggacatacaacaagtggatgtaaacaatgcttttctaaatggggagctcaaggaaaccgtgtacatgcaacaaccaaaaggattcgaagacagtaatcatcctactcatatttgcaagcttcaaaaagccatatatggcctcaaacaagccccacgggcttggtatgaaaagttgaaaacagcccttgtctcatggggtttcaccaattccatttcagataattccctcttcttctccaatcacaagggtcatctactactcattttggtgtatgtcgatgacatttaatcacaggtcatgacaaagctgctattcaacaaattatctctgcgcttgacaatactttcggccttaaaactctgggttctgttcattactttctggggtttcaagcatacagatatgactccaaaattcatctcactcaaactaagtatgcccaagacatcctaaggaaggccaatatggaagaatccaagccctgtagcacccctatgtgccctggtaacaagctgtacacagacaacaaggaaccatttcatgatcccaaactttatagaagcatcattggctccttacaatacctcactttaacaagacccaatctttcctttgctgtcaatagactaagtcaat

SEQ ID NO: 248904 - DNA, 635 bp, Cannabis indica
gtctcctcttgtttcaaaactctgttgactaatgaatctcttggctcgcgccctcgtcaccgggccaactagaacttgacttgtttctttgaccttagtgctctcatcattccaccccctcttgaaaaggatttgtcctcaaatcttcacttgcatcaaaagggctcaaatcagaaacattaaaagtagtactaacattatattctccaggtaaattgagtcggtaggcaatgtcattgatcctttcaagaacataaaatggaccatctccctgaggtaccaatttagaacgtctttgggctgggaattgttctttcctcatgtgtaaagcagaatgcatagaacgattataagcaaactcaacatgtggtaaacaatcctcccaagtcttaatatttttccttatgatagccctcaataaagtggaaaagttctattaacaacttctgtttgaccatcagtttgaggatgacaagtagtagaaaacaaagttttgtcccaaattttcaccacaatgttttccaaaagtaacttaagaacttagcatccctattagatacaattgttctaggcttaccatgtaatctcacattctccctaaaaaataaaatgtgcaacattagaagcatcatcag

SEQ ID NO: 248905 - DNA, 674 bp, Cannabis indica
caaatatgcacatgtcacaattacaatatgaagataaatatatttaattaacacagacgtggcaatcataaagtgaattattaagtgagatcgctacttaaaatatttataataaagactaattacccatcataataaccatatacaaattgttttatattaattagcattccatttataatagatactaaaaaatatatactttaatattaatttatttaaaaaaaatgtaataattagcgtgacatattctggtagaataaaatataattttaaagtcattaatcagatgttaacagccattctattaaaatgatatattttttttgtcacttccaaaatgaatgtaagtatatatatttatattttctcaagaataagatattgtatttgtaaacatatcttagagagattactaaatggaaggaggagtttcttctaaccaacaaagctcattatttaactaaaaagtagtatgtttagccaattcataagtcccaatattaaaattactacaaaactttgaatgtgatgcctttaaaaattaagacaactaataacggagacaaatgagctggaggtggccatggcccccataaataactaaatatttaatttattttttgaaaaaaaaaaaattgaattgaattaagctataataaaaaaaaaaaaaa

SEQ ID NO: 248906 - DNA, 604 bp, Cannabis indica
gggaaaattttttgggtaatgtaagtataggaattcaaatttcccttataaattcatcacttgtgtattcccaaagtaactttggcacatgaattacttaatagatttcgaatttcaaagaaatttctaaacatactcatatacaactaaaataaataaataaatgctagaaaggtaaataaataaattactcttttaattaaaattaaataccaaaacacaataaatatattcaaatttgaaaatataccaaactattggaatcgtgttttggaaaaatatatgaaaaaaactaaggttgttaagatagacagtttagggtaaatactattttagatctagtgttttgcaaaagttaccaattggacattctgttttgttaaatgataaaatgaatcatgtattttttaaaattgtacaaataacaccctaaattgattttttgtcaaaataaaacttaataataatctgatctagagatgttatgataaaatttgttacatgttctatatctgttcgtgttataaattgtcttaaaactagttatattaaaaaattaaatttttgaaaattgagttcagggtcttatttttactattttgga

SEQ ID NO: 248907 - DNA, 1039 bp, Cannabis indica
caataaaaaaaaaacaaaacattcatataaaaaatcagtctgctatgtctatgatgagatatactgtattgtggtgatattaatacttcctctttgaaataattattaaatatgtaggctttccctcgttgaaatttgacgtttacgaagaaattacattgtatacctattttattttaattattttaatatttttaaaatatacccactattatagatgatgtccacattagactctttatgttaatgtaaattatatgctaaacttaagtagagagtaatggtatattgggtaactcactcataaaaatgagtatattttaataaaatataatataaggctatttttaattaatggatacaaaaaagaggtattcttcaacttatctcttttcaatattgaggtgcatctaacaatttatgttcttaattgtatatctttcaacttaaatcaactcatgctaaaaaacataacgcttaaaaaaagtcatgcttatactcagggccgaccctaaaacaaagtgggccacaagaaaaaaaattatttttgaagccttatgttagaaaaaaaatgatatttttcaaaatcagtaaataaatatatatatatataatttttaaagaaaaaataatttttgagcccataaactaggtggacttaagcacaggcctaatctgcctatgtctagggcacaactaaataaagtaatcagatcattctaaaaaaaaaaaggaaaaaataattaaatagagtaaggaaataaatctcatacacatactgtaatggatattttgtatacttcattttctttaacttgtgattgttttaatttcttctcctgaggtaaagacagtagcctctaccataaattttctgtatatatatatgcaatgcaataatcgagaagtattaattagatctggaatacgtacttgacaaaaagtgattgatatattatatatatagggagtgattaggttagttattagttaagccgaagagggcgatcagttaataatattagtatatgattcagac

SEQ ID NO: 248908 - DNA, 690 bp, Cannabis indica
tatatatatgtattttcagcgaattctaattgtcaaagtcttatgcaaaaaaagtaatattatatttatgaagtaatattaaaaattttagagaaaaaaaaaagaaaaagttgggtaatctaaattctaaattatatataaatatatgtatatatggagacaaaaaatttttactgtattttgaaagctaatcaaattttaataaccagctaaataattatatataaatatgtaatcaagaaaagattattaaaaatgaaaatagtagaaaagaagcttaattatattatataattatatatggtggaagaacttactgtgtattcttaaagcaaaacagaatattattcttctgaactaaaacaaattggatttcatgttctagatatatactccaacttagatgcttggctgaaatacttacctatatatatgtgtatttttttgaaaactaaatcgataaaacattcaaagagtcaaaatttttatttatttcttattttcagttattttttggaacttttgatgtgtccttattaattatattaaatattcaagagaacgtaaatactcttaaaaaaagatatatacttaattatcaattattattcattacattaaaactgaaaagtcattctctcaaccacaaaaaactgaaaagccattagattattaagtgaaaagaataat

SEQ ID NO: 248909 - DNA, 711 bp, Cannabis indica
ttaactaagtattgttatttagacaaatgctaaaaggtatcattagcagtcgtgagttgaaatgagtctaaaaaagaatttttctcccttactataaatataaatagtatttttaaaaattattgaaaaatatgtatattttttaaaggtattttttttatttgagtccctaaaatgggtaggccctaggcacggtcctagccgccttagcctagggtcggccctgatcactggtgcttaacaccctttttgatatcatatcgctattagtataattaagtatcaaatcccatataacttaatacaataactattaaaatatatagctaattaaacaatggtaaaacgtcatttatagaatgttgtaggcacttctggtataataaattatatgattatatgaaaataaattactatgcacatatattgtaataaaattatataatgtatatattagtataaattgccgtttatagaatgtggtatgcacttttggtgtccaatgataatgttctattatttaagatgagttttacttcttaaaaatgacttgcagcataagtgtgtgatatttgtgtataatttatttgtgtacatatatttattattaggtaatatagagtatttttatatgggaagtagcctaagtttatcatgtagaaaagctcttattaatagaaacacccatttaataaattttcaaaaaaaaaa

SEQ ID NO: 248910 - DNA, 1160 bp, Cannabis indica
ttaaaatgaaaaagaaaatacctgaagactcgcactgatttggatctctagtaggatcagacgggtccttatcgctaccatctccattgttgtaacttgcaacatctgcagccattttatactaaaaaaaacaatttgttaataagtatgaaacagattcattattacttgataggtatatagttagaaacattctcctttaaaatcaataaaaattatacaatgtgtatcaattttgttacaaaaacttaattgtataactttggtgatgaagaaaagtaacaaaaagaaatttttttttatcataattataaaattttatgaaacgtttaccaaattatgatgttttattaataatgctttatgaaatgtcatatgatacgagttgttttattaactcttccaattcaaaatgattattagagccaaataattttatatccaaatccaaaatatattgatactgaagatgtattcttagtcttctaaaatagatttcatctaataaaaaatatagaactgattattaaagaaaaaaacaaattaaaatctaacttagcaaaaaaatgtgtatatatataatatatatatataaaaaaaaaaaaggtgtatcaatttttatctaaaaggaaaaacagtgtatcaatttcaatggatagaaagactaaagggaaaaaagagatagagagattacctctgtgataggcagccctaactcaggtgagaatgatggtgaggttgggattcaagaaggaaaatgaaagattagggtatagaagattttggggtttggaggtggtgttcagatgaaccggatttcatcatgaatatataaataaaggactattaggggcggaatggtccgcccctaataaccttaaaggtcgccgctaatgctcaacaatctcacatctctaaatttcaatttttagtgcccgcttcactttccctccaactttttcagcaaaccccaattgcgattcccccaatttccagcaataacctctgtgtatttgccatattaaaccctcctaattaatttcatgtgttcttttggttaattactctgtttgttgttgatagtgaagctgggagaaaaaggaagtgagtcctttaattgttgttgtatttgtggaataggagcaatttcaagttgtgga

SEQ ID NO: 248911 - DNA, 796 bp, Cannabis indica
  modified_base (793)..(793): a, c, t, g, unknown or other
gttaatattacatataaataaaatatagttttaatatttaaaattaaaacaaaaatatttataaaattttcttaaagttattttcttcaaatatatatgtatatatgaataactatatattatttttttttaaaaaaaaaatatgaagaaaagaaaaggatagaaaataacaaataaaaaataaactaatgaatgtaaaataatgttcaaatttaattaattattttttttcttttttgacaaattaattattgtataatgtgaaagtataagtatttcttgtatggacaaatggacgaatgtaaaagtattataatttagtactagttgagtttattcttatttcaaattaaaactttttttttttttggattaatattttatcaagatttgggttatagtaattaaataaattttatacttttttgtgtgagatttttacaatattataataaattgaattgggtttgtggaatattgtacatgtgaaaggttttatgtatgatgaagttggagttagaagaactaagctaggtagataggcatagaattaatggtgaagtgggttgttggccgcgcacatacacttaagactttcaaggaaaggagttaaattaggtaataaagtggtgtttggctgttggagtccaaagtgggttgtccatagtggcctgggcccttataataatttagttgattaaggacaaaattttctaaaggattcattgaaaaaaaaaaaacaataaaataatcttttttttttttttttgtgaaagtgtaataaataaatacntac

SEQ ID NO: 248912 - DNA, 1069 bp, Cannabis indica
ttgtaaaactgtaatttttttctaattttgtcagtacaactctattattgtcttaaatagggctatataaggcctaaattcttgatcattgagtctagatagaaatatgtagtatcagttacttccaaatgttcttttaataaattcaaaataaaagttgtactgacgaaaccaaaagaaaattacagtttacaaatattgagtacttatgtacaaataaacattagatttatgccgcttacaaccataaaattttggatacttatgctgctatataccctaaagttataatgctttaaatctgtatgtgagaaaacaagtttcaacttctctctcctttgaattgttgttaaaactaatcttgtttgaacacacaaacaaagaaaaactgtattaatacactaataaaattaacacaatatgtatttcatagccatgcatgcatattaacgtgtgaaataaattgttcacttgagattatgaattatatattgcttctgtttgagtctttgattataacaaacaaaaaatttatgaggaaatatagaagaaataaaataaaatgtttttcataaatttgatatgtgacgttttattttatttttatatatatagttgttaatttattaataaaattcaaacatgatagaatgaaatcaattgaaactttttttttcttaaaattaagggattttacaaaaatattgatttttgggcaaaagtttacaattttacccacgcggaaatttttccaaaaatactgtctctttataaaataactgtaaaacaacaaaacagaacaattaaaaataatagtggaacaactaaaaaacaacagtaaaataacaattaaaacttaacatagtacacaatacaaaaaaaaaatagatagtatttttttttaaaaaaaaaaattcccacagtcaaaaagaaaaaaccatgatcatcatgctaggtctcatgatattgatatggaattgagtataaggatttccaataatgacaattttttttaacaaaaaagtaaattaaatcattaatttcatatgaaaaattcacaacctactaa

SEQ ID NO: 248913 - DNA, 853 bp, Cannabis indica
cttgcctgccctctccatgggataatctctttgggaacatactcgagagatgactgccttcgacaagatagtttggatattaaagcttcatagacaaacaaagtggacaaactctatctaactgggagattgtgcatccaaaaaacctcattatcgttctctactcaagaacataatttgttgtccatggaatttgagggaacttgattgggacctcaaaatcaagaagtcgacttccacaaccctctttttgggtttctccttccgtcacggtcaacatctgcaacgtattattggtcgcatgccttgggttcttaattcgggtttcctaatcttagaacgaatgcatggaattcccccaatcgaggaaaacaaattggctagatttcttttcacacatcatgggatcgtcttcttcgaggccaatacattcagcaatgaagtttgctaatgtctatcctttgattgttgttcgaggctggtaggtgatctcaaactgacctagttcaactgcccacttgaataggtgccctgatgcttctagcttcatcagaacttgcgtaaatggttggttagttagtaccttgactgtgtgagcttggaaatatggccttagctttctggaggctatgaccaagcagtaggctcacttctcaatggagggataccttggcttggcctcaatgagacgcttactgatgtaatagacagggtgttgtatcccttcttcctcacgcactagagcagcactattgcatgctcggtgattgccaaatagatgtatagttcttcactatctattggtttggataggatgggaggcttggctagatggagtttgagggcttggaag

SEQ ID NO: 248914 - DNA, 352 bp, Cannabis indica
ttggcttcataacatgtattgaacgtcagagagagtaagttgatctcctctggaagtgagatttatgaccactgaatcgtactctggtcaaaggcccccaagaatatacataatgagttcatcatcatttaagatctgacctgcacggttgagaccatctgcaagagatttcattttgagaatgtagtcgtgtatcgacatggatcctttttttaagagaccaaagttggaatctcaggtagagtatgcgagctctagattgagtggcaaagagagtttcaagaaatgaccatagctcatgagaaaattgacagtagagcacatggcctaacatagcttcagaaatggagtt

SEQ ID NO: 248915 - DNA, 568 bp, Cannabis indica
atagatgaggagagccaaaaaaacacatggttggtgtcttatgcaaagagaatgatcgcttagagatttagtgaattgttgctgtaataaatgagaacttcatttagcataccattgccttgaagattgtttgagaccatacaaacttttttgtaatttacccactgcattaggtgggacgagttctttaggtgtgtagccttgagggagtttcatgtagacatcttcatgtaattctccgtggaggaatgcattattgatgtccaggtggtggaggtgcaagttatggatggcagcaagagcaaatataagttttaatgtgttgaattttgccacttgtgcataggtttcgaattaatctatgccaggttgttgagtgtagcctttagctaccaaacgtgctttgcagcgttctacagaaccatcagggttatattatttcttgtagacccatttcttgccaatgacatgtttgtttggtggtaataggatttcttgtagacccatttgttgtcaatgacatgttggtttaatggtaataggataacaatccaagttttgttctttt

SEQ ID NO: 248916 - DNA, 527 bp, Cannabis indica
actcaatcctataatctagtccccgattcctaaacaggaatgaaaccctaaggtgaagctctccacacatgaggagccatgttacaatgaagaaaaggtgtaccataatttcttcctctctcccacaaattgggcaagaagagtcttcaatgtgcatcggttctctaaggatggatcgaattggaagcgtattggaaagaatgctccaccatagcactttatgttgctcattagaatagttctaagttttgatggtgtttattggatcacatctaatgaatttggacccaacccaaccgatccaatctaattatttattagatattagattttgtcaattgattcaatccaattatttattagatgttagatttttcaattaatcaaatccaatcgaattgactcaattgattcgatccaatcaaatggatgcatttgattggatcagttcaaaccattagatgcattaactggtaatctattaaattggatcgaatccattcaattttttaactcactattaggtt

SEQ ID NO: 248917 - DNA, 1083 bp, Cannabis indica
gtgaatgtatacgttatgtgtatttgcatgcttaaagtgtttggttcactaccaacacctgtacagttaagttatagagtgcattggtataatgaatgttatttgagagtacattacagtgataccagcgcaagtacgggaaagtattgagtatgtttggtatatcactcagtggtactcatggtatgaaacaaacactaacaacagtcgtacaatgaggtacgtagtgtatgtggtatagtggctataccctagtatggaacgttcttactcatctgttctgttgatccttgtaaataagtgtatgggcgcctaaatacaagtcagaaattatatgatatattatatgcttgtcttactgagtctgtcgactcacagttctacttccatgtgtaggtaaaggaaaggcgaaagctgaacaggagtgaacctgagctaggatgaggttgtacatgtcaaagcagcgcgacctagagtgttcagtctcgggacatctggagttgtattttgtagtcgctgtgcgacatgaatattatgtattttgaagtattatgttaaaaagtttgagaataggatcccgaaacttgcaaatggttttgtatgttataaagtttactaattaatataaaagttttaatttgacacttttttttagaaaattctttgattagcaaagatggcactgtaattgaaaaagtactgtagcgtgccttagcattagggcgctacaattttggtattagagccgccaggtttgtataccgaagcttgctaagacttgtacaatcttcattagagaaagttcggttcacgatccagtaagcccgtacttgtttagtattttcaatgattgttaaagtatgttagggagcatattagattataattatttatttttaatgtgttgcctttaagtccataagagcggtattaagttttatgatcactgtctaacctgcctggcttatgggttcgaaggctaagtcctataaaatggacgcccagtgaaatacaagaagtcagtgtaatatggttgagactggaggcggtcagggaaataaaaatccccagaatccccgtggt

SEQ ID NO: 248918 - DNA, 564 bp, Cannabis indica
aaatgaatatgagaataaagttatttactaatttagtagtgcttaatatccatctaccaagctcgacagaaataattataatatcatatataaagtatcacttttaaaagtttaaattatagtgaacacagcgtattaatgcaatttaaatttaaaatgtatataattgatgataatttagtaatattgataaaatttgagtctaaagtttaaattataaaagatgagcattgttgaaaataaataatactaatttaatttgtattttgatataataaatagtactaaacaaatatttataatatgttacatatgttggttaattctattaattgtcaaacttcaagcctttttttattttcaagacttggtggttgatactaaaaattatttatcctgcctcatgttcaggaaaatgctaattaaattgctcacagtttaactaaacaagttttaatattagataatgattgtacttaattaaaaaaatttcctctgcctactaaaatactcgaaattcctaacggttttataccgtcaggtaaagaattcctgatggtctat

SEQ ID NO: 248919 - DNA, 2728 bp, Cannabis indica
tgtacaagtttttatcaaaaccagtaacagtttgattatgaatcgtattgtattttgtaagtagagttttatattgctatatgttgtttctctgtatcttgcatattttcaaaaaatatttattagccaatattattattaattgtgtctcaatttgtgttcttaagagcatatgtactattaatgtaatgataagtccactgctcaaagaggcactccatcacataaagtataaatgaaaatttttgttgcataaccaatacttataatttttcgtttcgtgcctgctttatactctttagtcttatttttataattgaattaactcttcacatggtcttaacaaagttaagatatgagaatgtaattattatgacactattaattaattggtcatattatgagttgactagaataaatattttcttttatattgtttggcactaattgtaaataattcttattttacctccaggtagaagcgattaaagtatagagcatcaagagagacaagacaacaactgagaaatagtgttctcaggtatcttcagtggttttatttgatttctggtcttgatctcaattgttctgctaattagaagaggtatgtaagctatcttatgtataatttaatgtaattttataaatattagaggagtttgaatatcttaaatattcatccatagtgaagtaggttttgaaattataattgtatgttggtgataacagaaggttgagaacttgtgtgttttagtgaagtaggttctgagaaatttatttgtgtgctgtggagatataaggaagaaacgtattatgtgttgtttgaattatttggcttgttattaacagattatttggtcattatcatagaggaaatattgtataattttatctagaattttgtatttgtattttgaaatttatacattgtgttgtgcgtgggtatatagtttgattatattgactttaacatgtttaggttactaatatagttattcatcaaatttttcctagaaaatggataagagttggataacaaaggatagactttcaaaagagtatgatgagggagttgagagttttattaactcagccttacaaaatacaaccgatcctagcaaagtgcattgtccctgtaaaaaatgttcaaatttaaaaagattagatataaaggatataaagaatcatctattttttaatggaatggaccaaacatatgtcaagtggatttggcacggagaagtaacagagtctactaagaatgtccacaatgaaggagagcaatttgatcaagaatttgatgaacctacagagatggtgagagatgtagatgaacgtttcattgataagcctgaagaatttgtaaagttcttaaatgatgcagagaaaccaatatacccgggatcacctttgtcaaaattagttgttctagtcaaactatacaacgtgaaagctggtagtggttggagtgacacaagtttcacaaagttattgactttgcttaaagaaattttaccaacagaaaatgaaatgccgtcctcgttgtatgaagcaaaaaaaacattgtgcacattgggaatggagtataagaagatccatgcttgtccaaatgattgtgttttatatcgaaatcaatttgagagtgcaattgagtgtcctgtatgtaaaacatctagatggaaaaaaaataagaatgacaaagattgtaagaaagggattccagcaaaagtattatggtacataccgccaatacccaggtttaagcacttgtttcgaaaccctgaacatgccaaaagtttgcgatggcacgaggatggaaggataaaagatgaaaaaatgcgccatccagctgattccccagcttggaaaaaagttgacgaattatggcctcaaattagagatgatcctagaaatcttcgacttggtctttcagctgatggcatcaatccattcagtaatatgagctcatctcatagctgttggcctgtgattctatgtatttacaatcttcctccttggttgtgtatgaagagaagattcacaatgttatctttggtgatttcaggccccaaacaacctggaaatgatatagatatctatttagcacctttgattgatgacttgaaggtgttgtggaatggaattgattgttatgattcatttaaaaaagaaaattttatgcttagaggagtactattatggacaatcaatgattttcctgcttacggtaatttatctggatgttttgttaagggatataaaggatgtccgatatgcggtgaacaaacaaacgccataagattagaacattgtagaaagatgtgctatatgggtcatagaaggtttctaccagaaaaacattattatcggaagcaaaagttagcatttaatggtgaacaagagttgcgagaagcgcctataccaatgtctggcgaagatatctataaagagattcacttaatggaaaataagtttggtaagtcagtggaaaaggtcgatgaaaatgagacaaagggaaaaagaaaagcaaatgtaaaactaataccaaacgaaagcgtaataagaaataccaattaatggaagattcaaagaatacgacatgttggaagaagaggtcaattttctttgagctggagtattggagacatttgttaataagacacaatcttgacgtcatgcacatcgagaaaaatatatgcgatagtttgattgtccataatagtactcc

SEQ ID NO: 248920 - DNA, 860 bp, Cannabis indica
gacatgtcttttcatatccgtccgtagatatttcttccatgcgcatttaatgcctggaatagttcatctccaggaccctaggcccagttgagctgggctttgcctagctcccggagatgaacaaaaggttgatccttccggatatcctactatagctccatgaggagtccctttgaatatatccacttaaatcataagcatgtttaggatgtccttaagcacctccgggccttaagctttaactgccacgtgtccaatcgtagagttgccatgtatattgggataaaagcagggcaacatttacccctcaagtcttattttaaaactttataaaataggacttttaccttgcatctggtcttagggagtgaagtggtagaaatcccatgtgcgcgtgggccatttattgtttataatcattttacatcatttttgataggcaacgattcaattcccgcttgtttgacagatcccttcattaatgcagttgttagagaggtacttaagcgtttcaactgcccttttcctttcatcttgcaagtttatcctgaccgttagatcactggaattcgaatggtttgaacccttaccatccgattgtaatcgattaatttttcttttatgaatcaataatttttatttcaaattaactatgatttatacgaactataatgtaaaggccgcttagtttaatttgaaaattagcagttaatcatgtttaattatggaaaattatttatagatatttaaataattatttatactgttattgttgaattctgaaatgcattttatgtcatttagtgattttcataattttgcattctcggtgccctataacatggaactcagtgtttggc

SEQ ID NO: 248921 - DNA, 1448 bp, Cannabis indica
actaataatatgtaacatatgattatattagttgtcatctttttgtaacatttggggagttgttactatgagtaacatccaccattatcaccaatattaagagtgtaaaaagatgttacacatcttaatttgaaattcttaatgccataggagttatggtgtatgtaggagttatatttgagtccataacatctatggaggttatgagtttgaatttctaatggtgatatcctaaatactatataaagaggtttaaagtgctcattttgaagatgaagttttctatcaagaaaagcagtttgctagaaaaccctaaggcttgataattcccaaagctatttccatgagagttcccttagtgctttgagatagggagaaataagcttttggacaaaggtgtaatacactacaacatttatggttattagaggcggaggattccgctggtaataatccccaagtccgctggttaaagttaatagggcggggtccaccggtaataattcgccggtaatgcttagtgggtattaacagcggactgacacctccaccgctaataatagtgtcagacacataaactgaaattattagtatcggcggaccaatccacctctaatgcttttttgttttttttcattacatgttaatattaataaaaattaaaattaaaattaaaaatattactataatttaaactatatttactgatcaataacactcaatactacataaaaatatttattattgaactttcacatatacaaacatttaaataacaaatatataacaaaataaataattatacattgtaacattttagtaaacataatattcatcttcaacaacaaataagctatttcattaaaaacaatgttcatctccaacaataactgcacaattgaatctattgccgccaacaatcgatctatttctttggtatcaaatgattttaaagcggtcgacctttcatcttcaacaagtccttgaaatccacagccttggtcagttttattctgcatgtagcaaataatcaataaagtttatcatataatatatgtgcttgaattcttaaaattcaacaaaaattaattaccttccacaacggacaaccataacactattacaaaacacacttttggtgtcaattttaaactaagactaatacttttagtgtcggttcataaaaccgacacctatactacaatggcaaaaagtaaattattggtgtcggttataaaacgacacctttgaatattggtctcattttataactgacacttaaagtatacatttatgttttatcttttaatgctggttttaaaccgacaccattgatttttggtctcattttataaccgacacttaaaggttctttagtgtcagttataaaatgacaccaaaaacttatttatgatttcccaagttttttagtgtcggttttaaaacga

SEQ ID NO: 248922 - DNA, 1110 bp, Cannabis indica
cacccacttgaaacttatagccaatgattactgcagacggcaatatgcataacaattaaaacacacaagatccatatggcatagttatagatatacacacacaggaatgctacaatagaaaagttataaagcaagcaaacaaatatagatattcatgttgtactaagttactaaccccaggagcttcggattcaacaaagcatgaaaagcgtggctttttatgagatggaatggaacagaaaatgtaggtagaactggggattcaggtgctgaaactttatgtccaaaatgagtctttataaactcaactacactcttgagaaagagaaagaaagggaaagagacacaaatcattaaattatttcaaatctaaaaaaattcttaaaatatcatttccaagctagtgtcaatagcatctaaactgtgcctagcttaccttcgtaaacattaataactatattgcttgagagtttcgaataacctaaataaataataacgttgtttgaatatgaaaatgaaatgttaactgagtaatattgaaaattctcatagtgaattattgtgaatcaaatcctaacgcaattctaacaccaaagattaaccgaaaaacacagaagtagccaatgcaaatttcatttgtttcaaattcatcaaaatccaaacctaagcagcaaatgaactaagtttaaggaatgagctcaacgaaaatgaatcaaagacaaagaaattgatgctgacatatatattatatacaccactaccatatcaaaaaagaaaagtaagagagtagatagagagagatgatatacccgactttgacagctcgagcagctctcattctgggcttagaattagaacgaacataataggagaggccattattaagtttgccatagtgaactccataaggttgctctccaagaatttgggccatatcaacgctcacaagcttcaaccaccagaagccatgtttcttcaccaattgggagctctaaggtggaagcaaatccatgtttgtggacttggaagagtgtttgggtgaaaaatcacaaggaaaagagtcgaaaaaaaatttggaccatttctcgatttgtgcgtgtcatccttgcg

SEQ ID NO: 248923 - DNA, 1206 bp, Cannabis indica
tgcacctctctctacctctcaatcatcttttctctctcaaactctcaatctcatctctatttcgtgtcatctaaaatagctagacaagatggtatttataagcttagtatcaagatcataaagttagtggctgcaagaaacgagattgttaagttagttagaaataactaacttaaccaacttctctttgagcgaagtctacgcgttggcttaagaatcagagcctccaagagtatatactttctaactaacttaaccaacttctctttgagcaaagtctacacgtcagcctaagaattagtgcctccaagaatatatacaggcttctggactcacagaccaaggacactcgctgatgacgctttcagataggatagcgcctgctggagttaactatccagaactaccaatctcgaagggacaactagccaaccagaactccatctttgagtgaggctagctaccttgagaactggacccagagtggacatgatagtcatctgggaactcccttccagactcgactatcattctgcaagactccttctgggatggacaagttagctgttcagaaacaagatccaggagacacctaactttttagggacgactttccagaaatgatattggagaccttttcatttggaggaactttaccacacgtgtgtttcgtttcacattgcttatatgtgacttacttgtatggttcatattacaatcatgataaaatcttaataatttgataaatgtaataaataaattgtatataatttgtgtatgcacataattacataaaacacaattttttgtaataaaaatatatttttacgtttaaagaaatttcttttgcatttttaaggttttttataaaaacaacatgaaaataaaaagaaaagaacataaagataatatgaaaataacaataaaaaataacatacagatgacaaaaaatcaacaaaaaattaagaagagtacaacataaaaatatcgtattttctgtaaataaaataaaaaaaattgtgaaaacatttaaattatttaaaatttcataaaactgtatttttgtatttttgtaattttgttaattatgtgtatttgtgaaataatccctatataatctattgaaattattgtatagagccaagcatattcttagctggccaaatgggctttgacagtgaaggatcgtagtgccaaaattcagtg

SEQ ID NO: 248924 - DNA, 925 bp, Cannabis indica
gaaaatgggaatgagaaataacaaaatgggaaagttgcaaagtgatgcccaatttccttatatgtaagactatggaaaatcaaccatcaaagaaagagagaaagagatccagattcagatcttgataatgctctactacaaaaaggaatcaagggctagagatctgaatggaaggagtcataatattccactgcaccaactgtaaggtttcttaaactcttatgtgtttatttcatggttttagaattcatattaggatgttaatcaaacatacttgttagtaaatctagatcctagtaaaatatttccaacaagtactccatggtggatggaatgggcatcactcgcacttggttccagaaaattctgacatatcaccgtcctcccctcaatcttgctctttggggtagggcccaaaggcttgctcgattgccgggggaagactagaatatcatccagttgacctccgaggatagctttgtgaagtaccggctctatttaaaggacttcattcccaaaccagtgaaaggggaggaagaggaaatctgatgctcgacgggttgaacgagctcatccagagaatgagctgattcaacttaagtgtgaggctaagttgaagggaggttcaagagccaagcaatatgcttaggagccttgaatcctgaagatgaggctgaggaagagcaggtgactacgctcaagaggaggaagaaactttcagcctcgcccaggcctgttgaacatgaaattcgcgtaagggagcccatctcaccttctcggccgtcccctcccatgttcggaaaagggaaagccgtcatgtctgaaataaaagcgatgtaaggtgatgatggacttttgatccttacttgggcaatcaccttgcataacagttcgtcttgttcttaagctttttgactattttgcc

SEQ ID NO: 248925 - DNA, 879 bp, Cannabis indica
tatcccatagtctgaattcttcaaatttagccttaattttcgggtagtaataaaattaaacaataattaattattaattaaaaaaccataattaataattaataaaataataaaaattaaaacaataattaataattaaattaataacaaaacaatagttaataattaattaaaaaccataactaataattaataaaacaataaaaaataaaataataattaataattaaaaaaacaataattaataaaacaatataaagtaatacaataattaataattaataataaaacaataattaattaataataaaataataataaaaataataattaataaaacaataaaaaaataataaagaataatacaataattaataataaaacaataattaataaaacaataaaaaattaataattaataaaacaataattaataattaatagtaaaaaaataattattaattattaattaaacaatacttaataaatcaataaaaaataaaataattcataaaacaataactaaataattaataattaataaaaccaaaaaaaagaacacctcgggtccgatgggtccgattggcccgatatggtagccattagaccctatcggtccaatccaaccttcacaatttgggagaatcggtcttgctctatgggtctgattggtccgattggtagccatcggacccatatggctatcatatttggcaccatcggacccatggcatcgggaccatcggacccacaccgtcgcacccatcagacccatgcatcgggaccatcagacccaaaccatcggaccctcttcttccccaatggtttctcctttcacagatccgaaccacccaatttccattccacaaaaattttctt

SEQ ID NO: 248926 - DNA, 628 bp, Cannabis indica
tttttgtttctcgagcctatagtgagtaacagacaactcacttaaagaccaatcacaataatagttccaccatgatcattaagagaggaaagagtcattgagatttgctgaactagtcttgaattctcatctagtatttgagaatgtttagtaagtttttacatttacttcttttttcactatgatatatctcttatgaaatgtagtctaattaatgtttatatgtttggacctcccatggaacatggaatttttcattaaatgcagtgcactttgggatttttcattaaatgtaattcagtgccattgtatttattattgtgattttggtttaagtctcatttatttctatttcgtatgcttcatgaaatattagtctttattggcacctcatttcaagatagctacgcgtgtttcatatatgaattttttcactgagaccttatttcatgacctattatacacacaatacattctttttcgtgacctgttatgtgcttcatgatgaaattaataagaacatataaattacacaatcactactacaatctaagcctttagcttccctttttcaatctaatttataaaaagggaagctaaaggggtgaaaatatctgcattgacattt

SEQ ID NO: 248927 - DNA, 747 bp, Cannabis indica
tataagaatggaatatatatttgatttattaagttttgaaaaatataattgtatttacatgtattagacatttaaattatattttctttacattaaaatgttatttgtatatatatataattttttttattttttttataaatatgtgtggattggattgaatcggttacttttacatgtcaattaacattcaatctgcacaagtacggatatccgcactttgcagattaaattagaatagatcgtgcaaattagattagatcaactactgtactccaaaaaaaaaaactcataagtaaattctataattaacaaatccatcccacttcatattaattttaattatgaactttgggaaaagaaatgatagtgttaccttgattttggatcgttacttattaatttagaaatgagatcttcagcttctggaaaatgagagaggaatttcaactccatcttgttctcaataatgttcaaatgaagttcgcgaccatcatgagtgttgaaggggtggctacgcccatcggtgatacaaaacgaaaatatgcaacctatgctaaacatatccaccgctgtgcttatgtgctgacccggtacaagacgttcagctggttgccaatctttagcgtcacaccctatgtacagtgacaaactcagaatttttaattagctaaatacattattgtaaaagagagcaaactaatttacatataattcgtgaagtaaatatatatttatattaggtaa

SEQ ID NO: 248928 - DNA, 596 bp, Cannabis indica
ttttttggtgacttttctagtgctgataacttttttggcatcaatcttttccgacaaaatttattattgtttacaaatatgagattttcatcttttattttacaatagtatgatataaaaagagcctatataaatgtaaaaaaaataaagaaacctataatcctttaacattatttatttatcccataaaaaaccctagcagcagtgggtcgggaaagcgagctgaattgccattgcacaccattctcgtcggagattgccaatatcgccggaactcctcattaatgtaacaaactctcgcgctttatttcttcattttacaaagaaccggttttccctttctgttcttagtattgataaggcaaaacacacgcacacacagaacacttatacctgtattatatgttggcataagctgaagatttcttttttaccagaattttgttcggctttggctaaatgattttgatgaccttgacccctaatttttaattttgtagatagatgctgtcatataggcacgcacattaagtgtttgagtaattgtctgcgaccaagaggctgttcattgccatctgacattttggaatgataaa

SEQ ID NO: 248929 - DNA, 471 bp, Cannabis indica
aatgaattagtaattttaatgaactcaattaagaataaatgtaaaattatttgagaatatttaaaattaaaattttatttgtgtgtttgggatatttttaaaattttaacctcaaaggataaaatgataattttattttgtgcgaatggattacattattatgtagtataaatttcgataagttagtacagtatagttataatttaatatttttgtatagttataatttaatatttttgtttgcactggattcggaatccaaaatttgtaagtaatatgattagggtaataatattaaacatctaatattatatgaatttgtgtgtgtggaatgagaattgtccttatgtgtgaaatatgatgaatttttgtcctaaggcgaaaatggttatttgacaaaaaaaaaaaaagttaataatttgaactatacttgatatttctaaaaaataaaaataaaaattttatttttgg

SEQ ID NO: 248930 - DNA, 2975 bp, Cannabis indica
aaataataattattattttatatatattttcaaatcctattttcctcagtaataatcacattgcacattattatacataaataaaataaaaatcaacaaattaaaaataaaataaatattatgacctcgttttagaaaagattaaatttaacggaaattaccccatatactatttttttaatttttttgttcaaattcacggtttgagtttctaaagtggttgcagcgctagttgcaatagaggtttctatacgatttttttattacaatttaggttgcaacgctagttgttatgggatttctatgtaaaattccatgaaaaaaaattattttaaagtgtaaaaatgaaaaatcccctaaatttaataaccaagtaattaatatcttatttatcttcactaagaataaattcattttttatatttttttctttcaaaaaaagaaaaagaaaaattatatcttaaattgaatcctaaaccaaaaaggaaattgacacaaaacttaaatgtatagatatataaatatacataaatctaaactaaactaagctagtgagaactctcattattatccttcaaggctggttacactagaaaaaaaataatcctaataaaaaaaataaagaaagattctgttgactttgaatttcttgattcccaagtaattaaaatttaaatacttcattttgaaacttatacataaaaagaggtacaaaattaaacatttcatacaattaatttgttaaaattcttcatggcaaagatttggtgctctcactgtggacaacactcaacaactaatcttatgaacaattttctgtaagtatttctaattatatctttatgttattattgctataataaattgttatttctttaattatgaaatcattagaaacttaccaaatttaatttttatgtgaaattgcagatgttgttgtgtatgtggaaaagtattggatgagattatgactattttagaagacatttcattaagaaaaaaaggcaaaaagaagaagaaagaaaacaagaagtaatactattaattctttattcataataatcatcatcatcatagcaatttgaatcactattatgtatgtatataaggacttgtatagatttacttagaaaaatgtttcatggtttaattacaataaaaagttttaatatatttaacaatgattaatatgcaaccattcaattaatgacaaatcacacaatcttatgaaactcatatttcctattttaattttttcttcatgtatatcttaaatattcatttaatattcgtatcaatactaacattttgatagtctaaaaaaagttaaatctttcatacaactcgaaaaagccttttaccaaaatataaattcaaacacaactggttagtgaaagatccaaaaaaaaaggttaaaatgaagggattttctatgtagtgaaaagaagatagacaagtcctttgaggtattcaacgatttcagatcctccaagctttgaagttccatacactctatcaacgaatgtaattggcacctacaaattaaagttatttcaatttaaagatgataaaatggcctaattgtaccaaaaaaaaaataaagaaggggaaaccctattaatggttttatatatcccaaagaatatttggccattattaattgatatgacacaaaatggtttgcacattctaatattgaagatttatgttgaaaggcatagcatattaatggttataacagttaatggctgaacactcaaacaaccttattagtcctattcacacattatgcacacattaagacataaatattatcatattatgcacacatttagacaattgctctaaatcataggaatcacatatcataagactggcaagcaagttaaaagttgtaaagaattacttaatggtcacagagttttgtaatgcaaacactaacaatggtaacaaaagtatgaaatgtaaacgtacctcttcaatatgatagcctttcctagaagcccgaactatcatctccatttgaaacacatatcccttgctaacacacgagctaataacatcttcaagcaccgattttcgataaagccttccttcaattaaaagaaagatgttaaaagtaattcatctccataaattgacattattggtcaatgaaataatttggttagtgtagtgtaccgaaaagatcctgttagatcggatacacctggccatagaagtgtttgtgcaaggacatttgctccccgactcgttagtttgcgcattagggtccatccgtggacgccaccacccttaacgtaacgggttccggtaactatactagcaccagtctccgattgtttcctaatgaataaaaaaaaataagtcttggaaatcgggtttcagatattctgtttctgttctacaattaagaatcacaagctgggaaattcttacttgatgaagctaggcaaatactttggctacatataaaaaaagcaagcaaaagatcaatcgatcaatataactctatagacaaattgattcataaaatttaggtcaaaagtacttacatggtgagataaatcagcatccataatcacaacaaaattaccggtagcgtgtttcagaccgtgaatataagccgtccctgagattcattttagaaaaagaaacatcagtggacggatttgaaaatagaaaacactgaaaacacgtacatacatacctaacccaagcttctttggtctcggtcttaacaactacaaacaaaagcatagcatatagtcaaaatcagttatctaatataaaattttggaatagttaaatatcgatacttacaattcgttcctcgccataaaccttctgcaattgcttgacgatttcttgagtaccatcaggactaccatcgtcgacgacaatcacttcaaagtccacatccctaaacccgaaaaattctcaggagtcattcaaattgaattcagagcacaaaa

SEQ ID NO: 248931 - DNA, 619 bp, Cannabis indica
taaataaaaaaatattaatcagggtcaaaatttaatttgaaccatttatttagatcaatggttaatgacaccactattcatgtgctatggctttacacatctctcaagacaatacgcccggagtggcatattaaaggtcaaggatgcttctagtttctatgagcttcttttgggttgcatgcacattccgagtaaacaagaggtggaggagttcgttgtttgaaaaaaatgtaatgtttgaaaaaaattagtatttggtgtaaatttttcaaatagaaaaaaccctaaaatgtaaatgtaaaataaactaaagaaaaaaaaataaaactaattaagctagaaataaaaacataaaatatgagtttggatattaggtctacaaaattatgacatattaaataccaaaaaaaagcttaaatgtgaaaaaataccataaaagagtggcgaacctaaaaatgttatatttttataatttttttttcttttttataaatttccatatttgatgtaatttttacaataataaataatgtaaaaaaaatttataatgaaagatctagggaaatttacatggtatactaacttttgtcatttttttttacaaaaatactgtcaagcg

SEQ ID NO: 248932 - DNA, 578 bp, Cannabis indica
ggtcttgctcgccaaaaatggcttcttgtacgtgtgcgaggtagatttgttcccgtgtttcattgagctcggtatattcggcataaagagggatatacctattgggcttcttatccttgagcagcattttggaatcgtcttttttctttgatcctgaggcctccaaatcaggttttccaacagtatcgtgccccggttgtctcctgggtttcgtgacttgatgcactctgaacttattctccaactcgctcattcgcaaatggaatgaatccttttgccttgaactgagtcgttgacagaggtcaggcttcttcaggttcagatgttctcgtaaatcactcttgtcatgattgtggtcggaccttgcccttcctctcatggtttaactcacctttttcttcatataagggtttgaacgagtttcactctcatgagccaaaatagtgggtttgcgattttcgtctgatgttccgcgtatctcaggctgtgtctccaggttttcctcaattgcctaaggttgcatttcctgagggttttgaatatatctctgggttatcctctgccccttggtctgcgag

SEQ ID NO: 248933 - DNA, 889 bp, Cannabis indica
aatcttttttcccaaggtcaggttgattttgggtaccatcttcctgtgctgcctttactgcagctatttcacgctctaactcggcatttacaccggtttacttcctccaatcatcgcccaagatggtagttttctaattccacgattggtatgtatttggctgggtcgtaagcgccattttcatcaacctggttagggagggaccgatagttgcccatccaaggtccgtcaagccaggagccccaatactgggtcttcctggggcttgcatttttttcatgcaatgactcggtacatccctgaggactcaatggttttttccaggacaatgattcattccttcttgaggatgattatctttgtcatccctcatttttatgtcaagaggcttttttctgagcttttgtttacagaggctctcaatgagagcaccaaactgttaacgcagatttttcgttaactaaatttgagcctcacgatgataactcaaaacagaaaaaataaaagttgtagaaaaataatatatgaacacaaggttttttatgtggtttttcagttaaaaatctgcatagtccacgtgtcaatcttattcagatttctgagtatttttttcaaggcctctttcataagagttttttttcatccctccttcttgtgatcttgtctgccactatttataattgcatagtggcaattaattacaaagctgaccgaaatatgtttacagccattatccctaaaattgtgggatctgattacaaatcaagtcaaataaatgaggtttttacacaactatgagtaccccacttttattgggccgagatgaacgcgtaatcaaaaatatacggtaagccttatctctagggatgcctcgctgagaatggtgcca

SEQ ID NO: 248934 - DNA, 630 bp, Cannabis indica
atttcttaaaattttgaaagatgtcttaaataactataacgtacatgatcattaagaaaaattagctaaaaaattatttcaaatatcaaaataaataaaagtgcatatagtaagatgcatgagattcccactcaagatggtgactatttttaacacgttcacagcagctctttttgactcactattcccgaatcacaagcagcttttttggctcgtctttttggaccaatttttagatttggatcagttactcgttagagttttaatttaactttgatatcatagtagaatgcgaaagtgtatagttaaggtagtagaataggtgagtgtatggtaaggtgcataaggttccatctcaaaattaattggcaataatgagaggagtagtttatgcatcttatatatggtatttagtttcaacatattatcaatttgagactctttaacattctccctcaaaatagtagttttttttttctcaccaatcttacatgatccggtcacttttaatatttacaattttgaagtgaatatttttttttcaatttacaatatcaacacgtttttctcaattaaaaaattacaattttaattacatacctataatatattctaaaaagaaataaaaaa

SEQ ID NO: 248935 - DNA, 1056 bp, Cannabis indica
tcttctttgagaaactttaacgagtgaatcaaagaaactaataacatgaacttgagttcatgattactaaggatttaggtcgatctactattgatcatcattatgatatcaattaggtctttatagtaaacggtaagtttgataaagacaactttcttcatattggtccttgtcatatataatctctattatatacaatatctttatttttatgtcatactacatcagtaatctgaaccgatattccttgcaccgaagaatgagcatcagtgaattttactagcaactattgattaaagattcccaaattttaatgtattgctaatcgttttatacatgactaagtgatcttagttctctgtacaagtacaagtcattggcaccccatatatgaataaggaatttttcgatatttgtatataaattattcaatattaaatattaaataatttaacattcatgcatatatcaaatgttcgactcctaattataaatcagagatgtctttacaggctttttagcgcataaaccctaattgtgagtattggagctcagtgaacattttacatatctagataattagacttggagcattcaaatctttgtgataatatgggcttaattttattagtccctggcaacacttctgttatttttaaagttttaaaattgatttcgggataccgagttttgtaaacaatttacattaacaatatttatttatgaaaatatttaattactattattttgattggacacggttttatattaaaccttttgattagcaaaggacaacacggtaattaagaaaagtactatagtgtgcctaaactagtagggtgttacattgatggtgggcgagaggttgaaagtgggtaagagggtgagagtgggtgagatgatgagaacgaacatgagggtgagagtgggcgagagggtgagaacaggcaagaggatgcaacatttggaagtcactcgcatgcagctaaaaacccacatgcaacaagccgctcgagtgcatcggccaatcacgtgcattaggacactcgcatgcaa

SEQ ID NO: 248936 - DNA, 1303 bp, Cannabis indica
aataaccctcatttcatgcaaaattcttaactttaaacttaaaaaacaacaaaagaggaactagaaaacttaccaaagcttgaaacctcaacaaagctgctatctaaacccaaaattgctgaagaaaacccaagactcttgctggtttctagggctctcaggagagagaagagagaagagagaataaatgtgattttctaactttttgtaaaataaagaaatagtttaggttttattaaatcaatttcagccaaatacaactaaaaaatttgaatgtatctatttacttaatttcacataaagacaaaatacaaaatcggcaaaaagaccaaaatgctcttgcccacccaaaactaacttaaagtcacttaggggtattttgggaaattctaaaatcccaactattttcgacattcttaatgtctaactatatcgccccgctatactaaaaatactaagatgtgattctaatagccaaacaccgtggtccaatgtcgtcgggcactgaacatgcaaaattataaaatttctatatatgacatataaaatgtattcttaattcaaataaatcatcataaattaataatttaaaattaataaataaattccataactaaaccctaattatttgctaatttttaaatttaagctaagcgaccatcacaataaaaattaatatgtacttaaaaaaattcagaaaagtgaatagaaataattttccgaaagtaagatcatagaaatttactaaggtatcttcaatttaaataaaataaaataaacattatgaatagaattgtaactacgtgactcaatgcatttagatcccgaaccttttgatagtgtgtaatttttcgtttattattaataattataattttgtggactataatattgttatgtgggcttttcctactaatactactggactagctaatccttcttccattctagaaaactttttatgtaatgagtagaaagtctgactcttattttatttatatatatagagacacgattttgttccgtgatgtatttttacagaatgtattatgtggtacattagatggatctcagggtatattagatgggtctcaaggtacgttaccattttttaacactaattacccctagatcaaccccagcactcaaatcaaataactctcccgcatctaacggctgccatacaattcgtacaacgactattttattgtgaggtcatcgtagttaataaactgtcgtgcacacttcaaacagagccataaaacgtcttaaaaagagcaatatagtccgcgacttgccaaaa

SEQ ID NO: 248937 - DNA, 1141 bp, Cannabis indica
tatttattttattataaaaatatatgtaactttttttataaattccactgtttttaatattcgtcacaaaattcctatttttctacattacaaacaatacatagaaaattacatttctactcttaaaattttattttatttttataatatattacacacatcaaaaaattatattttaatttaaattacattactcaataagttaaaaaaaataatcaaaatataaaaatattacaaaaattagacaaccgcgcgaagcgcggttttgttccctagtaacaaataaaagcattccaaagataacatagtcattttcaacataaatatacccaattaaatttcagattaatcacactttattaaaatactaataaataatcccaaaattgtatttcggccccaaacccggttcggcccaaaatacccagttgtgactataccgcgtcgacttgtcagaacacacccgaagaaggacaaaacaggcatactatatattaatatagttcataagcacgtaaataaattaaattcgcagttttacccctctcgggtcagaattactaaaatgcccttggctcaccaacggagtcttagcatgtcatttcttatattaattcgtatataataaattataatataatagaattctacaatgatactcaattaactagttagggctttactaatctatttccttaattctagggtattacacataattaagttgaaattttctaggaaattagttattgagatattctttaaatattgttttaagttgaaaatttgttaattttggatcaacttaaaattgaatatttttcaaattaaggtgattagttcaagatacttaatttgttatttaattaatttttttttttggaaaataatttaagctaaaaaatttgttattttagaacaatttaaattagatgtttttcaaatatttattttattatattttaaatatttttcaaaatttatacatttttatatataattttcaaaaattatttttttgtaaaattaaattaaattttaaaattaattatttaattaattttggtatcaacttatattaagtatttttttttggataaatgattaaataaaaatacatttttttaaataatgagcttta

SEQ ID NO: 248938 - DNA, 654 bp, Cannabis indica
tttatttttttcaataaacatacgtgcaattagagtatataaatattaattatgagaccgatttaggttgaatatataagaggaaatgtcataaatcagtctcgtaattaacattgaattcctatgttgtcataaatctttattttaattgtttattacaagagttttagattcttattgaacaatggatttatgaaaaaaaaaaatctgaaattgaaaaataagtatgtaaaggttactcttattaatttaatattaatctgaaaattttctgcataatgtcctatatgttcacctaacacctgaattaattctgcataatgtcttatatgttcccaacttcaagattaatctttttttgccactgcctacattgattgcacaactaactttgttttattcaaacttgaaatgtgcatcatataggaacattctcagaatcaggtgattgggacatctaagcgttgtggtaagctctatttgttgcactaaaacactactgctatggcaaattcgagtcaatcttccccttttatttttcagaataatgtagatcaatagcataatcgcattggtcacccctcaatgtatatttcaaacatattcaataaaaagattgacctttcttttgctattttatctaaacatcactgc

SEQ ID NO: 248939 - DNA, 1526 bp, Cannabis indica
taagaagtgtctaaagagtgatgagacactaaaactctacccatatggactagaggtggtgtcgccttttatgagaatttggagtattttctaagagtccataaattggaattttgcacatgactattaacgatgcaagagtgagacatgtggtctcaaatgagcattagtaagggtgtgcgtgttgtcaccggattgaactaaaggaatagcggttcaatgctacgacaactaaaattttatcaactttgtggtaattaggtaaaattcaagtcgaaagacatcttacctaatgcacctaaacaagacttcttaaaagtgtatatttattcaatcaaagtgaggaaatattatattttgatataatatttgtttgattaaataaatgttataagtgtgtcacacattttaatctagtgggggattgttatattatttgataatgtaataagtatagattaaaatgtgataaatatattattatgtgaataatatatattaagtgtattataaataaatgtgtaacatataattttaacctatactttgtaacctacatgttgtaacttggaaaggagttacaatttattgtcacttagtaactcttgtattgatcacacataattagtgttataaaaggtttatttcacaatttgatttaaggaattcaaaactatgatgatatagttgttacaaaatagattaatactcatttatgtgagaaaaataaggtgtggtgtgtgaattctatgtgtgatcacctcacactataaaaaaaggtctttgatgctcatttggatagagaatttttctatcaaaaaaataatttgctagaaaactctaaggtttgataattcccaaaattatttccatgataattttcttagtgcttagagttatgaaaaaataaatgtgtaataccttgttcaaatgatgatgattctcactattctactctcaatgttgtaagtaagtgattttctttttctttttcatattatataatattatgtagcctaggtctcttttccttttatatatataaatatgtaatataattctgtgttgtaacatttatataattataatgttttaatctttcgtaatatattaattccattcatatatataaattctctaacaataatatatattgtgacagtgattattttaaaataggtgtgcttatttaagcttgtaaagtgattttattagggaaatttgatattatatgcttaaaattaatttatccactaaaaatatggtagcttacactatttttctcatctaattttacccctaaacaaataaaaaccaaacatctatctctctatctaggatactcacaccacatacacgcacacactctaccagtcggacgacccatcaccggagctaatgttgttcggcctccttacatttcaaaaaaacttctctcgttttttgcgtttttttcttctagtttactagttttttgtgatattttgcgatatttaacgatgttatttgcaatgatagaacaaatc

SEQ ID NO: 248940 - DNA, 1327 bp, Cannabis indica
tccccaagagggtaataaagtggcccaatacatggcaaaacttaatccacacgatgatttttcttttttaacactggtgattaaattgatcagcgtgtttctcttttagattggttaataaaatattcattttaaaaaaataaagcaactatattagttgataaattgtttactctcgatgaaactctaacaaagctttgaaaaaagagaatttctcagccaatgtttggccattgaggtcttttcatgtcttattctttgagatttcttcttcttcttttataattttttattggttatgaggtttgattatgatgggctccattgataatctagttggtacaacgaggttgcgcattaaagatgaaagggagtgggaggttaactatcacgttaataaactcataaaagaataatttgtagttcgtcgctagttttagctaaagtagtatagaaagctcattcctaattttttgaacgcagtgagcatgagataaatttttgggtagcaagggtagatttttatccaagaattagggcatattatacctttaaattggagtagattccttttctatactttctttgtagtaaaattactcacaaagctcaggagtgtaaggatatatagaaactgttcccaaaattcataattcaaataatattgatgttcatatcattaggtcctcgaatcaggttgataatcctattagagattgttttgaaggcttcaagaagaagcttgcaccacaaaattattgtacgtttcttaatgatatacaaggctaaatggcccacattgataattccaatgagtctatctgtataagatcatcaccaatattgtattaaattgataaactaagtacattaagggttttggaactagaatcacatctacgattgtttggttaggaatgcaaggggtaatagctaaggtagaaatttaggggatattggctaagggtgttgctacaattccttctttttataatgttattatctctatccaagtaaatgatgttaatttcaagcaatggagacatttcttaaaacaagtgtcacaaaaattaggagggaaaaatttcaaagatgcagttagttgagaagttgagcttggtgaatgcttttaattaagtttcatctctttcttgtgtttttgagaaactcttcatgggaacccactacaagttgatgatattaatcctaattgtggtctcttaattagtggttttgtatcttttagattgggatggatccttaggattcacagataaatgttggttattagcttggagtagccctatgcgtactggtggaggaatga

SEQ ID NO: 248941 - DNA, 1062 bp, Cannabis indica
caagtgtaaccgtcaaagcatgagtagaaaactgagtttcgagccactaattaagttagagcattaattagtcgaaaatcgaagagacgcctaattagcctcacatcaaatcacgaacaaacgtgcctaacacatgtcacccattcaaatgcaaaggcagctccgatgaagtctacatgcaacttcggaagtctcgtaccgacttggggggcaaatgttatctcaaatttggcactctgacatggcatcgcatgctggtgacacgtggaatcgacttcacatatctgctcgaatgagatctgccgaacagaacatcgcacatatctgcacggatgaagccttcctagccgagcaatggatggtccgaacaacatgtcaacacttagcaacttcaacacttgcatcgtgaatcacagaagcaatccccataactttggaatcatatcacagagatatgacaagttgtccaaatcccttaatcagtgtattctgtatttaatgtgtaatcttaccagttatagacattgtaaatagaggggaaagtttccctcaagcttatggccctataaatagtgatctattctcactgggcaaagggtcggaggaatgatctaagagagtattctcagagatactattgtaaaaactttaagggaagaatcactgcattcttcattcttaagttaatacaaatcaaggggagtaggctattacgaactgctcggggccgaacctctttaaaaattttgtgtcctttatttattttactatttcacctatattatattatttatcccttacaattaagactcattgtcgttggctaaaagcgaggtcaacagttagcatatagtttctgttttcgaagaacatccaaaactgattgcgaatgtcaagcatgatcatgcaaacttttactataaattagaatatcatcaaaataaacaaaaacaaattctctaatgaaagcatgtaaaacatgattcatttatcgcaagaaagtgcttggtgcattagttaatccaaaaggcatgactaaccattcatacaatccatgtttag

SEQ ID NO: 248942 - DNA, 837 bp, Cannabis indica
aaaatggtgttgctgaacggaaatataaacacatagttgagagtggcctaatcttacttgcttaagcatctctccctcttaagtactgggatgaagcttatagagtttttgttttcttaataaacaaaatgcctacacccaagcttgcctataagtctccttttgaagttttattccacaccaaacctgattacacatctcttagagtctatggatgcctctgttatcctaatctaagaccctacaataaaataaaacttcaatacaaatatattccatgtgtgttccttgggcatagcatatctcacaagggttgcaaatgcctataaagatggtaagttgtacactttaagaaatgttctgtttgatgaacatgtttttctcttctctattgcagcatccaaatccctgtcatcatcatctgcaactcatacttccactcatgtatctcttcctacagttgtgtctcagcctatcatcaatttacctcctatcacacctgctatgtcttttgctcctacttcccattctaaatctcatttcagtcaatccacatctgaaccaacttatatttccccatctcctgcaactccaaatatatccatcccttcctcatctacgtcacctcctgggtctacttcccattggttcagcaaacaattacctctactcttcccaacaacacaactaatatatgtaatcctatttctagtgatgataattgtaagttagtggataatgctcaccatatgcagactagagcaaagaagatcaggaaacctaaagctctcatgacatctctcaatcctctttctgtcaagagtgtaatgcaagatg

SEQ ID NO: 248943 - DNA, 592 bp, Cannabis indica
atgttttagatgtgatcaaggtgttgagtatactttaaataaatttattaattcacttgccttagatggtactgtgtatcaaacttcttgtactaatacgcccgaacaaaatggtgtagatgaaagaaagcataggcacattgttgaaactactcgctctcttagtcagtttcgggagcagttctaactgcaatttacctaattaatatgatttcgtcttctatcattttaggtttgtctctttttggaaaactatatggttgtattcctgtctattcttctttaagagtctttgattttacttgttttgtgcttcatcctagtgtagagtgtgcaaagttgtcatcacactctgctctttgtgtatttcttagttatgaagaagggaaaaagagatattgttgtttaaatccaatttctctaaaattgtatatatctcgtcatgttgtttttcttgagcatatatctttctttactattcctgacactcctcataatttgacaaaaccagatcttattcacattgacccattctctgagtctaagtttgaattatccactactcttacagttcttttttcctcttcattac

SEQ ID NO: 248944 - DNA, 817 bp, Cannabis indica
ccttttaacacacggccagccaaagaattagagacattgtaaatgcgagaagtttgcttaccaagagagcctgattaaataaatgcaggtctctaaaacccatactgccatcttctttatgtaaacaaagtttgtcccatgtgcaccaatgcatctttttttttcacttcattctcaccccaccaaaactgagcacacatacgatggacatttttgataaaggttttcgaaagctaaaaagattcgtagaatacatgagaattgactggataactgctttgataaaaatctcacgccccgccatagagaataattttgatttccatccatgaagcttcttccagatcctatctcgaatggagtcaaacaaccctgtcttactatgtctcgcaaaataaggaaggcctaaataaatctcatgacactcaacaccattcactcccaataaatcaatcaaactttcttgatcagaactcaaaacattggggttaaaaacacaatgcagacttgtcaaagtttactagctgacccgaagccgctccataccaactcaaaagttgtcaaaatctcacacaacacacttcataagccttgagaaagaacaaactatcattagcgaacaataggtgtgaaataacagggccgccccgacctagggctggcaaaacaggtcaaacacgataacacgactcgaaactcgcacgagagttagcaagtttggatttgccttaaatgggttcgggtcgtgttcgggttgacttgtctaacccgttaataacaattcgtgttcgggttgacatggctaacacgatattga

SEQ ID NO: 248945 - DNA, 1054 bp, Cannabis indica
agtaaccgaaaaaatgatattgaattatattcattacgaatgtaagactttctaacatatatgattacgtttatcactattttacattttttttcatatttattttatattttatatgtatttgtatgtgatgttcattattgagtgatgttggtacatttactacctgcttttaattgtttgttgtatagatgtgtaaagcttcaagacaagtcgagtcacatagattcatcagtacagttgtgaaagcgataataatcttgatcaacaggaagttgatatctccttaagccctcgagtaaattctttaaaaccttcaaagactgttgctatatcagacttggctacaagtcttgctcaagctggtgttcctgttatcaaattagcagttggagaacccgactttgatactccaactgtaatagtagaggtaccttatccatcccatgcctacaattattttagcggttttgtttttcaaaattttatgattttttttcaatgcttgaaactgtaaaattaggctgggataaatgcaattcgtgaagggcacacaaggtatacctcgaatgctggaactttagaagttcgagaagcaatatgtcataagcttaaaggttagcaattgcaattgtgatgaaacaaatattcagtattttcaccaaaggtttaatagttgatcaactttgcagaggaaaatgaaatttcttacagtcctgatcagattctagttagcaatggagccaagcaaagtactatacaagttgtgcttgcagtttgtgccccgggagacgaggtgaagtactttagtttgtgtttaatgttgttctattgtgattaatgtgaagagcttcttctgtattgtttatgtaaggaggagaatattgtgttttgttgtgattgtgaaattcatttcctattttagtttgtgtgatgtagaactaataagatagaaagaaaaaggaggaatttggatagagacagagtaatagacaaaaaaagttgaacttaagaaagagagggagataataaaaagagaaaatagctaggtcta

SEQ ID NO: 248946 - DNA, 988 bp, Cannabis indica
ggaaaaaaaagatgtctttatatgtttacattattgttctttgttaatgtttgtgaatgttgtttttcttattttttttaactctttttttcctgtttttttcaggccgcagtggatgattctgatcttcccaatcctccggtacgtcgtacaagacgttttggggttaaatctgttgcgtcgaagggccctagtccttcgatagctgaagagcccgtgataaaatccactagtttttcagatgtggttagtgctttaagtttttcattttacatatatgttctgcttttattttaatgtgatttaatttttgtttatggaaccagttatttttatttatgatgtgctttgttgttgttgttacaggctaaatcttattttatagctggtttttttttttttttttcaggatgtttacttaaagatgaaactagagcatcggttcgcaagtaagctccaaatttggaataacccgtgggttattgaggagatcaattcaaatcttacgccttctcaaaaggcgttattttagacgacgcctttttcacagtttttgaagatgggcattgttaagtggcacattgcccttcctcaccttgctttagtgagggaggttcaccaggagagggaggatgtagaaaagtggttcttaatccgagacagagttgtccgtttcggtttggaggagtttgtattgataaccgggttaagtccggaagggtcttttgacttgaacgattttaaacagaagatgtcgttcaagaagaagatgtttcctgagttgactattaaagtccttcaagaacaagttagagcaaggtttttggcgggagattttgatgatgatgttgacgctatgaagatggcggttgtttacttgttgagtcactatttgtatgggtatgagaacagtaagcgagtcgacaatgagttatttggttttgtcgatggtgatttttttgagttaaggaatattgcattcggtaaa

SEQ ID NO: 248947 - DNA, 583 bp, Cannabis indica
tttgatacgatcccataattgtacggattgcttttgtacttgagcttcacgatatcaaaactgaagtacttaagtcttgatgcacagctcgaaaaaatgacttcatttgttgttcagatcatctacctttgctctgctcagtcaggtagattttgttcgtgcagatatattactcaaagtctgttcagagcatttctcatgtcaagcataaataataacatatatgtgttaccagttcatattgtcacgtcacagtgtgaaaaatgagataacataaggaaatccaaccatggaggatgtgaggtctatataattctcaaagtgggatttgagaagaaactcttatatatacataattaatcattagatatatatacatattcattggtattgtatgtgtataatcaaatggtaaagtttaaaactttttttaatcagatggacatatggttttggttttagaagaattgtgagagtgggaggagaagaagaagacatctcgataattctagagagaaagaacaagaaaaggaaaaaaatatatatatatatataacgggtaatttaattattttttaaattt

SEQ ID NO: 248948 - DNA, 749 bp, Cannabis indica
aaaatcccgaaaatatatttcgacccaaaactcggttcgacctgaaatacgcgattgtgactataccgcgccgacctgtcagaaaacacctacagaaggaaaaaataagtatactatataataatatagtccatgggcacgctataactttaaaattatcgttttacccttctttggtcaaaattacaaaaatacccctggctcaccaacggggtcttaacatgtcatttattagtataattaacacatattaaattatataataatataatttcacattaattcacatttaactagttagggttcggtaatctattttctcaatcttagggttatctcctccttatagaaattgtctcgaaatttacctgaacaacttcatatatttctgctgcatattcgtctcaagttcccaggttacttcttctactatattgttcctccaaaatacttttatcagtgcaatggtcttgtttctcaagacattttctctgctatcaagtatttgcactggttgttcctcgtatgatagatttggttgaagtttcaatgcttcataactcagaatatgggacgggtctaaaacatacttcctaagcatccaaacatggaacacatcatgtacagctgccagcgctaggggcatagcgaacctgtatgccacttgccctatcctcttaaggatctcaaaaggtccaatgaacctcgggccaagtttccctttcttaccaaagcgtttaatgcccttc

SEQ ID NO: 248949 - DNA, 1270 bp, Cannabis indica
ttgagagacccatcgaagctcatcgtcgatcgatgaacctcaataactccatctaaatgtcgaaactcgttgcgcttttgctaaacaccataggttgcggtcatcttcttccttgaccacaaacaagagagaaagggagaaggaaagaggaagaggtttcgctggtgagacgtaagggagagtgcctttggtctgagaatttgagaagtcgcacagaagaagaagaagagaatagggattgtggctggtagtgtttatttatgtagacaaagttttatgtagcccctaataataaagtaggtcagatcaaacttttaggggcgacaaatgtcatctctaatgctattagctggaaaaatctcgcctaaatataaaaggtatatggtgagcctaataggagtatgcggtataagacctgagatttgttgcgaactctcaagtcggaatctactctcccatggtgtgttattggagacatgaataatgttactagtcatctagataagaggggaggcaacgattatcctcggtggttactggatgggtttaatgatgttctagctgagtgtgacctcattgatcttgacttgttggggtatccatttacttgggagcgtgggagaggtactgatacttggatagaggtccgtctggatcgtgctttggtaagttctcagtggtatcaacggtttaatcttgctaagctcactaatcttgaaatcacagcttcggatcattgtccgttattacttgagccaatcacgaataattttatagttccttttcggcaattctgttttgagaatgcgtggttgcgtgagcccatgtgtctacaagttgtgtctgattgttgggagcattgtagtggccagccgattagtgagaagttgaagtattgtggtgagaggcttgctgtttgggggaaaagagtatacgggtaatttcaagaaaaaaatctctcagtgcaaaagagagattcgacgatggaagcaagggagagactctctttctgttcagcgatttcgtgaggctgaattgaagctaagtgagaccctaaaccagcaggagattttctggcgccaaagatctaagcaattatggcttcgtgaaggtgatagtaataccaagttcttccatgctaaagctactacttggaaaaagcataatacgatttctcgccttcaagatgattcgggtagatgggtttagtgggatgatagtcaacctgatgtaatgttgggttatttcaagaatctatttacgacatcag

SEQ ID NO: 248950 - DNA, 1099 bp, Cannabis indica
aattattaaaaaacacgttctttgtaaaaacaatatgatcagaattaaaagttacttaagaaaaatataagactgttacattaatattaataaatgtgggaacaaatttaaataaaaattgactaactttgaataaaaacctaatttatctctcataattattactagaacatttgaaaatgggataatagtaaatttttaatatatggtaagaatatagtgtcatcaggtaataggttaaaataaaaaatattaatttttgaaaaataattaataactataaatatcatccatttgattaaatctaatggtcaatacttaaatactcattaaaagtacacccatatatatatatatatatattgatagttattataatagggatcgtgtttgattcgatggagttaaataatgtaaatattcgtgtaaaatttgtgtcccaaagaacttatcatattatgtaaaaacttatgttattttaatattcaactcaattaaagttataattatgatagttttatttattataataacattatgtgagaggcatgtttattgtattacgattaatatttgtaaatttatatatatatatgtgtgtgattatcacaaatgttttatatatatacaaagttgcagataaatacctaagtttattttttaaattttgattcagttttttaaatattttattttattcatttatgttttttgtttcttcaaaaaatgagatttttatttaatttaaattttactaatttttttaattttaaattatttctaaattttttaaataaaataatgccacgtgtatactggcctggcacttaacggccaagcacctacagaagttccacactagtgacggaaagtatttttaccgccaaaaatataacttaggtacttatgccacaaattactatatatattgatagttgttataatagggaccactagatcgtgtttgattcgatggagttaaatagtgtaaatattcgtgtaaaatttgtgccccaaagaacttatcatattatgtaaaaacttatgttatttttaatatacaattcatttaaagttataattatgatagtttttattt

SEQ ID NO: 248951 - DNA, 617 bp, Cannabis indica
ttaaattattaaaaataatatttaattttgaaataagggtttgaaaattacaaaaattcgaaatttgtggaaaaatcccataaaaaacagatttttagggctgtccacgagacaggctgcacgtgcagcccagataggctgaagcagccttgttcgcgcgtgctgggaggagattgtggggtatcttgtgcggcatttcacggcgtgtgcagggttccacattgccggataacagccttgtgcgtgtttgaataggtgcaatgccatgtcttcagacacgactcgtctaggcatgcgcgcgcacgggcttcttgtccgaagctcttggggcatgggtgcaccaagcttcgactccatggacatctaattttaaaaccaccataactttctcatttttcatcagaatcgagttttgtaaaaatcaaaattacttaatttttcataaggaatccaaataaaaaatttcataaatcaaatacaatcatcaaataacacataaactaacatgaacacatccaaatcaacacaaaaacaatattcatcgttttaaattcatatttcattaaagtaaatcattgtcatggctctaatataagttgttgagattattttaccag

SEQ ID NO: 248952 - DNA, 793 bp, Cannabis indica
cattgatgtcacacaatgacattaatactatattttttgttaaataaaaaaaaattaaaggttcaatatatatatatataatagtttaataaaggaaaatttatatatataataatgtgtgagggtataattatagcatttttgaaaggtgttataacattagagtatttttagaagtaagggtgccaaaaataatgtggaagaataataaaataaaatattatatctttggataatgtgaaaatatttagcacatttaaagaatgctaccatcagagatgctcttagttgagagaaataaataaaagttatgtttgagttagataatttttatataaattgttgacctcgcttctagccaacgacagtgagtcttaattaaacgattagattaaatgaacaatagaacgcaaagaacaataagtaaagaaaatatcaggatttatatgagcttcgatcccgtgttagtggtaatagcctactccattttcagttgtattaacttgtcaaagaaagaatgaagaattccttctcgaacattcttacaaaagatatatgagtaattttctcttagatcgtaatttctctcttgagtgttctctctgcttaatttcatgtccctaaatagtgagatgagaccactatttataggggctaattacatatgaatgatttcccgtaatttataagtaattaacatgtttccataagggatattggcggctaaaccacctgaacttaacggtttgtaacacttaaccacaaaaaccgaatttttggcggctaaattacc

SEQ ID NO: 248953 - DNA, 1361 bp, Cannabis indica
accatatacgactttggaaaacataaaacaagacacaggtgagactttacaagattattttaagcgttttaatgcggaagtaactaaagtggaaaaggcccccaagtatttgcttgtctgcatgcttattacaggtgtgccaccaagaacagatttctggtaggaattacaggcgcaacatcttgaagcactagtcaagttctttaccatggcaaaaccccaaaagagaatagagaactcgatggcagagctagagaagagcaaagacaaacaaagatctctagtgcctagattgcggtctaggagcccatgacataaaagtttgagagggcgcagtccaaggtggagctcgagaagacacaatcctacaagacgtcaaagcccaaagcttgccaagtcaccacccaggaaagagagtgtgataatgcaaattttttgcctagaaataggaatacattcttgtgaaaagttgccacgtgtatccattcttcacaggaaaatatgattttccacaagtgtatgcttatctcccctcctctgctattaactgtagaaagtattgttaaccatagaaagtattgttaactgcagacagtgttgttaaccgtagaaagtactgttaacagcaaaaagagaaattaattgaagaaaaaagagtgtggaaacaacaactagtgagatcaaaaaaagaatgatcagttcacctcgcatgatgtgaacttgcaagaagatacaaccgagatagggtctagttgcatactatgctccgcatagtcaacgtataagcaggactgagaaaagttaatactgatcgtgcatatactaattatatgcgatgaccaagtatatctctactgcgataagtaaagaccatttcgttacataggttttggtctacatgactaatgtgtttgacgactcattagggattctcatgttccaagttgtcaacacatagaatgtctgactatgcaatcaagggtgaataaagacattcaaagaaataggcccaaaggcccattctccgagtacaacaacgtagagcctgcgagctcgtgtgtttggaatatgaatggacaatttgcgacttatcaagtcacatacgttgccacaatgaagtcaagaaccgacaaaatttttcttaatttattctttgaatgtttatctagataatttatgtctgtcatttatagtaaaaatgatccgatctgataggttatgtaattctaaagaacacttgctttctatataaaacggtaatccaaatcaaataaactaagtttaaactattgcctaaagtggactaagcagactaagctctgacaaaaccactataattctcttgtattctctacttttta

SEQ ID NO: 248954 - DNA, 1203 bp, Cannabis indica
cagtgttagcacgtgatgggcctattggatcaagtagtgggctgtgaaacaacaacaacttaatttctaaagcccagtttttttctgagatttgtgaaaaggacaacgggagtggattaaataccaaaaaaatgaacatggttgggcagggccctattggtgttgggccgatacccagtagggaattgctaaatcagcccgtgttaattcttggaaatgaaagagagtgtgataacgattcaaaattctctgttttgggacaggattattcttagcatcttgatgaaaggagatctcttgcaaaaaatttccaagctcaagaaggatatctccaagaactggctgagttcgcctctcacggcccaattaaaagaaaagcaggtctatgtgacattggtgtacaaccaacttctccaaccaatgagagaaacacaccagtgaagaagagaagacttgatgttgagtctcactcattaaagatcgtgcctaaatggaatatgagaagagtaaagtgtgtggttagggattttcctcgtggtgtcagccccaggggcagtgagctggatgtgtctggtgaatttcctggctctggtgactcgaaggagccatcttcgaatgatgggagctctccagtggtcgtctctactggttactcccatcacgtggacaaaccaatctctgccggtcaatcctcgagactcactacttggaaggcaagggccaggatgacgaacattgctattccaaggaaggatcttggcattattgaagatgtgggatcgacggtgggctctcccttcaacattattacccctgtggaggaggtggacagccctcctccacaggcaccatgagaggcgttgcttggaactgtagagggttggcgcagacctctacagttctggaagttatagccctagttcagtcgtgctcgcctgacttcttattcatttccaaactcaaaagcgaccccgctcacttggtatgttctctaaaaagcttgcacttttattttaatattattgttcctacagttggtggcacaggtggcctcctcctggcttggatgcggggtttgaatttgaaactgtctgtatatcaaagaatcacatctctggtcttgtgtactcggaccttgcgcatcatccctggtttttttcatgtgcttatggtccgccttacgtcaatgaaaagaaaatgttc

SEQ ID NO: 248955 - DNA, 572 bp, Cannabis indica
ctgtaaatgcccagctgttaacttgagacaattttgtgcaatttcacattgcattggacagcgctgattgccctatgtgtggaatgacggcaaaatcgcactggcacctattctttgactgctgcctctcccaaagagtagtggctttgatcttcgactggctgggaactaaagcttggcctattgattatcacggctggaggaattggttagcaatgaaagtggtgaatagaaatcagagagtttacacaacagtaatgaaagtagtggtcagtttgtggatcaatagaaacaattgcatcttcaacaactactcgataaaaagtttttctattgtaaatgatatacagaaaacaatttattatagattacaaatagaaaaaaatagaagtctaaacagctatgagaggattcatgtagaaaagttaaactgtaaatagggtggagccgtgactgtggtgtttgtattggttgtagttgtatttgcttgtgactaatgaagctcattcttcttgataaaaaaactaagaaaattatgaaataatatttaaattaaaggagagagagagaga

SEQ ID NO: 248956 - DNA, 1004 bp, Cannabis indica
gttaagtaataaaataaaacaaacatcatgaaaatgaatacacaaaacaagcaagtgttacaaacacacaaaagaattcaataacatatattgtattttttttattatataaataattttttaatatatataaatataatttgattggatgattttaaaattgatatccaattatcaatcaaattcaattagagtttaacttttagcatctaattcaattcaattataattggatatctaaattttagtaattgaattagattgaatcgactcaattcaatcagaagagattagatgttgctgacccgtatttaagaagagagggttgcttctagtgagttagtgattacaaatctcaccgattaatatagcttcattgataagatattgcagcataatacaagtcatacgcataagagttatgttatacactaaatctaaactcattgttaggtatttagtcttttttttttttggctattcatgttgcttttttttttctttttctttcttatgtatttaaatttgataaatataggtttggctattatagtttactaggtgtttgtgatctggagtcctcagttgtttactttgactttactagtgattaatttaatggcctattctattgctattaaccacgtggctattttattgctatttggcattcttaagctaaacatgagtcacaactgagattctatatttaattactataattaggggtgtttattagaccatattcaatgtttttaaccctatttagattcgatccagttatatatttgatgttagattttaccatccgatccgatccaattaatttagtcatccaatcaatccatgttagattggatcggtccattggatgtatttcattgatatttattggtttaatttgagtttatctaatattttagacttagtattttttggatcggatcggattcatccaatattttaggtccagtatgtattggattggactggatccatccaat

SEQ ID NO: 248957 - DNA, 2739 bp, Cannabis indica
cctctggccatgtcaaattctcccactcttactacactaaatcttaggaacaattccttggagggtttggttaatcttaactgttcagcaatggtaaaattggttactcttggtttagctaccaatcggtttagtgggcctattccagataatctcccttcatgtcaagctctgagtactttagatctttctcgcaatagattcacaggtcaaataccagaaagcttcaagaattttcatagtctttcttacttctttctttcaaataccagcaactctaatctttcttctgccttgagaatctttcagcattgtgaaaaccttagtactttgatcttcaccttaaactttcatggtgagcagttgccagctgatcctacgcttcatttcaaaaagttgaatgttctcattattgctaattgcagactcagaggctcaataccacaatggttgagtagaagcaaccaattgaagctattggatttgtcatggaaccacttggatggaacaattccatcatggtttggtaatttcaagttcctcttttacttggacttatcaaacaactcattcagtggcgaaatcccaagaagaataactgagttaagaagccttattgatgtggatgtttccatggaaaaaactccaatggacttccccttttcattgaagagaaatgtaagtttaagtgggttgcaatacaatcaactgatgagtcttccaccaactctagatttgagttataacaagcttagtggatcaatcttgcccgagtttggtaatcttaaaaagcttcgatatttagatttgaaatttaacaacctatcaggaccaattccaagtaccttggcagggttgagaaacttagaggcactggatttttcacacaacaaactttctgggacgattccctcatcattggaaagtctaagctttctatcaaagtttaatgttgcttacaaccaattgcatggaaagatccctttagggggtcagttttcaacctttccaagttcaagttttgttggaaatattgatctttgtggtgatgattacacaaatattatttgtgcaaaacatgagtcttccaatattccaagggaggcaacccatcaatcacaaagagatgaaagctttacaaatgggataattgttggagttgcctttggttttgtgtttgtgtttggagcttcattattccctgaaatcttaagatatgctggccccatgaagagattaaggactcactaaatgagcattaatccaacttgaaatagttcaaatattattatgtggaaattaacattcggcttcaatggcttgttttgtttatgtgtttgggtggtgtttatttgtttctacagagtttggaacttgtgaaattattatgtgtttgttttgtgatggccttttcagcctttgttcaatgtaatttgtgttcttccttggttccaaccctgatgacaagaaaggtacctttggcatgtgcatcttccttggttccaaccttgtatcgtggtcttcaaagaagtagaaaattgtctctcgatcgagtaaagaagcagaatattgcagctagggctattcaaaaaaatttacaaaccgttcaaaccaaaccgaataaacccacagattacacaacccgaataactttacgaaaaattcaaatcgcccaatgaatatattggacgggttgaatattattctaacccgcccaaataacccgaataaactgaataaaccgatttacatattttttactaaaattatctataatataatatataaattgcgtttaatacttaaactattttatatttaaagtttgtattttatagtgtttaatttgaaatttagaatttataattgataattttgacagtatttgaatattgaagttgaaacttagaatttacatatgagtatattttctttattttattttgtaaaaaaatattgtttaatactttaatgtttattcaatttatatttattttttaacattaatttaaactataaccattttaatcttgaaagacgtatattatacatttattttttcaaatgaattatttgaacactaaaaactaacaataataaaaaaaaaattaaagaatcagtttaaacgggttaactcgaccaaaccaacgaaaattattggacgagttgcactttttttattttttttcatttagacggattccaattagatatttgtaacccgacaattatattgaattagtaaaaatacactataacctgatcaaactgaccgatgtacactcttatcgcagccttgctcatactactggagaaataacttggattcaagctctcattgctcagattggtctgaaactgcaaactactcaaactatctggtgtgacaatcgaagttcggttctgatggctgtcaacctaattcttcactcacagtcacggaccaagcatattgagttgaatttatactttgtgcgtgaaagagttttgaacaaacaactgattgtcaagtatgttcctgcttgcgatcaaatagtcgacgtcttaactaaaactttgtatagcactcgttttgtttttctaagagacaaacttattctggcttctttagctatactaagtttgaggagaggtgttagataatgtttgttttcaagtgttagttataggactgaacatttcgagcggattcgacctaaattcgaactggtgaactcgcaaattctttttttaaaaaaa

SEQ ID NO: 248958 - DNA, 609 bp, Cannabis indica
caggcgatgtgggattgcacagcttacccggcattttcccttacggatcacgggagaactattggctctaacttaccaacacttggtgtgcatatgttgcacacccaaatacctttaaatgggacatatcaggtggtttagcggacttgctctcttcaggatttttgaactccgtagcacttgaatgacatctgtttatcaagtaagttgttataagtgttgctctccccaaaaactagtggccaacctagcttgaaaaggagcatacatatttatttgtttatgatagttttattcatcctttatgccactctattttgttgtagggaaattctaacagttctgtgtctttgaatacctacccatttgcaatatgtgtcaaacatatcatgcaaaactctaagcaactatctgtccttagagtcttaaccattttgttagtcaagttttccattagggttttcacattttgaaacttagcaaaagcatcatttttatgttttaaaagaaatacccaaaatttcctagaatagtcatctactatagatagaaaataactactccccatgtgagttggtaccttttaaggaccctactccacccatgagt

SEQ ID NO: 248959 - DNA, 599 bp, Cannabis indica
tacgacaaccaagggaacttgtattgtaaaacacaagcggatccaattgggcttgggcttgggcttgggtttgggcttgggctgggctttggtagatgggacagtgccacatcggcttgatattgggatgagttgacaaatacctctttttttatctattcatcaaaaatacctttaaattatattttattaaaataaaagtgggttgtctaatacatcatcaccctctacttaaatctaacacataatttgtattaatctaaggatataatagggacatcatctataaagtgggtatattttaaaaaatatagatttaaaagtaaaaattaaaacatgtaaaataaagtaagtatacaatgtaatttcttccttgggtatttgggttgtgaccctaatttaaaaattaagttagtacatattcttttttaaaaagggatattggcggctactttacagtaacacttaaccacaaaaactgaatttttggcggctaaactacctaaaccttggttccgttttgctctacacacctccgtcaaaaaatgacagttaagtgccacggtggactgtccacgtgtacacacttgtacacgtgg

SEQ ID NO: 248960 - DNA, 710 bp, Cannabis indica
tgtcaaatttaggtttagcttcaagttcagactcaacattagagtgtcctagtgggctacgtaagtgaggtcgaacatagacaaataatataattcaaattatggaccaaggaaacctaggcatgtttttcggtatgaaatatatttttattaacctaattaacttgaaattctccatgaaaagttatactgactacttatattattaaatatctacaggctgggtagtcctatttattatagggaaatttctgcttaaatttttaaaaaaatacttaacaatttaatgtaggtatatttgggaaagcttatctaaattgaaacaagttttcaagtttatgactcggagcttctcacaatccacagcaaaaaaacatataaatagtactaaattggctagttgttaaggcagttagttgagtctgttagttgttagttctgttagcctttcagttggttgttgcaactgatttctgttagttgttttccttgctgcttctacatgaatgttgtataaatatattgtacattcattcattcaacgagatactctttcttctccattgtctttctctctgttacctttctctctatctttctctgttctttccttctttcaatgttcttgttcatggtgtgtatttgctcatggctcacaggtttaacatggtatcagagcgctggcctccgctcagtgctaatatggcaac

SEQ ID NO: 248961 - DNA, 1052 bp, Cannabis indica
ttgtaattagttatacattttctaagtcccgtattaacaaagtatacctctatataagaataattatatcttcataaaatatatacatatatttcgtaaatttatttacataaaattaataattttgttcgaaattgtaatatatgtattaacattatatttactttaaaacaattctattataatatagtattaataattatttattgttattattgttacattgatattttttagtattttaattttttttcctagtgtaactctatttagttataacctctcaattagaatataatttgcttagtcccaagtgtattcttgaatagaggttctactgtatttcatactatgtaagtatttaacaaatataataaagagagtagaagtgctacttataatcttttattataatttcttaatcaatttttacgttcaaaataatatgttaaaatatttttttttattgcagtattcattatagttataatattatttctataattttaaattttttttaatagtatataataccaaaaacagaattcttgatattagggccgaccctggttaatttggaccccaaaaaatatttttttgggggctatttttataaaaataaatagtatttttaaaaattattaaaaaaatatgtatatttattaaaaatattcatttaggcccctgataggggtgggtcctaagcgcgggcctagcccaccttagcctagccagccttgcttgatatttcagtttaccacgtgttttcaaaaatattttcaaacttatatatttttagcactataaattattcaaaaaatttcaaaaatttatagtagaatggatattgaaattataacgaataccaccatgcaaaaaaatgtattttaattaactaaaaaattataataaaaattatcggttttatttcttagagttgagatggggagggatgtattaaaatttttattatgggcttgtttggaacgtcgtattaggttgtattgtattgtattatgagaaatttacgcacagagacgaaattttaaaat

SEQ ID NO: 248962 - DNA, 741 bp, Cannabis indica
tcacaagaaagacaaataacgaactgaaaagagaaaaagaaaagtgagaatatgagtcttaacgaacagattaaggaatgtagtagctgctaatgatcaaacagcataaccaggacattgagttctgatgtattcaaacaaatcaaactagagcatataaatatatatcaaaatgtaatccttcatcatgtctaagcccgagtcaagtaaatgttaattaagcagcatgctgccaatatttccataatgtgtccctgtaaattataatttaaatcactgtactataatatgtgctttgccataatttaatacagttgaccatttaatgggtttcatgcttgcttaacaccagaaatgcaagtgagtttggagcatgcattatctgcatgttttaagtagaacaactaccacaagaatgtagaagccatcctcataaacagcaatgagacctaaaacttcatttcttttctaaagaaaacatgaaacaatgtcaactaatcaaagagtagggaaatattagtacttgggaagaaaaagaaacatctcaaacaaaataacaagaaaagccagaagtcctcaaagaaaaagaaatacacgggaaaaaatgaaagtcctccaacaaaaagcaaaagacggaacatgaaacaaagcatttatcagattagctaaacccaaaaaataaaaaataataataaagaatgttgaacttttttagaagtataattcacagaaacacaattc

SEQ ID NO: 248963 - DNA, 1450 bp, Cannabis indica
acccagttatgtctcatacacataacctttaacatacatgcgtgtattcaacatttactacaacatatataatcttagggtaataaccctaacttacatactgagtaaccactcatacaatacgcttctatatactcagataacatttactaagagcgttaaccctaactcatgctttcactggattcataatattctagggtaataaccctagaccacactaaaattaactcaaggtactagcttaccgagtctagcttaattatgccttaagcgcataattcataatctcaatatatacatttatccaacatggcatagtatttatacaacatatatcactagggtaataaccctaggctattaaaccgctcatgttagggtaataaccctaatcccggttactaaactttcatgcatatcattcacaatataagcgccactgcgcatactctacgtgctaatcactgtcttacctgttgtccagcaatagaaagagattccgaatcccgggtgctcctgatcaggtgccggtaatcctagtcacacaaatccgggataattcacacttagggttaacccctggttcaacactcataaaattcaatcatggcatttaaaattcagataatcatacagagctcgaaacgagctttccaacgatataaagaactcccaaatcgaagttcggaatcaaaagttatgccttttcaaagtttcaacacaaactgccccaaaatcacgagggcgagccgcggcatgcccagaccatcccgcggcacctgggacaaaacccaggttccaccaagaggggcggactgtggcatgctccagagcatgcgacatttgggtgcagaacccagaaaccagcaagttttccttcgaatttcagctcaaaacttaatttttcaccctaatttcacaaccaaacatcaagattaacaagtaaggttgctagcaaacaagaaggagttaaaatccatgtttcaaacacaaaaatcccaatattaaactcatacttacagattgcaataaacacaaaattcatgctttaaactagctatacacaagctcaagaacttgagctaagaatccttcaaactcaacccatttccagcaatcacatatcaatataacatgaatttcaaaccagaaaaataccctataattacaatccaagctcacaaacatgaatcctaatcaatccatgaaatttctcacttaattcatcaaaattactacaaaatccaagaacatgcaacctttcatcattatcaccaaattcatactttcaatcacagaattcagcaactaaaaataaggttaagatcataggaaattacctcaagatcacaacaaagcaagaacaaagatttctcccaaaattaagcttccaatcaaaccaaattcctcacaaatcaagctttgaaaaataagagggtaagagagg

SEQ ID NO: 248964 - DNA, 1819 bp, Cannabis indica
agaagaaaaatgaagatcttgattctcgagttcatgatgaaagaaacttactgaaaccaattgaagaattggaggaggttattctcgacccaggaaatcccacaaaatgtgtgtacattgggaagaacctggacgagcagcacaaatagcaattaataagctttttgaaggcgaaccagggtcaattcgcctggagtcacggggatatgatagagatcaaccctaagattatctgccatcacttaaatgttgatcccaactacccaacaaagagacaaaaaaggaggccctcggattccgagaggcaaagggcactaaaacaagaagttgacaagttgttggtcaatgattttatacgcgaggtattttgtccttcgtgcatagccaatcctgttctcgtcccaaaacctaactgaacttggagaacttgtattgatttctccgatctgaacaaggcgtgcccgaaagactattttccacttcccaggatcgaccagttagtggatgcaattgctgggcacgagcttatgtcttttatggacgcatattctcgatataactagataataactagataaaaatgtatgtcccagatcaagaacataaaagcttcgcaaccaacatgggactctattgttataaagtcatgccgttcgggctgaagaacgctggggcaacatatcagcgactagtaaatgaaatgtttgcaaattaaatagggcagaacatggaagtttacgtcgaagatatgttggttaaatcaacaaagagtaaggatcatacctcagacctcgcggaatgctttaaaatattaaaaaagtataacatgaagctaaacccgaaaaaatgttcctttggagtctcctcgagaaaatttttgggattcatagttgacgcgaggggattgaggcaaatcctaaaaaaatgaaggcattaatagatatgacatccccgacaaagcctaaggaagtacaggccctgacaagaagaatggcggcacttaacgaattcattttgaggtcaactgataagtgtgtaccgttcttcaacatattgcgaggcaacaaaaagttcgagtggacaaaagaatgcaaggagacctttcagaacataaaaaggcatctcgcaatgcccacagttttggcaaaaccaataactggagagagtttatttttgtatttagccatctcggaagatgggattagtgtagctatagtgtgagaagaaggtaagcaccagcaacctatttactacgtaagtaaaaggttactaggggcataatccaggtatctccctttataaaaactctcgttatgcctagtccacacatctcgcaaactacgaccatactcccaagctcaccccataaaagtgttaaccaatcaacccttgagacaagttttatcaaagccagatgattctggaagattgataaagtggtcgattaaattggggcagctcgacataacataccatcccgaacatccatcaagggtcaagctttagttgacttcttgataaaaggtataaccccagaagaaatcccatctgatcagcgagatgcggaaacctagaagttatatgtggatggtgcatccaacgagcaaggttcgggtgtaggggtgatattaatatcgccagaaggctttaagtttcactatgctatgagattccaatttgaagcatctaataacaaggttgagtatgaagccttgatcgccagcttaaagacagcagaggccttgaaagtaaaaaatctcatctgccatagtgattcgcagctgatcgtaaatcaagtccttggggaataccaggccaa

SEQ ID NO: 248965 - DNA, 688 bp, Cannabis indica
tgatgtctcccagtcagcagtgtcatgattttatggctgttgggagtgcagtggtttgtggctccaaaatcaagataccaattgtcaccttgatcctgagttgtgtgagcaatattttcctgcggctgtggtgagtcagtagctggaaacacaccagtgaaacttttatcaaatctatagaaacaatgaatgaaagtatgtccaagtcgatggcaaagttgacattggactttgtttggtgcaccagggaatcgtgctcctcttcctcgtgccattgtagtcacctgagtgttggtgttacttccttaagaggagtctccacgaaagcttcctccagaattggaaaatttggagaattgaagctactgagccaatattgacctctaggataggcaggggatctgtagttgcgactggtttgagcaaagaaagcttccatagtcggatcatgatctgcagtaacgatgttcacagtaggttcaacttcttgatcctccttctcgattcgagattcgaatgcaagaagtaaagcttcaatttccccaactgtatagcctccaatccaagtgtttgtcgaaatgataaaggtatcatattcgcttggtaagcccttgaaaatagcagctatgtggtcacgatcagacataatctctccaacaaaggccaaaagatcgacatgttgcttgac

SEQ ID NO: 248966 - DNA, 762 bp, Cannabis indica
atattactataagaaactatgggtgctgcctttttataatttaaaatattaatattatcaaaatcaataaattgtttggtatatgtttcctctttatcacttgtgaatatcaaaatcaatgatggcttcaattatcaatggctgaggattttgatttttgataattgatataataattgttagaaaagccactaaaaccatgttaggaaacagaagaaaaaaagaaaacctaaatagtttttatgtaagtaaactttgttgattatcatgtctgtataaattcagtgcactgataaatcatgaaactaaatagtttgaaatatataatcataattactttccactataatgacatcagtgtaattgtgagtagctatgtgttctggatttaataaaatttatttattaaaccataaaatgtaaacctaaataatttctaatcttaattgatgtaaataagattatactatttaggacataaaattccaacacaatgatcttatttttcattgcacacactaatgtctgagaagtatatacaagtaatgtgtaagtctcctcttctaaatatttgtgttcaaacacacattatgacttgaaacttgcattttttttctcaacatctattaagcttaatatgtattttaaaaaatgaatttatgaagattttttaaagcataacatgattttgtcatttttcatgtgagagatagataaattttgagcaattttttatttgtataaaattattttaaatatata

SEQ ID NO: 248967 - DNA, 983 bp, Cannabis indica
agcattttttctgtttattttttcaaaaaaaatgattttagaaataagaataaattttttttttaagattttcaaaacacaagtcatgttcggctaatatttacctggaatccagatctagatctggatccaaaccctagacccgaatctagatcctggaccggaacccagtcctcggacccgacctcgacgtggccccagaccctggctcagactcgaaccccggcctataggcctcgaccctagacctcagcccaacccgacccgaaccaaaatgagaggagagaaagtgatgagagagaaaataaggaaatataaaataatgtgagaaaatgaagagagataaagtgatgagagagaaaatcatgtgagaaaataatgagagagaaagtgtgagaaaatgatgagagagaaagcaatgaaagagaaaatagtgtgaggaaatgatgaatgagaaagcgatgagagagaaaataatatgaaaaaataatgtgtataatgatgtgagataaagtggagaaaaaatattgacaaaaaatgaattatattttaaaacagaaaacaacatttcgttttactctaaatttttattttttgtaactttattttctaaaaactattttaaaaaaacaatgccaaacacacttaattatttttttaaaaaaatatatatattttttagttatgatgtcaaacatacgtttaattttgtatttttttttttcaaaaaatattattaatcactaattaattggtttagaatttgaaaacacttattgaaaattaaaaggtgagtcctaaaaagaatttttgattggttgagtgttttagaaacaaaaacttaatattattttgagttttaagttaaaaaataaaaatatattttttttatgttttctatgtttttatattatggaatcaaaaaattttaaggtggcgtttagttagaaataatgaaacagaaataaaataatttttattcc

SEQ ID NO: 248968 - DNA, 580 bp, Cannabis indica
gaaccagtagattctatgagtgacttcctcgatcgcgcagatggtttcatcaagcttgaagaggccattcagtgagcataagtcaagcttgaaccgaaccaatcacaagctccctctgctggaacatctgtttagcaccctcagtaccaaagtaattcaagctccggcggtaaaaggtctaacaacaacaacaggcatggcaatgggaaaaagggaaagtttgctggcaaaaccgaagaaggctttagagaaaatccttccaagttcactgctttctctgtcttgactaaggatttggagactatctacatggctactcagtcagtagctccgtataagaaacttgctcccatgaaaaatgacgtaagtaagagagacatgtccaagttttgtcattttcatggattttatgaccatgacaccaatgaatgcaacaatttgaagcgagaaatcgaatttttgataacaaagaataacccgcatgtgcaaaaatacgtcaaggccgatcaaaatcagagggccgcccagacatacaataatcaagatttattaccaaaaccggtggatgggcatttacaat

SEQ ID NO: 248969 - DNA, 1320 bp, Cannabis indica
aattccatctcttatttaaataatattattttgttttttttttaatatttttcatttttatttttaacttactcttcaattcggttttaatttttattatttggtcaaaaattgttgaaataacactataacagccccaaagttttgtagtgtagaaatcagttattaattttaatatggtgaggttacaactaattagtactaataatgataatgaatctttacttagtatagcaatattttactgtgtttttttttttacttttggcttaagatgatttaattccatcaaaataggtacaaataataataataataaaaaaaaaaagctagcaattgattgaaataatgaagattaacaaaggagaaatatattaactgcaacagtcacattgacagagatcaaatcaatcccatgtatcatcaagaatccaatatgaaagtgttgaacttgtaaaaatcaccattgacagagatgatcaaaaagctctgtactcgaactagaaggacatgcagtaacaacccttctccaaaaatctctgcttagtactttcaaagaacttgactctctctttaactttctctgcttaactctctctcaaaatctcagtacacgttacatataacatataagctcataaaagaaaaagactaaattgagctgaagtagtcaatttcaactaactctgcattaattggtttaatttgttattctattcttctcatggtatgaagtactagattgttccaatttgtgaattgaggacaaactatctgaatagattgttccaatttgtccttgagtaacttaatttattagttcttgtaataatatcccttgcaaccatattacctccttaaaattaagctttagtagtggcatgaactcaaactcagtggttgattgggtcgccatttgttgttgtttgatgcatatctttatatattaaaagtgcctatctaacggcatttcttggtttaacagaatatactttaataataaaagaatattctgttaaatttaacggtgttagtaggtttgacgttacaaaaccctaactcatttacacccactcttcccttccattctcactcccaatcccaattccaatagagttttttgatcgatttaggatctggtttttggtcacttacctgatttttaatttgggtcatgggttttacctccacggtagttaccccaaatgaattctcttacctaaatcgatattgaaatgtcgttcaatatatttttctcactgaactatcttcatggaatgctttatcattggaatcgtcgatggtaaaattattttccat

SEQ ID NO: 248970 - DNA, 748 bp, Cannabis indica
catcggaaatgcccaactttatggatacttacagacacatgtgtaagaacaattctagggattaccccaccaaaacactataaataccccctcaaagctcatttaatggggtcggagaatcttggttgctcaagagcaagaagagaaaaaactcaccaagaacattctttgtattaaagagagaaacattctcccaagtgtagaatctgtattaaagatatccattaatagcagtggctcgtggactaaggctcattaacgccccaaccacgtaaaaagtcttcatctcgctttcttacagctcattattataatcatattttactagttgccgaaaacctcggtcaacaataaggataagagatttgtgtgaaagccattcatgggtgaccatgatgatgtattttgtgttttactattttaaataatagtgatatatgtattaacacatttgttccctaactacgaaagaaacctagcttccaaagtccaccaaaatctttgacttcatcattctcaacaattaattaacaggttgctagtatttgaataactatggtgtttgaagaagaagactattgtattgatattcttaattgatgccaaaatttttctcattcccacatcaacgtctttttctgtgaggtgttcaagagcagtctttcgtttcagatttttattttcatttattaatttactattattagtttaattccaattaatgcttttatgtggttagaattataag

SEQ ID NO: 248971 - DNA, 846 bp, Cannabis indica
tagggcataaaatccaacatttctaaggtttccaacaaactgatacagtgtctcatattagacaagagtcaaaaatatcattcattgaacagcgtagtcaactcatctaaaatggaaaccattctagataccttctatttgatcgaaaagagaatctgacgttgtttcattttagtcgggagttgaggtcattcttatttcttgagcttctactattatttaatactttgtaagccctactcttagcagccattattcggatggacgttactaagaataaaagacttacaataatacttatctttcgatattctatggcgttaaattgctaataaacgtccatctatttggggtgaatctcactaaaactagaactatgtagaaccaacaatggagatcgaatatccttaaaataaagctcattatttaaagtgtattttcatctaatatttattttaatccatttattttaatatatatttatttaactaaaattaccaatttagaaaactctaaatataaattttaatttaatagttataaaattatacttagattgatttgaaaataaataaaattattttccatcttagtattaattctcaataaatattacgaaaattaattaatttaagttggtaccaaaaaattgtaaattattaatttaaaattattttcaaagaattagcaacataattaaaccctaaaccctaaacaccatcaattttaattatgttgctaattaatttaaatttaggttgttagaaaatatttaaaaaaaattaacatcgaacaaatatctaaaattcaaatacccaactaatttttaaaaaaattcagtttatt

SEQ ID NO: 248972 - DNA, 3353 bp, Cannabis indica
gaagaaaggaaagggactaaagagctcgggccaatacagaaacatgtggaatgctgatttgatagacatttctattgacctacagaacaatttcgtggtggtagacaagagcagaaaactgaaccataactgcatcattcgagagctagaagatgaggaaaaggagacccaacctgatgagaccgcggcagtggggaatgaggagaatacatctagccagggtttttgctttggggctgtggagacttgcccacaaaagtctcccgagacgccatgaagatccttgcttggaactgtcgtgggctcgggaataccgcgacagtttgacaattgacggctttggttcgtcaagcaaatcccgaagtgctcataatctcagaaacaaggcttcatcagagtaaatttcaaaaaattgctcataagtttcactttctcgatttcatttacattccctctattggattctcgggggggtttggtatgtgttggaaaacaggggtgaagtgtagtgtaaaagaccaagacaagaatgtaattgttggggttattgagtccgacccgccggggatcaaatggaacctcctggggatttacggccctcccagtctaacccaaaaggaggccttttggagaagagtaggggagttcattcaaggagagacaatcccatcgatgctccttggtgacttaaatggaaccttagaagatcacgaaagcatcaactacacccagccaaataactctgctaaatactcctttgaccttcgtcgcatggtggctcatacagggttgatagacatcgggtgtcaaggaggcaaattcacctggttccaaaaatctaccatcactggcagagggtgtaccctaaaacgtgcacggcttgatagagctttagccacggtggattggagattgctatttccaaatgctattgtcaaacttatgacaacatccacttcagaccacaagccaattcttctcgacacgcaagggggagctaattgtagaaaaactcattttaagtatgaacttatgtggggacgtgacccaaaatgttactgggttgttcgtaatgcttggaaagaccctatacatccaaacccgatgctgaatctctatcgcaaactgaagaaaataaaggaccatctcctaaggtggaatcgcaagcacttcaagatgatccataaacaagttgaagatgcccaacaatccctggagctaatcgaaagggagaactctcctgatgtgaatgtgttggatgaggcaagagcaagactgaacgaagctttagcacgggaagagatcttttggagacaaaaatcgagattggcatggcttaaggagggggatcgatgtactaaattctttatggcctccactgtagttcgaaggcgcaagaattttatccaagccataaagaatgaaaataatgaatggataagggacccaacttccattgctggcctttttgttgataagttcaataacattttcgcttgtaaccggccgtcctcttctccggatcttcattggatacggggaattagtgtgactcaatctgaaaatgaattcttaaattccatcccctctgatgaagaaatcgaagcgagcttgagatcaatgggaaacgacaaggcacccgggcctgatgggatgccagtggggttctacactcaacattgggatacaactaaaagggatcttattgatatggtaaggcatttcttcctcaactttgatttgccaaactatattaataataccaacatagtcctaattccgaagaaggaatgtcccagtggtgtgaatgactatagaccaattgctctatgcaatgttgcatataaatgtatatctaagatccttgccatgcgactgaagcccctactacctaccataatatctccggcccaatcggcttttgtaaagggaaggcttatagccgagaacacggcggtggcaagggaaatagtccattcaatgatgaagaagaaagggaggaagggctatatgctgataaaactggatatggaaaaagcatatgacaaaatggattggggatttatttcttcagtccttggctgcttacaattcgataatccattcataaactgggtgtggaaatgtattgagattgataagatgggtctgctcataaatggatcggttcagggatacataaagccgcggtgtgggcttcgacaaggcgatccactatcgcctgctctgtttatattggcagctgacgtcctatcgagattaataatggccaaagcagaggaaggagcaattactgggttcaagatatctaggaatgggccggcaattactcatctcatgtttgctgacgacatcattcttttcggaaaagctaccatcaaggaagcaagagggtttcgcaagtgtcttgaagactattgttcttggtcgggacaagcggtcaactacaataaatcaacagttttcttctcgaaaggggtggcaccaaataccacatctgaaatatctcaacttcttgggatgaaacgaatgaagcgggatgcaatttatttgggactaccactattccgttccctaaagaagacaactgatctccaattcttagtcgactgggtgctccaaagggtcaaaagctggaaaacaagactactttctaaggccggacgtgcctgccttgtgcaatcagtggggtcatccattgctacttatgttgctgcttctgaggttatacccctaaccattgcacggaaagtggacaaatgtcttcgggatttctggtggggggatacagaggagaagaagacaatgcacaccatagcatggaattccttgtgtcagtctaagcttagaggatgcctcgggttcagatgtgtggaaacagttaataaagccttcattctgaaatgggcttggaaggctctcacggatgactcaagcatatggagtaaagtgatcaaagccaaatatttgaaagataggaacttcttggatgttgagcaaaactgtggggactcgggaatgtggaaagcaattctaaaaagccgaactctactcaataacagtatttgcaggaaaataaggaacgaggctgatacttctatatggtttgatccatgggttccgtctggcaacagccgcccgacacctttaaaagatgcaactttgggggtggcatgggtgaagcaattcatagacgcaaacaaccagtggaatgtccacatgttgcgggagtggtttcaccagaatgatgttaaggccatccttaatatcgacctccctcagggtgatgcgagagatagttggttatggatgggcgaaccaaatggaactttttctatcaaatcggcatgtcg

SEQ ID NO: 248973 - DNA, 938 bp, Cannabis indica
aaattggatttcgaaatattaattgtcagagcatgatggtgtagccgtcaaccttggggggcaaatgttatcccaatttatacactctgatatggcatcacatgatggtgacacgtggaatcgactccgagtatctgctcgcaggatatagtccgaacatgatacctcatatgcatgctcgaggcaaagcaatcagcaatccgcacagtgcgaccaacacttagcaaattaagctttcgcatcgtgagtcatcaaagaaatccctataacttggggatcagattgcagagatatggcaagctatccaaatcccacgatcagtgtattctgtatttactatgcaatctttctacttatatccattgtaacgagaagggaaatacttcctctccaagctcatagccctataaatagtgatgcatattcactgggcaaagggtcgaaagattttagttaagagatattgtcttataattcatatcaagagatattgttgtaagagctataagaaaaggaacctttctccttgttcttgagttaatacaaataacgaggattaggctattaccgaactactcggggctgaacctctataaaattcctgtgtctttatattgcttcattatatttcaatcgttataaattacttgtcgcttactaaaatagactcactgtcgttggctaaaagcgaggtcaacaattctcatcttttttattacattagtaacaatcttgttgtaagcccctgacccttagggacgccacgtgtgtgcttttataaacttattatcactaatctataaattttggaaaagtgtggtttaatttaaatctttaattaaattcaaaataaagactttcattttaaatactgtcgtaatatagggatcccctgtttataaaaaaaatcttttgcagtaggttacattttcaaacat

SEQ ID NO: 248974 - DNA, 676 bp, Cannabis indica
catccgccatgataatgccaaaacaacgtaaccgaacttcgacaatattcttccatggaagaattatctgtctggtaattatcaggcaaaggaggcccaaaaaatgtaaaatctctagtaccattcaaattatttgtgtacttaaaccgatctaatgacttagtttttagcaagtcacccaattttctcattgcactaacacaacgtgtaaggtgaattggattagaaaagtagttgaattgaacatgtggtgtgactttgacatcagttgttgaagccaaccaaagtgaaccggttgataaaggcccacaattttttcagcaatggatcctaaacttaattctaatggatttgatgtgttggggtaaatgctaaatggtaatgtagttggaaaaaatggtaggctataagacatggtctctatgtaataatctttagttatgccaacaatttgtatatatgatgcttctaatgggaatgggattacaagattaaggttgttgcgaggattatcagccatgaattgtccaacatttggttgtgaaaggattatgggaatatgttgtgatgtgaggtttgattttggaccaattccacttagtagcaaaagttgaggacttccaagtggacctgcacttaatattacttctcctttattacgtattaatgccttgtg

SEQ ID NO: 248975 - DNA, 771 bp, Cannabis indica
tctcttctcatactgtttctcttccaaatttgatcatctgcaccctcagcagcaagggctagctcaaccacctgagcataagttcgaacaactcctggtcgcttagcggctacaactacatcccgagcgatatgctcttccaacccctgaataaatttggcctttctagcagcctcagtggccacttcattagaggcaaacttttccaaccaatcaaatttggtggcatgctctgtcaccgtcatgctgccctgagttagccgtataaactcttctgccttagccgcttgaatggtttcattataatatttttcagaaaataaaaatccgaaaggcatcccaggtcatgttagctagattatgatcctgagatactaatttccactaaatacgggcatccttgcacaacataaagctagcacatccaacccgattgttacccttaacacgcataatgttaaagatggatgctatcattcccatccattgctttgctttaagtggatcaacaccaccttcaaacactgacagattttacttcctgaactgcttgtacaacggctctagacgatttcccacatcatgtggcactactaatggtgctagaggattaggattaggatttagagcagaccgagcttgctgctctctacattctctaatctgttcaccttgtttttggatggtctcttgcatcgcgatgtacatttgttcctaattttgcagtagtgctggatttgcaccctcaccgacaaccccgagccaagaaag

SEQ ID NO: 248976 - DNA, 3270 bp, Cannabis indica
ggaccctggtcagcctaagcctatgtcctaagcaggtgaccagttttttatccacttttgaccttggcaagaatcatgtcatggccttgtaggcatatacaacctttgtctcatacatggctcccttagaaactctgtatgacacttaatggtgagtctattatagtcgaatgctcaacttaagactcaacattttttcaagttgttacacttgaaactgtactttattgatacccaaccttgtacgataaaattgtctggcaagtacccttgggtacgattgaccagagccttgcctaaaccttgtctctttgtcaagttgctcacctccccttatcttttgtgtgtagatgatccttagtgatcgttagggaggtgaccactgcatcgacaaagattttttttatcttctcttcaaggactaatgtccatttgattcctctagaaactctcggggagatatctaggtcagtggtggttcattatgtcaaggatcaagtagacatgccacagggcaccaccttatgacctctatatcgcaaggctagcaactagcgagagagtatacattgctgaggaggctgcacagtctttggatgacagagagcccggggctagccaagttgaggtacctatggttgggcagcccatggctgactgagatgaggagagctcagacagtgcatctgagattgaggaggtcattcttatcaggaggagacagtacaagacttgcactgttttctccaacaaccctttgggttcacatgatgatgtttggcagcctttgaatagccttggttgtctcttcaaggtcagagtggaccacgttctagaggaggctgtagagccccgagtcgttgattatggagatcagcagaaccggtggatatctcccctatcatctatttctacccacaggcttcacaagatcaaggagagtgggttgatgggagatgtccagtgtgacggcctttgagagaccagcgaacatatcagttgaccttcaactagatggtctaatcagaatgccatatagagcagggagcagtgttgcccatgcattcttatttcagagatatcgccatatactttagggtgtgtccaactcagatcaccccaaaaggtataaagtacctttcagtgatgttcattctttatgcggagttaggctggcctcatccctccccctacaagatagggtactcttttgagctgaaatctgttttgaagcaaaatcgaatcgaatacttttactttaatcagataggctatcagtttttgggtgacaccaacagctcgactttgtcaaaagtgggaggatatgccagaacttacggcattgcttgggatatcttgtaggtccaccaccgcttctagagggtgccaacctacacaccctccatccccactctctggatgagggatttagctaattatatcctgtccctgtccattgagaggaggaatatattgaggttggcttacgaggccaacttttggaggtatggtcttgagtcttgcgttgaggggctaaaagcctgcctggaagcctggatgatgctccggtagtagaggaaacttgccttagaggtgggcatactcttcaaatggatgacgatatccccctctccaggattgtgaagaccatggagaggagagagaagaccctttgccaacgcttagctcgcggacgcaccgttagcaatgccactctatcgatttggcctagaagccaggattctactaggcctacccatcccccgtctacttctagaggcaagggcaatgttgatgtttgtgataacagttcatatgattcctcctccgaggatgatggtagttgatagtacaacctttttgctttttcttgcattaaatacttataacttgtattctgactttgttactttattttagcagatatggcatccagattgagagatcttgctggagagtgtttcatcaaagcttcttcaggtcgtcctaaggccaaggtggcccaaaccactaggtctagcaattccataaggtcctcactacctccccctcctctggggtctacaccggctggtcagccaatgactatagatcctccatcgaggaggaccccacctccatgtcgatctttgggaaaggtagcttagaagtctggtcgtggggcatctcaaccaccagacagagggttattaaggttgcccatagctacattggcagtagtctgcccatcattgatggggagcactagaagctagaaaatgacgagttggactgtctaacgtctaattgtctccaagacttgacttcggtaagttgcatatttgatattactcaaattattacaccggtaaaggctggctggcttggtatggaacactgtaaggttggccagccagggttgtattattgagaagctggccgacaagaagtgtaccattcagggctggtcggctaggtcttcttctggcactaactcagttttttcttttgattttaggccatgttgaagttcagccctacccatggtaaggccaagggatcctcaggcgctcaccgagagaagcttaaggccaaggagactgagcttcaagcagagagggacacccatacatagacacaaattggtttgcaaaagtctcgtcacttgataaatggtctggagtgcttgcttggtatcaagaaccaagaaaatactttccttgttgttgaggcctctatgttggaggtgtagcttgagaagaaggaccaagcgttgcaacttgctcttgatggccaacaagccatcaaggacgagtatgttggattgtcctctgaggtcttgtacgaggtttatctccgtaaccccaaggtcaacctctcctacatgggatcttccttcctcaaaagaacacttgctcaagggagagaactctacaagagcagaatgcagacatactgacttggccagactgtcgtccagcctgacgagtcgtcattatgccatcttgatgaggctatggttgaccaacctatggaggagatggccagcttggtttctgatcacatggtcgaccagcttgtagaggctatggccgactagctccttggcaatccaaatgcagcagctcacgactcgactccccctacacctacacatgagtagacacattttattagtatattacatttatgattttatttcatactagtgacatattcaatttttttatgccaagtgaagtatgtctgcactgacttagcgacatgcttaagcttatactaagctttaaa

SEQ ID NO: 248977 - DNA, 1278 bp, Cannabis indica
tgtcttagtaaaaatgggtcaaactttgtattgggacatgaattagacatgtcatgaacatatttgagggataagaatcagattcggagaacttccattttttagcacactaagcaccaggtggcacaggcacccaaatgcctaggttgacatattgtcaacttggaccacttccaagcatcaaactgaaaatccatctcgggcattttctttgtcttcatccaaaatgagaaaaaaaaagttcttttgaggaagaaacagaccaaattggaggccaaaatgaaggaccagctcccaagttgacattttgtcaacctcggccatttccgagaagtttttcgaaaaaatcttccaggcatattctccgtttttatgaaagattaagatgcaagtatttgtgaggagggaacgaaactttctaaagcctgaaactggacccaatgcctaggttgacatattgtcaacccgggatgtttccaataattttctgaaaaaatgctatgaatatttttccgtcatgagaaataatgaagataaaaataaacttaaggagaaaatgacaattctaagggcatgaaagcttagccaagcacccatgttatcttggtgttgggctcgagaattctctttgaaatggtcataaatgggataggagacgtcttcctcgatttaaagaaccttggaagtatcaaaacaacaacctagaagctttgaaaagagcactcaatgctcaggttgacatatggcctagagcactgggtttttcttatcaaattttgattccgtctcgaccattgtctattttttcttagtgaccagaagctatgaagttagaagattcatagcttctaatttaagttaaaaagtacccataaggtcagatcatctctctctaatttctctctatagaaattagagctttcagacttagctatttttctttaatctatctcgtgagaaataaaagtcaaagtagatgtatctccattattgtcgtgacacagggagtgaactactataaattgttgggtctctcttatttatacttaactcataatacattctcgccaatctagcaagtgggtgtggcaagatatttgtgtctacaaatcactttctacatggtggcaacacagtcctcaagtgttgaaagaataaccaaaacaactggccagcaaattgggggcacgccagtcacttaaactggtgatgggactacacctacatcgtagatgatgtgtgaggtcttgaaacaagctccacagctcgtcccctaag

SEQ ID NO: 248978 - DNA, 653 bp, Cannabis indica
ttggacctctttcatatacagtagaagcagaaagaatctcagttgatcatgttgctcatcttaaaccttctgatggaggttctgctacaacacaatgtaattttatctctgtatatatgtgtatatatatattagtaaaaatactatctctgtaagagagtgttgtgttacatgatataaatatggtgtttttatcaaaagtaaaaactaactagtcttcaaagttagctataagtcactcacgacagctatttgctttgctttctagttgaaaaatataaaaatcgcacagtatacgatttaggcaaaaacaagaatacagaaagtaacaaacaaacaaacaacaaaagctcctgcctaaccaaacagaaaataatattaaatagatatatattgtgcttaaaattacaagaggatgatcaattttatcttaaacatcttcctagtacaaaaataatgtactgttttcttctagattagattagatcgtgcgaattgaattgaatattttataaacactctcctattataatggctgtttgagcagacaggacaattttatttcaaatggtgatatatgttacaatttatgaatttgaagcactagttgaatatgagatggtaagaacatgatagtaaatggtgcattacta

SEQ ID NO: 248979 - DNA, 690 bp, Cannabis indica
ctttcttttggtttaataacaaaaaaaaataaaaatttaagtttaagtttaaacaaaataaaatataccaaccaattttattagttattaaaaatatattttattatttaatatttaaagttactaaattgaatgctacataagtttatttttttttttaaggaataagtttacttttatgaaagaatgttaattaatttttaattttctattatactttttcagtcaaaacaataattatttgtgcttaaaaattacactattatgatctatttataatgatcattttgataggtaggaaacatatattttttctgactagtattaaataggtaatattttagttaccaaattgtattctcacaaatttcttttgtagaatatttttgatcgatttttaaaataacttacaagaaaataactataggttttttcaccaaataaaattttcagaattaaaagtaaccttatagtttattttatacttcttaatgaaaaaataaaaaagtaagcaataacttaaaataaattcaaaattcaatatgtcaactgatttaatattactaaaaaccaaagggcttcaagaggtttgtctgtctttttagctgcctttcggtcagtcgcgctgctttgagcccttaccacctggtctccttcctcttcctgcctttggaaggtgttatacttcgc

SEQ ID NO: 248980 - DNA, 1021 bp, Cannabis indica
atacaaacatcaatgcagaataaaccccacaaactatgctttgtctttaattcaacttcatattcataaccaaatcagttggaaaataactgataaataattaatgaatcccaacaaaaatatatattaaaaaattagaacaatcaaattgaattatttatctcaaaaaaaaaaaattattaattcaaaatatttattaacattctatttttttatttatttatttgtatggtggtgtgtcatacaaaatttcatatgcagcaatagcagaagaataggaagctaagaggagtagtcaagccatgacactcttttaatattttaatttttattattattattattatttgaataatgatatataattaaaaataattttctaaaatattattctgttttatttacaattttttaacttaaaattttcaattataaaaataagctccgtaaaattttaaaattatatagaaaaaatacaaaagtaaaaaaacaacgaaaattccacctcacgataagggaattgtgtttctaattaagtttcacttctttttttaatttaagagtttatatattacacaatacataatctggaactcgaactcaggacctccaacacacacactcctatgaccacttgagctagcctcaagtggtttaaggtctcaatttttaaattaaaatggtagtaatattaatcctcttcatattctctccaaatctactccctccaatactactctctccaactcaaactcatataacaaataaccctattagatgatgtttgattggaatgaatgaaaatatagctagaataagaatgacattacaataaaaataaaaatacaaaacaaaaagaataagaataaaagttgtttcatttctattccattaatttcattcctttcaactaaacgccacctaagagatagatacaatgataaataattagaagagtaataaaagaaagagtgtgagtgtttaagttgtgaatatattattttgattaaaaaaattacat

SEQ ID NO: 248981 - DNA, 581 bp, Cannabis indica
atatatatcaaaataaaaaaataacacataaataatgactatcgaatacaacataattgtaaaaatataacttaaatgttattatggtctaaaattaaacttaaatatctatatatcttttatataatactaattaaactaagattattaacttaaagtataagtatgctaaaattctataatatttttccttaaaaaaatgagaaaagaaaaagtaaaattgtattgaagttgattagaataaagatggttgattcctttttagtatatataacatacatcatcaaaagaagtgtttgactaattagaaaaataataattgtttttttgtggagataattgcaaaatttcttggcaaatagccaaatatagaccaattaaactttaacttgaaagagtatggctcatatagttagtatgaaagtttaaaggccctcttaatgccgtttcaaggtggtaaggagttgctaacttctggtggaagtgtatggaaacttcttctacatagaggagtttaccattgtttcatttagtttgttcacaagactgcagggtgctaggttccatttcatcttctttga

SEQ ID NO: 248982 - DNA, 4254 bp, Cannabis indica
tctcatgtctcactacttggagttccttttaagtccacataagaatattattaatgttagagagttcagattaattaaattgtgatgaaaaacaaatattatatatttcattctctctctcaaattaatttttttttatctttccatatattaataagtgtatatttttatatctcattttttttaacactatttttctctcttacaaaaaaatttaaaaagcactcctcttatatttttctatcttttacatgattaataaaaatagtatatatttttagatgttttgtagtttattccgagttaatttatgaataatttgtatattttaacaagattgatgccctcttatttttttattaatttatagttatctttttgttattttatagttatttttatgttgttgtttaggtgttctataattgttttataattatttttatgtttttttttttatttttataccgttgttgtttagtttatgtgtattttttatagtgtatattttcagtttatttcagacaatattttcattgtatggtacatttattttgttatttttatattattttattaattttttttttctaatttatagttatttttaactatcattaacttaaaaagaaaaagagaaaaaaaaaaagttgacagaataacattataacaacaattctataaaaaaaaaaatacataatagtccaaaaagataaatcaagttgtcaaaattaagtaaaaaaaaatcgtcatacaaaaatatattaaggagttcatattatttattgcaattaggtcaatgttttgttatttttccgttgctttatagttatatttttgatgttttatagttgttttcatgttgttcgttaaattttttaggatttttttagttttttttttattttttattttattttattgacacaatattttttgtaattttgaaactttatttattttttagtacattatagttaaattggtcaatctcggcttcaattttgtttgtatgacgaatgtggttaattttagtttcgtatgtcccagtttgttttgttttttttttttttttaaggaaaatcataccttattagataaccatctcaatcactaaaccaggtaacaaatcagttggaacagacttcagactgaaaatacaattagggaacgatacagaggctctagcaaacttatgagccaccatatttgctgatcgacaaacaaaataaatagaaatatttttgaaacattaagaatagccttaaaatcaataaccacttgaccaaacgtggatatcataacaattgagcttcgcaaggcttgaacaaccgaaagacaattagtttccaggaccacttgttgccaatatcaagacttgatccaacttaatgcttcacatacacccatagcttcgacaagttcaagagaagagtgtccttgaaaaatcttagtacgaccttcaataagcaaaccgtgtgcatcctgagccaccaaaccaatcccaaattgtcgggtttcaccaaacatcgctgaccttaacactatgttcttgtgaggcacccagtgctcagttccgtccccatgaatcataccagaagatgagagcccaaaaccagcagtttgagcgttttgccattagttaaggaagccttttgttgacgaaatgatgctatctacactctgaattttattctaccaaacctgatcgtttatggcattccaaacagcccaagaaaccgccaccagcagctcttttttctcccgatcgagtgcctgaaaactctcaacacaccaggccaaataatttgtctcatgttgcacacccgtgcctataccaactatgtcccagtaaagcttagcaactagacaggtaaccaaagcatgtaggatagtttcatcttcaagggaacacaccggacagagagaggtcaccaccgcatgctttgaccaaagttgaaccatggtagggaggcagcaactacccgctctccaaactagattcttcatctttgggggcagcttgagagtccagaatttcttccaaaatttattcaccaaagactcctccaagttcacctcacctttaagttcgtggatgagtttatacgcacgtttaacagtgtataaaccagataattccccaaaccatatcagttgatcatgagttgatgtagtgtggataggaatttgaagaatcagttctctgtcacgtgaatcaaataaatcattcaacacatccaaatcccattcaaggccatctaatgttattagattggcaactttagcatttccaaggctcggatgcgaagatgtaaccaagggattgcctctgtctggtaaccacgggtcacctatcacattaattttttttaccatccccaactttccaacgaacaccactagccacaaggttttgagccttaagaacactctgccaaacaaagcttgggttggagcctataactgctgtaagaaaagtgcttgtggggtaatatcgggctttaaacagacgagcctaacattgctaatttaaactctcttaagttacgaaaacccatacctccctccgttttgtgattacaaagcctctttcacgacatccaatgaatacccgtattattgcttaaaaatgactgccaccaatacttggacataaggctctctatatctcttgttacctcaagaggtaaaagaaagacattcatgacataacttggaagcgattgagcaacgaactttattaaaacttctttacctactcgagatatgaacttagttctccacccttgaagtcttttctctttcaagtaacccaagcagctgttttattacgctccattgaacttagaagatccaaatatagactcccatccaatgcagcacccatacccaccaaaccacaaagtcgattcctcattgtctcaatagtgttggaactcaagaaaatcgaagacttagagaaattgactttctgacctgaagccaattcaaacttgtggagagcttctttgattcgcatagcttctagttttgtagccttgccgtataaatagccatcaacgaatagcatgtgagaaaaccttggagcaccattagcaactttacaaccatgaagccatcctctttgttcatacttgcgaagtaacgcaaagagaccctcaacacagagaataaacagatatggtgaaagaggatccccttgacagatccctctcgaaggaataattggtccaacttcatgatttccatgaacaaccttgtaccttgtcgaggtaacacatttcaaaaccagtcggacccacttctctgaaatcccagcttatgaacatcgcttcaagaaaagaccactcgactctatcatacgccttgctcatatcaagcttgagagccatatacctttcctttcctttgcgttttctttttaagtaatgtgaatttcaaacgaaaccagaacattatcagaaattaaacgaccagggataaacacactttgattttctgaaatgacagtgttaataatcggcttcatcctattgaccataacctttgtgataatcttgtacatgacattacaaagggcaatgggataaagatcagacataagctccgggttcttcttctttgggataagcacgacatttgcctcactataaccatcctccaaagtgcactgatcaaagaaataacgaacacatttcacaacatcatgtcgcactatagaccaagaccctggtaaaaagcaggggtcattccatctggacccaggcttttatcaggatgcatctgaaataaggctttcttcacttcttcttcgccaataggttggcataactccatgttaacactgtcagacactacctttagaaacacaatctatcacctcagcgcaacaagtgtttgcagaagcaaacgaaccatgaaagtactcagccacaactttagataatcctgactcccaagttacccaattgtcgtgatcatccttcaactgcttaatctgattgttctttttttttttttgctacttgctgccttatgaaatagctactgttttggtcaccttcatgcaaccaaaattgtttagttctctgcttccaatagctctctctctgatcaagggccttgaaaagctttttcttgacctcattgtagcattgaaccaaggccacatcccgtttgccatggagcaccttcaactcctttttgtacttttttatacggtgattaagtgtacctgttatctctttcccc

SEQ ID NO: 248983 - DNA, 1130 bp, Cannabis indica
aatatacctgtcaaataaaaataaataatatatttaatattacgacaaaaatattatatgaaattttcataaaaaaaaattatacacgatttaaaaaaaatatgaaaataaaattaaaataagtatttgaaattaatataaaataatgtgagaaaaaaaaataaaaatattaagagtaatttttaaaaaatattttaagtttcttttttttttaataatagggtgtacttatattatatggggttcaaataaaactcaccttattttattatttaccctattttaattttacctctaattaattattttattattatcctattttttttaatgattattattatcctatttaaatttacccttaattaattatttcattacttatttattaatataaaataaaatttgatttaaaataacatactcaaaataaccttttccagcggtttataactgttgggaataataagtatttcctacagttgtaaaccattgagtatacctagtattcctaaaggtttacaactgtgggaaatacttattattcccaaccgttataaactgttggcatttattatttctttttttaaaaaaatctatttgggattgcccacaattttccactgttggcattaattttcccaacagtttctttacttcgtcctctaaacagttgggaaaaatctccccttactttttccaacagtttttataattgatcccccttattaactgttggaaaaagtcaattttaaagagtgtcattcttaagcaattggcttccccatattatacctctccacgtcattgaagggtgagacccaacatttgcttccaaaaaaactgtattagaaaagtaacagtgcttaagcagagtactacgcaatgatgtatgattggaaaaaaatttccaaacttgttttgccaagagtaatttgcggcgtaaatacctaagttttatatcgattaacagataagtacctaagtcatatttttggtagtaaaaataccttccgtcacacttctggaacttccgtagatacctcactgttaaatgccaaatcagtacttgcatgtcactatctaattggtccacatggattttttaattttatattttaaaaatcata

SEQ ID NO: 248984 - DNA, 510 bp, Cannabis indica
ccctacaataatgggtaagtgtttttcaaaaaaaaattaatcattttgaagagtatgtagttcatttctagtagatttgtgtgttaatgttgcagttatgttatgttgcggtttttttctgtggaatggaataatttagttttttcggtaagatctgttttttttttacattatatcgatggtttatcgataatatatcaatgtattatcgattgtaagcgtaccaaggttgaggaagactcttatcgataatttttcaataggttctcattaatttccatggctgtgtgatttttatttatttattttatttttgcattttttcagtttagcgatgcttccgaagttaataagtttctatccaccacgattgtttattgataatgttatcctaaatttatccacctgacatggcatgtttgttgggaatattttactaggatctagatttattaacaagtattttgattaacatcctaaatatgaatatctctaaaacaatgaaataaa

SEQ ID NO: 248985 - DNA, 805 bp, Cannabis indica
ttgtatttgaactcattgttcgttttgggtctacatacaactgaaagtgtactgtagcagaggtatgtacaatacacagataggactgatgctggcaaaatgcttccgtttacctatttttatcggaaaaccacatcaggaaaggataaatatagtcaagatccttacaatattcatcattcctgtgcattccatacacaaagctttgataaaaatctatacacaataagaagaaacataaatttacaaggctttgaagcaaaaatattactaaagccacaaacaaacaaacgcaagtaataaataaataaactatatacaattgttcagaaaaataaagttttggttggtaaaaagaggtactggattttaacttgcaaactgtgcagaaaatatcacaattgtttggtttgtaaatttatcttaattaattactaaggtctttatttctcgtaaagtaaacatgatttataatgcccgaactttgaaattgtctctgcaaacaaaatggtaaccataagataaacacacgcagtcaaatacattatataaatatatatattatattggaaagaaaggaattaggaagttaggattacactaaatcacaaagtcgaacatgcagataaatttaatttctatcatagtgtatgtgcttgtattagctccaagtttataatattaatggtatcaaaagataggaaaccagagatgagctgatcaaacatgcttttagctaattgggggttaagaaaatgaaaagcaaaaccaacacaatactatcgttcatccatgctgcacagta

SEQ ID NO: 248986 - DNA, 654 bp, Cannabis indica
tccatcccatgttgatgccaaacaaggatacaaatactatggccactttcttgatgattatagtatacatggattttcccattaactcagaaatctcaagcctttgatgtgtttatcaagtggaaagggctagttgaaaagcaatttaatctcccaatcaagtctgtccaagcagactggggaggagagtacagaacatttaaaaagttcttagaagatcagggcattcattttcaacacccttgtccaagaactcatgagcaaaatgggagggcagagagaaaacatagacatatcactgaaactgggctaaccttgcttgcacaatctggtttggatctatcctattggtggtatgcctttagtgcagctgtgttctctataaacaggttacctactagagtcttacattatctatcaccctatgaaactctatttcataccaaacccgattacaatattctaaagtccattggatgtgcatgctatcctcatctatggccttacaatcaccataagatggattataggtctcaacaatgtctatttttgggatactccaatcaccataagggatatatttgtgaaagtcatgaagagcgtgtctacattgcaagaaatgttgtttttaatgaacaactttatcctgcaaaa

SEQ ID NO: 248987 - DNA, 1193 bp, Cannabis indica
aaatcaaattttttgattttctaagtatagaaaatcaaatttccctactgaaaattgcttttcaaatttgagtatttctttagtcaaatggtcgccacatttcaagctcacaaaaagaaaggagcaatttatgggttaatgcatatagacagagatgaaatactggacctacctattgttagtaaaccaaactctcggcctgggcctacgtggaaactacaccagctaaagacttgggctcctctccattgctaccatttgtttcatttcttttgtaaatacaccctattttcctacaaaatattataaaccaaattaaaattgaaaattttcattgaaaaaatatttttattaatttcatgaaaataaatattaaaatttaagttattgtgatatttttctacaataaatgtgcagtgtcacgcactaatcacatattatctcttaaatgaaagactattgttatcaaaatgacttatagattgttggggaatagtctcagtattgcacttaggagaaatacaaccaaaactcaatattatatataaatatagaatcatgaatacatgagaagaagaaaaaaaaaaaaagattacaaccttttacaataataatacaactctatgaacgaagagataagaataagtagaagaacactcaaggcttaagaaaagttcaaaatttgtcttaaaagtcatcctccctcacatggacaattaaggaagctctacgaatacttctaagaatttataaaatcttatatacttagcgagcgtattttcacaaagttaacttttcaacattgtaactggtattttacacaactgagtaatatggccattttaatagtgttctcattcttgtttgaacttaaatgaaaagcataaaggtcttcgatattaacaattataaattgcattcatagaattaattaggtgatttagatgttacttgagctgtcgaaatatcccaaatgttcaaaaaagtacaataattgaatatgctgaaaaatttagtaactggtaactggtttctgattcctaattttacaatttttgtcaatttctgattactaattttacgatttttgtcaatactactccaaaatacgttataaatgataaaatcaagtctaaatcaactatattgtattaaaatctataacatcgtattgttacaatttgataaaaaca

SEQ ID NO: 248988 - DNA, 884 bp, Cannabis indica
gcataaaacccaacagataccacgtacaaatatcttgtgccaagtgattttattttctgcaattatttttatattctgcctgttctattttgtctctgcaaaacttgtttctacagtaacagaattacagtatgcttctacagacgtatacagtttcatatttcgtatactttcgtatttattattttcatttgcaaaaacttgtttttttaattggtatcaaagcgagacactaaactcttagtgtggtccttttaacggtttcacgtatttttgtgtaaaatatcattttttgtaaaaggaagtttgatttctagaccacctttgctcaatgattctaattatccttattggaaagttagaatgagggctttcatcaaatctcaagatgagagagcttggaggatggttctatcaggttggtcttcttcaattgagacagattctgaaggtaattctaaaataaaatctgaactggaatggtctattaaagatgataaactttctgcctacaatagcaaggctttgaatgctatatttaatggtgtaggtgaaggttatattaagcttatattatcgtgtgaatctgctaaggaagcttggcagatccttcataccatcgcgcgcgcacaagcaggatttggccgagaaaactcagcgctggaggctgcacgcagcctttccgcacgcggaatggggggatcagacaaccccgtgcgtgtttcttcagacatgcagtatccgaacacgcacttgactgagtgaaactcggtgtccgcgcgcgtgaggtgtgcacccaattttagatttttcaaattttcaaaaaatcataactaattcaaaaaaaaatcaaaattgagttctgtaaaaaagtaaattgctta

SEQ ID NO: 248989 - DNA, 814 bp, Cannabis indica
accgccaatatcccaaaaaaaaaaacttattatatacataaaatattctttaacttatactatttttttctttcttcttacattatttaaaatgtacatattaaataaaaataaaatatactttaaatatatgtcaaagaaattatatgaattatatagggaaaaatataaaaaattatacatgatttaaaataagtataagaaaaattataataattatagaaattaatataaaatgtgtaaaataaaattttaaaaatatataaaaagtaattttttaaaattaatttaaatttattttttaaaatagtaagatgtgctcataagttagtttggtagggtgcaaatgagacactaattgtaaatagtcaattttacttattattactgttaagtttacttattgaaaactattatgtacaataataatttgaatcaaataaaatttgtgactaaaattaaaataaatttttataaaaataattaaacaaaaaactaaaataaactattaccaagaaaaatattattaagtttatattattattattaataagtttgatattaaaaaattactcacaaaaattataatttattataattaaatatgttagtatagcaaaactaaattaataataatttagagaaattgctaaagggcaccagtggggcctagcactttttatgtgtttattggtctaactaagtatcgagtctcatataatttaatataaacttttagggaatatcgcttgcctatcacaatacgacatgtcgagaaagtgctaggtaccactggtgcctaatagcaatgctc

SEQ ID NO: 248990 - DNA, 872 bp, Cannabis indica
aaatataaaatacttctctaattgcttacgcaattcccattcaaactcaaattaaaactctaaaattagagaaatacaagaaattaaacacatcccataaaccaaaatcccatggaaccatcaaatgattgacaaaagagatcataaacaataaaagataaatataaataataaaaatagataatgcaaaatcatgtacccaaacgtgtatatatatacatataaatccaaatattttaaaaatataatcataccttcaatggtagaaaatctttccctctaaaaacctattttactgtcatgctattatcagatctgagattgaaggatgagagggagagagtaaaataaaaaaaataaaaaaaaagttttacctaatgaagaaattcgagtcatcagagtcaatcagccacatccatggaagagttcaagggagaagagaactgcagagaagaaagactcatggtgcagtacgaaagagaaaagtgattttaattttttttaaaagtgaacccaactcagagtaaattaccaaaatctcatctcagagattaagacctaaatctcatttcagagattaaacctgaaatcttacagaaagagagagagagattacctgaacagaagccattgaagatcgcagagcttgaaatcacagagttaagggagagcaagggagagcggagagagagacgagagaaaagaggaaaaagtgtttttaaaaaattttaaaatcgtaaaaaatctgtttttaaaatttacataaatttgattttaaattaaaaaaatagaaaacacaaatattttaccgaacatgattttattttgaattgttgaatttttgattaaaaaaacagaaaaccatttttaaa

SEQ ID NO: 248991 - DNA, 646 bp, Cannabis indica
aaacttaaaaaataatttttaaaaaatatcactaaataatcataaagtaccacttataaaaaataatgaacaccaataatgctgctatacatataagtataacatacaagaaattatttcgttgggaattaaaatacttacaatatttaatccaaagataaataaataataataatactcacaagttaatgagttattaatgaattataggaataggcatcaataattaagaattatttgagaccttttattttcctctatttatttatttatttgctttaattggtccttacatcaatattctagagttgagttgagactacatatttttatatgattataatttgtaaattcatttttactagtttgtactttttcgatgatgtaagagagctagatcctagaggggcctggaaattaactaaggtataatattaactacagagcagcgggttcaatgaaagcagacagcaatgcgaaaatggaacatatttatgtatttattgttactttttttatttgtgattttgatatcactcggactgaacaaaaaatcaaacaaatttcagcaagtacatgaacaaatctaaatctgaataataaaacagagagataattgaaactagaaacacacaatattgaagag

SEQ ID NO: 248992 - DNA, 818 bp, Cannabis indica
aaaaagttataaagtaattaatgagagacacaacgatttatagtagttcaacccctatatcgcgatagtaatggagttatgtctactttgtgtttttatttgtcatgagatggtaattacagcaagtgtttaagtatcagaaaatctaaactctagtgagagaagctctgactttgtggatagttttttgaaagttcaaaatgaactaagagagctctccttttataggggaacgaggcccaagaaaataggagataaaataaaaataaagtattttccaccgttgatgatggtctaactgtaaaaattagcttttggtggtgatggctaacttttaatgtttggtgggtcccactatgagttacttggagcttattttcgtaactcccttagggctaaattttgacaatgctagcttcagaatttggacaggtatgtgagacatgatttgatagagggcttaaatagcttcaagatgcaagttgaattgcatcaatcaaataaaattgagtgagttatagttgttttactgaagacagttcaagtcaatgccaaggttgacattccaatgcccaagttgacatctggcgtcaacttggatgttgtaaaggtctagacacatccaaggaaagtactttgagatgcctaagtgatggtttgagaccccttagttcttttatatgttttggtgaagctagtcacacattttaagaaatgttgctattttgcggaaacgaaagactcaaaacttacagctttcgattgatccaaaattgaagttgtgaattcgattgatctgaattcatgtatcatttcac

SEQ ID NO: 248993 - DNA, 1037 bp, Cannabis indica
agaaaataataatgtgggctggtaaagttgcatagggtgtttgggttactctattatttatagtgttgaatgaaaaaaaggagaaaaatatcattggttgaagtaacattaatcttttctagtttcattagttgttgaatgacttaataacatgttattgttgaatgaattagtaaaattttagaaaagttattttgcttatgtagaatttcagagtaaaattttagaatttcagggaattcatggactttgttccatttgtttgcaatgtagtaatttttttttttatgataattatgatgtcctgtactagacatgtgaaatgagtcatttgaaagatgtttgagtacatctgattctgatctatgtaagtttttattgttcattcagaatagtatttccttgaagaaaatttattcaatgagttttcaaatatgggttactgatgatgatctacatgactattactgagtataggtgggttggatttattgggcagttccgaccgaagaaactgatatcttctataaaagctgaatttacaaatgaggatacagatttcccttctttcaaagatgtggcaaagcatgtattggaaaagtcactttattcatttggattatcaacacagttttctccaactccatcaacatacattaggtggagcacagaaagccacggtgaggaaaagcgacgacgccacaaaatgatgctatttcataaggtgtgtgtttgcattaaaatgttgaaaatgttattgttttgctccaactttttgtttacatagttcttttacctggctgcatagctgttcatatgattgaagttttgtatattatatttgctctactgttgtgcttaaatcatttgcctgatattttgattttcttatatccaattgcaaattcgttatctgtgtgctatacctattgcgtatttaatgattgaacaagatcagacgtttgagaacaaagaatttcatttttgctaaaaggatttacaagattatattttggagagtaaatactatgtcggat

SEQ ID NO: 248994 - DNA, 640 bp, Cannabis indica
gatgttaatgaaacatacttgttagtaaatctaggtcctagtaaaatatttccaacagtaatatccacactgtacatcgtttggttgtcctcgacacttgtactgcctaatcattacctcaaccatgtttcaatttgttttgaatcttttaggtttccaaaggactacaccatagagaagttacttagtgaaagaattagaaacataaattaaattaaagaaaaaaaataataaacttacgttgtgacatattttctaatttcattctgaattagcctattctttgggtcaaggaatgccactaactgagtagcagcctggatgattatcacagtctagtgttcactacacataattaaaaaagttcaatgaactcatgatcgatctatatttacatatattaaattacaaatctatttacaccagatttcaaggacaaatcaatcattgactgggttgtatttccatcaaccactcagtgagattttgtgtatgtttattaggatctttacaaccgaatgaggatattgaagcaagaattaaaaatacatatgtattgttcaacccactaatattaggtgaatattctctcaaataattgaacatagtatttgattaatataaatctacaaatataatt

SEQ ID NO: 248995 - DNA, 842 bp, Cannabis indica
gtgtccaattccttgttccttcgcctcatcatgtatttaccaaactctttatccacaccaagtgtggccttctcaagatcagactgttcaagtagtttagaacgattaataagaaactcaacaataagatcatggccgtaccttgcggccatgagtaagggagtctctcctcttacattggttcgcgccaataggggtggacataactcgagtaccccttctagaaaagaaggtgtaccattttttgaagcaatgatattgacatgggcaactgtattcttttctggggttaataattggtcaaggctaaattggttgttattgagtagaattatattcttgaacacttcaatttcaccattggctggctgcagcttggaacaccttagaattaataggctgagtagtagaagaagccatatatatagtttgctctctctctttgttttaaacttttcagataattttagtgaaagtgctcaactaattttcgtcacgaataattttatagttccttttcggcaattttgttttgagaatgcgtggttgcgtgagcccatgtgtctacaagctgtgtctgattattgggagcattgtagtgggcagtcaatttgtgcgaagttgaagtattgtggtgagaggcttgcggtttggggaaaagagtatacgggtaatttcaagaaaaaaatctctcagtgcaaaagagagattcgacgatggaagcaagggagggattctctttgtgttcagcgatttcgtgaggctgaattgaagttaagtgagaccctaaaccagcaggagattttctggcgccaaagatctaagcaattatggcttcgtga

SEQ ID NO: 248996 - DNA, 877 bp, Cannabis indica
gtcatgctgaggttcagttgaagtattaggggagaataggatggaagacttatctctattaaccaactgaccagtggcttgatgataaaggagaaggacaacattaagagcttcgcttgagcgaggagtaacaggagagaacagcatgctatcgtctgcaaatagaagatgagatagggaaggggctcccctataatttgaatgcccgaaaagctaccattagcctcgtgtaaacagatagcagcagaaaggccctcaacaaccaggagaaaaaggtacggagataaaggatccccttgtcgaattccacgagaagagtgaaaagggtgagagagggtaccattgagagataaacgataagtgacagtagaaaggaatttcatgataagagtggtaaaagaaggaggaaaaccgacatgagtgagcaaacgataaatgaaatgccattctactctatcaaaagccttttccatgtcaagcttaatggctgcccaaccaagtttactagagcgtcttgagtgtatggcatgaatgatctcattggctataaggatattatcaatgatttgacgacccttgagaaatgcactttggttattgctaataatcgagtgcaggacacttttaatgcgattagcaagaaccttagagatgcatttgtacaaagtattacaaaggcttattggtctgaagtctcggactgttttgggatttttcttcttgggtatgagaaccagaatagtattattaatcaaggaaatgtcaccctgatgattgaggatatgtagcatagcacgacagagatccgggccaaagatagaccaatttttctggtaaaaaagagggttcaaaccatcagggctcggagctttatctc

SEQ ID NO: 248997 - DNA, 722 bp, Cannabis indica
aatttattactatatataaggatattcataaaatactaaattcaatccacatatatttatatatcatttaaacaaaattaaatgtacaattaatgttttaatataaaagataataatttaaaaatcaaatatatataatacaaaaattataaatatatttccaaatttaatatgctatagttatatagatataggttacatattagacgagaatatttttatgacttgtgtagcaaatagggtttccatttttaatactttttacattaaaatatatcatcacaaagacgtaaaaattttacatataaattttactaaaacggaacctaaaaatgcataaactaaacctagcatcgccattgtcttgcaactccacctcaaacaaatttattatctgagttgagattaaaaatgcacttttttgctcggggttcaagctctccttgcttgatgggagcataagtcacataactaaatacttttaagtgctcatattttgtgttgactgaaatttatgacaacttgaaataatatatataaaaaatatttatgagaacttaatgagatgaggtaaatggtcaatttaagcactttagctattttttttttttagctaaatagcattctaattctctatctcatttatcatttcgttattaattttattttttattcatgttaaagtaatattgaaagtatatataaaattaatgctagctata

SEQ ID NO: 248998 - DNA, 497 bp, Cannabis indica
aaaaaaaaaaaaaaacaactatgaaataccatttattgagccaaaaaaaaaaaactatcaaataccatttcaaaaaatgaaaacaaaaaaaaaaccaactatgaaataatatttcacactagtatcacttgtgttgagtagcattttatccttaatattttctttattaatttcatatcatattacaataaatatgagtattatttacctaaaaactaatcctaggtgatttggatatcaatgtttgacatgtggcaagaagaaaaatatttacggagttgagtagtcctgagtcatagcaattagtttgggaggggtccctagctctgtgcctaggttgactctgtgaacttcaaaatgggtatttggatcccgctaagttgtttccaactcaccatccttcaatattatgaactaagaagaatccaagttagaggcctgaaaactgaaaagagacaaaacagaaagtcaactcgggcgcttagggttttcaccca

SEQ ID NO: 248999 - DNA, 902 bp, Cannabis indica
tattaagaaatgtcctggacagtaaagaaaatatctgtatttagttaagtcagtatttagctcttcctaaaccctaaacccttatcaaaaaaaaatctaagccacaaacagccattccaaaattcattcaactcattaaaactcagtaccaaaagaccattaaggtcataaggtttgataatgccaaagaatttcagtttgagaaatcgtttagttctcttgggattgtgcagcaacattcttgcattcatagacctcaacgaaattctgttgttgagaggaaacatcaacacttgttgaatattgctcgagcacttttgtttcaatcctatattcatttatcctattgggatgaatgtgtggctactgtttcatatttaatcaatataactcccacaccaaacttacaaaatgtttccccttttgagattctcaagtccaaaccacccaattatgatcatttaaaagcctttggatgtttagcctattcctctacatcacttaattttggaacaaaatttttgccaagagttgcaccatctattttcataggctatcctactgctatgaaagcttacaagcttttagatttgaattctaacaaggtgttttgttcaaaagatgtttactttcatgaaatttttttcccttttacataaatgattctctttctgctgaatatcaagatttcttttccaaaactgttgctaaacctactgattctgatgttcaacatgaaagtgtttctaattctgatgcttcatcttataaccggcctgttagaactacttataagccttcatatttgcaagattatcactgttttcttgctaaaactaactcctctgttgtgtctcaaaatccttcattagttaccccttactctatttctcaagtgcttg

SEQ ID NO: 249000 - DNA, 1010 bp, Cannabis indica
atataaattttgttaatagttaaatgtatgacaactatatatgttctaactttataaaaatctagtatatatatgtatgacaactatatgttctaactttataaatttagctaagattatacttgctagtaaaaaacaaaagtaaaactaagctggaaaatattttgtatagtagtcgacccattcttcacgcacagtgttaatatcatctattgtatactccgtcttaccatcacagtgcaatataagagtaaatcaatatgttagtttgttaataattaaaatttatcaaatttaaaagaatatgttaattactcacgtgtttcgaaagatattcttttggatcttttgccatagttaaatctctcattagccgcatgacgtaaaaactgcacacagtgtcattaggttgcttaaggcccaacatatcatataatatgtattaatatttaatttatacataaaataaatgatcaaatgaaatacttttcaattttagcatcatataccttcactggaaaccaaattattttcttactctttcctcttggattgaaagcatcatttatgccaaatgcccttaacaatgaaataaattttcaattagacaatacaatgattataaacattataagatttgcatattagataaaatgaatgtaaaacttacgttctaaccacaatcaaggcatcctcccttagattgctaccagccgaatcgtagaaatagcattccttgtgttatcccaaatttggcactctgacgtggcatcacgagaatggtgacacgtggactctacttagagcatctgttcggatcaacatgccgagcagaatgcctcgctggcatattcaaaatggaatactcaacgagctgtgcagaatgagcaacacttagcgaattcgactaaacgcatcgtgagtcactagctcaatccctataactcagggatcaacttacgtggatgtggcatacatacgatcccgctatcagtgtattcagcctcaat

SEQ ID NO: 249001 - DNA, 1057 bp, Cannabis indica
ttgctctccatatatgatcagcaatttcatcacggacattagccatttcacgaatttgatctcttgaaatgctaaactcaacactatcattcaaagtttcgtgggtgctttgtatagtagtatcttgtacttcaggaatgtcttcatctccatcaaaatacatatctttttctgcattcgtccttataaaattgtgaatcccacaacatgcaatcacaatgtacttctgtatttacagatcatacgaaggcatttgcaaaaaagctacaactccagagcttggtttagtattattaataactatttgagttcaacctactcattaaaatatattataaaagggaaaaaacaaagcacaatgaaacaatcaaactacagtgaagaacatagcattaaacatatcatcatttttttcttaagtgagtcgaatcaaaacctagacatgtcaatcaaataacaacttgtcacttaggaatacatgccttttattaatgaatgtcatgatggagaattagtcaattagtacagcattttatgagtatctgaagaatgcgaactttgttgttatctcttgacactatcatgctaattgctaaatttggaactatcctgcatgatcaatttcatgaataaaatatacagaattaaagaataatattacaaacataaatagaattgtcttctattctcttagttcagtaaattgttctatgaaatataatatgtgaaaatgtacaaagaggtttttctgaaagcacaggaaattaaactcccctaaaagcacagattctgtaataatctcatccccacttactgaaaagttcttggacaagaaagaaccaaaaagtagatgatttaatagtacttattaatttaagcttgcatttcaattggttagacgcctttaaaaagcatgatgtgattctatattcaacaatgtcaggtttcgatctagctagtttgcctatatatataagagaaattgttatatcgaaattaaaaacaataaaattggagtcgaattaccgatagaataatctggctgagtcgcggacaa

SEQ ID NO: 249002 - DNA, 716 bp, Cannabis indica
ataggcctacatcgagagtaatcttgagcggaaggaacatgatggaccgttaagggagaattaccggattcggatgtgctggcatcaggagccccagtattgggaaaggagagcagcaagttaggccgaggaggcgcccggtctttacccgcttctatctgaagggtcctcccagcagcagattgagccttaatataggctaactcatgttccctcctaaagaggcacttctggtaccggttctccgctgaggcaataatgtccacccggagtgccttttcagcgttcgggttacgaatgtttgggcagaggaccttagagaggttaaagtcatccacggattggctcctcgagataagctttcccttccggcaattctccgttgtgaccaagtctcccacgttaaggccatttttgtcatcaatggagaagaccttagcgtgccagaggaaaagctgggtaggagcagtgcgatgcaatggagggatcctgacccactctgtgagcagttttgggcgatcaacggcttgaaagtcgaaagaaaagaagaaacggtggcggtactccttgacattcttttgaaagttataagggaccggacgctcatcggtaggatgggcccgaagtgtgaaaaaacagtccttaaacttatcccccttcttggggacaaatacaagttcataaaaatataaaatctcagtcgggctaggtgaagc

SEQ ID NO: 249003 - DNA, 508 bp, Cannabis indica
ctacttcaagcctcatatcaaatccatttaaagagaaaagtgaacccttcttaaacagcatgtgggaaacatatctttatatggataagggaaaaagagcaaacagtttacctattgtctctatcataaaggattatttgatgcgtatcccagattttgttggtctgcactgaataattaacattaatagtattttcaataatagtactcttcaaaagttttaaaaaatttacacaatatttaaaaatataatattctattatattattctttcatatcacgtttgacactcttacttttaaaaatactttaataatataatatctttaaaaatattattataatcacatattatttaatatattatttattttttgattataaatattatcatactaaattttaaagagaaaatcatcatatatcatactaagaaccaataagtccttttaaggaaattggtatattgatcttctcataaattcctaatgaatctttttgtttaata

SEQ ID NO: 249004 - DNA, 596 bp, Cannabis indica
tttttaaaaaaaaaaaggaaatttgaatctaccctaaattacttttcaattttttgtgttcagtctcagcttcttcttctccgtcccctttctatatgtggcgaaatcctggggcggctcttccatcttaacaattcctgggttttcactactaaagctaaacacagttctttcacagaaaaaacccctaaacttctctattgtggccgctccaatggggtcctccggcttgcccacttcgtcggttcccttcctctcatctcaataaggtatcttgtgcgttttattgctcacattgttgttctggattccaaccctgttccttgaagcattgcacgaaaagtactgagacatctacctttcactatagaaaaaataacagattccttgttaatgctgctgctgaacatcctcttgaatcggagccaaaaaaatgttttgaattctgctaaagatgccttagatgctttctgcaggttttctcgactgcatacagccataggcacggtatgcttaaatttaatgcaatcgatcccacttagccattttattaatctcattcatttgggcattaatttaatgataatattgttttg

SEQ ID NO: 249005 - DNA, 1235 bp, Cannabis indica
tcctatccaagaagctcttcctgcgagtgttttagtctgtgattccagaagctctcatactcgctcccagaaacacctatacttaagttgacgtggagatctcgctcataattaaatagagtttgttaagccctgactaacttaacaacttaacttcttgcagccactgattttaagatcttttagtcataatataggaataataatttataattagtcacaacctttttacttttagtcacaaattttgttgtgacgaaaagttaattttttttgtagttttagaagttaataatttgtaactttgtttctatttgtcatatatggtttacattttatcgatataaacattattacattatactattctatcatcatatcccaaagagaaatgctaaaaagcattaatggtgccaagtaagtactttcctacgtgtcaatatcgctattggtctaattaagtatcgggtcttatatagtttaatataatagtttttaaggagtatcgctagccaatcgcaagacgatacgtcttaagggtgctagacaccactggtgcccaataataatgctctataccaaaactctttttctaattgtcttccccatgcaccatacacgtggcatctaaataggtgttctttatttatttatttatttttttactttttaacatgattcgttgaaatagtttgaaacctctcataaaaccataacaagtaattaatcacatccaaacaatgtctcaaattttccttctctcctttttgccacatttatgaaataaaacatatacgtttcttatttaccaatataaaaaaggtaacataacaacacatcgatcttcacattattattagaaataaaaaaaaaaaaagaaaactcaaatcaaattaaaaataaaaaccatgaaatcttttctaagctctatgcttcttttagtactactactccttgcattatcatctatagtaaaagccaagcaccaagtctctctagtgaattttatcgatttaaacacgacgctaactcttcactgccaatcgaaagacgacgatcttggtatgcatgagttgtttttcggggaaagttttaaatggagttttagaataaatttcatgagaacaactcttttcttttgtgacatgagttgggtttatgataaggaaaaaatggtgatgatgagaggtcattttgatgtgtttgtgaccaaaagagatgcttttaggtgtctt

SEQ ID NO: 249006 - DNA, 533 bp, Cannabis indica
agtaatttaaagtataactttatcattacttgaaatagaaaaaagattgaaattccattaatatatattttaaatttacataatttttgaggaaataaacaattacaaacaagataattattgataatatgatttcaaatgtttgttgtttcaagtgtattttatcagcgaactattcaaccatgctaatttataaactcttggtgctataacaattttaattacatatgaaccttcccaattgtgattaaataatcttgctgcagaatctcgtgtatttgtgaatacttgttgcaatactagatcttcaattttaaagaatctttcctttactcttttattgaagtgtctcgtgatcctttgttggtatgcaacatttagcacttgtgacttctctctcatttcttcaagcaagtctaatgattctctgagtaactcttagttttatcttgatcataaaactctcgtctgtaggacaagatgttaacttctacgagttacgttgcttctgaaccaaaagctagtgagaagag

SEQ ID NO: 249007 - DNA, 803 bp, Cannabis indica
tatatttaggtattacaaattattttaaaaaaattattaataaattaaattcaattgctattgctttagttattagtaaagattcatcaaaataagttggaagaaaagagcttggagatttttattccgaagttatagttcaagttcctatcaagtgtgatgagcaattaattagagcatatggacaatttaagataattggtaaagttgttggtgtacctattgtatggccgacgacctttttggtaagttgaatatactttttaagtcatttatcatctattgaacgtcatattatatatacttaaaaagattatttgtttgtttatattgtgttaaaaattatgcagatttcagaagaatcacatacacaactatgattcaatgatgtgactttgttattttagaagaatagagtcatgtaaatatatgtatatatatttatatatatttgttggtgttgtatagataatttgtgtataaattttattgttgttgatgtttgttgtaagaacacaaattattatatactatacttttatattattaaaatatatgtgtagaaaatttattttattattaattagaatgttggtttaatattatataagtaaatataaatatattaaatattatttatacataaaaactatataaaattgattatgtaattcttaaataaacaacttttttaaaaatagtgtacatgactcttaaaaatataatatgagtattatctttaatcaaaataaattatatattatataaaaaaaataatgatatttttaaaaaatgtcactaat

SEQ ID NO: 249008 - DNA, 511 bp, Cannabis indica
aaaatgactaaaaaattattttctattctacacttttaaaaatataattttaaaaattaaaaactaaaaaacacagccaaacaaggtatattttgatgttttctattttctaattttttaaaactcaatttttaaaaaattgtttttaaatttttttgctaaacaacccctattagtttttaaaaacacaaaacaatttttaactttggtgaccaaaacaagatagtctattttggaaagtctaccaaagagcaccagttcaaatctcggcataaagcttctgcttctgcatagattagaggctgcctactggaaattgatgacagacaagctgccacaacttcaccttgggaatttttaacaacccattaatagcagcatcaatatttaatttaaatcttcctagaggaggtagtttctccaattgatcataacatgaagacttccttaaactagaagcagtattaggaaccaatctatcaagtcttgagtctgaacattgtcctgcaaa

SEQ ID NO: 249009 - DNA, 870 bp, Cannabis indica
tgaaacataaattaaaatagaaccgattgcataacaaaatgattaaaacaaataacacacaatatcataaaaatcaattttattaaaaaaaaaaagacagaatcagttccaaaaatactaatacataaattaaaaattgaattggttcaacagcaaaattaataataataaaaaaataactcggtttcatttttcattacctttgcgaacatttgtgagcatgacaaaagccaagccactttacttagaaatcttcttcattaacatgttcttaccaataacaaatgtactatctagtgtcgattgatttcgttgttgtttccttccattatgcccaaaagagtatccaatacaacatcgttcctaatagagtaagaacactccttttgcttcaacctttggttgataattcccttaataagctctaatattctactaaagtgaatcttcattcgacgccttatacccaaagggtcaatcttcttaagtaaagggaagtagtcactcaagtttggtgcaccaccctctttcatgatattccaactgatttccttaaaatctctagatgttaagggtatatggttttgttttttctgttagtgacagttgtaacagttagtctgttattagagtttgttaggattagtttgtttatgtttgtaactaattctcttccaactctctctagcttgctttgtattcagttactatataaaccatgtacgattaacacttaattaacaagattgctctttgtttcaacaatcttcctttactttctgtcagtctttcttcctttctagcctttcttcttgctctgttttccctgttactatggcataactgttggaatttattttaccaggatct

SEQ ID NO: 249010 - DNA, 820 bp, Cannabis indica
tttatttttatttttattttgctttaaatataattaatattttcaaaagcctaattttttaaaattttacatgtaataaattttaagatacataatgaaaattaaaaaattagatacaaaagtgtaatattttaaaaatattaagtatactcaccacccaaggtagataaaatattaaggttatgttgatcatgaacattgtatgttttttttttagagttctggttctagagccttcatgatgcatgctctctggtttccctccagtacccaaactgggtttttggtccacccaaattggttttgtggtggtatttggtacctcttttggggttttaatcatcatcatttcattttctccttcattaattgcaacattaatagtcctgacgaatattatctccaaaatctttcttcagaccaaaatttatactgcatttattgtcttccagtttctcgtttaggccttaatttgtatctgcatttattatcttcttctcttttcttctaccaagtatctaactatcaaatcaccagatatcttttaaacccaatttccttcattaaggtggcggcgaggagaatcgaaggagttgatgatgcttgggagaatggagtaatcatgatatctattaagattagaggccaagctatgatcagaggcaagccaagaggtactcttcatagtctattttattccttatataaagatagatttaggttaatttgtttttcaccatctctcttctgtatcttctctctctctgtaattgttctgggtaatagttctaagatggatacacttaatccttttccttct

SEQ ID NO: 249011 - DNA, 533 bp, Cannabis indica
gtccttaaaataggtgatcactacacttattgagtaaaatcaatgtgtattaggctttggctcacaaaaaaaatgaagaaagaccgactaaaagcatgaagaaacgggatgaaattctacttgaagaactctaagatcataagaaatgggataatactcaagaacaacaatgaagtttatattacttattagagacgataaacaattctcatccaacattgtatattattatgtttagatttttttaaaagcactcccatattgtgctactgtatatttagacctttatattcgaataaaatttcaattttatgtgatctcttctattttatttttctcttttatttaaaaacatgtatacatcaatttttttataattatttttatgccataagttatatataattttagtacaatatataaatttctttatgctccaatcatttttaacaaaattcatatattattaataattagatacaaaacattgtttataaatttatatcattttttttatttttaacataattatt

SEQ ID NO: 249012 - DNA, 1571 bp, Cannabis indica
actctctatctttccaacattatttccttcttaccaaacatagtgcaaatgtaatttgtgagaatacaaatcactaaatatattttttcttgtggaatttattaatttttttgacgatatttatttacacaataattgtaaattaggtcaaagacaatccttcacgtgatttcaaaagcatgtatcgccacatatcgaaaggatcatggacattctcagatcaagatcatggatggcaactttctgattgtactgccgaaggtttaaaggttaattatttagcttaattaatttcatcaccaaattaattctattttttattaatattattaggataaatataattttgaaccttgtgtttttgtaaaagttactgattggaccatctgttttgttaaatgacaattcaaaccatgtatttgactcatttttttgtcaattttcttttttatataatcaacttgaatctaatatttagcacgagcctgatcataacacattcatttaagttttaatgtgacaaaaattaaactcaaggtctattatactattttgaaaaatacagagtttaaattgtcatttaacaaaacagatggtccaactgataagagcctattctttactcatatgattattcactttacatatttcactgtaatcattatgtcttcgttttacacgctacagtgttacttattgatgtccatgatgccaccagaaattgttggagaaactatggaagttgagaaattatatgattctgttaacattttactttcattacaggtgagattattctattaacatcttaattaataaaattaaatgtaattagtcaatatataatctagttgactttgacttattttagagtaaaaatggtggtgaggcagcttgggagcctgctagatcaccagcttggttggaggtaattaattagtgtatatagttcaatataaaacatatgattgcaaataataataataataataataacgtttgaattaattgaaattcagatgttgaatcccgtcgaatttcttgaagaaattgttatcgagcacgagtatgtagaatgcacttcggctacaattcaagctttagtactattcaaaaagttgtaccctaagcatagggaacaagaaattcagatgttcataacaagagcggtgaaatatctagaaaacatacaaagacatgacggttcatggtttgcgtcatcatcatcattatttataagtgttttcttcgataaacaaatgaaatattggaataattaatatattattgttgatattgtgtaaatataggtatggaaattggggaatttgtttcacatatgcatcgtggtttgccctaggagcactagccgcggtcggtaaaacatacaacaacagttcaactatgcgtaagggagtagaattcctactcgaaaaacaaactatcgatggcggttggggagaaagctatctttcatgttcaaaaaaggtatcattttcaacattcctaatatcgagtcttcatcttttgaatttataaacactttctttcaaaaaaaaaataataataat

SEQ ID NO: 249013 - DNA, 588 bp, Cannabis indica
ttaactcgtactcatcaataaatgttcttaatcaaattccaaacggcagagaaaattgcttataatcaagttcttcactttacaatactatacactcaaaaatctaaatttcaacatttactactgaatgtttataatttcaatatttcaacatacctgccttcatcagtcaagaagccaagaaacttttaattgttccagaaagagaatttcaacagtgacaaatatgcaatgtagaaagatgcagagtggacattgatcttatacatacaagatatgaaaacataaagcttcggtagaagcaattcccatcaccccgtgttctccgaatagtcgcatattgttcactaagcacctgagagaagtgatatctagcatttcagtttctctgcatcccataacatcaatcacaacctttgaaaacatacagaattcaactaactctgatataaattaaaataagaatgtccaaattgtaataggaaaatgaatacaataaataattaaagaaaacccaatcgtagatgtacaacaggaaaaacctaatcatattttttttggatttaataggatttattttatttattt

SEQ ID NO: 249014 - DNA, 2327 bp, Cannabis indica
catatgtattgttgtcgaagccaaaacctctaccctatgcctttttagatagaactattttggttctctatagttgactttgcggggatgcagagtagctcaaaacacaccatgcttgagctgctgtcatttcaaaaaagttccttccctatcaaatatttggaggtgaaccttagaccaattgtgaaaaactccaagctaaactacatacttgggcaagttgacacctttcatttggagattgaactctcttaatcaactctgtcttaattggcattagaagctattgaaagaatatattcatgcttaccacaaaagatatgtaaagagattgacgggatttgtaggaactttctttggggtggaaaggataataccagtaaaatgcatctggcttcatgggatttaggggtgttataaattagtttggtccgaatttttaattttttcaaactaaattagtattacgatttcttaaaaatttaaaaccaaaccaaaccaattaaatgatcaaaccaaactaaaccaatctactcaaaaacagattagtttggttcaaaaccatagtttgtatttcgtagtcattttgaacttttttaacaataattttttattttttcagtaatttttctacttttagttagtttatagtacatgaataataataaattattattataacaatattaagtcaatattaatattttatctaaaattattctcaaatattaacatttctttcaaaaatatatatattaagcgtatataaaataattagacgaattaatttagtttgaactactactgagatttttaaaactgtgatcgaaccagaaaatttaaaacggtccagattaaccaagaaattcacaccgaattcatttagtccggtctcaaatagtttggtctggattgattggagtttagaactacagacggcagattatatgaacatctctagtgggattgtgtgtgtaagctaaaagtttttaagggtctgggacttccgtgatggatccaaatagaataaagcagctattacaaagtgcatttgagcagtagctttaaagcaagattatttatagattaaatgggtatatttcattgtatatacttaaatgattaggatttgtggtctcatgaacttaaccaagatgtgagctgatattagaaaaagctcatgagacttagggggagacattctccctgaatgagatccatgctgcgtgtgttgagaacatattcatagtaagtaaagtgtatgaaaacttcctacataatggtaatcgtgttgcttatgtgggtgtcgtgtggtgctctcttttcgccctaaagcatcgattcattgtttggcaagccttaaatggccacctttaatttgacgagggacaaactcattaggagacaaataagaattgattcccctctttgtcctgtttgtgaattagagcttgagagtacaagctcattatgagacaaataagaactgatttcccctctttgtcttgtttgtgaattagagcttgagagttactctcacctctttttctaatgcccattctcttggagagttatgcgcctcatcgaacaatgcctaggaagcatgttatggcctaatgtctatgaggaatgcgcctcatcgaacaatggctaggaagcatgttatggcctaatgtctatgaggaatggattgagtggttgaattacaagaagcccaagaaccttttgaacaatatcttctatgcaacaatggtgagttgctacatatagtatatggttgaataaaaatttatgtgtgtttgaaggtaaatttatgtcatctcactgttgatctacttgtcaaagagaactttaagacaaggattttatttgttaagatttctaaattatccaaaatggagaaataaattgtacaatgtgttaagaatttgtaaaaatggttgggtttgaaggagtgtgccttagatttgatgtaatttgttagcattgattaataaactctatatcttgataaaaaaagaaaaaagaataaaaaacttaacttcaaaattatcattattgtttttgctaaattatcaatcgaaaaattcattgtttctcttatctcatttattggttaattttttttttcaaaattgacttcgcaacatgtaactcagatgattctgagtttattaatgatgatgaaacacgttaaaagaaatactaattttgaatgtatagttagtagggttgtacaaaaaattagtaaattgtccaaatcgaataatccgcccaaattaaattgaaaaaaccgataaaaattacaaaccgaaataacccgaaaa

SEQ ID NO: 249015 - DNA, 1259 bp, Cannabis indica
tgcaatgtgatgtataaagtcatatctaaaatagtagcaaatagaattaaacccgccctcccctctcttatttgccctacgcaggctgcatttatcttgggtaagaatatccaagataataatgtgattatgcaagagattatccactcattcaaccggaaaaaagggaaggaggggtactttgccattaaaattgatctcgtcaaagcttatgatagattgagttggaaattcatagatcataatcttgactgttttggattcccacagaagttccgccattgggtttctcagtgcatctccaccaccactctcaacatttgcctaaatgggggtcaggttggtaagattatgccttcttgtgggattatgcagggtgaccctctctccccctatctcttcatatgtgctgctgaagtttcatctagactattagaagaggcccttggaaaggggaatattcaaggcattcagctgagtaggggtggtccgatcctttcccatattttctttgctgacgatcttattctagtagggcgtgccaatttgagagaagctcaaagttactggagctgccttgagaaattttgtgattggtcaggccaaaaagctaataaactcaaaacgtctatcttcttcggcaagaataccctggagggcatgagaaggggtattaaggacaccttgagaattaactatccggatggtgtcattaagtatctaggtcttcccctattcagatctaaacaaaaggatactgattttaactttatactgggcaatcttacctctaaactacaaggatggaaggcaaaaactttatccaaggcgggtcggcgacccttatcaagtctgtgggcttggctttgccaatctatgccatgcagactactaagctccctaaccggcttgttaataggattgatggtcttatccgagatttctggtggggattagagaaagggaaccatggtcttcacctaacagcttgggataagctttgtctccccaagtccttggggggtcttggttttcggaaaactaaggaaatgaaccttgcttttttagccaagtgggggtggaaaattttgaatgggtgccaatctctgtgctgcaagatcttggaggctaagtatctcaagggaaaggattttctcagctgtaactacaaggactctgattcttagttttggaaaaatattgtaaaagccaacacaattctgagaaaggggcctgtaaagtggtcgctaatggtagag

SEQ ID NO: 249016 - DNA, 785 bp, Cannabis indica
ttacaatactgagctaaaggagcatattatcgttaacttctggaccaaaattatgtgattttgaaatgtgaagcttcatatgttacatttcttattgtttttgttttggactctcggcactatttaaatttattcattctttcacaataagctaaattgggagaaagtgcttttttgttttaatgtacactggaatgaatttcttctttagaattatgagtatttatgtgacgaaaataagagaaggtggaatgcactttttgtttattaccatatatttttatttagttaatgatgttatgttttgtaatgttattcttatttgttcaatttaattatgttacttttaaacaaagaatagagttatctacatattcgtgttaaatcttttaactattatagtttatttaattgaataacatttttaactagagttttagtaattggataaatgttatgtttggtgtgatttatcaaaaaaaaaaaaaaacatttttaactactttattgtataaatattatatttagtaattggataaatgttatgtttagaaaagaatagggatgtttatccaatccaatatgccctaagtacagattacatattttggatccaatctaattcggatattattttaaatctaatttaattttaagttatttatatttaattaaatgagtaaaaaaaaaaaagttaaaaaaccaaaatttaactaaacattaaaaaaacaatagtacactcccactaagtcatgtcataatagatatgtatatatatatatata

SEQ ID NO: 249017 - DNA, 549 bp, Cannabis indica
ccgcactttgaatttaaagaatctgttcacagcaatacgattaactttcggttcttggatttctacaatttcccccgccattcctgccaatctagccatatttgattttgttatggcctttacttggagattataaacccgcccagaaatggtaaatgacctcaactctttttcccattccgttggaatacccgtcatttgatccaaaataagaaaaccagcattcaaaacccatgtggatcttcccaggatcctctccaacgagttgttctccgagaaagaaagaaccaagaacatggctttgtcagagatcttctttattttcaggtcccaatcattgtcccccaaattccagagtcgacaaaggatattcttcagtagagatcgggtgaaaggtttcatggtgcacaaacgaccaagaaggcaagatttgccaatgtcctccacccttgcctcgtttatctcccagccgtcttcatttgtgacagttaatttgctggtgcgatccaacaattcctccatttgagacaggcttgaagagcacatctt

SEQ ID NO: 249018 - DNA, 514 bp, Cannabis indica
ttatacaataatctattaataattaatgttagtatgaactcttatttatttcttttcttttcaattttgttcttcattttctcaattttaagtgtactattacaaaccaattaatttagtatattatatgcatataaatatttcagttataagattaaattaatataatatgactttatattattctttttctatttttatcatcattttttttttcacaatttggatgcacaaaaaatacactgaatttaattttatcattctccatattattgaagatagatctatgtgtgctttctctttgaagttattatgaaggtacactaaaattttaaaattaatatatagttttttttcttttctaaattcatttgcttaaaatattattatattatggtacattactatatgttcaatgttacatacgtgattaaaggaagtttgttaattattattaagttttgcttatgtattattattaagttttgatattatgttacttttaatgagtagg

SEQ ID NO: 249019 - DNA, 807 bp, Cannabis indica
cagttgcatgaacattaagttaaagtgacagccccaccatttcaagaactcagatagttgtcatagtaaaaatatgaataacctaaagctaaaaaaggcctaagagttaaaactatataaaacatggtcataaaggttacctatggcttagataaagctattctaagcatgcgagtatttgaggtgtttttccaggaactagcgagtattcaagatgtttatcttaaaactcgcaaatattcgaggtgttcttcttgaaactcgcgaatattcaagttttaggcacttattttccaaaagaaaaccacattttgcatgaactacagaatttaggttctatcattccatatatttcctactcctaaaaacaaaaatgcatacaaatacccaaagaagagacaacgatgataggaaaagtaaattactaacctcaaaatgctaatttccctgtgtaatcttgcaaatgatggaatctcaggaagcaactttcgtaggaagaaatttgaaaggatgcaaaaggatttttggaagatttgaattcctaaggaagagaggaaaatgatgaaaatgggagggaaatgaatgggaaccatttcgtatcaagaggtttaaatactagtatcactcatttattgggatggagacgtttggcaaaggaatgcctaggtctctcaatccaacggttactagtgaacacgcctgcacgtaccccaaagggttttggtgacatggcatctcaaaagaataaaataataattacagccatcttatcaaaatcctcgacaagacaaccaagagtcaccatct

SEQ ID NO: 249020 - DNA, 511 bp, Cannabis indica
tagtttctgattccctttgttatctttatcccactttgtatgcgtaaatcaactttgatttcttagaaagcaaataaaagattgaattctaaagaatgaagttagaagtttagttattagatattcatagagagtttatacattcgaaactggttttcaaagtttgtatcgtttttagattataattttttgcattatatttttttattatgttgttgatgaaattgattttttttttctgttacttgtaatgaaataattagtttatccaattaagggtgcacaaagtatgggccaaaccattcaaccaggccaaaacccattttttgtagtaaagggttatattaagagtaggccatggctcattgggttgtaaagcgatagaccatataaaatatattttacatctacaaaatatatacaaatatatattttacgtttttatacataaataaattatattgtgaattaaccaaaatacatcactaacatgtagtctatagttacccta

SEQ ID NO: 249021 - DNA, 683 bp, Cannabis indica
acaccttcatcccacaaattttttagatcatctatcaagagggccaaatagacatctatgtcattaccacgttgtttaggtcctaatatcaacaatgtcaacaatgtgaattttctcttcatacacaaccatagtggtagatagtagataacaagcataactggccaggaactatgcttactggtaagagatgagtaaggattaaacccatcagtagcaagacctagacgaatattacaaagttcatttgcaaaagaaggccacttcatattaactttcttccattgcaaagtgtcagctggatgtcttaatttatcgtcatctattctctcatttgcatgccacgacaaacttttggcatgtttggcatttttaaataaccgaataaaacgaggaataggcagaaggtaccacaataccttggcaggtactccttccttaacatccacaccatttcttttctttttccatcgtgactctccacaagtaggacatgattttaaatttgacaattctttatgatacaacatgcaatcattaggacatgcatggattttcttatattccatgcttaatgtacatattgtctttttgacctcgtaaatgaaagcgacatctcattttttccggcaataagtcattcaaaaaaataagtaattctgaacaactagtatcactccaac

SEQ ID NO: 249022 - DNA, 1130 bp, Cannabis indica
atataattgaattgtattagatttaattttattattattatttaaattaataactaggcaaaagctactctaatacaactctaagtaaatatgtattacatgttactaatacctaatacctaatgtatatatatggcagcaatatatgtggatgaagatgacatagcaaagtatacaatcaaaaccatagatgatcctcgaactatgaataagactgtgtatcttaggccacctaagaatattttgtcccaaagagaagttgttcaagtttgggagaacctcattggcaaagagttgcacaagtcatcaatctcaaagcaagagtttctagctaatttgaaaggtgagaccttaatataaaatatatatttattatgattattttcttcctaattactagttcttatatcaaaatcacatgttggcctaacgtaattacttgtttgattttaatttgtatggaaatgaagatttagattatacttggcaagttggaatggggcattactacaatgtgttttttgaaggttgcctaacaaattttgaaataggcgacgaaggggtcgaggcaactcaactttatccagaaatcaagtatgtttcggtatatgtttacatgaagcgctatctctaataaatgacacatatagaccttaatataattttaagtatataataaagtctgttagggtttttcattcttgaatccttaacttccgaaagaccttccctgagctcaggcgtggcttggttagggtctgtggttttactactgcaattagtcttgtcactgtgatatagttttgtgtgtcttttatttaggttactgtgataagtcttatctctgtaacatggttttatttttgtttcattgttggttcgttttctttatcaaatcattgttagcggttgagaacaacaagctttttacggtttaatgcgttattaatagtgcagttacgtaccttgtattgcataatagtttattttatttaagtttcttttgtaaaatatgatttgatcatcagatggccgataggttgacttgttctataaccctgatcatattttcaacggaggagatcacgattggattgcagattattattttaattgattggtattaatat

SEQ ID NO: 249023 - DNA, 624 bp, Cannabis indica
tggctcagtagaatcacatttttgtattttgatatggcggggcattttggttagacattgggaatgtcaggagtaatcgggaatttagaattgctcaaaatacccttagtacccttttaatgtcaacttagagtgagagggcaaaaaggtcattttgcccatttgtaatttgtctcttatggatttttaattatgttagtaatctgattttttctaacttggtttggctgaaacaaaataagggaaatcatttttatttcattttattcaaaattagaaaagttgagaaaaatcacatttttcctctctcaagctctctttctctctctcgaaaatcctaggggctgctagggtttgattttgttcttcaattcagcaagttttcaacaattcttagtgtaattcaagttgaggtaatctttgaacaacctcctctttgttttcttgaagtttaagaaatgtgtatttttgcatgcttgatgattttgtggctgtggctgttgtttatgtttgttgttgatttctaaagcttaattatgtgttaaaataaagatttaagcaggtttttgtagttgttagatggttttaagtaagtttggagtttgaactcaaaactttggtttt

SEQ ID NO: 249024 - DNA, 1365 bp, Cannabis indica
tagtgtaaagcaaaaaaccagataatgaatcaatgataccaaatagactagagcacaaaccgagcaattgcagaaaaggataccatgttttggcatcaactctgttttgtatcacaatgtaaataagtaaaaagaaaaagaaaaagaatacctgcccgccagtgtcaggcaaacctaaaacatttgcttgcccaaagtatccatgtggagacaaaatgacaacattaaacaccataggcagtctcccaaggaatgtctccaatgtagaaggatcaggagcctgaagaatatccaaaagaagatgcatcatctccagcactcgttctgcagtgtctccccaacctctctcaaaaccatatccttgtaaactacattgaagtgacaagagccaaaacaatatcaagaaacatcatcaaaaatgataacgaatggttttatgtgacagagaagacgtaattctataaatagtatttaaggcttacacatattcaaactcagtatataacgtttcaggtggaagtttagaaagatagtcctcagccttagctaaagcattttgaaggcgcaaaacgcttgttacacgatcattcaacattaatgcctaaaacaaaatgatcacattatttagtgctatgcaaagtcctcacaacattagattctctaatcagtaacaatttaataaggttagaacttagagatatcacataaacaaaaaacacttacacgtcctttgtatttgtgagcacgaaggaaatcaagtagtggggccaagcagtctttgttccggaacatatttgaagagaggtggcggttgagaaattggacaccattaccaatggatgaagaccggttaggacgaggaaaagatgcattgaatggctcaaagtcgagctcgagaacaaattttccatgatttctatgcatgtgaaaaaccaaaaataaattagtttgaagcaagatacttgtattgtatgggtaaagagccagggaccaaaacccaagcatcaaattttggaggtaaagaaggagggtacttactgctcgcttactagatcttctttgaagtgaagatactcagcaacagttaactgttccacactaagctcattgacattaacacgaacgaattcccaaacaccaggtcttgggcgaacagcaatggccacaaatgggaggcagaacaatggcttcctgtcaccacaaatttaattcattagaaaaagttaattaagaaataacaaacaaaaaatcccattttcattgcttgtaccaaagcaaaagagttcagtaacaactatctgaagacagcccacccctctatttgggaaaatagtgatcttactgagaaacaatcactaaaagagg

SEQ ID NO: 249025 - DNA, 580 bp, Cannabis indica
gtgaaaatgaacatacatgtgatgttcctcctaagctcagttttccattatgatgattatgtgaagaaaagtggtatagttttttgttgatgatattgtaaacccaacactattatatataatggactatttgtcatgcataataatctcattcttctcacttgtttggttaagtaattaacacttattccttgtttggctgcttcatttcaatgcaacctccatgtgcaatattagtatatgctaccggattccttgtgtatattccacacagattggtttgcccaaatggggaatgaactcaactccaactctctaatcactctatctatctatctatatatatctattatgtagttatatgttttctgaaaaaaaaaaaatgggatttagaatatctaaatatattttgacaatgcattacaccatcatcatccacgccctctctatttattgtcattaatcagcaattaaagtctacataaataaaacatgaaaaatggcatttcccttgcgtatagtaagagccattatttggtttttgtcttttgtgaccgatgtgatatcccaccacaatttt

SEQ ID NO: 249026 - DNA, 801 bp, Cannabis indica
gataagtccccaacctcaaaaaaatagcgttaatagtcatcaaggtcatactttttatttgtccgttagtcataattttaactgaatcgtttacttttttaaaattgacatgtgtcaaaatattattggtcaaaattattattattttaattttaaaaataaaaataaataaataaattatttaaaaataatttcttttatcttttatttttctttttctttcttttcttcttcgtctttttcttcttctcattgccataaacaatcaatcactaaccccaaccccaaatcagcacaaccatcgtcttcttcttcttcttcttcaataaagatatggccgacggtgagatctgacaatgctctggttcctcttcgataaagagtacataatccttgaagggctgacgaaaatcgagaattctccgagctcaatttgagattttgcttccatatttagccgaaccatggagatgatgagaagagaaaatcatgatcgctgccatcgctgccactgccgtcaccgacatttctgggtttgttgtgtttggggaaatttttaggattttaggaaagaaatcttcttggctgttgttggtgacttcggttactgtttggaccaataatatttcgacacgcagcaattttaaaaagtaaacgactcaattaaaattaagattaacgaataaataaaaagcatgaccttgaaaactattaccgctatttttcgagattggaaacttatctgtatctaaactgaacttgttaaagacttttacagcaaatttccctaattataataag

SEQ ID NO: 249027 - DNA, 569 bp, Cannabis indica
tggatagcggaatcctcaattttgacccaagaaattgttcataagataagaaggaagaaagggatgggtggtttaatggcggtaaagttggatatgcacaaagcatatgacagaatggagtgggagttcctgagaagagtactatctgccaatggttttgatgaaaggtgctgcaaccttctaatgtcttgtgtttgtagtgtgtcctattcagttctccttaacggaagtcccataaagaagtttgtgccacaaagggggttgaggcaaggcgatcccctctctccattccttttcttgatgtgtcaagaagttttgtccaagttactgaatcgggctgaggctaggggcggtatccatgggattaaaattgcaagagactctccatcgattaatcacttaatgtttgctgacgatacaatcctctttacacgagcgaatgaatcagaggcaaaagaactgctgatatgcctaaacacttatgagaagtggtctggccagagctgtagcaaaccaaagaccagtgttctattctctaataacctagaaggagcccgaaagcagtcaat

SEQ ID NO: 249028 - DNA, 1303 bp, Cannabis indica
tataggatagtgacatttttatagccattgattgtgttgacttttgaagatttaaactatttattatggaataacatgtacattatataaattaggaaaaaatattagactctttgggaagcacatattgagcatgtgacactcaactaacacctcattaaataaataaaacaaatagttaatttaacaaaaaaaaaaaaaaaaagataactctaataatacaatttctaaatgtttttttctataaataattttttttctaaaaaaatacattattatttgtttaatgatttattctatatattattctttctactgcatttttttttaaaaataaattaatgtatttataatgaaaaaaaattcttacaaataaaaatatttatatactaatcaattccatatatttaaattattaatcctttttctaatttaatagcaaataatcttttgatttttaaaataaaaattatatatattataatattttattaattattatttattttaaaaaaaaatgtaaacatattagtaataattttatattaatataatatacattttaataaaaaaaaattagagtaatgccaaaagatttattgatgtttagtattttcctaagtgtctattggcacaattaagtatcatgtctcatataatttgattaataacttttaaagagtatcactaaccaatcataggactcacacatctagatagtgataagcaccactaatacctaatagtaacaatgctctataacaaaatgtaagtagaaaataaataaaatataaaattaatgtttaataattaatatatgttttctatcttatagacattagatgcagtgacatcattgtatataagagaatgtgatatacagtggggtggcacagttatatacgcagatgtgtaatgtatgaaatgtgattattataattgttcatatactattttattgttctgtcttactggaccttgacacggatggtggagcttttgactacggggttgaaagttttaaagaaatcaactcttggttttgttggaaaccttttgccacaaggcgtgccttgagatgttgtagggtaccatcaaggttcattttacgacgaaagagccatttgttctcaacagtgctcatgtcaggaagtcgtgggacaaggatccaagtcttatttttcggcaaggcatagaattcgctgtctatggctgcatttcattttggtaagaaaagagcttctgcaacgcttactggtttgagatcagtgagtaaggccaaaggcgatgaggaaaaggcgtg

SEQ ID NO: 249029 - DNA, 707 bp, Cannabis indica
gtgtgcatggaggcgattcagtcctagtgggagacaagctaggttccactgttggcaaaggtgacaacgaaccatcaccagtcaatgcagaagttttgacgaggcgcccagcctttttgcccattgtttcacagcaagcacaatacagagatgatggataccacgaagaagacgaccttggcttaagaagatggatagtttgattgacaaggtgggtgaaatcaaattatggtaaaaagatatttattaccaattagtgaaaaagacaaaaaagcccttagagttatatttcatgaagcccaagcccattaataatattaaaaacacagcagcccaaacccgatttagacaatacgtaaaaaatatggaaactaagaattggagaattaccacaaggaatacacacactcaacttgagaaaaaaatagctcaacagaaacgaacaccaatgcttgaaaaaaatccgtagaaggacacctacacaagccaacatcactagaagcacatgtaagttagtcaacacaatttgagtatatacagggagcaatattagacgcatgtgaggactacaattgacacatgatcaaggttgaatcaattaactaccattcgtgtgtgaagtgacctcatgtgaaacaccaagaagttaatcaaggcacttcactcatctccaaagaaacaaggaagagaaaagagattacagcctc

SEQ ID NO: 249030 - DNA, 586 bp, Cannabis indica
aatccaataaaaaataaacacgaagatgaagataaagacggagacagaggttcggggcctctgggtttttgatgcttgagtactatggaggtccgaccggtcttgggcctctgggtttcatctggatttttgagtaaatgaggaggttcggtggtggaggaaaggaagttcggtggtggtggttgggtagtctcggtgcctgggtctggttggtctcggtggtgcgaggaagaggaagagagacgggagaagagaaagagacagagagagaaggaaaataaaagggagggtattttgggtagaaattgaaaacaatagcatttaattgtatgaattaattaggagtctaaattttgttagagagttatttttttaaacattaaaaataaaatttcccaaatgaatttccaagtcttaattacaatattcaaattattaagagttgagttgctcttgttcttttttttttttttttattaatagttgagttgccttggcagccttattgcaatagttattaaaaaaaaaaagtaaaaaaatttttagtaagaagcgaccaaaaaatggggtcattgcataaatttgt

SEQ ID NO: 249031 - DNA, 4062 bp, Cannabis indica
gattatgcaaaggttttgtaagtatgtctgctatctgaaatgaggagtccacataacgaacttcaagtctcttgtcaagaactctgtttctgataaaatggatgtcgatttcgatatgctttgtgcgagcatggtagacaggatttgcagcaaaggaccctactcctaagttatcacaccacagaactggagttgttgacacaggtatagacaattcagtaaggatagactcaagccatataatctctgaagttgcaagggcaagacttttgtattctgattccgtgcttgaccgtgctacaacactctgcttcttagagcaccaactaacaagattattgccaagaaacatgcaatatccagaggtggattttctgtcatcactgcaaccagcccagtcgacatcggcatatccatgaagatttaagtctgattgttttgtgaaacagaggccaagtgtaggtgtaccaactagatatctcagtattctcttgcatgcgccccaatgatccgaagttggtgtttgaagatactggctaagcttgtttacagcaaacgcaatgtctgacctcgtcattgtgaggtactgcaaagccccaataacactgcgatattgtttaggatcagatagaggagtgcctgaagttcgagagagtttggcacttgcacacatgggagtaggctgagactttgcatctgtcatgttggttttgatgagcagatcactaatatacttggattgagttaaatatatagcattgttgtcccttagaacctcaaacccaagaaagtagtgaaccgagccaagcacttttaaggcaaatttattgtgaagagcagtgatgacattgtggatttcatcattatgatcccctgtgactaatatatcatcaacatataccaaaagcaacagtaatttaccatttgttcttttgtaaaataggctggtgtcagctgttgagttcttaaaaccccattgcagcaaagtatttttcagtgtatcaaaccaggctctaggagcctgtttgagaccataaatcgctttattcagcttgcaaacatgattaggaaagtcagcatccacgaatccttgaggttgatacatatacacatcttctttgagttcaccattgaggaacgcattattgacatcaacctgttgtatatcccatccattaattgcagctagagaaaaaacaatccgaattgtgcaaggttttataactggactaaaggtctcaagaaaatcgagtccaggtatttgttgaaatcctctagctacaagtcgagctttgtgagtgttgacacttccatctgcattgtatttaattctgaaaagccatttattagtaattattttcatgtcatcggttgggggaccaagaatccaagtcttttttcttttaagggcatggaactctttgttcatggccttattccaatgagcaatggcaagggcctgcttaactgaagttggttcaattctattgttaacttcggtaataaaagttttgggtttaaaaacccctgccttggatcgagtaaccatagagtggttgttgacagttggggtgggaatttgaggagtggagacagaagtagttgactcagatggttgaggttgtaaagggtatgggagactagaatctgtcgaaggaagtgtgctagagctgggttgtatagattgatgactgggattgtgagagtgatctgacatagttgggcttgtggaattgtgagaagggattgagtcatgactactattatgtggagagggagtgggattggatggtaagacagtgtgagtagggacaggagttggatatattatagtggggctgggttgagtagatgatgattcaggaaataaggtatgataggaaaactcacattcattgaatgttacacttctagcaatgtagacacgcccactggaatgcaggcagcgataccctttttgagtgtggctgtagccaatgaacacgcacttgctcgatcgaaaagccactttgtgattattgtatggagttaagagagggaaacaagagcacccaaacaccttcatcatattgtaatcaggtgtttggttgtaaagtttctcaaagggtgacatgtaattaagtatgggtgtgggaagccgattgatcaaataagcagcagaagcataggcttcctaccaaaaactgagaggcatatttgcctgagctaaaagagtaagccccatatccaccacatgtctgtgtttacgctcaacccgaccctgttgttggtgagtatgggcacatgattgtctaagggtgataccaagttgtgaaaacaggttatacagagggagatactctttaccaagatctgtttggacgctttttatttttgtttcaaacatcctttcaacaaaggcagtaaaatgagtgaacaaggtggtcacttcagacttggattgcattggatatatccaaacaaacctagtaaagtcatcaacacaacttagataatatttatatccatctctagaggagtaaaaggagggaccccacacatcagtatgaacaagagcaaaaggggatttggttttattatctgtagctttaaaggtgaattggtgcattttgccaatttggcatgcatcacaaaagaaattttctttacatttgacagaaggacaaactttagctaaaactttagcaagaactggcttggctgggtgtcccaaccgacaatgccatacagaatcaactttatttttatcttgcacagggttactagttatggtacaattgaaaacatcagaattacaaggaaaagaagagtaattcggatgtaacttggctgtggcagcagcagtgggagtagggacttgaagttgatagagtccattatgaagagaaccccttagaacttgcttcgtgttcttgtcctttataagacaacacacatagtcaaattcaagagtgacactattatcagcagtgaatttagagatacttaacagattcttggttatatttgggacatgcaagatatctttaagtaataaagacttgtttggtgaaattgtgggaatagaatttgaaccaacatgcagtatagggatagaggttccattacctactgtaactttggcttttcctttgtagtcggtggtgttggtgagattggatgtgtctgttgacatgtgatttgttgttcctgtgtcaagatactacattcctggtgcttcttcagttataatggactcagagatgtttgcttgggggttttcttgtgttgatgtagaagttgaagcacctggggcttgaggtccagtgaatgtgatattgaagcggtgataacacttctgagctgtgtgtccagcacgaccacacagctgacacaccggtttgttgcctcgtcctcctcgatttggtgtaaatcccctacctcctctgtagccacctctgaatccacgtccacggccttgattgttgacagaaatatttgcaatgtttgcttgaacattgctgagagcattagcagagaattgctgaagcctaacttcatggctgtggagcatgaattggatttcttgaagggtgaggggatcagatctggccgtgagattaacaacaacactttcatattcggagccaagacccccgaggatgtacagagcaagatcttcatcagtaataggttggcctgctgctgccaaattgtcagcataacctttcattttaagtatgtactcatcaatggtggaggctcccttcttggtggattgaaggagtccacggacttgaagtaatcttgctctggaagtggtggcaaatagctgagcaaacacagtccagatctcagaggaggtttgacaattaatcacataaccaagcatgggttcagtaatagaattcatcatccagtgcatgagaaattgatcaagacgaagccattgaaagtaatttggattaggaatatcacctgcaagaacttgcggtgggggtggatttgtcccaaggatgtggccatcaagattataagcacgcactgcagccagaaccagcgatcgccaaaaggtgtaattcg

SEQ ID NO: 249032 - DNA, 544 bp, Cannabis indica
tataaggaggggagaagttacttattaaatggactgcgattcattctcacgaactttcactctctcattctaaaaacttacttgagaattgaactcctggagaacataactttaagaactcttatcaagcattgagatcaataatactctaagtggactagtctattaccactaaaaggaggtgaatcactataaaattacttgttcgccatcaccaaattccattccataaattggtttactttgattgacatttacttgtgttcatcttgctcatttgcaatcttcttagatctgttgacgaaaaaccatgtcaatgaatcattatagaaattactaaatataaatatgagaattttcattagaattgtcaagtgatatatgttgagaatattttaccaggatctagatttactaacatgtatgttaaattaacatcctaaatatgaattctctaaaataataaaacaaacacgataagggtttaataaaaccttacattaggtgcagcagaataatatgactccttccgttcaagatctct

SEQ ID NO: 249033 - DNA, 536 bp, Cannabis indica
aaaaaccttgaaaaataaaaatatgcaaattttttgtatttttataaacatatctgtttacttgttattttctgaatttgtgtatgaatttattgaaccaagtgatttacttatgtttattgatatttgtagtgctaaaatgaacaacccacaccccgagccactcctagttaatgcatttggaaatgaactctatagtgtgaaaatgcaccctggtagttgcattaactcccacctattgatgatgaatctgaagttccaaaaagcaaatctacttggtattgaattaacaaaggaacaatgggttcaattcatacttaatagtcttcctccagagtataatggatttgttgtatcttatatgatcaacaattttaactcttccaacatggataagctcgaagcagaattgtgagctcatgaacggaatttgattgcaatgccaccactcggttttgcaaactttaattagaggaaaagggttaagcatgaagcttatagcaaagctgcttcttcaagtacaattgatagtcata

SEQ ID NO: 249034 - DNA, 1303 bp, Cannabis indica
atttgaatgtcagctttcatctgagagacctgacttgacggagcagtgaatctcattaaaagatgtctgaggctgattagtgaaagtaccaagagtatgccttcttatagcgagatggatgccttgctatccgttgtccaagttcattcaactgttatgcttagtttgtataacgtacattatacgctaaatcttttaacagtcaacatgtctcatctacttctcttcatacgtagcgagattggcgcctcgctttgtacttctagcgtagaattatttctcgttaatgctcgagataatagtttgtatatccttacctcacttaagactttagagtcagtaagttgtaaatatactctatcaactctgcatttaatgagtgattctattttaatatcttctagtataattactattatattggttgattcgtattctcccatttgacacgtgttctcctctaaagtgccaaccgaatttcggttataacacttttagtaatatgagagttatgttaaaaaagtctcgcatggtttaaaattattgtcggtggtatacttttacattatatggatcaatattcttttgctttggtttgttctaaagttagtacatttattttttatgtggatgattatttaaaataacttaatcttgcccaattagttataatttttatttaaagtaaatgtaaaatatatttttatatttttaaatatttgtcaaatttaaaataattattaataaaatcatttaattaatttttcatataaaagttattttttataattatttattttaatttttgtttaaatattaaaactgtattaatttgttaatactatattaatttattaatacatcatattttattagaataataagattttttaaaatatatatatatatatatatatttatttatacttttggtgagatgaaactattgtgaatattaaatttataggttatatatattttatttgttttaaagttaatattattcatttttacatatttttgctactatttaatctttgtcaaatatttaaattttaaaaaatccttaagtttttaacaaataaaaataaaatatatttttagaatttttattttacattattaattaaaatttttacaccaaaatacaaatgggcttttttcataaatgtacaacaaaaaaaaaaaaaaaataaaaaaaaatgtagcaaaaaaaaaaattaatttgaaaaaacttatacattttgaaaatttattacataaaaccatacattttaatcattaaataatataaatcattaat

SEQ ID NO: 249035 - DNA, 983 bp, Cannabis indica
acatattacaaatattgattccgattatttttcatttattccgttacatttctccattaatttattcagattttgaatactgtatagtaaatgtgccatgagggtttcagggttttgagaatggggatgggaatggtctggggaatgggaatgtgcatgggtcaggcaatgggaatggggattggaaacaggaatgggctagggaatgggaataggaatgggaattggaatgcgaatgggaatgggaatgggagtgtgaattggctgggggatgggaatgggaataggaacgggaatgggtcggggaatgggaatgggaatgggccaggggatgggaatgggaatgggccagggaatgggtatgggaatgggaatttgaattggaataggaatgggaaagggaataggaatgggaatgggccttggaatgggaatgggaataggagtgggctggggaatggtaatgggtatgggaatgcgaaggaaatgggaatggcaatgggaatggggatggggatgggaatgggaatgggaaacagaaagggaataggaatgggaatgggaatgggaatatcaatgggaatgggagtgggaaaggcaatgggaatgggaattggggtttggggtttgaggtttggtgtttaggttcaagatttagggttttgggttggggttggggttggggtttaagggttagagattaggtaaggggtagggtgggggtagggtaggggtaggggtaggggtttgggatcaggggttgaggggtcagagtccagggttcacggttcaaggtttagggtttaggggaatgtgaattggaattgaataaaatacaatttaaaatgcataaaaatttttgataaaattcatcaaactttttctcatgttacatgataattttcgttccttccatttcgaaatagaatattcattccactaaaatggtggaaagggcattctattggaatgacattctaata

SEQ ID NO: 249036 - DNA, 581 bp, Cannabis indica
acgtgcctcgcacgtagttttttactagtatatatataatcatacataattaaaattaaaatctctaaaaaactaaacataagcttattaatgtcctgtttcaacattttttctcttcatgcgtggacgtggatgattaatagagcaatacactcaaattctttctcccatgcaagtatgtttgtaagtttcaatatgcattaatttttgcattaaatttgtatatatgcataaaatatgtatgaatattactacattatttagtttagtatacatatttatgtcatacgtgatgatctaataatttgcttcttggttgttcaatttttatgtaaatatgtattttatagtatatctattttattattctatatgtatgtgatatgttcattatggtagggtgtttatcatatactatacatatatattcataactacaaccctttactgtgatctttcaatatttataatattcaatacttatacttatactaggtaggagttacgtgccgagacacgtaaatattagttttaggtaaaatttagttttttttttatttcttcttatttagattgtatgt

SEQ ID NO: 249037 - DNA, 823 bp, Cannabis indica
ttgacagattggaacttacgaaatcttgatctttcaaggtaaatgtgaaatgaacatcttgaatgaagcacccaacttgaactagaatcacccttagacgctattaggatccttgaactttcataatcattagtgtcttccctttcaaaaaaaattctagcgttgtcaaacttcttattgaaattcttgaaaattgaacaatttctaatcaaatgatcaagcttgttagagacatagcatcttctttgttttgtctttgatctagtctttttgttttgatttgactgatctttattcttttcttggagaatttccctcgagcaaacgatccacatccgatatgtctactctttttcatctcatattttctctttatttctttaggcatcaatgcattctgaatctcctcaagtgttaatgtttctcttcaatacatcatatcatctatgaaatattcatatgaatatgaagacaatgaattaattcaaaataatgattgcttaatcttcatctccaatcttgatgtcaatattctccaaatcaagaattatcttgtgaaattcatccaaatggtctttaatattctttctcgatcccatcttaaatgaatataaattctaccttcaagaacaattgattgggcagagactttttaaagtacaagctttctaatttcgtttagaatgctacagtcttttcatttaaaatctatctacgtaccttaatcccgagacttagaataatggcattatgagctttgttcgacacctttgtgctctcaggatcaaactttgcataatccatatggtgatagattttcatc

SEQ ID NO: 249038 - DNA, 1004 bp, Cannabis indica
agatgcacgtgtcatatgcatggggggagtgtgcatgtggtatatatgtaataaaataaagagaaaaggtaaaaatattgaggtaaccgtgtgtaagtatttatataataaaaattccattttgtatttttagtgtaaaatttcatatatatatgtaaattaatatatatattttaaattggatggatttaattcaatccaatatatattagatttaaaatattaaatagatataatttaaaaaaaaaataataagtctaaaatattaaataacaatgaattaattcaattgatatacataaaatacatctaatggatacaaccaatccaatagatctagtgaatgattgaaatgaattagatattgcattgtaaaatgtaaccaatatataattgaatcggatctggatatttctaaaaatattaaatgtaatccaataaattaaatacccttgtgctcctcaacttttcaactcattaacaatatatagtccctagactttttataaaattgtaaaggtcaattgtcaaattttatcgtacgtgacaaacaaaatgatgacatgactgtttagtcaattgtcatattaacaccacatgtataatttaacattaaagaataataattatttattttttaaaaaataattaaattaaaaattaattaatgattaaaaaaattaaatagtttaagaattacttttaacagactaaaaaattaaaaaagcaacaaaaatactaaatagcctaatatattgagaaaatatgcactacacacttaaattggtattttggtagacaagcaagacaaaaaatttattgggttgaatacatgtaataaaaattgaaaaattatttatttttatttctaaattatcttttactgtaattttttttttttaaaaaaaggagagagttattaacatagaaataaagaatcgaagatatgttaatttagtaataggagaaaaattgtcaaaatagtgagctctattaggtagttt

SEQ ID NO: 249039 - DNA, 1210 bp, Cannabis indica
cacaacacctatcaccatcaaatgatctccattcgtaaagacgattgttacctcataatttggatcttatctagtcgacctaaagttaatataaaattataaattaccttttactctatcactaggtctagttgacacattcaaatcctaagaggtgttggtttgtccataaactcaagtctagcctataaataaaacattatatatccttactcttgtgtaagatttctcaagcttaataatagtattagtgactcatcgtgaactataattaaggttcataattgctcaaatcaccaaaaaaattgtattacattattttaatttttagttaagtttaaatatttctttattaatgaatctctgaatatttgataaatagtaataaaaatatgatacagttaaataatgcgatagtagttaattgatatatataataacataacaataataacggtattgacgttaagtttaatagactcatcatagattcataatgtaaaacttttatctaattcaacactacatttcttgttatatttattttcttatctatcaccaagtggcatggaagagatatttatgagattgtcaataactttagttggagataatcacagaaagaggcagaaaatgattattgagggaatataaaaatttaatttaataaagatggtgttaaataaattttgaaaagaaaatataaaatttacaaaaatatataacaaaaaattgaaaaaaaaaaaaactaaattacatttcaatcttttatttgattacatttaagtgtaatggaatgtttctcttctactattttaattattttaataaaatgacggttatattttaaaattaatagaattattattgctaattcaatatttaacatctaatcaaattaaattaataaaatttgaataagttgagatatagtagattcgaatgagatcatgattttcttatttttattaatttaaagggaatctctaatttaaatcatataatacatacttatgaccagatacagaaattaaagagttttgtaaaatagtgtattaatgatcatgattcatgcatgatgatgcattagcgaaatctaagctattgagattgaataaatgtattaggttaaggttggtgaagagtggtgactgagtggttccatattttttttttttaatttaagcgtttatatattacatcagtataa

SEQ ID NO: 249040 - DNA, 684 bp, Cannabis indica
atatatatatataaaaaaaattacatctcaatcgtagctttttgcgatgaagctacgattggagtcgactgaacgactctaaggtgaggtttgtgatgaagaagtgtcggaggtcaatcgaatgtggcttcacggttggagtcgacgattgaagaatttcactctcccaatcccaatctgaacgactctaaggccagctttgtgacgaagaagataaaaacttaagctttcttaattcttttcatggtgagagcttgaatagaggcccaattggggaaaatcgtttctgggttattgttttttctttaaaagatttgtgttttggggtcagagattttgtcgggggtttttgaagggttttgatttcaatgttagttcaagatagagtagggcctaagtcttccaagcagacccagatcaagagtttgcccactcatcaccatccaggtagattatccgaacctaaaaacctagatttctcaacatgggtatctgagaatctctataaagtcgttcatgtttttgttctgatcagtactgttggcgctgtcttctttctccggaatgtcggtgacaccgcggcgcttctctgcttcgagaatcatgttgaagccttggagaagatcgaattccccaaagtgaattggaatcttcattaaacttgcttcttgtatttgggaataa

SEQ ID NO: 249041 - DNA, 688 bp, Cannabis indica
atcgaatgtggcttctcagttggactcgacgactgaagaatttcactcttccaatcccaatctgaacgaatctaaggtgagctctgtgacgaagaagataaagacttaagcttttaagtatttcatggtgagagcttgatcagaggcccaattggagaaaatcgtttctgggttattgagatttttttagagatttgtgttttggggtcagagatttgtggggggttttgaagggtttgatttcaatgttggttcaagatagagtagggcctaagtctcccaaacaagttatttatttgcaattcagcatggtgcgaagaaaatctttgatgctgatgatcgtggtgaggtcatcgatggtgatttgggtaagcattttgatgttggattggtaggagaagatgctagacaagagactattatgcagtatagtcatgaaaatcctaataggactgttgtgaacccttatattcattttgatacatacacagacaaagaataaaaggtatatatatttcattatctttgattttgtcttgcaatgaattattttgattggtttttgttcctgacaacataaagccctctacaactcaattctttttccttttcaaagatttattttttcattagggagcagacttttttgacaaagagatggttgtgtgtgttcatactgagaattgca

SEQ ID NO: 249042 - DNA, 1375 bp, Cannabis indica
aaacgtattcaagattaataacttatcgataacattaataacttttaaacctttcaataatctatattcaagatcaataatcaataccaattaatgattttcaaacttttgcaattttttttatgatttcactccgattaagtgatacatattcagtatgtttaaaactgcaaagaaggaagagtaaagcaatttcgcctctttgagaaaatagaattacatgacagtgggtggaatgaagtacagatgtgtcgagtgcgaaaaaaaaaaatatctttaattttataattattattatatttaaattttttatttcatgttatttttttaaaaaaaaactaaatcacttggaccaatcatggactgacacacttatttggcgtttaaagtattgataataagattgagtatataattacatataattataggtcattcttactattttttattaattaaggctacgggtgtaataattttaaattataaggagctattataaatatttcaataatttaagtgaaaaaaattaatttctaacatattcttatttggtaataaattgtaaaaaaaattaattaataattattagtaatttaatttttaatataattaattttaattaaaattttataaagtaaataaagtattaggttactatcagattataagtttttaaattatttatatgtatatatatatatatatatattaatcggaatcattcaataatgatccaattaccaaaaataaatgtaactataataattacatatttgatgtaaccattaaaactttctccatatatataattttaataaggtattttaaatggtttttctttttgtaacaaaagtattttaaatgattgagtaggagtgttcggaccttattttgtgctctttcttaacaaattaagggcactccaaatctaatagaagcaagaccatcttcaatggatggtgtatattttaggttaaatttggtccaaaagataccacaaaactatatttggtccaatttttgtatttgtgctccaaagcacaaggtacaaattaactataaaagtcaataatataattaatactcattgaaaatatataaggaatatttcttaatgggtattacctattaatgggtaataaacaaatttaactgaaaatattaattttaaaaatattaaatcattagatcttggtccgataacgaataataaaagagaaatttgaatttctatacttaattagctatttaattaaaaaattatattaaaaaatacttctttttgacactatataaaaaatatgtttatatgtaaaatatttaaatcgaatttatctttttttatcacatttttgtcaaaaactttttttta

SEQ ID NO: 249043 - DNA, 745 bp, Cannabis indica
gagtttcgataaactaggaaacaacttttaaaagcccaaccaactaaatccttatagaattgctatagagtataagagcatctttaatggtagtatcatctaaaaatgtaatattttattttatttctcttcaataatcaaagaaatagttagttaggagttagttggtcctagctgtcctagctgtcatgtttgttatattcggttatggttgttatttttgtaacctttcttgttaatcaactatataaagcttttctctcttgtaattctgtagattgtattgattgattcaatctcaataacaaagatccattgttctttcttctttctctgttctctcttcttcgttttctggttatgctttgctgatatggtatcagagctcaagttcgagtaagcatactccttcgctgtttttgattcttcttgcttacgcttctgtttcgcattcatggccagaggaggaggagtgcgaactcgaagcaatcatgatcttgatgataactcaaacgattctaatcaatttttctgttcttggtgagaattcgaggtcaacgagtttcaatgatctctctaatccttattttctctctaatggagataatccaagtgttgtcctagttcccaatattctcacaggaagtgagaattatagcacttggataagatctatgttgatagctcttgttgctcgaaataaggtgaaatttgttaatggaaagcttccacaacctgatgagga

SEQ ID NO: 249044 - DNA, 633 bp, Cannabis indica
acctagctattaatgaggtatttacttttctcatgtaagttttttttattagatacccaagtctcatatattcaaagttgctcagctatttgagatcgggcaagtagatacaagggaatagactaaagactaaggaaaagaacaaattcaagaagactttgttgcacagtcgcttcacaagaagactaaggtgtaaattgcttgacaaattcaaggttcattgtgtgtttcctatgtgatgtcataatctaattcataagagttcacaaccctatagaaatggataaaataaatcatctttagaattcaatatctttagcagttgtttgagctcgaaagcaacaaaagtataatgataagaaagaatatatgcgttttaataattttaggagtgaaaagtgaatctcaagataattttgctaaaatgatgatttttaattatattttagttcgatactttgtaagttttgatagaatagctcatgtatcccatattgcaaataaactccaaactcttctattatcattttaggtgagaaagaccctacactttttccatttttttttaattatttttgctactttatgatcatccaattttttttttattatatatatatatatatactttag

SEQ ID NO: 249045 - DNA, 1348 bp, Cannabis indica
gctttctttctctttaggttttgagacttcttcttcttcttttcttctcttgtatttcgaaatccttagtgttcctcacaaacataaaatatagccattagtgattgagtgcatgcccacacataacaagttagccctcaatcatagtatgtaagactgtgaagaatccaaacaacaagaaggagagtcgggctcaaatcttggtgatactcttctacagaaaggatacaagggtttcttgtaaccaccatattgagagtaaaagaaattttttattttctctgtattttgagataaacacttgaagttattttcatctttctcttcatcttagttctaatttagaagttgagtttgattttctgaccaacaagatagttgacgagttctcactatcaacacatttacacaagaaaaatttacatagtagaccaaattttaaaaaaaaaaatacaaaaatatgtcaaaacggaaatttttttcatcttttactctttgaacttttttatttacaaaaatacctcttcagtaaaaataataaacatttttttggttgttttataatttatttatggttgtattatagttgtcttgaggttgttttttgttgttttatagaatgtttatagtttttgtgaggttgatttctcgttgtttgttagtttttttaactttttgtttagcaaagtgtatttttgtaattttaaaactttacaagcttatttttataattaaaaaaattagactgtaaaattgtaatttaaacataaaagaatgatatttttgaaaatttccctttagttaatagatataatttaaggggagttttatttgcaccccagaaaaaaaaaatatattttacataaaatatatgtatccttaatttgtactagtttttttttatttttttctaccttatattcttaaaaaaaaatatacctataaacaaaaataaaatatatttttaaatattaaggcaaaaaaaaataaaataaaaattatatgaaattttattagaatttttttttaaaaaaaaaaaaatcatacatgatttaaaaaaaaatgtgaaaataaaataaaactaactattgatattaaatgaaaataatgtgaaaaggaaattttttaaaaaatatcaaaagtaattcttaaaatttaatttaagttaattattttttaatatcgtgatacacttataaatttatggaatgcaaataaaatttcccaaaatttaattgttttgaactaatctacccacttaataagagtatatttggttgggacaaataaaaataacaaagatataaaggagaatagaagtaaggatctatctatctatatatatata

SEQ ID NO: 249046 - DNA, 638 bp, Cannabis indica
ccaataaacagtacacgagctacattcagcagattagcaagatttcttggcttcgctttggtgatgaaaactctagctttttccatgctagtgttaagaaaaggaaagagcaaaatcgaattaccacctatgtctctaatggtaagatctatgatgattatgatagtgttatttctcattatctctctcattttagaactttcatgggggctggtagttctgcaactatgaagctgaatccagagagattatcttatgggaagaagcttgatatgcaacaacaaattcagcttgtgaaaccgtttacaaagaagcagtgttcagtataaacaagatcaaaagtccaggtccggatggttatggagctggttttttcaaggatctctggaatgagattgggaagaaatttcagtggctatcctttctttttttgacaaaggtatcattcttgctgatttaaataaaactaccatatctttggtccctaaagtagattctccggcctctgctatagactatagaccaattgcttgctgcaacactttatacaagtgtatttctaaaatgatttgctctagactaagtgaggtgttaccagatctaattcatagcaaccaaggtgccttcgtgaggaaaag

SEQ ID NO: 249047 - DNA, 1394 bp, Cannabis indica
aaaaaaaaaatcataaaatgaagcaatcgcattacaaaacctatgaaactagtttcgaccttataaaaaaatcatataaaatctatgaaaccagtctacaaccctataataaaaaaaaaaatatatatatatctacacccaaagacaccctattttaataatttttatttcatacaaaatttatatatttaattgtattaagttttttttaacttttttctaattcatattcttagaagatatacctattaaaataaaaataaattatattttaaatattatgacaaaaaattatataaaattttcttagaaaaaaataataatatatatacatgatttagaataaaatatgaaattaaaatcaaaataagtattgaaattaacataaaataatacgagttaaagattttaaaaatatattaagaataatttttaaaattatataaatatttttttaatagggtgtacttatcattttatggggtgcaaatagaactcataaaaacctataaatttaattttgactctgataagtctagcagtgttgaattcttaatgtatgttttaaggttattatactgatcttaacatgcatgaaactaaacagagaacactcaaatttacaagcttcatcggaccctgtaaactcatttcaggcgactagtgcttgggttcccttgaaccggggtaataactttcactatgaatcaaaagatacactttccagtttcaattacaatcacaccaaaagtaatctgaaactaattcatacagaaattacccaaatgatttgaacacactcaaatcagaaaatcatctaagaaccttagacttcagaaggcaagactcccttgcttctattcagctgaactctcttcagcaaagcaatctgaactcccttcagaaacgcacgacctctgatgcaccttcaatctgaagatcacctcagcagatctgcaagaaacacctgaaaaataacaagaacaaagttttgccctaacagagcaaaatctaattaaccaagaagaagagttagttaaaaaaccggtaatccctgatttatattaacaactctaatctaacaaactttaacagctcagccaacaaagaatgacagctgtcttagttttagctcacttagctgacctgtcaacgacataataagaccaagagattagatgaaactaacaaccagtcagatgacagaagcagcataatttgccacacataccacaggaacttacaatctcccccttggcaaattatgctcaacgaatgcacacacaattaagacaaccagaagcacactaccattaaaagaaatcccaagagtttaaccaaaagacagcacaaaaggacacaacttacacaaaaaagttacacttataagattg

SEQ ID NO: 249048 - DNA, 609 bp, Cannabis indica
tgtgagtttggatcgaaaaccagaaaaactttgagtagaaactggtttagtaaggccatcagcaagttgatccaaggcaggaacatgtttcacttgcacttggtgccgaagaaccttttctcgcacaaagtaaagatcaagctcaatgtgttttgtgcgagcatgtaagacagggtttgcagcaagtagaacggtgctgaggttgtcacaccaaacaaccggagctgtggattgaggaatctgaagctcagtaaagagtgattgaagccaggtgagttcagagacgacattagcaaggctgcgatactctgcttcagtgctggaacggctgattgtttgttgcttcttgcattgccaagtaattaagttgcctcctaagaagatagcaaatccagaagtagagcgcctgtcatcaggatccgaggcccaatcagcatcacaaaaggcaactagatcagttgagagagacttatggaagtgcaaaccataatctatagtgccactgaggtatcgaaggatacgctttacagcttgccaatgaggttgtaaaggagatttcatgaactgacagactttgtttacactataggagagttcaggccgagtaat

SEQ ID NO: 249049 - DNA, 308 bp, Cannabis indica
gagcacgggttgcatctctcacagacaaagtatatcactgacatcatttgcaaagcaaaactggaatgtgccaacagtctccctactcccatgacaggtggggaaaaactgtcctgtattggcagtgaccctatcaagaatcctcaacaatacagaagccttgtaggtgcattacaatatgcaacattgacaagaccagaaatcgcctatgctgtaaataaggtgtgtcaatactcgagtctcactggaagacagttaaacgaatcctacgatacctaaagggtactttagactatggccttgacatg

SEQ ID NO: 249050 - DNA, 979 bp, Cannabis indica
actatatacatcccacaaaaataatagttatctaactaaacaagttgtttattcatccctaattaagtaatagagattatagacaatcttaaaaatttagataacaaacttgcaaaaagtactcctaacatcataagatcgttataatagagaactctgatagtaaaaataaagcacaagcacaattgttaaatccttgtaataattttaatccaatatcatcatgatcaatatcacgcaatttagtttaaaaacttattattttttctctcaaagcttgaagagacataaaaatattttaacttcacatatacaaattatatattagtgtgattaaaaaataaaataaataaataaataaatattattacaaatgttatacatcatttgcactaaaaacaaataaacaaataaaactaagtatggctggataaaaattatagaaaataatcacaaaagtgactaaagaaattgttttcagtaaaaaaaacaaatatatatttttatagtaaaaaataaataaatatatataagaaaaacagtgaagtgatttatcttgtctaatacatctgtactagatttataattactaattcaataatctataactacaaaaattgtataacattatagctctaataactaataacagtatataccgaaactataatcgcaaaaacaagagcacaacctatataaattcaacaagagctagagatataatttactatgtaaaaattaaagatataaaaaattaattcttttttgaatataaacactacaaaaaacttttacatttaatattaactttttagtcacaacataatttatttgtgactaaaaatgtgacttttagtcacaacaaaatgttacttgtgactaaaacatagactttagatacaagttgtcactaatttagttttagtcacaacaaatattgtgactaaaaatacatttagtagtaaaaaagtaaaaaata

SEQ ID NO: 249051 - DNA, 651 bp, Cannabis indica
cattaaagtcgacgacatagctgtgcgaaggagaatatcgaaaggtggccatttcttcagcttctactgtgacgagtagctgtgcggtgtgggtcgacatcaaaagagccgtaaattgaacaatggtgaatatcagaggagaagataaaaatcctccagaatattgtatgctatttcttgtgaaattagaattttatttaataacaaaaaaagtggagtttgctttgctgtatgttggttgaacgagaaaaaatggtagattttataggtgatgagtttcttggggcagtgtgggtcattgattgatgtaagtagttttagttggtgaattgatattgaaaaacatttaaatattcaagtgaatttaaatattgagaatgagtgataaatgtcattttccctttacacatatgcacatgtctacgttattttgtcttcttatgaggggtaaagagttaaaggggttttccatgtatattaacattgaatagatgaaaactactcttaaataagatgaaaaattgtatttttgcaattgtcaattatatataagaaaatataaaacagtatgagtctgcagaagcagaaagtaattctgctacagcaaaacagaacaggcaaaatataaaatatttgcagaaaaataaataa

SEQ ID NO: 249052 - DNA, 718 bp, Cannabis indica
tggaagggaaggactgcttaaagttggtcacacacgcagcgatgtttcaccatattgtcttttaaagtgaactcatcgcttgaatttttatgaaactttagcctttccttgcgtgagccgaagtctaccacatgaaaatttaacatgagtactcatgcatgcacgtagcttttttgagcgtgaaagactacttggggtatgatgcatcttcaaccctcattccaaaagggaagggttgcttgaagtttgtgacatgcccagtgctgtttcacctgaagaaaagtcattgctttaattttcatgcaactttaacctttccttgcgtaagccaaagtctgccacgtaaaaatttaacatgaatctaccaagcacgtagttttttggtgcattaaagatcactagggatataatatgtcttcaaccctccttcctggaagagaagagctacttaaattttgtcacacgcccagtgatttttcaccctttggtctttttaagagatgtcatcttttaggcaacttttgcctttactagtggaagctgaagtctaccacataaaaattcaacatgattctcgcatgcacttagtattttgagcttgatagatcacttggagtatgatacgtcttcaaccctcattcccggaagagaatgactgctcgaactatatcacgcaccaaatgatatttcaccctttggccttttaaagtgaagtcat

SEQ ID NO: 249053 - DNA, 1049 bp, Cannabis indica
atggaggaatggcaattattcattaactaggcaaaaactttaaacaacattcatcatcctccctaaatgggaaatttagttcaaaatcaaatccataaccattcctaaaacaggattcaacataaagaaattaaaaaggaatagagaaagaaactgttggcggaatgactctggatcttcaatctgctcctcttgccgctttccactgcgttttaggtctccaaattgcttcccctaattttcaatcacagttttctatttatttctaatttttagggttcgccagacgaaaatacccctactcgtacggactctcgccgcggccacaggttgtctcaccgcggcgactggagcatcaaaaaaccacgtttctgttttcgagttatggccgcagccatggtgatctagccgcggccaaaagtttgtcaagcctaaatttggcatttttcttggctccacttgtcttttattgcacttttgcatcctgaggcctccattactccgagaaacctgaaaacatagaaaacaagcataattccgtcctaaaacatcgaaaagcaaacataaaatttatccaaaatataggctagaaatagtctaacaagcaccctgctgtctcaaccgccgaatctcttcatcttgttcattgatcctggcttgcatttctgcaaacctattttcccaatcttgggcagcttgggcagcctgtggcgagttagcatcaccccggccacgtcccctgcctctaggacctctacctccggccacaaatactaaggggaatctgagctccctgaccaccactgaatcccaccgaatttccctggctcctggtgtttcgcctggcatccatacaaaatagaatagcctgcataaccaagagctagtctggttagatcgtaatcaagtaaatactaattgccacttatttggaaattaaaaacatgcacatattctactatcaggctactaacatgcttcctaataggcttttcttaaatcatactattaaaataaactgctaaagcaataaaagcttactgaaccgt

SEQ ID NO: 249054 - DNA, 957 bp, Cannabis indica
gggcattaactaaattatagattaatgagcttaattgttagtaaaattaaattactgcattaattaaaatataaaacctgagccatatatatagaatcataataattatcatttatcaatattatatatattcgcggcttaattggggcagggagtaccacacttgattatgccccgtccccaattctagaaatgaaaatcaatcccatacccaccctatttcccgccaagtcagagattctctgccccattagaggtagattctcacgagtctccagtcctatgaaacttttgtacattcctacttgctattgaacacttaatatttaattgtaacaataataatattaacacgcaataaatactaaacatcactaatgttttttaacatttcttattaaatttagcaatcaaaaattctaattaatatgtggaagttacttttacaccaacccattaaaaagaaaaaagaacgaataaagtgatacaaatttagaaaaagaaaagtcatgaattgtggctggctgctgcacgtttttcacatgaagacattatattattaaccataatcaattataattattaattccatgaaatgtttggtatataaatgatattatatgatgtgtatatagttataaatacctaacttttttcacaagcgaattaaatttgttactaccaatatatatgtatatgtatattgtatattactatgtattttttacacaagatacatttaaagtcatgcttccctatctatctataggttataagatgatacatactctagtctctactctctagtctaccatttctaacaattatgctattagagtatattttttttttcataacattattcgttataattacagtattttttaagaaattttgaataatttacaataccgaaaacaagattcttgaaacattcaaaaaaacttcaaatatatt

SEQ ID NO: 249055 - DNA, 563 bp, Cannabis indica
tattattataatactttaaaaaatgaataatttttaaactaaaattaaaatgtaacctgtgcttaaagtatttggagttcaatttaattttatcaataattaatatttattgcaaattcaagtaaaaaaaaaatatattaattaaaaaatggtgtaatttattaattccactaatattaattaaagaattcacttaatatatatacattttttgaaaaaaaaaaatatttttaaactagtctaaataaaaataagtatactacaactataatacaattataatattattaaattttattatatttgtgggacctacttaatatatataagtaaaattatatataatcataaatcaatatcaattctttactttttgtttccataaaaatcatgtatagcataatcttatatataattatctatatataacacgtaagttttaaaatttcaggggggggggccacggccactgttaggccatatgtggctccgcccctgccaggatcgcgttatcttgaatgagacgacctcgaatgaaagtacttttgtaaagaccgcttagt

SEQ ID NO: 249056 - DNA, 595 bp, Cannabis indica
aaatggttaatagtttttaataaagtgatttatgtgtacaattaatatacggttatatatacaaatataataataatttattaaattgcacaacaaaaatgtttattaactcatctcaaagaagttttaatattaagagaattgttattatattctaatggtttattatattctaatgatgttcaacactactataagataatattttctacaacttaaatattgagagtttcaaacgttgaatagtattttaattaaggtaatttatgtctgcaattaacatacgactgtacataaaaatagttgtaacataaatgtttaagattattaaactattaataaacaacattaatcactttaggaattactaattaattaatgagtgatttcacaaggaaactcattgattggttactctaggaatcaaaagtatggcatcaacttcactaggcacaaaagattaaaccacaacaagatcaaaattctactcaccattatcaaataataaaagtaagttaatttataacaagtttcttttctcgaaaaaaaagtgataaaagtaggataaatactattttgagttgttttttttttt

SEQ ID NO: 249057 - DNA, 582 bp, Cannabis indica
gaataaacttgggaggaggtcactcgtggacatgtgaccttcatctcttcctatggtttaattgcaggcacgagatagttttttatgttttaataactctctacatgtaaagtaaaggaactgtgttgtactgtattttattataaataaaaatgctaagttgtatagaggaatgtttaatctttttaagtcattgattaaaactggttttcctcattattttgaaactgatttcataaagaaatatacatatatcagaacatggtaacaaagcttctgtaattatgtaccatatggatttttgagtgcattatgtgaactgtaaataacagagtgaggaagggtgtaacagaatgcatgtgtgtttgatcatacagttcccatggtgttgatcaccattgttgcgtaattgagacttaaatctcgaattgtatagtgctgactcaaatcattaaagttgattcatttgtttgattctcattatttagttagtgtgatcttgattgctattagtgacaaaccaaatcatgaaacaaaacttcaaacacacacacacaatatttttgaattttcataactaaa

SEQ ID NO: 249058 - DNA, 507 bp, Cannabis indica
gaatccgaagggagaagtagcggcggtggagtgatctacaccacagttccacttgcgagacctttcactagggagtttggagcacaaacaaaggggagatttggtacagaaacagattttaccattgggttgaattcgttggtgggttggatgtaaacaatgtcttggtgtaaatcctcagttcactcctttaccgaactcgaattatcaaaatccagttgttcaaccccccggtgttggttcggtgacgacgatggctcctgacgcggcaaccagtggtcctggtgctatgaagattcctatgcagcagccattgatgcagccgtatcagctcgccgccggtcagactcttgaccctgctttgagacctccgtacgcgccgatgccaaatggatacgcagccatgcctggtcggttattcgtttctacgtatattcttctttggttaattggctttgataaatgtttgaatgttctaaattctgttaaaagttattacttgtgaat

SEQ ID NO: 249059 - DNA, 1194 bp, Cannabis indica
agaactatttagggtgtgagttatgaaaataaaagctactatattaatcatatttatgaatgatttgatgatattttttatttataggtagttatttaggatgtgagttatcaaaaataaaaagacattatattaatatcctattaataaatgatttaataatttatttaaataaattaataaaattttttaataaataagaaaatggaaaaaataaagaataagaaagatagctcatatatgatgtcacatagcctctttcaaaaccttcctttatatatatatatatatatatatattgattagttattatgggctattaatataaataatataaattatgaatttgtgagatttttaagtaaaatatatttatttaatgtgatatttagtatcaaggtggtatttaatatgaatcattagaattgttgcattaaccgtaaaagattatacactaaattgatgaacaaaaaaaaaaaaaacaccagaatagtataaccattagagaaagttttataaaaagagaatataaagtgaggaaataaccttctaaaatcacttcaaaatattaatcattttttcctttttttaaattcacttttatcaatttatcattgaaatatataaaatggttattgaagaaaaaataatataaatatctttgtactttttaaaattaattataagaaaaaatatgtttttctataaaatattgactaaaaaattaagtttatacatataaaagaattataaacgattagtttctgtattattttattttatattatctgttgacgtgatttttcgttaattgatttaagaagatcataaaaataagaagactatgctgaagtaatattggtttaaataaaaccgctaaaagatgaaagaagacaccaggatttataatagctcaccccatgtcaagataataatagggctacatctactttatattttattggttggacccaacacaccagaattatgttctcaagtgtgtgtgaatgatattacagaaaaaatttctaggagaaatctatatcaaaacttatgaacgatggatcatgagagaccaacaattcacaatccaacaatcatggaccaatattcttgagaacagaggtgaaaaggaagcaaaaaaagaaattggtctctaattcttggtgaattcgtgtctccaatgattgagaa

SEQ ID NO: 249060 - DNA, 3784 bp, Cannabis indica
atttattacgagagtaaaaaattacatgtaattgaggtttatatatttaagaagactataaattaccttagtaaacttactattgcgtagaattttgtaataggaatataatcatgttcaaccataatcaatagatgcaattgaaatcgatagccctaacttttattcatcgttaatttccttcttaatttacccgcttcttattttcactatttttattgttttctagtttaattttttcttaaattttatataattaaatagaagtaaagatttagttttgaagtatttaactacaatccttgtgggatcgacctcactctttgtgtgtctataacttgttaacgatacgtatacttgcgtgttgaaaataccacaacaaatttaacaataattaaagcttttcgtgattaatttcaattgaatctactttatatggtttaacataatttaattcccaaattcaaattttcatgtgataatgaattcactaaaaaacttataatcgggctaggacatataaatctcaatttatatgaaatttttttactctcgtgataaatttaaacatataggaggtattaagcataaaaatcataaatgctacacaaaccatataggtactctcatcctatatcaaaatcgatgtatattttactataatataatcaacactcaattctcagaatttgattgaaatcataaataattaattggtgatcaaacatttaaaagtaattaagtacgaatgaaatagatgcacataaaaaattgaggatgaactaaattacattaaaaccaaaataaagtgtcaaacactctccattaacaccctaataaaaagtctagttactcataatcattgaaaacaactgacaacaactaattaagaacataagataagagtagaaaaaaagaactcgttgaaaaatattgataaaagtctccagagccgctttctgcttcaatttatatccctaatgattgttgctttgaaaaagtgtcaaaagggtccattatatagccttccagcagggttaaaaccctaattttcatcctttaaaacatgtggaccgtgacaaaaccttgtagtgccgcggtgcttgaagtgggatttttggtagcgagtttcctagtgtgatgactgataattttttgaccataactctttcattactgctccaaattggatgatttaagatttttggaaagctaaaagagagatctagagcttttattcacaacatttttcctcaaagtgaacacatcacaatttaaagttaccttgaagcttcaaactttattttcaatcacaaacggagcgtgttgagcatccaaaacttagaatttttaccacttatatcctagaactctaaattccatgataattcatcatattcatctcatttaacacgtttaacacgtttcttctcatttttaatttatattatgaattttaccattaaaacgtgaaacaaatagaaaacaagctttattctgcacaaaatgaatataataatttgaaataaacctctaaaataatttgtaaaatgcacctaaaactagcctatcaatgacacactgaggctcaagttgaacgtcaacctgagcactcagtatgatgtctggtgatgcctaggggcttaaccaccacttggatgataggttcttctgattccaagtctcatatgttattttgggagcaaaacaataataatgttgaaggtacgtagaattgcattttctgagtgacaaaaccacaacacgtgtggaatacgttaacttgggcaataagtgccaggggaactgccactctgggtgcccaccttttcatttgggcattagatgaatgtatttgcttcctaaaagcactactatcttcattgtttatgaaaataaggaaaatacccaagagactttttttgaaaagtgtgctagagctctcgaggtttacatgtgttaacctgggaaactatagatagtctgcgagcctacattagttgcccaggtctttggcaatgttcccgaaatatattttgttgatgtctaataacctgacttcagttttgtctaatttgcacaggcattactcggtggagctaaattgttgcccaaatcacattgtcaacctacatatatgtgcgccttcatgatgtcattgacaaaaactcatgtcctgtcattgttcctttttggatttgaggaatgagggtcgaaagaagtttcaaaaaaaccttaaccctcgccttcttgccgcccaggctgattgaatgtcaacttggggtgcctagtgtgcaccttgtatctccatgttggatctccaaggtctaaaattaggctagggcatgtctctcatgtattccagtgtaatggctaagcataactcacataggaagttattggcaaccaaaattgatgcgagccaggacacaggttgtcagcctgggcacccagtacctgtgttgggcccaggctgatcaccggaatgtccatgtgacatcctcagtttcattattcattttaaggtcattttgacctacttgttgaaggataactctcaaaaacgacattgttggctcaagggttgtttgcttcgtgctacgtgctaaaaatagtgtctatgtcatcaagccaatattttaggtaaacagaatttatgataaagttagtacaattttatacaacctataataaaaattaatatcaaatataatactatattaaataatacctatacaatgctatgtaatacaaataacacagtcctaataggtatactataaacttaccatacgttattcagacggtagggagactttgttaatttgtttttcttgactttggaataatattagtgatattatgtaaaaagaattatgaaatgatagccgaaacagatggcagagaagttggtcctcttacaaccactcaataattggataaagcaaaggaaatgaattaagggtcccatgaattgaatatttcggaaaaagggctttctcaaacttaggccttaagcaaacccactctgaggagcctttcacgctctaaagcaaattcggccaccatcgataatgccggcctctttttgttcttcattttgcttcaaacttggtcaatatataaaagtttataccaatttatttatttaaaaatatagaattcgataaccttaataatagtattacaactcgtaataatgttagagactaatataataatatttcttatgatattgatgagctcacacatatgaatgtaaagcatggtaaagttggttattcagtacaaaaattcaatggatgtcaggccaactaggcagacggagattgattgatgaaatatggtccattgcattaattgatagagttacacattttttctttcaaacttcattgagaacccaaaagtgagaaaatgaaattcacatgagcctctgagatccaagttgtgaattgcaatactatgatatcctagttgtcgaccctagaaaactagattaattaatttcacatctcaacaaaaactatattctaattgtatcatatatcaatttgttatttcatttattccttgcaatgggaatgacgcatcctgtacttgcaaagtttaaagttcttgattcaatattgtattgtattgctaatgaaataagaaaatatgagacttgagacaattatacagtctttactcaaacatgagactagacatccgtcgaatcaaaaattgtctttctagtcagaaattatagtcctgacgattttattttactctgttttttttt

SEQ ID NO: 249061 - DNA, 996 bp, Cannabis indica
tcttcttcttcttcttctaccaataccaccaccagaaatccgcctgtgctccccaaaaaattccaaacttcctttcttcattatggagaagaaacatggtttctttgctgctctaaaagatgaggtggttcagcgcctttctctggcgaggtctcaaggaaacagttcgtagaggtcttcttctcccaccatatctggtttgctaaggaggaagaagcacagttaaggatttcctcgttatgcacgttataagagtatattgatgatatttttaagtactctcaaatagaaacgaagtatggacaacatctatggatgattttgtagtgactatggaaccacgatcaacacggggtaaggttgaatcagtcaagatttggctgaagtcaaaagcagttattggaattgaagtttttagggtttagatgaattatggtattacaacatggaaggattatttcaaatctcaatgttttcaacaaagttagctaaaaaaaaagtaaagatctatgtggatagataaaggtaaaactggtttccagaagctaaagtcacaattgatgaattaagataagttctaagtctttttgtaaggcatctagttaggatgtaaaatgcgattgaatgtaagttgttagggttagtaattattctccttgttagttgaaggagtataagtagtgttactaaacttattacttggaacttgtgaatagagattttgtaagtaaaagttggcagaagtatttctatagagaaaacttaaagtatttagttattcagaaagatcggaattcagattagaggcggtgattagaattagcacaaggttgggactacgtaacttattattaccctagaaggccaatgcagtggcagaaaacttaagtaggaaacatctcaagcgagtaatcagtacaaccatgatttaattcccttcagttagtagatgtcatgatcaaatttaagagtagagtttgtgctaggtaaactcag

SEQ ID NO: 249062 - DNA, 880 bp, Cannabis indica
aaatttgaaagttgttgagtgacatggctttgttttttctctttttttccatcgtgatatcatccgtattttaaagttatacatctttcttaatcaataatcgaagaaataaaaatcttaaaaaaatatgttttaaaaagtatttacatgaaaacagtgtttttggagacacgcgtacataaacaacagtgctaaaggaaattagatggaccacgacatttttagaataaagattaaagaaagaaattttttacaccgcatactaaattttttattttttatatcttttttattgaagtatttttttactaaaaatattgtgttttttttaaaaatactgtgtaagttttatactgtgtactgtgttaagttttcactgttgttttacgattgttttttaattgttctactattatttttaattgttctgttttattattttatggttgttttataaaaagatagtatttttgtaaaaaaaattcgtgtgacagtaaaattgtaaatttttgcctaaaatccagtatttttgtaaaaacctaaaaagtcgaattgtattgtgataagttgaaaaatatttcttttttgtatccattaatcaaaaataccctcatattatttttgattaaaatatacccacttttttgagtggattacctaatatatcctcactctctacttaagtctagcatataatttacataacctaaaggggctaatagggacatcataaaacaagtaaaaattaaaacaagtaaaataaaatgggcatacaatgtaatttcctctatttttattattgtatttgtctttgggtttgaagcccttatcaaagaaaatcaaatcagtttgggtccagaaaaatagtggtattacagat

SEQ ID NO: 249063 - DNA, 984 bp, Cannabis indica
tgttttgagttgttctactttgtgttttactattgttttataaaaacacattatttatgaaaaaatttccgtacgacagtatttttgtaaatattaacctgaattccaatatatttgtaaattttcttttatatgccttctgcttaataatttttgtttttcatgcaggttacttggcagctcaatgcattacaagaagcatcaggtgagaagtaaatatttgttcatgaccttatactaaagttgttgtaattttttttttctttttgtaacattagattttaggcaactaattaatgaatgaatttttttctctaatcaagtatcaataaattatgagatagtttggaaaatacagaatccaatttattatttgacaaaatagatagttcagtcgaaatttttgcaaaacacaaaatctaaaataatatttatttgaaaaatatcttagtatgaacactcactgtataagctatttactgttatttattgataattatttcattatactaactaaaatatcacaacactgggtggtttttgatttatccaataaggctaataagcctaatatttatgtcactaaatcgacaaaaaattataaactcatctcataattattttaaattataaacaagaattaagtgtttctttcgaaaactatacacattgttttttattttaatgtattcattatgttctttttatttactttatattaaatatttatttgtttttaaaataaaattatttatttaattaaattatcaatattattgtatattataataattaaaatttaaaatatattatttaaaaaaatatatattctatataaaatgtggctatataacaaaattcttggtttacgagaaattattgagtgacttttttttaaagttttctattcaaaaataacagttttttttagctgaggttaaacgggatttatgagaaattattttctttaatatatttataata

SEQ ID NO: 249064 - DNA, 713 bp, Cannabis indica
attcattatttcgtacagaaggattctcggctctgctaaaacattatgagcaaagtcagcatgtacgaggcattcaaattactcgtggggctccaattgtatctcacatgttctttgcagatgacagctatatttttcgcagagtcaatgagagagaagctaccaatgttgttaccaattgaaacaagcagagaaatacaacgtgctatgtgcaaatactggtggagttcttcatccaaaaaggataaaaatatccattggatgagttgggatcgtatgtgcaaaccaaagatgaaaggaggtttgggcttccgcaatctctatgattttaatgtgtctcttttgggaaaacaaggatggaggttgttgatacaatctcaatctctagttagccgattgttcaaggccaaatatttcccaaacagttcctttctttcagctgaaataggtgggagccccagctttgtgtggagaagcttgatggaagcacaatagttggttaaacaaggtgctgcaattcgagtaggatctggtgcaacagtgagcatcctcaacgatccttggttacccgatgctgctgatccatatgtgcatacggttagtgattctttcattgataaaaatgtatcccaactgatgactatagagcgaaatcagtgggatatggatattctgcatgacattttcaaggagagggacattaatttaattct

SEQ ID NO: 249065 - DNA, 3184 bp, Cannabis indica
gatatttctgatacaatactgggtttctctcaaggattttttgtcctttttttagtacactctacccctatttatagttacatagggaggcagttaattacaatcagattaatatcccacaacaatatttccctaaaattatgggatttgattatctcccacataaaataaatgcagttattatttgaaaatcacacaattatgatttatctgcttttactgggtcaatgctgacgtggattcagatacgctacaaagtgcatctttgctggatcatctcgttgggttagcaacaataaccctgacagcgagctgaagcttttctcatgtctttatgaggttaataatgtaaatactgtcgtttctgctattgaagacataacgctccatctgacaatcacaattcttggtgacaaggtgaacttcagcagtcaacatcatttgaatgtcagcttctatctgagagagctgactcaacagagcaatggatctctttgaaagatgtctggagctgattagtgaaggtaccatgagtatgccttcctttagcgagatggatgcctcgctattcgttgtttggattcgttcaactgttatgcttagtttgtacaatgtatattatacgctaagtgttctagcagtcaacatgtctcatcttcatctctttatacgtagcgagattaatgcctcgctttgtatcacaaatgtcatccttacgattgtgtcttctaacacgaaatggtttctcgtcaacacatgagtcaatagtttgcatatccttatctcgcttaagactttacagtcagcgagttataaatatactctatgcatttaatgagttattccattgtaatatccttaaatataattaccattatatttgttgattcatattctcccaagttgacacgtgtcctcctctaaagtgccagccgaattttgggtataaaaattgtcccttaaaaagttcttattaatgaaaagtgctttttaaatgattacaaagggtatttctgttccttttgaaaaaacgtatgtcctctgattttggtggttttgtggtttcgatgcacataagcatttaataactatcagttccacttccttttttaaattttacccgttggatcaagtgtctccttaatctgacagagatcaacctaagagtataaaatcaaaaaaaggaaccacctttgcattacctttgcaatttcaaaaactctgagaattttcgagcttttctgtagaaaaaaccatacctagattagcctaaaaccttgcatgccatctttgtcattaatatttttcctgcgaatttcatccgatttaattttcgaattcaagcattcagagggatcttcacgccattcgttgttccgtcgattgcaggaacattcatcgtcccaaaacctaacttcaaacaataagtgacttttctctttattttattacatgcttttaattttgtgtttctgggtttgattactactttcttagttagcacctttgttaccacatttggttttagcaattttaggattgaattgtatctgggtaaatgttaaggtttaggcagaacgtaggttttcgagtttctccaatttaccaacttctggtttgataaatttcatccaggaattgggattgctttctccttgcagaaatgtcccaatctggttcacaagtttatcatctagattatttagaaacagagtgtcccagtgaacttgccattccatacaaacctagaatttcagaacccaaatctaaattagagataaatgatgcaaaaattagggaacacttagtaaaaacctggcaagatgacattgccagtcgccacagacgcttcttgtaagaaattactgaaggaaaatgctgtttcttgcgagatgttgcttggcctgaaccccccaatttattgtctattcatctggctaggcctttatttttacctagagtcacaatttcttttgaactaggtgacctagactttgaaattatgacctccgagcctcaaaaatcaaagactgcccaggatcctaacgtcaccttcaaggctaaattcatagagtcgaaggtgcgatccatcggtgattacgtaggtaataccctgagggcttgtggtattgagtataagtgagacagttaggttagatcggtagttgctggcgagttcagttgttatccaccaatacaacttagtcgcgaagcatctgaaggggccaatggtgaggccagtatgagtggctcgacgggaataggcgcttggagcctcgaacacatcagggttggagccattatccccctgtgagactatttcaaggacttcttaaaccatctcggacttgccccattccaattgaatcccatttcatacagaattctcgcaagtttgaaggttttgtacagaattttgaattaggagtgccccactccctaggaaatagtgtatctttactctgtcaaggctgttcctgcgagaaagaatgcagcaggggttttttactacctagggactcacacaagtgatcgtaagatcattgtggatttgccaagtaaaactccctttaaaggcgacttcttctagacaattggtctttccccaatcggcacaaccacctttcacataatacgtaagtaatttttacttaagacttggttaaatcattccatgtctttttacgcgattcggctgactttaatttttcctttatttttgacagttgtctagcaaagaccagttccaactcttaagatggccgagcgacgcaggctcctgttgggtcttccatttggccttcggtaatgttagtttcttttgaacgaggtcaacttgacgtctgtgggtctccttactaacaatgagtttacttgtgattataaatatcccaagtattcttcttggcagcaggttctcgtcctagccaatgaggaagctcaggattgcgtggcttgggaacattatctccagagcatcgcccctcggaagtgtcatttcgagatagtcattacaatttttacacttggaatccccttctcatagatcgcatttcacataggttggatagttggtacccaaagttccatgtccaaattagttgcactaactcgtactacgggatagccgagaagtacaggaccatgttggatagggcaagccacttagtgttgggttttatgc

SEQ ID NO: 249066 - DNA, 1675 bp, Cannabis indica
tgtgtagcctttggtcacatgcctagctctaaagatctctaccatcccttcaacatttttctttttcttaaaaatatacttacacctaaatgacgtaatatgctcaggtggagtttcatattcatagattttgttggtgcgcattaagtcaattctttaatccatgacatattccaattttttgagtcagggtcatccatttcttctttgtaagtcaatggatcgtccttatctgtgtcaaaaataagaacatgagcttcatgttcgtagcgaacaggctctctcacaatcctcccactacaatcatgtactgggatttccatttcaggaactgtggtaactgctgtcgatcgttcaactaatggtactaaaattaatggttcataaatcacatttctaatttccttaataaccacttgactttgtggcttctgacttttcatatagtcatgttcaagaaaagtagcatttgttaacacaaacacttttttgtcttgatgacaatggaaataggtaccttgggtctcatttgaatatcctacaaatatacacacttcagtcttaggagaaagcttccaagacttaggtttgagaatacgagcaggacaaccccaaatatggaaatgtttcaatctcagttttgtctcattcaataattctagtggagtattgcttatgctcttcgagagtactacaatcaaatctatgtagccgccaaaagtgcgtatccccaaaagttagtcgcagtgatgagtaacacatcatcgatctaaccatgtataacaaggtctagttttttctctctacaacactattctatagaggtgttctaggtgatgtgagttgggacaagatcccttcttccatcaaataacctttaaattcagaatccaaatactcgccaccacaatttaatcacagtgtctttaaaatttacctaatcacttttcagccatagctttaaagtctttgagctttccaaaagtttcaaaattcttggccattaggtaagtatgactgtatctataacaattgtctataaaggtgatgaagtatttataaccacctcgagcttgaatattaataggttcgcacacattattgtgtattagctcaagttgttctttggcgtgcaaaataaaaagtctttttgccatcttgtctttgacacaagatttgcataccaaaagctccatataaagtctattactctgttttgcagaataaataggtgtaccattcttggaaataataatcttattattaataaaaccaatattgaaaaattatttgttcaaaaaaaaatattgaaaaattgttaatgcaaaagagataaagaaataatattcctgatacattcaagaataaaataaacattgttcaatatcaaaaatttataattaaatttcaagtggacttttccaacaaccttgacagacacatgtgctccatcccctaggtgcatagtcacctccccattggccaactcccttgacgattcaagtatctgcatagaataacaaatatgattagttgctttagaatcaacaatccataaggattttttatcttccactaagttagcttcaagaatgaataaataatatttacctttcctaatctcggagagatactttttacaatttctctttcagtgtcccattatgccacaatg

SEQ ID NO: 249067 - DNA, 579 bp, Cannabis indica
acacatacatatatttcattttaaacatataaatttctaacaatttgtcccattaaaataacaaattaagttagaccaacaatgaagattcgaaattaaaactataattaataacagaaaacaacagaataacaatagtagctaatccaagtcaaagcatattgacataaagttccaatttgtgaaagaaagagtgtagagtggacagatttccatagagcatattgggacaaactccatgatagcggatccacttacaaaaggattaccacccaagttctttcatgggcacactgctcatatgggtgtagtactacttgaagatatcatgatttagtggaagtttgtattttctttactttatgtttgtttaagacatttatgttttttgttttctaatcagaaataaagttttcaattcattcactctgttttgttatgttttagtctgacctcactttggttgaaggaggatcagttggaattaggcatgttcggtgcacattgcatgtaattttcattctacgcatccatgattgatctatgtcatttggatatatttgtatatgtgaccattga

SEQ ID NO: 249068 - DNA, 577 bp, Cannabis indica
catcgcgcattttttaggcgtagttaatttcttgatatatctctagtttttagaaacttttttcggttaacattggtcgtcgtttgagttcattatgttttgatttttatttcggctttacattaaattttattagttttattaaaacttaagttgattaaatagttctttgatgtgttagccgatattgttggtgatcaatagttaatagatttagggtcaattcggtacagctgcactgtgagaaaaaacaaactgtaactgtactatgagaaaaattcgtcgtagctgtactgtgagaaaaagctaactgatgagtgtttggtataatataatttcaaaatatctgtgagttagaaaagttgtatataagtatttggtaagctagctagatgattgaatagctgttaaatatacaattaccaaaataagtatgatatttgttatcgaatttatttaaataaattcatacatattaatatatttataattatttttaattttattacaaattacaataattttttcttataatatttattttttaaaaaatatatataataaaataattagttag

SEQ ID NO: 249069 - DNA, 559 bp, Cannabis indica
tttattcacccaagtgaatgtcggcccttcgtatcccaagtcatctagcatacagtcatcgagaactttttgaaactcactcatcgccataagatcgcggtgtgtcccacctttttttttttcatgcctagataaaacctcattgaaatccccccacaaatccatggtagattaaagaactattttatacgcataaggagtaaccaagactctttttgaaggtgggttttcaggttgccataaaatttcatgaatcaccacaactcactccctgaacattatacaagagcatcatatatccaatagagtagcttttaacagtaacatcccaatcatcattccacattaataagattccaccaccactccccacacaatccacatgaaagttatgtcttcgaataccctctacccaattaccacaaagcttagtgtcgaacaggaagaccaaacttggggaatgcttgtgcacaatagtccgcaatccatttactgtactgggattccccagaccccggacattctagcataagatgtagggttttatgccctaaataaa

SEQ ID NO: 249070 - DNA, 538 bp, Cannabis indica
aaagttcggaggaaaaaattactaattagcctaataatattggatatccattttcttatgtattccatagtacactatgggttgaattaaaattaatacaataacacttatcctctaaacatagtagtttaatacaatatgaaaggttgatacagaatgtgaattgaatcctaagatgttaaagtactgttatcctaaatcattagtcaaaatctgttgtgctatttactaattgttatccaatcaacatatctatccttcatgctgttttttaattgtaattttttttttgtcaaaacatctttcataatagtaaaattttaaataacacatctcaagtaaaaccttctctcaaaaaatacaacatcttttctctcattcgtaaaaaccattatttaaaatgcttaggattattctcaaaatttctgtttctatcatctacatttttgtcattttccattaatcaggatatccatcatatatttcaacaccaataatttactatatattgccaccttccacttagtatgtttttctt

SEQ ID NO: 249071 - DNA, 1290 bp, Cannabis indica
ggttgctctgttagttgctatggagatttcaatgtagaattctgtaaaaataaaaaaatctcaaaaaaaattactataaagatatttttttttatctcttttagggaaaagatttcacctattatttgacttttaaataatggggtgcaaataatataattaatctttaacaaattaatttttaaaggctatatttataaattttttatttataatttaaatgtgagagatatactaacactctatttaattaaatggtatttctactctatttttaaaaaatacattacattttttttttctaattacattattatctataaattaatgctattatttgtatgaatctcatataacatttttttataatggttaatttttttagattacacaaattaaaagattaaaatttcaattttcaaaacaatttttttgggaacaaaaatataatatttaattttttttataaaattacacaaaatataaaatttattcaattatcaaaattatatgatagagtaaaagtataatatttagtcaaaacatagtcttattttgtattttaaaatataatatttagttaaaacataaaataagactaaaaattgtattttttttatttttccttctaattaaagtcatagtacattttcacagccttttaggttagtacgtattagtacttaatacacttaaagcaactttagctctcaaatttgtctaatttatttatcattattaaacattgactaatattatatacatttatgatgagtattattcatactaatatatagtcaaaacatctttatttagtttcattcctttagcttatcaattcattaccaaaataaattacttacataatttggtccattaagcaaaaaatatttattttaattggataaagatgaactactcattaaaaaaaaaaaaagttaattaccattgaatattttaacagaaaaagtcaaatacactacactcaagacaagagagtagattattattttttttttttaaaaaaaaaaactaaataataataaaagaaaaaagtgttattcgggttttggaggcgggagagtaataaaacttgaaacccgaacccgccaaaaagagactatttgcatataataaggtcaattggattgggggtagaaatgtaaattcagaaagttaaaaaagattgaagacatgacttctcattttattatttttattttgtgttaaatatatattttttaaaatttatactctttttttatatatatatatataatttttcttttt

SEQ ID NO: 249072 - DNA, 725 bp, Cannabis indica
tgttagtaaatctaagatcctcgtaaaatattttcaacatgagtttcaatccagcttagcctaattcagagcgcctataccagtaaaactgtccgatttagccatcactaattccccttaagagtctcgagcgactatgctataattaaacacaactcgatcatgacaattggtggcatcaacaattaccttgatcgtattctcttgcggcttaacctaaaactcaacttcatcaccaatttcaaaaactaaaaaaaaaaaaaagcttgtgaacctctattttggatcgacttccattggacaaaataattcatagatgagataagaacatcatccagcgtagcatacttttagttccaaactaaatcatttcgagtcttccataatcccaagcacaaagcactttttaattgatttatttaacaaaaataacgtggctcatttatcttcaattgatattcgggttggcccatatatttatatggttttttaatgttttggtttgtttatatatatattgtttatgcttttaattattttttttattttctttcttctctcaaatgtgaaaaataatttttgccacgttgttactcagatgagcataaaaacaatgccattatgatattgtgaataattactgttttataattttttgccatgttgtttatatatttttttttcactatttttcagaaaaaaaaaaactatttaattactaatat

SEQ ID NO: 249073 - DNA, 1214 bp, Cannabis indica
ctaaatagtcctagtcctagcttaaacaagaaatttctatcctagacatgaaataataaaactttaaccaggagttattgtacttatgtgttaagtggaaacgagatgggttgctatcatagaatcttgtcttaagtcttcaaacccagtagagaaggcagtcgcaactgatgtcaaaatcgaacccttcatttggcaaggggtcaagctgctcgatttgaagaggatcaatgtctgaaaaaagcctcatgcgaacattgagcaattattgaattaaactatcacacttcttgcatgcaatggcgaaggaacagtgagagagaaaaatttaaaggggaatactcgaagtctggtagaagtgtggaaaaactgaagagagagctgtcgatgtcaatttataatttaagaagaaaattgccttttacaaaatcgacggtctagatctctcattagatccaacggttggggagttggaagggtggaagcatttatttgtcatgactttcctcgggtccatcaagctataaagatgggtcttttcaaatcacctcgccattagtttcacctttttctgacagaggcaccccaacacgcatgtaatgaatcaaccatggaatttaatgtgtcgcatggtcaccacgttggcaggcctcaatgttcgatcaaccattaacgaattacagttcaccaaaaagatgtgtccacaactctaacagtcagcacgtgccaatgatcaattccaacgaggagattgcaagctcctcaaactcggagagtcccaaaagcttgggagtaaaagttattcgtatttccgagcaagggacacatggcgtgattagagaagaagatttgttaacaacctggattagcagagataagtataaaggttccttgtagaggcgtcttggtaatctaggaggggtttcatggatactttatggggagaaccatccccatcacaagtagcgtctccaggacacagaagaaccatattcgtcctcagctccgagaagtcctggagcacaaattgataaatggcttttggggaaagacctctatggactggtcacagatcataactgctacatcaaggtaaatggccatgttagcttcatatgaaaattgacctacaaacggttacacctttttttgacaccggatcagatcctgtcccccatgctaggccatggtagtgcttgttggaaattatttta

SEQ ID NO: 249074 - DNA, 658 bp, Cannabis indica
ccccccaacgcctcatgaagctcctctcgtggaattgccggggacttggaaacccccgtgcaaagaaggcacttcggagccttgttcacttgaatgatccggatgtgcttttcctcatggagactaaattgagtagtaggcgtatggcaagtgtttggcggcaactgggttttgcgggagcctctgtggttagttctattggtacagctggtggattatgcctctgttggaaggagggagttcatttggaaatcctctctaactctctgtcaatgatttcagttcgtttcagtggggtcctcaacggccctttttggacggcttattgcgtgtatgccccccctgttcgcggtgatcgtgcaactttctgggactccctttccctggaagtggcgactgctgataatccttggatagtgatgggtgatttaaatatgatgacagatcaatcggagaagtttggtggaacttcgctctcgtatacggactgtcaaggccttcgggatttccttgagatcactgggggtgtggattttgggagtgtgggggtcttctatacttggtcgaatggtagggactttcagaaccttatccgcgagcggttggatagagtaattggtgacacttcgtggattatgtctttcccgaaggcgggggt

SEQ ID NO: 249075 - DNA, 820 bp, Cannabis indica
gtccgagatcgagtcccagtcccaatccgagttcaggtcgctggtcttaggtttaggtcgcaggcttgggttcgtgtagcgggtctttggtatcgagtctgggtcgcgggtccgagtccgtatccaagtctgagtctggggtctggggtccgagtcccggttcgggtctgagtccgtgtctgggtctgggtctgagtccaggtctaggtcgagttcgggtttgggttcgagtttgggtctcggtccggggtccaggtccaggtttggagtaggggtctgggttcgggtccgggtcggggtttgggtccaggtcttgggtctgagtccgggttcgagttcgggtcgcgagtctgggtccgagtcagggtcagggtcccgggtccgaatctgggtttgggtccggggtctgagtttgggtccgggtcccgggttcgagtcccgagtctgggtccgagtcagagattggtgttgaccctagatcctttgtaaatattatgatacaagctaatagggactatttgttatgtattaaataatacaacatatattgtattaaaagttttggtcgtaataattaaaacaatacattgttttatctaaggctgggcatcggtcggtttggtcggtttttttctatataaaatccaaaattcaattttcgatttggattggtgcaatccgaaaatcgaccgaccaatccagaacctatcttaaaaacgaccgttttgaacctcgatttggtcggtttaaaccacccaaaccaaactttttttttaaaaaaaaaatccaatttattttataaatatattattctacattt

SEQ ID NO: 249076 - DNA, 1402 bp, Cannabis indica
cacaaaagtgacaaattggtatggatttttatacctcaccaaaagattgagaaatcttacttaaagctggagaatttattctgccaagaacctcttttgtacctatagaaacttgcaacgtaggattagcacatataaatgatgaactttctgtaataccctagaattgagaagtggattagcgaaaccctaattagataattatgaataattgaggaattatattactatatagttcaatatatgtgaattaatatgaattataacatggtaagaccccgttggtgagccaggtgcattttataattttgacccgagaagggtaaaataacaaaattaatttaattacgtgcttaatagaactattttattatatagtatgcttgtgttatcttttcaggtgtgttctggcaggttggcgcggtatagtcacaaccgggtatttcggcccgaacccggaaatgcaattggagttgaaataattggcacttttatttattggtgataatctgaaatttaattggaatttattatgcatgaattccattttttcccttgtatgcttatgtgaaggttatttggccctaagggcattttagtaatttggcctttatgtgttatgagttgtaaaatgagattttaacaaaatgaaaaaggaaattctggtctttatctctctcaaacctgaaccctctccctctcttcctaacctaatccttttcacttgaaatcataagaatttgcttggaaactagcttgattgttgggaaattttgtggtaaagcttggagcttgcttttggttcaagttgaggtagtttttctactaaatttaattaaatccttgctgaaaatgattgtagaaaaagcatgaattaattggaatgttcttgtttatgcatgtttggaagaattgtagtgtttttgatagattaaagtgtaaattccatgatcttgatatgttgtggagctttggatggatttttagggtattttctaggtttgatttcatgttataattggtatgttgctgctggaaatttaatgggatgcttggttttgaagctctagttcaagagcttgaactttgctaagttaaagcatgattttgggttatttgtgcaatctgaattttgagagttgttattgatgttgtatgctctctgttgtgatgattttttatttgtaagaggttaattttgggtatggtttgattaaggttcgaatatatggaaaaatgggcatttttagaccttaaaatctggttttctgggtttttcgaacccaatggccgcggccagatttatggtcgccgcggccataaaacctagcagagagccatctttttcccgattttattttggccataatttttgactcgggactccgttttggatgttctt

SEQ ID NO: 249077 - DNA, 703 bp, Cannabis indica
ctgaccatataattacactggaactgtgtaattacaaaaactttccatttaaaacatgaactactcaaaaatattattttctcgtgtaattactaactatttttccaaataaaatattaaaaattcatatgtaattaccacctcatatccaaacacactttatattttaaaatatagtgtaaagactagactgtgttattaccagcctagtaattatactatttaacaattacacagttacttccaaacacactttaagtgctaattaaatttttgatttgttttgtttattagaagtaattaaaatccactaattcttttttttaagtgtatctaagtaattatgagaaaaaaaattaaataaaaaagaagacagtgacaaactttgcataattatgtagcacactctttaaataagtactttattacacctctatctgttttggtattcatgagaaagttttttagtttattttttttatgattgtgtacgttgtagctatttaagactacttttaaatattttagaaaattttgaatagttaacaatgctgaaaattaggagtgtttaccaaactactcacactgcacaaactgtctgcaccacatcacatctcatagaaaataaggtttaaaacgagttacaatacaattgtggtttttatttttaccaaacaaataggtgtagtgtgatttatagttt

SEQ ID NO: 249078 - DNA, 731 bp, Cannabis indica
gcgcttccacgaactccatctatcagatttaggatatcagtgctgctatgactgctgtaagtctctcttagcattttttgggtcttactttatggcacctgatctcccgtacttactcttttttcttgtattgctagattgctgcagagatcggtcgcctctcaaagattttaattgttcatgggtacgtcatgtccgagttcgggggcatggatgaagccatgaagactctacgggacttggcggctgagaggaaggcgttccgggaggaggcccaacagagggaggctcaagcggagcggaggcatcaagaggcgctgaaggccgatgttgaggagttgaaggcccgggatgaggccgtggctagggtgaggcgtgagcttagggaggccaaggagacaatggaagacctgactgccaagctgaagtccctggaggagctgcaccaggctgacttgcagacgactgccaacctaactgttgaggtgaaggagcttcatgacttcacagctcaggctgaaaaagaaagcggaaagagatgagctcctggtccccgtcacttgccaacactgcaccaaatgcttcgatgatggcgtctttatggtctggcagactaacgaccaaaaccttaagctcgacttctatccaaagcctaaggaggttttcgtctgcttctgagaggagaagaagagactcgatgccttgctggaggagcgcagggggcctcgtct

SEQ ID NO: 249079 - DNA, 1108 bp, Cannabis indica
tcctcctttgtttctagggttccaattctgaataatccctaattttcacgaactctctctatttaaaccaaatctcatctttaaaattcgtgaaattacgaaactgcccaaaaatcccgtcactggggtccccgtcgcgactggcaaagcccccgtcgcgacggggttaagcagcgaattcttgaaaatctttctgccagttcccgtcgcgactgggatatttcccgtcgcgacgggatttggcagcaacatatgtttttggtttttcttctcaattctttcaccacttgtcctcaattcttgtaaatactttctttaaacacccgaggacctgaaacaaaagaatcaagcgtaaaatagccctaaaactagaaacaaagagtgaaaactaaccgaaaatacgacccgaaacttagactaattttagcctaacattgcttaacatatatttgttagcatctcagtgcaaatatatatacacctcactaataccctaatatgttgttctgatggcaactaacatgcacgctaaatatgtacacatatatgaaactattatattaatcttaccttaattctgaatgcaagcgtgccgataactctaggtggaaactgctgctcaacgatttaaggtcctaagtcacaatctacgtaaaactagttagtgattcgctaaattactttcgataacttaaacttgaaactaaaagttttcttctcgataaatagcgtgactaaaccttaaatatcgaggaaacgctaaaaaatgagatttcgagaaaagtaacccaaaatatagcaagttgtttttctgggttttctacctagattcataggattgagatttaattataaccttaacttcaattatgaattagctatgctttgtttggcagcatccttgtattttgtttttgctgcaacacccttcaactactttttaaatatttttttttcaaatgagaattttttttattattttaatatttatatttgttatacctatttttggactatttaatgaaaaagtcaaattgaatgccacgtggcataaataataaattctcacaataaatacattatgggacaggtcgaaaaaaactcagga

SEQ ID NO: 249080 - DNA, 644 bp, Cannabis indica
cggagccaggattaaatatcaagggggccaataaccaacgacacatgcaaaaataaaacttcatatttatgaattttagtgaccaatatttttatttctagatggtgttaattatatttattggtgatctaatatattattctcctaaatttaatttaaaatttttataaatattataaatcgagattaatatatatgaatcatttaattaaaaataatcatacatattttgaggtatctttaatttattatgttaatttatataaaaccacacttacacacattcatttaactaatattatatatatatattgtctttttgaaatgtaattaatattttattagtataaaaaaaattgtatttcattatatatattaaaatattatttttatctttttgaaatgcacagttagcaattaaattaatttattcctattaattttactacagttccattgactttttaacttagttttctttatttaatattgattgttaattattattatataagacttatatttcacttgtacaaagctaggggatccattgccactataagttttaatgtacatctgctcctacctataaccttataatgttatttatttataccataaaaaaaaaataaactcttgtaatt

SEQ ID NO: 249081 - DNA, 1209 bp, Cannabis indica
taacagaatttataatcatgaaataatcatgtgaaccatgcaacataaaacgttatttttgatctttattaataagtaaatctgactatattgaaatgggttttatttagggcacaaaacccaacacttgggtctctggaacaagctggcttcaatctacatgaagaaatcttttgtaaacaagttgtatccaagaagaagttgtacacattttgaatgaatgagtcaaaagaattgagaaagcatctatatgattataactgaatcattcttgatcatctaaaaaatctcaggataaaaattgatgatgaagactagactataatcctgttgagtttacttcctaagatgtatgagcactttgttcatacaatcttgtatggcaaagaaactctgaccatgatagagattaaggctgcgttgaattctaaagaaattcaggaaaaatgagatgaaaaagaagagaccgatggggaaggattactcattgttaaaaaaaaaattataagagggaatacaagagaaatcagaactcatatggctaaaaaactaactattcaagatccaattctagaaacttcacaagaggtccaagctctaatggagaagcatgttggtttttatggtccatatcagagttataaaagcggaagaggaatttgataaaaatagttcttatctaatatgaaccataagcttaagaatctcaacataatatatatagttgaaattatactgaaagaaagatcatacctcttgaagcctattaaggtatccttatttttttgttttgtataaataatgatcatccaatctaagaacatttgttgaagaatccatactttgatcttccaagcttaccttaacactcaagaatagagtgggctattagggtttcatactatctttttttatatctcatttatttatttagttaaatttataaaaagtttttttaaaaaaaataaagaaattaataaattaaataactaataatctgtattttttattaacatatagtggcatgcaaggcatgactgggtacacaagtcccaacacgcctagcgcgtcactatatcttaatcttaaatttatttaataattaattatattattatgatatagtggcacgccaggcatgtcaggacatgcttttgcaatccctcctggcttgaccctataggtcagcaattttttttttttttgaaa

SEQ ID NO: 249082 - DNA, 1090 bp, Cannabis indica
gagaagtaggaatgaattgatatggcaaaataaaacccccaatcctgatcaggtggtgattcagattaaaagaagtgtcaaacaaagactctttcttatttggccaaagaaagttagtaaggaagatgtaatgtggtttaataatttgtaaatttgtatggatacacactgaggcctcccttattgggtgtagtgctcttagcttgtatagaaatgtagtttgtgcaatgaatggctaatttcccccaaaaaaaagttcaaaactcgatttctaactcaaaatcacctcaaactcaacaagtaaacatcagaactagtcccatgactacccgagaataatcctataagctcagaacttttataactattctaattcacaaaaccactatatgaaactaattgtttttaaacttaaaacaaaattaaaccataccttaagctttctcttttcaaagatttgctatcctgctgctacaagagcttaaatcactaggtttcgggttgaaaatcgaaaaaaatagatataagaggaaaacgttttatcaaagggataaaacgagtttcgttagttcgttcgttctttctgtttcattgataacttaatatataaattaacttaacgttaacttatatataagtaatattatactaatatattaatagtaatataataataatataatattaataataatataataataatacaatattaataaaaaatttattattaatagttatcttattattttttagtcattaagaaacttctacttttagggtatttggccaattccgagtaccccaaaatatcttggtatttctaaagcaacttatcccaataattccatcaatatttctaactaaaactgttgtgacatttttgacccctaatcgggtctccagggttgccgaacctaaaaatatttttatttcaccaataactcatattatacccacttatttcaaataaatctccgtaattgacaaattacacttatatatccacttatcgagtcttcagggtcgccaaacctgaaaatatttttattccacatatagctcatattacattcacacatgctatata

SEQ ID NO: 249083 - DNA, 1119 bp, Cannabis indica
tctcaacatttgttaagtgtggttggtatttgagatactatttagttatcctcttttgaaagtataacatgtgtatttatctctttttatgaaatttgattagttacttgctctagaataacttgttttacttatcaatataaaaaaaatataagaaaaggggagggaggcgcttttgacttgacttgtgggctaaggaaatttagttcttgatttgtttggtaagtatcaacatttactctaattgattatgatgagtttccttttaaagattgatatcttattctttttattttgtttgtttgttgatcatgattgttggtttagattttaatttttttttaagaaaatcttagtttctttttatctttggcccttatagataaacaaaaagggggagtatttaagattttaattttgattgtatactcaactgtccagggggagttaaggtttgtgtttgtgtttaaatttggtcaaagttagctttttattttgatgtaatgatgtgtttctcagggggagcttatatggttgttttgctaactttattttgtaggaacttattttttaaaaagattttgattatttaaagtgccaaagagggagattgttaagtctttttttggtaatttagttgtcaaaatattttgtgcatttttattaagcatttaaattgtttttattacattaattttgtgcatttaattactcttttcttctaaggaatgattccttctcagctggtttctttttggtttagaaaacttcttgtaagagaaggaattttcttatgaaaagttgtctaactttgggaaacttgactttctctttttctaatggatgatttcgattttgcctttattagaacaaatcaaataaactttatttggcaggtttgaagtccaaattcgtgatcttggttaaatttggaaagtttcctttctagtcctgatctgctgctgcaaaacccgattctgatgctacaaatcaataatttttttaagaaagttttgtacaactgggaaattgtgtttgtggctgtctctagggttgctatgtttctataaatatgacctagagagcagccaaactttttttatctcttctagtctcata

SEQ ID NO: 249084 - DNA, 951 bp, Cannabis indica
ccacttctggcttgataccttcacggaccataaatacaggtaagtgggccgcaacattgtaacattgcccggcttcaccttgattacccctcacggtccctactccaacttcctgggtaggaaatttcagacataagtgccggataaatgtaactgcgccaaagtccactagggccggtcgaccgaggattgtgttgtaagtagttgggcagtctaccactacgaatgtgcagtatttaaaagtgctctggggtgtgtctggacacaaggtaactggctgccccatctcacctttcccattgggataagtgtggttccattgaatcccgtgagctgggaaccgcttggcgaaagatcccggtccgtgaggcctatcgctgtgaaggcttctttaaacaataaattcacaaaactcccattgtcgatcagtattctagccacaatgttattggcgatgggagtctctatgaccagagtgtcatggtgaggaaaacacaccatctttgcgtcttcttccgtgaatgtaattggttgatccatgagtcagggcctttgagctggaagctgagtaacttcccacacctcactgtgtttaacggccccggcgtagcactttagttcctttagagtggtccctctgatatggggccctccagagatcatagccactcttccgttgggtctcggtggtaggccagaagtctgctgaggtcctcccgagggtgcggctagtgccagcgctccaggcgcaccccctggtgtcccttggggcagaggtccccctgccggaaccgggttgagatggggcagctagttcttgatccactcataaagatgacctaatcgaatcaggttctcgatctcatctttaagatttttgcattcataggtgctgtgtccaatgtcgttgtggtactcgcatctttgttgggatcccttctggaactatct

SEQ ID NO: 249085 - DNA, 520 bp, Cannabis indica
actaagctagtcttagtggcttatttgaaagctaggttcggttaagtgtttcccacgcccaacatttcaaaacacgaaaatttgaaccgttttcagcccaacaaaaaaattcaaattttagcaaaagagcaaacaaaatcaagtaaaatcaaactaaaccaagcaaactagttggtaagattttaagaacactcatattacatcaaaacgtgaaaaatggaaatcaaccacccctaacctcatttttgagcttcaattcacgaatgggactttgtgggtggtggatggagtgtgctgcctgggaaaaataaaatgagagataattttttaacaataaatataaaaaaatatatatatttttaaaaaaatagtattgtaaggggtttttctttaattataatgtaacatttgcataaaaattgatttatttattttttctaaatctacgccttcaacatcttatgtataattttttttctgagaaaattaatattaaattttttacatttttatgtgtaat

SEQ ID NO: 249086 - DNA, 661 bp, Cannabis indica
cgattttatgccttgtgggctgattgggttttcgcgagaatccgagttagccttccaaggagatcttgaattttttatgcgggtgaggtcacttgtattgttttcgcacattcaccacactgaaaagatcttctatctttcagatgagcgacttgtcggacagccagatgtttggctctgaaggcaatgctttcgacggcgaccaagaccaggaggatagcttcatcccgacctcgatctcaaaagaggagactccaattgctggagatgcagagctaggcccgttgtcctccgcagatatagaaaggatggatcaggagctcgctgaaccagggaccatcgagattcatgatagcaaatctacgatgtcagctcgtgaacaccttgttcattccaggtatgctcttgatgccgaagttgaggagatgggcgaggactgggaggctccagactgcgagtcagaggaagaggaggatgcagaacggagagggactgactcagtggacaacactcaattggacgagcccttctcatgcgaggattcggtttcgcgagttaccaaatccgacctaaccacttttacaaggttaaatctgttacgccttagcaccatgcgtcctcgccctacccagagatcgcatctctctttcaccaatcctgc

SEQ ID NO: 249087 - DNA, 614 bp, Cannabis indica
atacatcttgtgtattccttaaacaattttcaagtaaacaacttattgaataaaattgactcgtggactaaggccaattaatgcctcagccacgtaaaaattgtttggttctttttgtaatttcttttttattattatttcttcagttcttggtatttttatttcgtttccaaaaatcttgggaaatatttttgtacttgcattgagagctgaggaaagcagtgagattttttgcaaattacgtctgagtaatcaaggttctcaccataacccaatttggccttcgttacactggtccaaatactagagctggaggttctagtgaccctcaagaggtgtttagtcgcgagcaaggccgtcaggacgaagaaaataatctagatgctcccgtcatggaggatgcagaattaggagaaagtagttctaaggatgttgaagttaacatcgatgatgcgtcaaaggatattcatgaagacgacccttaggacaaagccgctgagaataatgttggatagaaaagccagtctgatgagtcagaccctgtggtcatcttggtgcgacaacttcaattaaatgaaaagaggttatctaaggaagatcaattcaacgagata

SEQ ID NO: 249088 - DNA, 708 bp, Cannabis indica
attaatcgtactccttctaggttgcttaaaatgaaatctcctttcgaactttaacataataagcagcccacttatgatcatcttaaggtttttggatgccttgcttatgcatctactcttgatgctaagtgccataagttttctcctagagctaaggcttgtatttttattggctatcctcacctcatggtatgaaagcttatactttattagatgttgagtctcaagacatttttcattctcctgatgtcatattttacgaaaatatatttcctttacacaataagcatccgaatgctagcattaaagattttttttaatgaatctattttgccctctacaggctcatcaaagttccaaggccaagatgatcatttgggtcacgattcaccccttgtgcaatttcttgtgttatgacaggttatcccctccatttcgtgctgccattttggctgccaatgccactgttgctcctatcagctataaagaggctgctactattcgcgaatggaaccaagccatggacaccgaaatcattgctcttgtggctaacaagacatgggatgtcgttcctcttcctcccggtcaacatgctacaggatgtaagtgagtctataactataaatatcatggaaaaggggagttgttaagtgcaaagcccggttggttgctaaaggctatacccaaaaacacaggatagactacctt

SEQ ID NO: 249089 - DNA, 581 bp, Cannabis indica
ataaatgaaagtcagattgatagttgaataaaaaaaatgagagttattttaaataataataaaaaattatgaaagaaagaaagaataatgaattttacaaaaaaaaaaaaaaaaaaaggaatggtgaataatgcaccagtaacgagagagaatgtatatgtaaataactttcgttacttttatctatttaaattaatatgggtatccttataaataaattgtgttttacgtgtttgagtgtaattttctctaatttttatatacctacctacctagcccagacaagaaacagatcattacttaaatagggcccatcaaaatattgtgtacagccgctctattataaatttgtcaccttgcttaatttataactgtgcatatatgaatatatttcctatatatgtgcaggactactatacctatgatgaagtcattattatttgatagtagtaaacccaccgcatccccatataatccaaccaatttaattcaggatcactattaaatcctgtataaagttcagaatgaattgaacatatataaatttaggaaaatggttagttagagtcacgaaaaatgtc

SEQ ID NO: 249090 - DNA, 902 bp, Cannabis indica
tagaaggttgttacaagatgcaacagtaattaactaactcctaactaatttaactaactgattttatccttaacaattccatccaagattgagactaagaaagctaagatggtcaaaattattcttgatatatatagaagattagcattgctaatgaccatgataaaatgttcaaggctttagattaatcacttcaacccacaagaaagacaaaggaatgagtaaagggagagtcccttgccacaggaaactagcatgcgaggccacacttcacctcacaccaggtctcgtgtgagacctctacccacctcacatcattcagggtggaaaaggcaccacctcgctcactacgcatgagggaagcgaggtccttatgggtagtaccccttcacctcgcgacacatggtggccaagcaaaggtccccctaaccacgcacgctctcagaccctaagggccatacacctcgttccacgaagtctctcctgcctcacaccgtacggaggccatgcgaggtgaccacctcattgaggcctcccccaccttgcgttgtacgaaggccatgtgaggtgacccccgtgatcactagggctcccacaccttgcacccaaggttcgtacgaagcctcatctactcgatgacgtctgtacgaggtggttcacaaagaccctatatgtcgtcttcaagcaacaatcattactcaaaacaccttttaaaggctattttttccatctttttttataaaaaagaaaagataaaagggtgtaaaaatactcgtctaattgaaaaattgacatttagagacggttattttataaaaaattgcagctataacattgattaaaaccatttagagcagtttttaaatctgagaaaaaactactctatgacgtcgatttaaaaa

SEQ ID NO: 249091 - DNA, 1425 bp, Cannabis indica
aaaaatgtaaacagttttgtcatatagcacctttagatcggattataattaaactttattttgacaaaaaatcaattcagggtcctatttgtactattttaaaatatacagggttcattttgtcatttaacaaaacacagggtccaattggtaacttttgtaaaacaaagagtccaaaatggtatttacccgttttaattctactggaataatttattaataaatacttgtggtcagattaagctatttatggctgttatttagtttaattatatattaaattatggctgttagttagcttaacataatttattgattaatacttgtggtcaaagtaaattattttggactttgtattttatagaagtaacaaaatggaccttctatttgttaaatgataaaatatactttgtactttttaaaatgatacaaataaaattctgagctcaattttcgacaatttttttttaattataaccaacttgaagataattcttaacacgaatagatgcagaaaaatttaaccagttttattataacacctctaggtcagattattattaagttttattttgacaaaaaatcattttaaagtcttatttataccattttaaaaaatacagggttcattttataatttaacaaaataaaaggtcaaaataaattttactttattttttttatttattacatgcatcttatctatatatttatatatttatatatatataagtgatatgagacggtagtgatgtgacattttaaaatcacttaaataactctatttttttatctttaattctctaatttttttaattttttatttagaaaaaaatcgataacatatcattctaaaatcactccaaaaattaaaattagggtatattgaccttacaaaattcaaactaaccatactggtcttacaaaaccaaaactagtcatattggccttataaaaccaaaactagccacattaaccgtaaaaaaatagccaacattcactgtacaaaataaaactggccatattgaccttataataataataaaaaaaaaactcaacttataaaactaggcataccagaagtgacacttttttttgtgtcttgtcttttgacatggttgtttagtgtgtcttccaaaagttttgtattgtccgatagtgctgtgttgcttgtttttttgtactgctatgatgaatcaaagataatcccaacaccagaacatagttgatgactatgccaacatcacgattaaagatgatgatgaggaagggttggtatttgatgcgggggaggatggtttaacagaaatcgatgatagatggctgttagtgggacgcttcttaaccaaccgatctattgacttccaagccatgcagaataagatggccactttgtggtagccgggaagaggtttatatgtcaag

SEQ ID NO: 249092 - DNA, 581 bp, Cannabis indica
ccatggccattcaagacagttacattagaattaacttcatcactatatataaccataagactcatcatcttgatcagtctattaatacttgagtagcccatatacagcctaaaccctttttgtaattacttctgatggagaagtgacgctcaaaatctattataattatttttttctttttattatttatttatttattattttatttttttaaaaaaaaatgctagcttcattcttctacatagaaatttattatactatcgtaataattttttttatttgtcattcatacatttactgagatttccatttttttttctttactatttgaatggaaaatgtaaagtttgtgaagagtgcttcacagtctgcagcttcatggacatcatccagctccagttctagcggcagagaggaagagtgcttccccatggccttcttctactcctttctcttccaggttaccaggaaaaagctccatcattggtgttttggctgtggctggtttaaaaactgaaggaagagtgggaatgaaattatagtctattgtgttgtggctgtgggtggttggattaaattat

SEQ ID NO: 249093 - DNA, 795 bp, Cannabis indica
taagtgaatatgaatgcaataatatattttatatgttgataaaaaaagttatgcgattaaggcataactaggttagactcggatttaaaaccgagataaacaattctaaggcattattgtaaatagacgtgtgagcgtaacacgtaggtctatgtcaaatagacaatagacgcagtaacatcaatacttaagtgattttgattgatattcatattatcatttatattgtcttgctaggccttggctcacagatgctctattgtgcaggaaagggtaagtcagttgttgattagccatgaggttgagggcttttacggtgcattgtacatgttcaggccaagctagaccacgagcgttgggtctaccagggggaaatgttgtaatctccacttttgctggttatgtcggcgtgtactaattaatgagttgtaatattttgaaaaaaatttatgggatcccaaaataaaatgtgttcttttagatgtattgtaaagttcaataattacaagttattatttttattctgtatttttaaagtttaatttttgctcttggctctagtaaatttcggattagcgggataagtatgtgtttagccacaatacgtttagtattgtcgacggttttccagtgtcgggaaaaacttcttccaacatttttttcactaacgtcaattctacctagttttgctaagaccgacgggaatactattcgagaaatcttaattttttagtagatgcacaccgacattattaagataaattagcgtccgtttgaaactgacaaaaagtctca

SEQ ID NO: 249094 - DNA, 778 bp, Cannabis indica
atattattagcattagtaattaataataactaatttatgatgtagtattatttattgtcaacaacttaaataatatatttcttatatacaaacaaaaaaaaggttaaaaaaaagttatgtatcaatttagtatagattcaaaattcaatattattatgatgtaaaatttggtacataccaatttggtataattcttggagtagaatgatatgaggatttaacactaattcgatgtaatggtgcacttttggaggtgctctaaataattctagtgtgtttctatagtgcactccaaaaaataagtatactcttgcatccgtttttattttcaatattaaatagttatgatttttttttatatatacaatatatattataattttatatacatgatgttatttattataattatttaagacatcttacaaatttttgaaaaattcattataatttataatacagattgtaaggtttaaacaatctatttcacatgcgtataaaatacgtttattttgaatttctcaaaaatttacagaatatcttaaataactatgatgtaaatatatatatagttaggattaaaattatctggatatcaaaaatgtgaaggggtatatcgatacactcgttttttaggagtgtactgtaaaaaaaattaattgttataattttaattattttataagacaatatacattatagttgtaataagtaccacatcaatttctgatcaatttatgttatcaaaatcaaattataaatagcttgactagcgagt

SEQ ID NO: 249095 - DNA, 1233 bp, Cannabis indica
taagaactaactaaaaacatgttattattatccccccaaaaaaaatacatgttccaaatccatttcaaaaagataaatgttccaaatccaatacccgatgtttcaaatccaatgcttcatagattttctcgcatataaacaaattaggattacacgccctttttgcctatattaacttatttgacacatataacaacaaagttgacacaaaacttgaaacaatctagtgtccagaacaaacaagctacgggttgagaaaggagattaaagttagaaaagcattgaatggggaatatagtcaatataccattaataagtaataaaaacccacatctctaatgcacatagattaagatcactcaacaaaaatcaaacttgctactatgaaactgcaatgtaaaattcaatttctgcaatgactttaaacaactaaactccaaaacatttgtctactacttgcgccataaaaactgatttattataaaatcaagagtaaacccaagattgaaattgacgactttgaaattgaaattaacgtctctttatccatcatccatatatcttagtactaaaatattggaatgcataagatcaagcaatcaaacaaacacatggtatttatttcaagaaactcttcttcgacgtaggtacatatattttttaattacatctcattttgaaacattacaattaaaaagcaatggaagaatgaatacagcactttgttaataccttcaataacaagccctgctttcaaatgataaccctttgtctcaggtcggcgagggcagggagtggagtagacctcgactgaagttctggactggtcggcgagggcagcgagtggagtctaccgtcgactgaagagatagactagtcggtggtcggtggtcggtggaacggcgacagagattgatagtgatgaagagaagaaaattttggtctaggtttgagtttagtgaagagaacggctgtaggagtcagaagagaaagtggaaagattatatttgggattagaaattagctttgttctctttttttttttaatattaatgtagaataatataatataataatattatatattttataattttaaaaatatatatatataattaagttcggattggattcgatcggttaatttctgaggttaaacaacatccaatccgcacaagtgcagattttaaattttttaatacaatccaatctgcacaagtgcggatattcgca

SEQ ID NO: 249096 - DNA, 872 bp, Cannabis indica
tcaatgttgtattttgctcaaattgtacagttgtggtctaatgcactagggataaaataaactttattttaatagaaatgagagaaaaaaagtcaagaaaaatatttaatttttattgaaagtaaataaaaactatataaaatatataaataaaaatatagggcttgtttggtatgttgtattaggtcgtactatattatattgaatttgattatatatcatatttttatataatactatattaaactttaatttatactaaaatattatatatttaggtgcctataaaagtcaatactatttatagttttatataaaaatattgcataaaatataatttaatataatattatacaatacaatgcaatacaatgtaatacagcgtaccaaacgaacccataaaaagttcttaattacattactaactggtaaaaaattaaataaaaaaatgatattattgtgtgtaaattttggctcatactatatttgtcaaatttaacatactttttagcatgtattaaatttaaaccacattatacgaagttcttttatgaaatgggctaaaaaatacataacactatattgaagatgctctaaaaattgaaaatgaaactatagatgtcacttacaattgtagatagattagcaagtttaaaggcacaaagctttttatctggggcaagtttgctatggcccaaacgagcaagatggattgtctcaaaatcactagaacaaattaggcgtaaaatatcattgagaagactatgtttttgaagattgttcatagtaggaatcctattagacaatagtctaggtagaaaatggtgaataaattctatattgtattccatagtatatatttatatacaaag

SEQ ID NO: 249097 - DNA, 717 bp, Cannabis indica
tttattttaatatgtcaaaataaactaataagtttatttgacatatatgagtatagacatatctaattataagatttttggtatgatcatcatctttttatttaaaattgatgatttatcaaaagtaaccaattagtatcttatcgaaatcataagtaattggtccaaaaaaatatcatatttatgatgatttaaaagttatttgtaatttcattctttatttaattaactaatcaaaacacatatattaatttacatttaaaatatatcagtgacttaaacatttatgatatatatttttttaaaatacagtttactaagatggtaagttactgaatgacaatttattatttttaaaaataaacttgaaagttactcaaatgtattaatatcatataaataattaatcgattattgaagcacatacatataaattttaaaagtaactaaaatgtatatcaaattatataatataaaagtgatacatttttttttatgaaaaagttacttattggtttattatcaacatcataagtaaccaaaatgttacttttgaaacgcaggaaaatttaaaaattaaagaatttcggaattagtttcatttcagacatattattttaaaattaaagtattttttaatgacgtagcacagtggcggacccagaatttaattggagggtgggcgtaaatttttttcatatataaaaatattccaaa

SEQ ID NO: 249098 - DNA, 923 bp, Cannabis indica
ttggatccaataaatcttacaccatactcttccaaatctatccaccacacacaaggagtagtgtgggctactacgacaaggtgtatatgaagttcttgtatgaaacttgagcaagaattattttttatgtgatatagagaaaaaggtttactaataaaattctttttataggctatcaaaaaaattacgtgaaaattttattctaaaaatttgtgttcaaaactttgttatatagtatatttaaataagcccaataaaaattttattttaattcaaatctatttattaaatcatatttaactatttgaacaaataatataactaaatttggttatagatatttacatctgttaacttgaaaactttttctggtgacgtggacacaatgtttgacacgtggcatgaaggatgacgtcacaaagttgagtagacccgagtcatagtagtcaacatgggaggggaccttagccgtacgcccaggtagagtactctaggatctccgagatggaagttcgctttaataactcgaatccaaccttctatatttaagtatattgtaccatgaagacatggagcaatgtactacaaggtctgggagctaaaattacacgaacctgcaactcagaacccaacctgggcacctagggtttcctcccaatgcctaagttgacatcctcaactaaagtttcagttttcgggaccgtcttagtgaaaagtggtcaaaacttgcattgagacatcgacttgacatactacagacatatttgaggcatcagaatcagattcagaagcaagttgatttttgagcacttagcacccaggttaacaatctgtcaattgggcgccttccaagcatccgatcaaagatccgacttttgcattgaatctgtcttctatcaaaaactggaaaattggtccttcca

SEQ ID NO: 249099 - DNA, 880 bp, Cannabis indica
tgtattttgtaaaagtttaaaaacgggatcctggaacttgtaaatggttttgtaaagttttaatttgacacgatttttgagtaagttctttgattagaaaagatagcactgtaattgaaaaattactgtagcgtgccttagcattagggagttacaatggtatcagagccgccacgtttgtctaccaaagcatgccaagacatgtacaatcttcatcaaagaaagcttggctcactgttcagtaagcctgtacttgtttagtttttatttgaatattaaagtatgttaggaagcatattatattatcgttatttacttttaaatgcgtttccttaaaatccataagagcggtattaagttttatgatcgctgtctaacctgccttgctcatgggttcgtaggctaaatcctattaaatggacgcccaacgaaatacaaaaagttagggtgaattggttgagaccgaaggcggttagggaaatcaaattccccagaatccatgtggtcgcagccgtggctgtggcagagttcagggtggtcgtcttgtaaatccaccacaagctccttcagattaggagcaaaggtttacgaagatgcaagatcgaatcttccaacaagatgaagaaattttgagattaaggtagcaaggtcttcctgccgtgcctctacaacaagctcaggctgttgtagctccagcggtgccagcagaataacctgttgctgacaaccatatggagtcgtcatatgagaggtttcgtaagtaagcacctccagtgtttctgggaggtccagatgtgaggaaggctaagaagtggctcactatgattaagcaaattttgaattttatgggggtggttggtaatgatcgggtgacctgtgc

SEQ ID NO: 249100 - DNA, 582 bp, Cannabis indica
tttcagatgttcaagctcaagaagttcaagcacgaattgattttgaagagtgtcaaactaaacttcaccaacaacctttagattctgatctgcaagcttcagaactagaagctaggaatatttatgtctcaaaacacaaaactttcctagcttttttacaacagaaggcgaagcttacttgggcaaaggatggagatgaaaactctgctttattccacaccagtattcgtgaaagaaggcatcataatcaggtactttcaattaccaatactgatgggaaaagagtagatgaacccaaagatgttatagaagctttcattcactattatttggaattactgggtaccagtatgcgaaacaaaattagtgtcaaacaggggattctaagagaggggaatgcattatcaaacagccaagctgattttctaatggctgattacaccagagaagatgtcaaaaaagtgattatggcaatcccaggagtcaaagcccctggtccagacggattcgggagctacttctttcaaaaaaactggaaaattattggagatgagattgcagaagccattatttcttttctca

SEQ ID NO: 249101 - DNA, 620 bp, Cannabis indica
aagaaaaggtaatcaagaattcggttctaaatctgtgcctaatgctgttgttgaaggtgatcaaggtggtccatcatcatctaaggctcatgagcatgtaactcgttttgagtacgaggtttaaaaaaagatgtgtctcttattcttcgccagcagcagattattatgtctgtttttgctgatttgaacagaaagatggatactcttattaaggtattattttttgtttcctttttaatgtagttgtttggttatttttgtattgtttttttattcaagttttgtttttttcttagtctttacgttctgcttattgccactaatcgagccaaacagagaatgtgcttcgctcctcaaataatgatgatgatcttgttggtgatggagaaagagatgatgatgaagaaattaatttgaggatgacgatgagcctggagatgatgatgttaaagatgatgatgatgttgatgataatgctaatgacagcactggtggtggtggtggtccagatgatgatgattgtggacagtctgtgtctgttgttgaaaaagtaaaaagtgatgagctgcatgttgttattgatgatggtgcaaagcctaatgaagatgtagtagatgcat

SEQ ID NO: 249102 - DNA, 983 bp, Cannabis indica
ttatagaagctatggattctatatctatgattagcgctcccactcaattgcactaccatattcccaagatgtaagtattaggtcaatccaattggtcagctttaacgaacaaatcaaagaatacatataatatatttaagccagaacctaaccatctcaagattaagatctgttgacctaagatcaactaagggatattgacttagaaaagacataacaataagtttatgaaatctttcaactgtcaatatcggtccactctgatgtatacacaatacattttatactagtacactttgctaatgccctggaaaagacattccacataaaattttgtaagtaaattttattgttgattataacgacagtgtaaatccagtacactgataaatcatgggactaaagtctttgaagcatataatcactattactttccactgtgatgacagcattgtcattgtgaataactatatattttggatttaatagaatttatataataaatataaaatcatgaaattaatcatgtgaaccatgcagcatgaaatgttattaattagtaaatccaattatattgaaaagacatttatttagggcattaaatctcatcaaactcccacttgcactaatataaaattagaattgtatttcaattaatctcaacaccttgatgtccagatcaagtgtagtatgtagtattatcattgtaataggatttgataggttatattcagtatcaaccttttccaccattatatctcattagtcacaaaattattgatgatgttaaattcctttctatatgttcactgctcttatggtgttggattctttacagtttagaaactacatatgtgttatcaagaagtaacactcgtagttaatccatgattggaataacgccaaaacctatatacaactttccataggctaaataattatctagtagccttttgggccattttaacattcagtctcactgg

SEQ ID NO: 249103 - DNA, 865 bp, Cannabis indica
tatatataaatattgttaattaatttgttcagattctgagtaatggaaagtacaagagtcatgttcatagagttgtggtagacaacaacaatgtgaagagggtatctgtggccacacttcacggaccatcgttggatgcgtttgtgaagccgatgcctgagttcctggatgatgctctcccacccaactatgatggaaccacatataagcactacttagaagccaatggtcaacacctaattgacgttcagtctaatattcaacaatttcgccacaattaatttatgataataaacaattagccatatgaatttgagagatagaaaggatatcgaagggtgatgttttgtgtagctgttatgtttactaaagtgtggaataatagattgttataagattgtcaaaggtgaaatgagggtcatcccaattgaaataagtcccaccaatcacatgtacatggtttggagtggcttgggataagcactcttatcaaagttaatgtactattttgttgatttgatttgttaccaataatcaaatttgtgttttaactgtgctattgttgagaaatgataaaagaaactaataatggtatttgatacttttttttaacacgttatcgtttttgtgcaatcaatactacaaaaaaaaaggagccctatctcgacgggcacgcaaataggtctgaatttttctaaaaaaattatgagtgtagcaatcttggcaggcattgtatgttctgtcgttattgatattttttaaacttaaaattttaccaatcttggtgggtcaatataggctcacaattggtcccttaaaattcctcattgggttgtgttattaataacgacaggccaatatagac

SEQ ID NO: 249104 - DNA, 557 bp, Cannabis indica
tattattcttaataaatttattttgttgagcaattttgatcggttttctaaaaaaaattatgagaaaatcaaattttattttaatttttaaacaccacaaaacatcaatataattatataatttttaagaattactaaaaagtactagtgtctagtcctttcttgatatcatactgttattggtgtaattaaatatcgagtctcatataatttaagaaaataacttttaaagaatatcgttaattaaccaatcgtaaaacatcacctataaaaattactagatactagctactagtaatgcctaatagcaatacatcaaaacatcatttcaatctatattacattattttatatagatgtttacaagaaaaatgattggaacacactcaaattacacacttcatacacataataatatgtaattaattagcatatatatatattataattaatcttagttgggatgtccctttttatgtgtcatgaaaaataaatatatctatatatatgcatatgatcgataatattatgctgttttggttttttatgcatggatg

SEQ ID NO: 249105 - DNA, 572 bp, Cannabis indica
tcttttaatttttttattaaaaaaagttattaaaaattaaatttagggtactattttgtactatttgaaaaaataaaatatctaatttatcatttcataaaacaaaaagtttatttaataaattttgtaaaatataaaattcaaaatgatattaagttattaagtgttgtaaatataaaaaattatcatgtaacatgtattactcagtacaaaatttgggcatgccttgtacaaaagttaaccaaatttattcttaatatattatcaaaactcttattatactgattcattattgtttagcttttaaataattttttaagttagatttaaagaaaaaaaaaactaaattttaaatattttccaaatgtaagcttctgagttctgagactatatttacatgttttataaaatatatattttaactattgctcatttaataataatttgactggttctgtaccctaataaaatagatacattaattcaatccctaaatatttcggcatctgtaataattttttagttcaaattttttataggagttatttaagacaaattctctaaaattttga

SEQ ID NO: 249106 - DNA, 504 bp, Cannabis indica
agaaaccatgttacatctgtcctaaggctaagcaaagaaagctcccttttcagaataataatcactttgctaaacatgtttttgatcgaatacattgtgacatatggggaccttaccatattccctctcattccaattacaagtattttcttactcttgttgatgatcattcccgttttacttggatttacttattaaagcaaaaatctgatgtttctcacattatacctcaattcttatcttatgttcaaactcaattcaattgtattttcaaaagtttcagatctgacaatgcacccgaattgaagttcactgatctttttgctaaaaatggtatattgcatgagtttacatgtgttgagactcccgaacaaaacgccatcgctgaaagaaaacatcaacatcttctaaatgttgctagagccatttattttcaagaaaatatgccaattactttctggaccgattgtatactaactgttgcatttctcattaatcgcactc

SEQ ID NO: 249107 - DNA, 709 bp, Cannabis indica
aaactatagttcatttacaactagtttacaatacagttattacaaaatcaaggttacatttcaaaaaataaaaagaaagggtcaatcctgattcccagaagccaagacaccacggctgatacgtacaatgctggatgacctctggctcatggctgaacacatttgttatacttctaacctgcaccacaaagcatccgtgagtcacggttacttagcaagaaaagatactagataaagaaaaatcatggaaggtgaaagcagatttcattacaacagattatacataccaataggtcatactctttcaacatacttattcaattcaacatctatacgaataaacttattaaaaaataaagagtattcgtaactatacataatcaacatctccaatgtttcattaaacaccttaatcatactttattataaatacttattttcaatgcttcataaagcactctagttcacacattagcatatccacacaatttcagtgcttcataaagaactctaatcatgcatcattaaaaacatgtattcttacatccctaggccactgagactgcaaaaaaagtgaccaatttcataagcaatataacattcattcaaccataccataacagaaatgtattcaattacaactcatcacataataatacacttgatccatttcacaacatcgtaagcacctaatttcggtacttcataa

SEQ ID NO: 249108 - DNA, 1069 bp, Cannabis indica
cccaggatttctctcgttattataagggatttccttttccctagatcgaggctctctcgtgtcctcattcctacgagaagcctctggtacatcattatgttcattcccttggttcataaatccttgggatccttgaggaacttctcaacgttgttcttgattattttgtttgaaacatccctagtacccacaggtttctcctcctggtgttttggggatttccttgatttgctccctatcttctggttcttgaacctcgaggcctgcctcgtggtctccttaccccaggattgggttgattctgagtattagttccgtgagttgccctagccactccagccttcctttccaactcagtgttttgtcgattaaattcggctaagcattgtcaaagttgtctatttttcaattccattaatggtatatacctagttagatcatacgcatcctcacttctaggtatatatcctacagaagtatttgtttttcgttcctctcttcttggttttgattatcaccaccataatttctccgtgtacgtcttgttccaaaagtatagggtctttgagaacccattgactctttcccaagtcgatgtgtagtttcctcaggacgatttctatcgttttggttgtgatcaaccatggatagatttctatttgtaaggagggatttatgaaagtaccaaactgttaacgcagattttcgttaactaaaaataataagcctttataataaatatatcacgaaaatagtaataaactattaaataactctagagcttttacgtggttttgcagttaaatctacatactccacgagtctatcttattataatattttttttgtataattgatacaatatacacttgatgatctttttctctaaaaaatattcatctattttattacggaatctggccctatttataggaatataggttggcggttatttacacttgggatcaatttaaaatataaccgttcataaaacgtggacaattcccacgtttcatttaaatgcacgtgggataatacaggataattacttaactgttttttgttctta

SEQ ID NO: 249109 - DNA, 1364 bp, Cannabis indica
aacactttgccattattccacatattgaatgaactctcatatatcccataaacatataataagacacaattattaatttattaattaagtaataccattaggggtgatacaaaagaaaaggactagaaattctaattagaatctaacattatacagctaagaattaaaacttctcactaacctaactcgaagtagcacttttaagaaaattaactaaacttcttacaatattaaagcataagttcaaaatactaccaataaagtaaatacaatatgttaatactaagataacaattagcaaagaaaacatcgtttaaaatgttgaagagtaattagtagatgtctttctcattatagatagactctttacgaaaggcgaaatccacatcaaagcatctctccagtctgatcccttctccagtttcgatttagtaataactctaagatgctcccatttaattaaaggagaacgatacttcatctttatttctttcgggaatatgatcgccttcacagcaaaatagagaaatcatataaagttaattaaaaaaatgaacatgttaacgttgcaagtgaaataataacagaatcaaagttaaaaacacaccttttccgagtcaatatgcaagttcaccttattccaagagcaattgagcttcgcaaaaaaattcatcatatcaacaaactaattagtgtcataattcttagattgattaagaataatgaattttctattcaacaaattggatgacactattgatacactgtgcttcatatttccttcataacaaaatgattccaatttcgaagcttcaacaataacttttggttcatcttcaagagtaatattactaaacctcaacttcaaacttttcaagtgatgattcaagattttaaggttcttcaattgcaacaccttcgaatcacataaggtcaaattctcaagttgaggaagatttgaaataagattttctaacgacaaagactctttcataccccaatcacaaaccaatacaagattcctcatcaccttccctaaggagagattcattttttcaaaggaaaaacaatatagttccaaagattcaagattcatggcttcaatttgcactaatatatcactatgggattcaatttgcaagaacttgagacttaaactacgaaaacgaagccccccacgaattaatccacaacacttgcttaacttcaaattctcaagggaaggacaacccaacaataacttatcaaccacatcattatttttaaaccaaacaaaacacaatgacaacaatttcaaggatggaaaatcaaatgagtagttagaatccaactccactttactcaactccaacttagtcaaatat

SEQ ID NO: 249110 - DNA, 971 bp, Cannabis indica
taataataataattcatatatattatatatagctaattaatcacaataattaatcccatgcatagtcattactaattaatgattaatacagaattgtatgcatgtcgtttaattaattaatagcataaagaaatgtcatcatcctactaattgtcccatgattaataacaaatcatccgaacagtatttgcagcctattatattgactcaattatgtctacatcaatatatagcttagtttttaatatttacataaaaataaaatatgacacacaatgatatgcatgtaacactagttttaaatctcaattttattaaatgatagattggataaaaaatgactagccatagtatgaacatattattttgatcactctactacaaaagatttttttgtgtcggttaattataagttgacacctatataattactcaatagcatcggtttatctgacacaataaaaataactctcactaaaattaaatacactctaaataatttgatgtaatccggcctcatcctaagcataaaggcttaggcctgtacttaaggactacttagctcaagtacctaaaaaaaatttctttttaaaataatattttttttgctaattttaaaaatatcacatttttttattttgaaataaggaccaattttttttttttcttatgacctactatatttcacgaccggccaaaactgtaacgtacttagcttaagagcggtgccggttaaattacaatcctatcataatctaacacttattaaaataaactaaatacatttttgggtgggacaaaatgagatctctactccttctactccctatattagaaatgctaactagcaccctcctatgtgtcaatatcgttattggtccaactaagtatcgggcctcatataatttaatataatagtttttagagagtatcgctagccaatcgcaatgcaacatgtcgagaaggtgcta

SEQ ID NO: 249111 - DNA, 6385 bp, Cannabis indica
ataaaactcaacggctagcctttgaaaagtcttaaagacactcgaatggcctcgcactttgctgctataatattcaataaataacataggacatggaaggggaagaggccgataacaccacatgaccacagaatttgagacagccatgagtcaaagagaaactcccaccatcttgtctgcaagaaatctccgagataatcttagccaagtcaaggtcagcggccacttgagcttgtagatcaggaatggatagcacactaggaacagtaatggcagccaaagaagccttagctgaaacccgcaagagagcattgactgctctattttcggaccctggcttatactgaatatcgaaatcataccccacgagcttagtgagccactttttgtgttccatataaaccaatcgttgctccaacaaatacttcaaactacgttgatcggtccgaactagaaactttctgccaagtaaatatgggcgccatttttgtattgcaaggacaatagccatcaattctctctcgtaaaatgatttcgatcgagcgcgaggagacaaggtgcgactgaaatgggcaagggatcattcatgttgcataagaaccacacacctaatcccatactagaagcctccgcttcaaggacaaagagagctgagaagtctgcaaagctaatacatgaactatagcttgcttcaactggtcaaaggcacattgagctttcgaggaccataaaaagcatcttttttcaggtggtcggtcaaccgatgagatatgcttccatacccctaaacaaacttttgatagtagtcgatcaaacccaaaaaaccccttaattctttgatggtggatggaattggccactgaagcattacaaatattttacttgggtcggccgacaccccattggccgagatcacatggcccaaatattcaacttgtggcttaacataaatacacttcttccggttagcatacaattgatgttgctagagtcgttcgaggaccattttgagatgagtaatatgggctgctaaagttggactatacataggaatatcgtcaaaaaagactaaaacacaagagccacgaaaatcacggaatacctcattcatgagagcttgaaaagtggctggggcattggtgaggccaaatggcatgaccaaaaattcataatgccctgtgtttggaaagctgtcttttcaacatcattgggagccattcgaatctggtggtaacctaacttcaaatctaacttcgagaaaatagcggcaccatgtagctcgtcaagcaacgcatcaatgactataatggaaaatttatcgactacagttgctcaattgagagcccgataaacaacacaaaaccttcaacttccatctttcttttttactgataaaatggggctggaaaaagggctcgtacttggctgtgctatccccactcgaagcatttcgaggaccatcttttcaatctcaacaaactgaatttgagcatgtcggtaagggcaaactgagattgcttcggtacctagtttcagcgtgatagtatcgtcacgagaccgaagtccaagcggcaactcgaacacatcttggtactgatcgaaaagttgagtgactggggtgagtatcagtggctattcatcgcattcttcagtggccaatgagccaaattgatcccaataagcctcaacccccttctctactgttaacatcataaccttcaaggatatcgaagacttacacaagctgggatctccctgtaaagttacccatgaaaccggcatctcaaatttcataataattgttttccaattaacttgcatattgcccaacgtctcgagccatttaattcccagtatcacatctgctctgcccagttcaagtggaaggaaattagttattacctgaatggctcctaaatcgagctccacgttagcgcaaattcctttcgttcgaacagttccgcctgtaccgagaagtataccatagcaagtggtggccgataactaaaaacccacagccgccacaacctccattgaaacaaagttatgagtggctccactatctatcagaaccatccctagctgattcccaatttactatgctaatttcatcgtttttgccgtttgagattccaatgagttcagtgagagagtagcaagcgtgtcttcggtagctattgtttcagtggaatctggtgagggggtgagtcttctttcggtgaattgaactcttcttcgtcaacagtgagtagaatttggagtaatttctgctcgcattcccttcttggatgaaactttttgtcacactgaagcaaaggcctctggaccttttttcttggtacacgacctccatgagccatttgtaaagggtgatggacaccgaccgactgctgcctaccttggaagttgtagaaaccattgatcctgatgaagaagtggtgaaggatcgttgtggctgaactgtttgggtgtttcttgaaatgaaggagtttgagttgaatcgggttggagataacaagcccaaagcggttttatagttatgggatttcacaattgggcctgtgttcatcaagtgatggccctcttctactccttgggccgtctccattatctgggccaatccttgggattgaagaataagcaaggccgccttaatgtcatctcaaagacctctaacaaagttcccctccataatgtgatctggtacatcgggtacccgcgacgccagcatttcccaattaacccgatactcccgaactgaacccgtttgaaccactgacaaaaaattctttcgataaaaaccccattggcaccgcacgaaatcggagaagaatcattttcttaagcatcgcccaagacataatcggacggcgttaattctcccactggaaccacgacaaagcatccccgtcaagtccaaaaatagttatatccagcatcattgattccgtcatttttgatagaaggaaataccgctcggcacgataaatccaaccgtttggatttttcgccattaaaccacgaaatctccattcgtggtgggcggaagtcatggctaagggatcggccattctgaaaggagccgagctaaatcgaaggcccgaccagaaatctagaatggtggtactgccatgtttgctgagaactttgggggatggctgagctctaacggcactgggttcgccaatcgagaccccctcccttcaacagcacgccgttgtcgatctgcaacagccgcagtcgcatcgggtgtggattttctaggtggtagaaggagcagtgagatctgactcaccaccgattccatctgcttggcaacaatgtgctcaatggtgctctgaatctcaccttggagcttctccaacccctggttcactttccagacaccaaggagaagctctgaaacttccgcttcgaccttctctccaatgatatcagccatggcgtctttctttggtcccatggaggcaatactctgataccaattgataggtcctaccctatcgattcaagcactaacaaatagaaaataaaaggaagaagatgatgaagaaaaaagggtactggtattagaaaatccccaggtattcgagagcctaggctctccttacaataaagtaaaatcctctctaaaacctcacacaaactcttcccacattatttatatcccttaccccatggttataccgtgaggctaagtcccacccttacaccacctacaaaacaacttgcacagtcacttaatgccctgtggcagcccctatattaagtttcctacccctttattcagcatagacataagcgacaggtgggttatcagttacctgattaaccatactaccatagtgcttcaaactaataccaaagtaaagcctatacagttcaagaatatgttcacattctcattcacaggatatgtagcattgttatatagatgattattacttattactatcattaacaactcaccatctctactccatatccttgcttgtccatcataagagcctgttgcaagtaatgtcccatcaccctgaaagagaagtaattatgcaaaggtccttatgtatggcacgccgaatcttagtagtttgaagaattgaaaaacatcttggaatcaaaatctaaaacatctattgacaataccggaaacaaaaaatctcatattaactaattaaaaaaaaagataaaaaaagaaggaaaactcacattccaatctagtgtcgtcacatccttgcttttctcgttggttttacctttgaaatgcttcaagacaacggaagttgtagtagagtcattttgcatgacagattctgaagttgcatctgccatggtccaaattcgagctgttgaatctccagacctaatgtcaaaacatttcaagcttggttctttctaaataaatcttgagcttctatatcttttcaaaacaaatactcacccagacgcaagaagtgaaccagaaggactccatgcacacgcaaaaacctatagaagtggaaaaatagatcatgtgatccacaagataataagctcaaaactcaaaaaacaatggattattcagattcatgttcagacctctgaagtgtgcccttctagaattgttatgtcagaactaggaagttctaaaggaaataatggagttgtagagatttccattggctctggtcctattaacaaatccactcacacattttaaaatgcttacaaatatgaaaacactactcatattataaaaacagatattaatagaatgtgaaagaaaagtaaattaaaaaggacaacaaccatacaaacaaattaccattgcattctgcaggcttttcttcaagttcaacgttagccttatcttcagacttctcatccaattttttatccggctccggtcttcccttatcttcctccaaatccttcattattatctctttatcattttgttcttcttgttccttcactttttccgcctctccttcctgtgagcgatcttgatctattttctgctcattctcattgtctttctcaactgttttaaccatatcgatattcataccctcctttttctttttaatgatcttctgcagttcatagacatctttcgtgataagatccaagggttgtataaatgagaaatcttcatctacatcagcctcaacctgtaaagtggagtacaagaccaaaattaaaccagctaaaacatctcaatcaatcagctcaaaataaatgcaaaacattcaaataattaaacacttacgttgccagagtttgcctcaagctcgaggtattgaagtcctttctgcacaaatgtaacaagtgcaccaggtggaactatgtcgccatcaattgtgcttttgttaatacccgcttcacatccaaaagcaaaagctgagtgtgtaaagcctgaagaaactttcagaaactaatttagcgatcaaattattatttttattaaatatgtacacacacatattttctgaagaaaactaaaaaaattagggcccgaaagaacacattagtatcagctcagtgcccagacaagtaacgaaagaaccaatgaaaattaatgcataggaagagattacatagtgggcaacccccaaactagtaaaaagtagatcccttagtaagaaaattagagaaaaaaataaaataaaaatattgtaagctgagtgttttaggaaagtaagagctgagatcacgtaacagtttctaactataaattaaccgcatctggagaataaccgatttgttatcctagaagattaagacaacaagttcacttttccccgtcaaagtattacccaaaatagaaaaatcaggtatttaaataatttttcaaataaaaagagagtggttttgattttgaaaagaaaaaaagaaattgagagagacagagaacctgattcgtggagataacggaagactatgtagttgagttcggcggaggtgatagagatcattgagcttagaaaaacgatgccgtttccggtgttttatacttcaaaaccttattgaaagagattaatctacttccgcagcttattcagcacaaaatgacggaccacagacgttggccttggccgttcttctgcaaataataaaaaatcagggtgaatctttttgttctctttattctaacttctaaattttaactaaagagagaattttattttatggcgctgctcttctgcttgcttctacttaaattaaatgttcgttgacgacgacgacgtcgtcgttttcatctccaataccaatttagcccacttcattgttcatgtatatttatgggcttattttacttgttttttgaaataaacttttgggcctgttcgattttattgtaggaaaaattagatgttgatacgtttttttccatttaatttta

SEQ ID NO: 249112 - DNA, 2140 bp, Cannabis indica
aaatctagcacgtattttttaatatgactaaactgtactaaaaaattgacggtagcactaaaataaggcatgaacaaggagaacatacactcttatataattagtccaaatttaacgcatatataaatgagaaataggacaagaacaaagtagggatgtacatatattttcgtaaaccgcctaaattgaataatccgcctaaaccaaatcgaaaaaactgccaaaaaactcgacgaaaaaaaaaactgcccaatctgtatattgggcgggttgaaaataaagtaactggcccaattaaaccgacttaacccgactaacactattaatttttaattttatatattttttaaaaatgtttgcaggttatttattttatcctattaaaaaactaaagtggtaggtttttattaaaaataatatcagttttttattaaaagtaaaagtaaaaaaaaaaaaacctaaaatctaagactgactcactcgtctctctcattctcatcctctctcgcttcttctattcacgctgtcaccatctcagagccctaagaaccctagcatgaggagcatcagggtcaccaagcatagcattctgcctccatatctttgcggccctcctcatcgcttcctgtaatctggtttatatttatgttatgattatgcttctcttactgagtgtgtcgactcccaattactgtttacatgtgtaggtaaggacaaacctatgattgaatagcagtgagtgcgagcggacgaagattgtacatatcagggcggttagacctggagcgtacgatctttgagacagaaggctatattttgaatggtcactaggcgacaacttttatatcaaacattttgtattacgattgtaaatattttaaatacgagatcctagtttatgtaaaatttatttactttccaatttaagggtaattaagtaaagttttatatattcacgatttttaacaaaaccgttgattagtaatggattgcacaattaatctaaaatcacgataacacgcctaaactagtagggtgttacattattattcctaagacatatacaagcgaaagacttattgaataatactgactcgtggactaaggctagttaacactccaaccacgttaaaaattgtttgtctcattttatactttctctttcgattatttattcttcaattcttattatttttatgttgtttccgaaaatttcggtaaacaatagtgtattaaagttttgggaagctttaatatggaactgtcaagtacggtttactatacactatacttctagtgtgtatgattttaattcgaatcacatatgttattttaaacaaatatatattgttgtttttttttttgaacaaaagaaaatttttattcaaaaataaatatgggtgattgaaattgaatatttcaatcttgcccaattagttataattttttttttttaattgattagtgtgtgcatcttgaaattaaaatttaatataaataataaatataaattttgtaaattctaaaatagatattatagtataccatttaattagtaaattttatattatatagttagaaaaataatataatataatatatagtgtaacaacaatatatatttgtaatatatagagttcttaaaaccaatgcaaaaagaggcgataattattttcttagtgtaattgaaggctagtattctgtttgtactagtgtgggtgttagcctttgttgtagcttcttgttcaatttttgaataaaaatttaattttgttcaaaaaaaaaaacaacaatatatatttgtttaataaaaagttctcggagtgctaacagttgaatccaaatctataataatttacagattaattgttcacattgaatttatggtacatgaggaatcaagagataattagaagagtaaaacggtatttagaccaactttaattatgaattaataattggagagcgagctgcttatattaagagctatttacacacggtactgctttttttataaaactttctttttactgttatacgcatatattttcttttttactatttaatctacatattgtatactgaattagtatgaagcttttcccttttatgtttttgtcactttaagatatgttttttt

SEQ ID NO: 249113 - DNA, 624 bp, Cannabis indica
gtctcataagctttacatatataattataaataaaaaatatctactatttcattcttcattcaatggtttttacttttgtcaatatatgcttcttattaatgaacattataatgagtatgtgttattggatagcattgttatgcttaatctcgtgaggagataccatatcgtattgttatgtttagtctcaaaaccacaattggtaatatttaccattaatattctctttttatcttcaactcaatctaacatttttacaccaagccatgtacagatttatttcaatgattcacattagagaaaagagtgaattattttcttgtatgtttagttaataaaattttataattgatttaaaatttcatttttttatgtactagtgagaaaatattttatttattaagcatatcttttttccaaatatgatgatatgtttttactgtatattcgttcaatacatgaatcccaataatgtttaaaaattgctataaatcattttttctacttatatttttatttatgagagtaaccgacaagagtattgtcaatattaatcatcaataaattcttcgaaacatgtctaagtctatgagaatgaattatgcgagaagtatttaaaaaaa

SEQ ID NO: 249114 - DNA, 839 bp, Cannabis indica
ttcaaactttttgttgccttgcagtatattgaagaaaggcaggcacttattagttgatttcgaggtgaatctgttaagggcttccattcttcgtgttaaggcctgaacttccttcggctttgttggtgatgacatttctatcaaagccttgattttttcagggtttgcttcaatgcccctcgcgttgactataaatcccaaaaattttcctgaggagacttcaaaggaacacttttttaggttaagtttcatattgtactttcttagtatctcaaagcactctgcgaggtcttttgtgtggtctccactttttatcaactttaccaacatatcatcagcgtagacctccatgtttcttcctatctgttttgcaaacatttcattttctagtcgctgatacgttgccccaacgttcttcaaaccaaaaggcatgactttataacaataaagtcccattttggttataaagcttgtatactcttgatcaatgacatgcattttaatctgattatatcctgaatatgcatccatgaatgacataagctcgtgtctagtagttgcatccattaactggtcgatccttggtagtggaaagcaatcgttttggcacgccttgtttaagtttgaaaagttgatacaagttctccaagttccatttggttttgggacaaggacaggattggttatccatgacgggtaaacgcctcgcgtataaagtcgttagtcaacaacttatccacttcctctttaagtgccccttttctttgagaatccaagggtcgccttttttgtctcttcggtgggtaattcgggtcgatattaaaatggtgacaaataat

SEQ ID NO: 249115 - DNA, 555 bp, Cannabis indica
gcggaggtatacaatccgaccaataacaagccttatctacccctaaagcaaacttagccaacccgtctgcagccatattagcagaacgtttgacatgagaaacatttacattagggaaaaaagataaaagactagtgatatcagcaattagatcttgaaaagaagaaatagctgatgaagatttgcttaaagcagttgaaacttttagagcatccgtttcaacaaggctgactggtaaatgaagttggatggcccagtttaagcagtgaaacatagcaagagcttccatttcatgagaagcatagcatccaaggatcggctgagatgtggctgctacaaccgtaccagtggagtttcgaattaaagcacccataccagtgattttgcgtgagctatcgactgctgcatcaacattcatcttcagcattccaggtggaggaggagtccacggcattaaaggtgcagcagcagtagaatttcgtggcaaaggagcagcagtagctgcaacacaggagttggaatctggtgctgtagaagagcgcttcagttgggcag

SEQ ID NO: 249116 - DNA, 891 bp, Cannabis indica
caaagatttcaagataggacaagagtacttatatagtttgtgtaccatttaggatttttatgcttaatgcttcctatgtgtttaaatttttcacgagagtagaaaatttacatatatgttgagatttatatgtcctagtccgaatataagtttctttagtaaatccgtgtttggggggtaaaaaccgagcacaggaacaaaaggcccaatagattaaaataaaaacgtcaaaaggcccacacaggttgagtacataaagacccaagatcaaaatacgtcagagaaggcccaacacggtgcgggccaagcactgaacctcaagggagcgctacggacaaaaaaggaaagggagcgctaaacgacaaggaaaatgagtaagcaccaacggaaattgaaggaagacgggaacaaaagaattggtcgacagagtaaaaagtcgaatgtaggatgtattacaaatgagaacccaataaggacccctagatgacctgtcgacgagggatgtacctaaaatgcaataagaaaatgaacgccgggatgataccacgattaggacaaacacccccgacggaaggaaactcggatcatctcaaataggagttccgacggaagaaggagattctggatacaaaggaaaaaatcagtatttttgagggtatgataccgtcggatcgagagaaagcagcagcattatagctaccagttgaaacacggatacgtagcatagcagaaagaacagagaggaaaaacacgtgtcaacaacagaataggtatatgatagattacccatgcaatcaaaaagacgtaccaaataaatagagaaggatcgcgtaaagaaaagcagattaggaactggaaaagaaagaacccacaaaagaacaaatagtgact

SEQ ID NO: 249117 - DNA, 535 bp, Cannabis indica
ctgggaatccatggcgaattccagatatccacacgcgacggtttgcaaccacataataggattctcctctaataaaaatcccttgttgccataatccatttggcccaaaggaggcattcttagtaattgaagatgaccagaaagattgatcttctccaccccagtacttagctttaaaaatttggcaccacaaacgagtctttgccactagctagtttccactcaatttgagtcactaatgcaagattcacatctttaaacatcttaaaatttagtccaccatgtttaaaaggtaaacaaagaaattccaatctatgagggccaagaacctctcctttttcagaactacccaaccaccaaaatttttttaccacttgatcaagtaccatgcaacaagtcttagggaggaggaacgtcgacatagtatggatatgggaacttaaagcaactgatcgaattagcatagctccccgacttgcgatagaagttttcatcgccacccttcaatcctcgaacaaatcttgtcctttaggaa

SEQ ID NO: 249118 - DNA, 857 bp, Cannabis indica
gaaaaggaatctttctccttgatcttaagccaatacaaataacgaggattaggctattaccgaattgctcagggctgaacctctataaaatctctctgtcttattattgctttatatatatgttattatatatcgtttatcgcttataaaatagactcattgtcgttggctaaaagcgaagtcaacaacgaggattaggctattactgaactgctcggggctgaacctctataaaattcttgtgtctttattttactttattatatatcgattgctataaatcacttatcgcttattaaattagactcgttgtcgttggctataagcgaggccaagagttagcaaatttttgaaatttgaacaagattattttaaaaaagtattttaatatcaaagtaatatcattcaaatttaatcaaaaaaattgtaatatctgatttgataattaaaataaataaaacaatctaaaatttcaaaattaaccataaggctatttttgtgagaaatcaaattttcaaaattcaaagcctactaatatctaaaactaattttaattaattaaaaattaatttcattcggacaattaaatttttaattgaaaattcagattctacacaaaattctaccaaaaattggcttttgtttcaatgaaaaacgatttttgaatcaaaagttatgaagaaaacaagtgaggcaatgcatacccctgggcgcgtggaagcaaggagacagccgaggaatgaggctgcgtgcaacctctgtcgccgagaaacctcggcgcatgcagcctcttcagacaaggtgtgtccgagtaatcttggccatttttgtctgaatgggcgtgcgtgtccgagcgg

SEQ ID NO: 249119 - DNA, 557 bp, Cannabis indica
ttctcatctctgagctttatttccaagttaatggataacttgttattattgtttactttttttttttttttttttatttttttttaatttaacatttctttgtaacgttaataatggatatctttactaagtcttgagctctatgaatgatgatatatataaaataataacaacaatatatctttattctttactaagttgagattgcatgggaagaatgaaagagatgcatggaaatagaaatgaaagaaaagtgtggtaacttataggcagaagagttttctttccagacctccacgtagtaaaaaattgaagagatgagtaatcatatttgaaacaataaaaagaattagtacgatgtatggaagtaaaaagactaatgagtaatcatctttgagcaataaaaagattggtgtgatgcatatggaagtaaaagaagagcatgatgatctatagacaggaggaacactgaccctctacgtagtaaaaaaataaagaggtgagtaatcaactttgaacagtaaaaaaaaaattgtatctgtgaagaaaaaatattg

SEQ ID NO: 249120 - DNA, 1218 bp, Cannabis indica
tgtagatttcagacctattgcttattgctctacaatctataagagcatatctaaactgttatgctctagactgtctgtgatgcttccaaattcggtcaaccaaaaccaaggggcttttatcaaaggaaggtctattgctcataatgttatgattcttcaagacctcctgaaaaattacaagagaaaattaatttccccgaggtgtgctttaaagatagatatcagtaaggcttatgatactgtcaattaggagttcttagaagacttgttggctgcctttaactttcctcaaaagtttatacaatgggttatggtttgtctgagagcaacttcttattccattgttatgaatggctgagttcaaagcaggcataaaggagaaaaagggttaaggcaaggggaccctatttcgcctttattgtttgttttaataatggagtatctcacgagaagtcttctaagggctgctaataactcagcctataggtttcatccgatgtgtaaggggttgaaaattataaatctctgttttgttgatgacttgattctgtttagtaagggttctactccctctatatgatattgaaacaggttctcgatgaatttagtcaggtgtctggattacacatcaatgctagcaaatctcaagtctattttggaggcatgagtaatgttgatatccaagatattcttagagatttacagctagttgaaggcactttcaccttaaagtacctgggtgtccctcttagaccaacaaaatggaaggccgaggattgtgggatcataatcaaaaagattaaataaagactccatacttggtcgagtagacatatgtcttttgctagaaaagctcaattgattcattctgtgttacttgggcttcagaattattagatgagtatttttgttcttcctcatagtatcaccaaggaggtagaaaagctgtgtagaggctttctctggggtctaaacggcaacaggaacaagatccacttagcttcatggcataaagtttgccttccaaagacttatggggggcttgggttcaaagacggtatcaagtggaaccaagcaatccttgcaaaatatgtttgggctatcactaccaaaaaagatctgctttgggtcaagtgggtcaataacatttacctgaagtcttcgtgcttttggtcttataatctaaagcaagattcgagctggtattggcgtaaactt

SEQ ID NO: 249121 - DNA, 1025 bp, Cannabis indica
aatgtataaatgttgtatttatcatgtaatgattaatgattgttatgaataaaattaaaatttgttcaagtaattacaaaagtttcttttctttaaaattacttggagacatatatatgtgtatcataactaaagtccacctagtaatatatactatattgcaaacctaaaaattaaaacttttccacaaaagaaaggataattgattaaaattatcttttaacgatacaaagccaagaaattgaaaaactttttttaaaaaaaagaaaaattaaaatagcagttgtaagtgagattttctcataaaacaacataaagctatttacgagctaaatatgtaacggctcgcattattttgggcatgtattataaacgagacacaaatatgccttgaaaaataatacttaagctaaaaatatgaatagagaattaactattcatatgggcaatcaaaggatattcaaaatagttcctaaagtgaattattcaaaatattttaagtttgctctaaaaagtgtagcagattataaactgagctaaaaatatgaatagagaattaactattcatatgggcaatcaaaggatatttaaaatagttcctaaagtgaattattcaaaatattttaagtttgctctaaaaggtgtagcagattataaactgctcgcgtaaaacatggcagattaataactgctcgcaaaagacatggtagattattaactactcatatatctcaaagaaaatgatattggagatgcacacaactcaaagtatcttaagctaaatcgagagacaaatatttagattatgaaataaaatgcaataaacaaacatatataactcaaaagtaagatgcgaggcataaaagtaaaaatatataaataagcaaagttggtcatccaacaatgcaaaagttttcacaaaataccacaaggggcaaccattgtctcggcctaatggccatttttctaaaaataaaaaaaaaatgaaatgataaccaagtccacatggttggagacttggatgg

SEQ ID NO: 249122 - DNA, 1188 bp, Cannabis indica
ttgagttcgaatcaggcggacctatttcaagaacctctgtctcctcgaagctcactcagagaaattcaacggcaagaggacgtgcaacgcgactttgtgagctttctcaaagctacggagcaatgtaacagtaacctagccaaaagtatgaactctactcctcctattctgagatctgcaactgttgtgagaaatttagaaaattcttttaggaattcacagcaagataggattgtgaagattgaattagaagatatagaagatgaggttaattactggaagccttcattggtgtgttatgttcttggagccaatccacctttacatgtacttgaaggctttgcaaaacggaaatggaatgacaatgtggataaggtaaaattgttaacatacggagtgttcttgattagatttcactctgttggacagagagatgaagttttgaatgggggttatattttcttcaatcgaaaaccagtcattatgaagccatgggacccgaattcaagcattaagaaagaagatgtgaaaatggtgccaatttggatacaattagaggacttagacctcaaatattgggggggagaagtccttgttaaaatagttgggcaattggggaaacctattatggtggatgcgattacaagagaaagagaaaggcttatgttcccaagagtgttgattgaggtcagtattgagcaagaactcccaggcttaattgaatttgtgaatgagtatggaagcatcactactgttattgtacagtatgaatggaagccaagcttatgtcaacattgccatggaatgggtcatgtgacagccgaatgcaagaagaaaattcaggctaagaaggaatggatagtgaagaatgataacaggtgagacaacaaaaaaaaatacgcttgatgaggagggctttcaaccggttacagggggaaaagaagcaggtcacaagaagcacctgcagaaaccgaattgcagaacacttttagtgtactactaacagcagcaggtggtgagaaacaggatgtgcaagaagtggagattggggcaaaacagaataacacaagagaggggggagatccctctcttagaaatggataagtttctttgctggaatgtccgaggggccaacaacactcaaaaacaaagaactatcaagcaattcattcaaaatcagggtgttgg

SEQ ID NO: 249123 - DNA, 991 bp, Cannabis indica
tttaaaaaaagtactatctcaacgtatattttaatatgtgggaagtatatattaaagagtgcagcatccatttatcatgatgttattcatgtcaagtttagtccaacactcaatcccatctccttcattttcaaagaataaagaagataaggaaatgttatcttgagccttacgccaatgatcaagagttatttgtgctgatgcaatgacttcatttcttgaggagagcatagctaaccgtgaagcgatctcctcatcaagatttctaagtattttctcgaaccaccaaaagatagttgttggttcgggtcataggtgatacctagcttacgccaacatgacatagcaaaaggacagttgaggagagcatggacaatagacttagcttgggctctacaaactggacatattgtagagattctcacgtgtttagtgaccagttaaagacaagtcggaagacaatcagaaatagcacgccaaagtaggttcttgaccttgggtgggatcttcaattgccacagtctacgccaaaaaccaaaattattagaaccgaatggctggagtttttctttctgaagaagagtatatgcagttttaaccaaaagagcccagttcgatctcctgaccaagaccagaagtcagcttcagcattggacgacaaggggtgaccgagaattaaaattgcatcccagttgttgaacaagtccttgacgacttcagtatcccaactgcgagtctccatagagaagagagaatttacattattatacagaagagttggatgtgttgaggttacaaacttgttatcagtatcatgcaaccatggggttccaaaaaattttggtagtttcaccatttccaatagtgcgcacagcccctaaacggactagattttgggcagcccaaatactacgctagacaaagctgggattattttctaattcggctgaaaggtagtcactagtagggaagtattttactctaaacattt

SEQ ID NO: 249124 - DNA, 985 bp, Cannabis indica
ttattttccaactcgtcaatccgcaaatggatcggatccccttgctttgaatcgagtcactagcaagatcaagttttttttctgttcaagcgtctcgtaaatccaatggtcagacggctggcgaacctcattccactcatagaacgtattttgccatcttgatcattgttgtgacgagtattctctcctccttgcgttgatcgactacgggttattgtgtgtctcgtagtaacactcacctcttcacgcctcactctcccctcttgggtatgattcatcgcattctccctattgagatttgtgcaagctcctttctcataagtttggaaagaaagttggtgatctcttactaatgacccatgtaccccaggttgtgtccccagatttcccttatttctacagggaatttccggttccctggttcctggtcgatcacgtggcatctcgttttcaaggtattccccaatttctgcaagttgtatttcctaagtgttctggggattcctttgggctacctcctgccccctagttcgcgagtcccgaggtttgcctcgcgattctctctctctagggttaggttgattttgagagatattccctggtgtcgccctggctgtagctcccccacgctctaattcaccattacactggtttgcctcttccaatcgacgcctgagatggtggttttctaattcaacgattggtatatactttgttggatcataggcgccatcctcatcaactagattggtaagagaccttccattgttcattctaggcccttcaagcatggttccaaaattctgggttttcccggagtttatggtccgttcaaatgataagtcgaatgatccttgaggactcattggctcttttccaggacaatgagtggttttttcataaggattattttcttcattgtcagccataagaggtatattattttttatataagggggatttttttttagctttttcacgaagg

SEQ ID NO: 249125 - DNA, 1302 bp, Cannabis indica
cttaccccgaagccagatatctattgtatttaataatcttttttaatgttcaaccttattattcacgtatcgtatccatatttatggctcaaaatatgggcatgacaattgtctcctaaaaaaaaaatttctagagttggaagagtttttaaacaaccgaagctggaacaatttggtctttctcttaccagtaatgagtacatccttttggcaatttaactttcaccgagaaaggtaaactaattattaattaaatgttttttcatctgacaggctttttaccagtctctttgtatttcctagaaatgtcctcagccgtttaatctaatttgaaacctaatcaatagttctctatcttttaatataagaaagattttttacatagcctttttttttacctcatttgaaatacaaaaccagagaaaaaatacccatctttattcaaatgactaatgcatgcccagtttttctttgacttatttcttttatgtgaccaataccatattttccaacctcattctcgttatatttcaaacccttcttaccagagattcccagtgagaaaccatcatcgtttttagaagaacccaaaacctagtaactatctaaaatttaccctaaattattttttttttttcgatttttgatatgttcttgcatcattttcacctaaaatagataaggtagttttattttagtattttctttccttgaattatcaaaaatttctaaattcctaaaatatttcttttttgtgaaaagaatattcattctttgttcgaaactttggaagtttgagtttttagaataggaaaacccaaaattgctgccttacctttcaaattacgattggaacatccaaaaacgatattaaaaataaacgacgagaaaattaggttgttcaatgaaaacttgaccaagaagaaatttttgctcgatttaaacgttttatagacgaggttgctggtgggaaacgtcattttttgcgagatgcaacttggtcaaagtctcctagtttaactaagtatcccttggcaagacctttatttttactcaaggttaccattgctttttctccaagtaaactaaaatttgacatcatgtcttccaaagagtgtaagtccaaactaccctagaatcccacagtccaatttgaggctcagttgattcaatctaaagtcaggtcaattgccctgtatgtgggtccatttttaaggtcttatggcatcaagaatgagaatggatatcttattcgctcaatcgtactgaaagttgtagcactagcgactcttcaaagattgg

SEQ ID NO: 249126 - DNA, 560 bp, Cannabis indica
agtcaacgcgtctcaccaaaataatttttagaggcaaaaaataggcagaaatttatgcttcatagtataactgaagctaaaaaatatcaattagcgtcagctcatttcccgttactaaaagaaggatcgaggaaaaaagtgaaatttttaaaatttgtctattacattttgctttgtggaaaagtgaggctaattgtttttacttctgtttgaaaatgagattaatacatttgccacagctatccaccaaagcaaaaaaaaaaaaaaattgcgttatttcttctcccacttagtttttttttttttcgcgcgaattattcccaaagaaagagttatctctaaagactataacaactcactcaatttcaaactctctcgttcctttctttttccttttctctaatatatatacatatagcatatttataattcagtgactaattataactatgtatatatatgattcttaaattatacatatattatattataaagaaaaggctttccttttaaaaataataatatatatactctaataattataagagagtggcatctaa

SEQ ID NO: 249127 - DNA, 963 bp, Cannabis indica
tacttgcctcggagaatacagatcgcagacgtatgtaagtctcttcctaatcatttaaggacgatttataaatatcgtgattttgtaagaccagcgagataaacaactaacagaaaaagttcatctcaggaagtacagagtaagatgaaatatggaatagacgagacagtgtaaatgctctctaacctaaggagcacaaatatatgatacaatctgaaaagcttatcataagtttttataaagattatataaaggcttcattataagcggctagcgtgagaagaaggtcaaagaaagctcgtcaaagtcatctcctttacagttataatgtgaggaataaagcaagatgcaataccacatcacaacaaaactattagttagcaaatcctctttggatatagacaaaggcaatttgtagtggttatttcttttatccatgtgctgtgtaaatatgaaatatggggattatccacgtttaattaacagatataaagataagattaggcaggaataacaaccacccctaaacacctataaatagaggaaggatttccaaactagggtgataattatttgagaagaagaataagaagatacaaaaaaaaaaaaaaaaataagggaagactatgatttcatttaactgcaagatcaaaaagtatagaattacaattaattagaaagtcttatataggcaactaacataaaacactaaaataaaggaaaagactacagtgatcctaaataattatttaacaactgatagcaaggcccaaaacaaaatcccagtgctaattgacccaaatgtcttgcaccaaaaagtaaaggagtggatggaccaagccacttcttcagcccatgacactagcagtgaacaagcttcttcaaccaaaggaaacaagaagaaggagaagatggaagagaaccaggtagctacaatgcctgaaggaagggtgcgcgtgaaac

SEQ ID NO: 249128 - DNA, 806 bp, Cannabis indica
acttccatattgattccaatttgatctgcaaatattttatttacaagtcgcgggtaggtagcaccgacattcttcaacccaaagggcatcacattgtaacaataaagccccatgtcagtagtgaagctcgtgtgctcctggtccgccacgttcatgggtatttggttatatccagaatacgcgtccatgaaagacataagttcgtgaccagcggtagcatctactagttgatcaatgcgaggaagtgggaagcaatccttgggacatgccttatttaagtcagtgaaattgatgcatgttcaccacttcccgtttggttttggtaccaatacggggttcgcaacccatacgggatagaaggcttcatgaataaaattactggctaaaagcttgcttacttcctttttcaaggtcacaactctaacctcatcaagtaatctcctcttttgtcgtttggcgggcacgtccttgtttaggttcaccacgtgggtcattacatttggacttatacctaccatatcagaatgtgcccaagcaaatacttcttggttgtcacagaggaactgaataatagccttcttaatctccttacttaagtgcttcccaactttcacagttttggttggttcatttaggttaagagcaagttcttcaatgggacccaggtcaacacggtcgacgcgagggtctatctcttctatatcaggaatttctcttgctcccttattttccacttcattatcattgtttacgaccaacatctaggcccatggtcgggtttgtccctcatagccacattgtagcat

SEQ ID NO: 249129 - DNA, 1497 bp, Cannabis indica
tgtctcatccaatatccgatctgatccaattggtatttttaaaatttgcatccgatccgatccaattatgattggatatccgattctattggatcgggttaggattggatcgggtcggttggaattggattggatgactttctgcacacccctactaagctatttatttttaacaactcattttttgtttttgagaaacatatttatttccaaaataattagatttaaatatattttgtatagtaacacattcaggttaaatgtggccttttattctaaaaaaaatggcaaaaagaagtgaatcgtcttctaatccctttaaaattataaaactgataccgtgctatttcttttctatatcagcagtactgtcctttcttgaattaacagattcctgtaaggtagagacataacttccaaaaacaaaaagatcagatttaacaaattttggtatgattcctgtaaggtagagacataacttccaaaaacaaaaacatcagatttaacaaatttggtattagatgttgattgagtcgaaacaaaacctaaactagcatgactcatttgacttgaattttgaatcttttcaaaaatattggaacttggatttagcattttgatatttcttttaagattttcgagttcctcaatgaaagagataatttcataatcttttaaaatcaaatcagattcacaacatttatttttctttttcaagatcattgatgttgacataaatctttattcacttaatcgaggaacgattttcagcacaaatttttaaccacttaccaaacattaccttgtaagattcagccaaagagttttcatcaagttctgactcatctaaatttgatccatcttttttccctttgtcatcagtcaaagtgttattcaaacatatgaacattcctttttcctacaaaccacttgacaaaacacttgttaaagtaatttttttcattttcatcctcactactttcagaatcatcactccaagtaacattaaaatcctttttatttttcttcaaggtacgtattagcacaataagattaaatatgaccatacccttcacattctctgcattgaataccttttttattgttagacaaaaggtttagaagggttgatacctcttggagtttttgaataaatccttttatttccaacagatttcatgtatttttgaaaattctttatcaacaagggcatttcatcatcataaatattaatttcagaaactttaaaagcaatacctttgcttttctcactcgagacgctttgcttattctttttcttgatttgttgatttaactcaaaagttcttaaagaacccatgagttcttcaaccttcattttgctaaaatcttttcctcctccataataagtaattttgtgtcaaatctatcaggaagcacacgaataattttcagaacttacacagattcatctaatttttctcccaaggcaaaaaaactcattagagatatcagata

SEQ ID NO: 249130 - DNA, 939 bp, Cannabis indica
cgtgtagcagtcccaacacgcttcctcccatgcggcattaaatgcgacttgattgctcaggagaaacctgacacgtcacggagatgccttaacgttacttcgagcttccgggagcatatggggttccatatgccttctccgggagctatgtcctggaagctacctttcagcataaagacttagcaaatattttggattgtacattgcttgatccacgtgtccttattcggttggtccacgtatattgggaaaaatcaggggcaacagtacttaagctacatttttagaactttcgtaagtacctaattattaagtgttaagtcataatccatttgttattttcttattaatatatttaaattaaaaaaaataataatgatctggaccaataaagaactgctacatgataacttacttaatacttagtagttgggtactcacaaaagttccagaattataacttaagtattattaccgtaaaagaattaaacttaaatctttatttataattagaagttaaatttaggttttatgtaacaaattactcttataaacaattatattttctttcattaattatcttgaacaaaatacagtccaccatgcacacccttcctctaatttcatgtttactacataattacctaattaaaccaacactcaaaacctaacaattactccaaattattttctaatttcgataacaagatcactacaaacacaaatttaataactactttgaatattacacttaatttcaaaataagttttttcatttttacacttcgaaacagttttttttttcttttttttttttttttttacttattttattggaattctacataaaaactactattgtcaactggcactgcaacataaattagacaacaaaaaatacgtacagaaacccctaacttgcaactagcgctgcaacca

SEQ ID NO: 249131 - DNA, 610 bp, Cannabis indica
cactataggcgacggtttaaaatagtggcctatagtttaggctacgatttaaaactgcggcctatactatagtaaaactgtctaaattcaacgtatgatgtaagcatacttgtatatatatgcatataaaagtcttcccttattgtgccagcatttgagcatattattcatacaaaatgaaaaaaatgatggggatttttggcacaattaaaaattgtggatttccatagaattagagaagctaaaagaagcagttgccaatacatagtgaccatttcattatactaacacgcacacgaatacttttatctaagattctataattgaggacataattattaagcatattcctcttgtcgtctatatgtaataataaactaaaaaaatataaaaatatccaaaagttaagtttcaaaatttaaacatagcaaaaatcattccaaatcgttgaatttgccaaaccacataatgaaaccgaacaagttaacataactaagcgacattcaattaaacaggatatgaacattatcaacaaatccccatccaaactaagcacaacagtcaacaaaatataccggtgagggcggcagagtggctctgggcagtggaa

SEQ ID NO: 249132 - DNA, 994 bp, Cannabis indica
ttttatatttactattttattattttatttttaaaaaataaagtatctatgtatcatacccttctaacccattatagatatattgacaattatagctagtagttttgcactttaattaataattgtgattatgaaattatgcttataatcgttagtgtactttagatgaactgttcatcagtcgctagaaaatgaagaattttatcaagtatggaataaagagataactctagaagaagaagtcatctctgccttgaagtcaaaggatctggaagtgaagtcatctctagaagatagctagctgtttttacaacttctccccaaaatggtctctcaaggccagcattgtgaagcatgcttctgatcctctctatgagtgtcctattcatcctctctgccaatacattaatttgttgtgaattcttgaaaactatcttctacctatttatgcctcctttcctacaaaactcactgaaataattagaacaaaactcaagaccattattagtcttgagtttattcatagttttactagtttgattctcaactagttttctccaagtaacaaaagtattaaaagcatgatctttaaatattagtaagaatacccaaacctttcttaaaaaaacactactacaaaaagtatataattcatgtcggttttcaagtgtcatttaaagaatttacgtcggtttaaaaaaccgacgtatataccgtagtcgaaaatagttttttctacatttataaaccgacgcaaaatatttacttttctattttatcttttgcaatggtttagaaatgacgctaaattatttatgacattttaaaactgtcacaaaagacttattacgtcagtttaaaaatgacatatctattacgaaaatacttttttttttacctattgcgtcacttataaaatgaagcgcaaatataagtaagggaaaattacaaatttttcatgcaattttctgcacctgcattatcaaattttaga

SEQ ID NO: 249133 - DNA, 809 bp, Cannabis indica
attcgctctagcttatggctacaaggtgatgttgcttgtagagcttgtgccactgtctaactggagaataacctatgaccaacaaacaaatagcaccctactggaagagtcccttgacgaagtagaagaaaaaagagaacaagccaacctaaagttgtaggcctacaagcaaaaagtggcaaggtacttcatgaacaaacacatcaagagtagaaaattattcataggagacatagtgctccgaagagtgttcctgaacactgaagactcaacagcaggagtgtttggacctaactaggaaggcccttatcaagttatagagatacctagtaagggagcctacaagctgggaaggtacaacaagaacttggagctcattctcctaccaagatactggaatggagagtaccttcacaaatactaccagtaaccagcttacagaactctaccccaaagtagtggttctatctactcaacattagagtatacaaaaagcgatggcacccacggccctatttggtcgtggtctcccactattcttcaacagtggcctctgctttactaggcaagcaggggtagccacttgacatctagaagctaaatttatgtaatataagcttgtagattcaatttatgtaagttggacaacaacaaagactaattaatgaataatatcaatatttatattatgtttattgtgcttatgaaccacttgctcacagactaactttttaaagttactctcttagttccacatacgtactatgcattacaagaaatgtcactttacctagcacagttcgctactg

SEQ ID NO: 249134 - DNA, 545 bp, Cannabis indica
tatattttgctggatttttacaaaaatattgctacgacaggcgtaagttaggagtctttacgagctgtaaaaaaaaaaaacaaaaccaaaacaatctcaattaccctgaattttctttcctcagaaaattctattttctcatcttcttccttttctgtcctaaccaccatagccaccttgtctctactctcccctcgccctgaaccacaaccacccctgaccaccatttacccttctccacctcaattcgccagaaactccattatcagaccacaatcacttttctcctctcttctttctccaccatcaccaaacacagaaattgacctgagcctaaaaaaccctccgcccaccttcaatctcatctcatcatcatcctcaacttctcttcacctgaaccatagcctcatctgttgggttttgtgccctaaataaaatccattttaatataatcagatttacttattaataaagatcagaaataacattttatgaagcatggttcacatgatttatttcatgattatatatataatgtatgaatt

SEQ ID NO: 249135 - DNA, 1045 bp, Cannabis indica
cctccccaaggacgagcaaggtgaacagagtcgatcttcgatcgacatggaccgagagtgggtagaaccgacccaaaatggaaatttcgagaattaaaatcgatcacttcaggcatctagatccaccaaactctaacaattggtgtggtctaccccaaatccaacacacagtcgacattggtcgaccgtggagtcacgggaagccaaaccttgcccaatgcaagtctggctggccaaagaggcatctcgggcggccagacccttccctttacaggtctggtcggccatggaggagtactgagcagacagaccctactcaatgcaggtctggccagccaagcacagcacccgagtataagcctagacagcctaggccaactccgtacttgggaatagtcgaccagggtatgcaggggctagctgatcttcaccatacactctccctgggtatggccactcagcccctaactattcagaatctaaagcctccccaaggagggccagtcaaccagatccccataacaacagatctttctgtgcaagcacagttggaccaactcagggacatgatccagggcatagttggcccaaagcattcagaccttgaacttgatcagtcaaagggatcaccattctcggcatgcataaatgtcttgcccttgccgaagttcaaaatactggtatggaaaatgtatatcggacgagaagaacctagcattgttgtcccaaaagaagtcaacatgttggatgacactccaacatggatgacacctatcgtagcttacctccaaaccaaagccttgccagaagacaaaaatgaagctagcaaactaagaagaaaagttgataggtacctaatcctagatgagataacgtacagacagagtttctttatgcctctcctgaggtgtgtcaccaaagccaaagttgaacggcttatgataaaagtgcatgaacgcttctgcggcaaccatgccgaggacaaagcttatccaaaaagatgctccgacagggtactttttgccaacaatgatcgaagactcga

SEQ ID NO: 249136 - DNA, 930 bp, Cannabis indica
ggtgacccggcgtatgttagagccgcctgcgaggccagcctaaatcggctccaagtttgattgtgtggatctctattaccagcatcggatcgacactcgtttgcccattgaagtcacggtctgcttcaccttttctttcttatatttatttagttattttattttcttcgttgtttaccaaaaaatttatgagcttttctctgttaatatctaaccattaagtttagagtagaaactaggcactagtataaatgacagaagtcagtcttagtccaatttaattaattagtcatatgattgattttcataaactggtagtatccagttccaaggctgtatacgtaaatatttggtttctttgactaaagtacagtacggaaacttgtatcttttttcaaatagttagtagacaatcgaacacatggctgacttgggaattattctccttaattggccagcagctctctctatctctgtttgttaaataatttaattcttgggaattagcattcgcagattggtttggattacaaactactataatggaatataatggttgtccatttttgttataatgtttttacaacagttatataggaaatcaatgctcgaacttttccaaacgtacttggccaataacagctgtgcaaatattaaaaaaaaaaaattagcataactctatacttgttgtgtcagcttatttcatttagttcttttgttgcatgctttctattttaaatttctgattttatctcttgttgctaaaagattggggagctgaagaaacttgttgaggagggcaaaataaagtacattggtctatcagaggcctcagcttcaacaatcagaagagcacatgctgttcatccaataacagctgtgcagcttgaatggtccttgtggtctagagatgttgaggaagatataatt

SEQ ID NO: 249137 - DNA, 526 bp, Cannabis indica
gtcaaaaaactgttattttttaaaattttaattaaattaaaatttaaaatttgtatgaaaatcaaataaaaaactaatttcaaacataataaataactgaaaagctggcatcagcaattcgtttacccaagggccaagataatcgattctcaaaatttcctctaattggaggtttttatatattttgttcttttattgttttattttgtaaaattcaaattacttttaaaaagataaaaaaaaatattaattaaacaaaaaaataaaaatcaaagtagtttctgagaactctggtgtgagttgggttggagaggttgttctgatgaagtttgtcgaagttagggttagaatcgaagccaagctacgtctctatgcaatttcacaaaaattctcttcttcctcaattttcaaacgatgagtgctgtcagcattacaaacgtcactgttcttgacaatccttcctcctttttgaaacctttccagttcgagatctcttacgagtgtttgactcctcttaaagacggta

SEQ ID NO: 249138 - DNA, 691 bp, Cannabis indica
ctttcttaattgatagttaaaaatatgtataactagttattttacaagtaacttaaattatgacataatttataataaattaaaaattattcttaatattcttacatagagatcctattatatatgacaatttttttttgtcctatagtacaaattttttgtaaatataccaggtgaatattataatgacaattaagtatgcacattgtttaactatggtggtcatatgatagagatgtagtcaaactggtgggaaacacccttttgaacgattgattcaacgattcattggaagaagagaaaatgtagatttgggtcaatagttatcaccaccaatgattcatttaaaataattttttaacttgaatcatttagctcaacctcaaaaatattaaaaaaatataaaaggtacaagtcattaagctaatcatcactaaaaaaacataaacatattttgttaaccaagaataaaagaaggatagatacaagtaagaattactcaaaatttttgtacaaaataaagaaccaaacaaaaataattaaataatatcactactagaaaatttgattttagtgacacacattgagtaactctaaaagtgtatagtgacacttcaacgcgcgtcacgtgtcactgaaaccttttacattcattttctgcgtgtcattataggcgtatagtgtcagacta

SEQ ID NO: 249139 - DNA, 512 bp, Cannabis indica
aagtggcagtcttatgtggcatgtaacagtcaaagttaacttatactttaaatttgttaacaaaagtaaacataagatagttttaccaccaaaaaataacataagggggttaagtgtctacaaatataaacataaaggggtttggccgcaaatttctcttttataaaatatgttcttgaaaaatatttttattttttcaattttaaaaataaaaaactgattaaaaaagatattactaaacgctacctaaataaacataaagatgatgtgttctaacttaaacagttagattcaaaaaatgaattaacatattattctctatcaaaataaataaataaataaataattaacatactaatacattctaaattcctaattattttcaatcttcttctttctttctttcttttttctatgtatcaccatctcattttagataaatacaaatataaagaaaaagtatagcttatttatattttttgaactcacaactattatatatctattattat

SEQ ID NO: 249140 - DNA, 695 bp, Cannabis indica
cccgttaaattaatttggattggattaaatctgctaaatagggcaggcagttatgagttaggatagtaaggggcaagtctaatcggtacctgcttatacactttgaattattacgttttttctttgaggttaaatttctacaatatatttaaaaatagatttttttttatatatttttacgaattttttttttaaaggttttcactttttctagagaagaatattgctttcacatttctttgcttacatattacaaaaaaaaaaaaaaaaaaaatacagttaaaaaaaataaattcgtgaaaatggaaaatttagaggtattcatcaaactatctagaccacacaaaaaaatgtagtttgaaatcttttatggtactgcattgtgattatggtttgcatatttgcaaaatcatgtggtacagtgcaattttgaatttaataattgcagttaaaactgtaccacatatatattataaagttataattttataatatgtttttttatatatgaccaaataaatgtatatattacattatttttaaaaaataatataatataataacttaataattaatatatataataattttattaaattaatatttaaaatttttattataatatttaataataataacaacaacgtaataattcaaactacaccgtaacacaccacattttcttagtatgtttt

SEQ ID NO: 249141 - DNA, 671 bp, Cannabis indica
gttattttatttttatagttatattgttgttttagttaatttttatgttattattctaggattggagtcttaaatatttatgttctggatgaataattatcgtgtttcagctattttagggttgatcggttgtttctgatcgtaactgttgagaatgatgaggttttagtcattttggccaagactcagtatgatagaaaaaaattagcctaggatagtataaatgtaaaattctccgtatcacaatatttttgtaatatttcccttatttttcagtatatatgtaagttttccattaagaaaatataatatggcttaaaaatacaagcccatggccgaaatctctctaaggtctatgtgtttgaatttatttattgttttccttaatgaaacagtcttttctttcttcaaaaatcccatttatctattctaattatttaaatgttaaatttatctatttaataattataattaattactaaacaaaattaatacttaaatatatttattaattagactatccaaggtcacataatcagtgaattgttgggttttgtgccctaaataaaacttatttcaatataattaaatttactaattaataaaagatcagaaatcattttatgttacatggttcacatgatttatttcatgattatgtttaatgtata

SEQ ID NO: 249142 - DNA, 1086 bp, Cannabis indica
acatggcatggcatttatacacatatatcactaggataataaccctaggctattagacagttcctattagggtaataaccctaactttggttactaaacattcatgcatatcattctcgatataagcgccactgtgcatactctacgtgctaatcactgtcttacctgttgtccagcaagagaaagagattctgaatccccgggtgctcctaatcaggtgccggtaatcctagtcaaacaaatccgggatgtttcacacatagggttaacctctggttccatactcataaaattcaatcattgcatttaaaattcagataatcatttccaacgatataaagaactcccaaatcggagttcagaatcaaaagttatgcgttttcgaaaaatcaactcaaaactgcccaaaacacgagggcgggccgcaacatgcccaaaccatgccacgacacctgggaccaattcccaggtccactcagaggagcgggccgcggcatgctccagagcatgccacgacatctgggtgcagaacccagaaaaccagcaagctcaactcaaattttcagcccaaaactcaatcttttcactccaatttctcaaccaactttcaaattaacatataggattactagcaattataagatgctcaaataacatacttcatgcatccaaatcctcataaaaataccaaaattcagattgtaaataaatcacataattcatgcttcaactaagcaaacatcaagctcatactcaagaacttcaaagccaagttcctcaattaatttccagcaatcaaacacaagaaataaccagaattaaacacaagagaattgccctaaaattccatctagagcacaaccaagcacaacaccaaaaatctaagcataacatgctcaaactaatcaaagaaaccactatcatgcaacctatcttcatcatcatcaagaacatgcaatttaaaatcccaaacatgctttttcaacaattaataccagcaacacaaaaggaattagagttataaaaactacctcaagaatcattttaagggctagcacaacatatcaccaacactttcacttcaat

SEQ ID NO: 249143 - DNA, 523 bp, Cannabis indica
cactagcaattatattcagaggttgaagaataagaactggatgagttcccataatagtacaaaaatcaaacataattatgtaaatctttagatatatatacatacccgagagagaacatcgtcggcgagggcaagaggggaatcgcaaactcggcatcgataagccctgccgtccaattcaacgaggaagagtcttcccatgtggaagtttaattgagagagagagagagagaaagcctatctatctatgtatctatcaatctcaacgaatcatcctccactacactctcttctctttttcttcctcttcctcgtcctctgtccgtcactgtatcagcacaactaaaccaaccgaaaccgataatcctgcccaaccaccgtttcacagtcgatcttgtttgttttatatacacgtttcacttttataataaatgactatatttcaaaatacttatatttattttatctctataaaagatcaaaatattttagatattttattttttaaattatttttaaatat

SEQ ID NO: 249144 - DNA, 1111 bp, Cannabis indica
ttaaaaacagaaaattaattaaaaaagtgttaccacctaaaatttaataataaaattaaaaatgacatgatggtaaatataaagtataatatttattgtgatacaaattcgacctatatttttttgagtttttaaaatatgagtcgtgtcgtgtcaggccataaaaaaattatgagttatatcatgttgtgcaacaattttataggataggcccgtcgcatgtccagtaattttgtgacgtcctcagattcgtgtcgtgttttatttatatcgatacgtttttattaaatagaccaatttattttcttatataattcaaatttgtgctccatacttttacatttttattacaaatcggtgaattagatattaaaatatatatgtattttatagttttaataacttttatatattttttttcaataattacatataatcatataaaaaataattataattattataatttaaataatactatcattttaaatgataagtaaatatttctcattattattattatcaaatgagaattgttaaaagtcactattggtgtctagtatcattttcggtgtcatacgtataattaagtatcgagtctcatataacttaaaaaaatagcttttaagtaatatcattaatcaatattggaacgccacctatagaaagtgttggacaccactggtgtccaatagtaatgctcttatcaaattattatatttttttaatgtgttatgttttgagctaagtgcttatgtgtcgtgttgtgtcatgtcgtgtctaaattcatattttttttttgaattgtgactaagcacgtatatttttgtagcgggtcgtgcttgcccgtgcctctcgggctcacttcgtgtcgagtcaaaatctcccgcccatatttacaacactaagtgagagtgtaaaaaaaaaattgtttttctttaaatcttttcttttaacctactgcaatactaatccttgactaaattcattaaatattaatcaatttgacgagatacgtatacactcttccatttttttttatttttttttaaggatttttttttttcatttcttatttttcagtacaaaaaagagtaaaataaaatactat

SEQ ID NO: 249145 - DNA, 855 bp, Cannabis indica
cattctccgatggctctatcagagtacgtgtgaccccttttcccaccattgagaaacaggtgcttctgcccgattccgacttgacccacggcccatacatctgaaccgcttcgccattcttaggaaataccatcgccgtgggaacatggcaaaccctgtccaaatgcgctagtttaccacagttaaaacataaaaatggcaatttttcatatttgaactgtatccatgtctcctcctttccttcagctttgagaaagaatcccactacaaacgggtgggcaatccaaacatcgagccaacatctcaggtagcctctacgaaccagttccactttggatttatcatcagacttcacgaactggccagctttttttgcaatgatacttgcattttcatttgataaacacctagttgggaggccatgaaactgaacccagaatctggccacttcaaaatctgcaactcttacttctccctcgacaggccaaggcttgaggttgaggagcattccattaacaagccagggccgtttttcagtatgcatttggttacatttaaatctgatttaattttgtgttgaaataagggttataacccaacccaaaccaacccataaaagaaaaaatgggttgggttagataaatttcagtatgtgaatgggttataaatttctaggccgatgttattgggttgggtcattgaaataccttcaacccggccaacccaacccatgctcagccctagatcgtagggaaaaatcgatggaaaaatttgtttcgatcatatcctcttttaaatttgcgttttctagctctcgtgcaagtagtcttcaagctcctttaaaagatattcgaa

SEQ ID NO: 249146 - DNA, 980 bp, Cannabis indica
gacaatcgttgattgattcaggtcattttatttttctttaaaaattgatttaaatatactaattagaaaatgacattaatgacttgacacttaattgccagatacatatggaagttctaaaaatataatttagttattatcattgtcagaagttaaatttagtaattatttgcaatcaaaagttaaacttaagtatttacgctgtaaattatttaattttttatgcctccaatatgactcttgtagtcatgggactttgatggcctcatgtcgacatagctgaatcgtgtcaagccccataggctttcttctaaagcttgttatgtatttagtaaataggttcaatctactattctaaatgtttataacttccgtagcaagtattaaacagtcaaaacgaccaaatatgttactcattttattattattacttttgtaatcgatagttatgtttttggctcccattgtctgccatattgcaggatgagcttatggcatggtggtcaactattcgaagaaatggcagcaaaattccttcggaggaagatttgaaaacaaaggtaaagaaaagaagcatgttaggcttctaaaataaaagaagagaaaaaaaatacagaatagtttgaattataaatagagtgattaattaaacataagcgtgttaggctgattggtacaaactgtacataagttcttaatattttctcagcttatacttgggatcaaattttttgtgtaacactaagcatgttattgcattttgatgaaaattctttggtactatttaggaagttggagaccctccaacttcaatcacaaggttagtttatttttcttatttcagatattcaaatatggtattctttgtaaatggaatatgagttattaggtatctaaaacgaatatattttttcctttataaaaatattatttatttttgtctattgagttttagctaaatactataccatcataattat

SEQ ID NO: 249147 - DNA, 757 bp, Cannabis indica
atataccaaacattcaaaggattagtaaccgtaagcccgacagatcttaacggcgcgatgaattcgagaacggaggcgtcgctagtgacgagatcttcgatgatgaggcagatttggtccgatttgaagtgtccttcgatggctttggcggtgccgtaatccttgacctccttgcggcgcatgagcatggggatgttattggagattgaaatgcaggtagcgatgggaagagctatgtagggaacaccgcagacgacgtcgtatttggtggaggaagggattgaggggattagggtttgggaggaacgtctatgtagattggggaagaaatgcctgatttgagcttgaagttatcaaatttaacggctaagatttcgtggagctttaggatgagagattccattgacggtggcgatgaaggtaaaggaaaaagctttagggtctaagaagacgaagaagaaaagaaagaaaaagaaaaagaaaaaagaaattattttaaaattatttatttatttttattttttaaaattaaaataataatttagaccaataatattttgacacgtggtaattttgaaaaaataaacggctcagttaaaattaggactaatggacaaataaaaaacatgatcttaaagactattaccgctatttctcgtggttggggacttatctgtgtcaaattgaattttttgaggacttttgccgcaaatttctctttttaatacagtgtctcattttttttttgatgaaatat

SEQ ID NO: 249148 - DNA, 647 bp, Cannabis indica
ttaaccataattcttgtagtgtaaaccttcaattactcatgttgttctgccttgcactcaaattctatctcagggaagctttaaaatcaataccgatgatgttgatgtgtttgatagtaagaagagtaaatagtggatgagcagaataatatcagggcaggtattgttaagccaataaatggtatcatcttcttgttgaagcaaacactattcttcttgcactcacttggttacaactaattattagaatgtttgttagtattattcaacctgattgtaaaattattgtggataaactgtgtggttctagcaattttaattctgttcttggagatgttttaagatttataaaatactcattattgttcgccccaagctttgtaattaactagttatattcctagaaaattgttcataaacatgctagattaggccttggactacaaaatgaggtggtttggaatatggttcaataccttccttttatacatgttgttcgggttttttttggctaattaatgaaaataataagttttcaaaaaaaaatatataatttaactaatttaaaagtgcctttcgtaatatttttttcatcagttttttattttcaaaattagaaaagtaaaaataattttctaaaatcatgt

SEQ ID NO: 249149 - DNA, 684 bp, Cannabis indica
ttttgaataatttactaaagtaatagggagtcgtggaatggtgaataaaataaattttacaaaattatttttttctttttcaatgaattttaaaagggagatttgatttttgaacatttttttaataaaagatgtaaatttattaaatcatctattgagcaattacattagaaatgctacttgggatagaagtcgccgagtagctacgatcagcatgtaatcatgaaactctagctaagccatgagcaatacgattagcgaagcgtttaataaaaaataaattaatatttttcaaattagacaaaaagaatttgcaatcatcaatacaactgctaaaaggagagatcatattgaccgagcttctaatagcttgaacagtgatgagactattcgtttcaacggttacattggaaacatttgacatctttagccaacttaagacctccctcacacctatggcttcggcaagactcgaatcaacacaaccaacccaagaacctgatcgagcctgtaaatcatgaccccttacatcccatacagggccggccctgaaatgtagtgggctatagggtaaaaattattttttgggcccttatttagaaaaaaatggtatttttcaaaatcagcaaaaaaattgtgtaattttaaaagggcaaaattttttttttgggcccctggactagg

SEQ ID NO: 249150 - DNA, 996 bp, Cannabis indica
ctttcaagctttttctttcttttaagtggtttgtcaatgtttattgtcacatgcaccctgagataatctctccaaacaccgatgaaattattcgggtccgatttcacaaaaacacctaagtagttgccaagatcacgtaccactctatccgatataaaccccgcagtcaaattatgaatttggacccagaaatccaatttattgaggatgatcgatcttgggttctcccctattttagccgttcgaaaatcaaaggaactctatcaaatgtccatgggctcccctaccataactcttcctatgtccacttcatggtagaatttggaacaaatataagttatgttccaattctttgacatacataccacgccccggttgccacaaaactgccatcttattctacatagcttggaaatcaattggtcttttcgtaagaaaacggccaactaaacaccatctatcgtcaatatccgacagatcatcttcaccaccatcataaaggaggccagcatcctctcttcttccaaattaaaaccttcatactgttctaccaatgtaggacaatcacgattcacgttatccatagtaacagactttcacgaataaaacaaaataacaaactaggcccagagcagaatcaacaccaagaaagacaaaccttcaagaacaccacatacggacaaatcttaccatggcaatagacaagacataatatatgacgttttttttttttttgagtttctatttagtgaaagggaaatttgattttatatacttatgatatcatcattttatttattatgtgggattgataaaatttaaataccaatttataacactatctgaaaagttaagtagcataataatccaaaaatttgcttaaaaaacttactaaaattgatgatggataaaaaatagaataaaatttccaaatttcagtagaaaagaaacattgtctcgccctgaaggctaaagtcttcgcttcctcttcatttc

SEQ ID NO: 249151 - DNA, 611 bp, Cannabis indica
aaatgatatttcttgtagtgacaccctttacttggtttctaagtataacttttataactaggggtaaaatagtcataagtaattatcctcgtgtaatcccgacattctaactatctataaatcttgcctcgctaattctaagatactaaatcgtatctaagtgactctaatgtccaaatcatcaaattcaactgttatgaggcataaaacataaaaatatcataattcataaataacatacatggcacacctagaattcaataaaatttttaaaatcgagaaatcaaattacttatgcccatttatgataatacgacttaatttctactaatgaatacataatcatacatattaattaatttactaacaaatgttactagcttgtctgctaattccatgtctaaatatgtgatcactaaaattattcctccgttaaaaggattttgtccccgaaatctgtgacagtcagtagtcccgtgatccgtaaggggaaacaccgggtaagctgtgcaatcccacaccgcctggggaaggtcaagtgggatgattccgagactgtgtaggtatgggactacacagttgaagagagcttaaatggattgattggtact

SEQ ID NO: 249152 - DNA, 669 bp, Cannabis indica
ctagaacccgaaccctcccaacacccttgaaccagctgcttgcataaaggctctctaatccaggcattttcaaaacgaaaagaattaaaagaaacagaaggagacacacctttaaagaccagtaatatgggacaatgatctgaagtagagacttccaagttgtatagggtcgactgagggaataaagacaaccacgtgtaggtagctagcgccttgtcgagtctttcttcaacccaattatcaccattcctgcccttctcccaagtaaaagggtaacccaccagaggcagttcggttaagttgcaatcgttcaaagcttctacaaagccatcaataagtcggtctgggtatggcctgcctcctctcttttcatcattagagcttaaattgttcatatctcccatgagacaccaagggggattgcttgcatctttaatagagcgaaagaggttccaagtgttgaaccgaagctctcttctaggctccccatatactccagtaaatctccattgaacacagtgttgcagttggacaatagcgtcaatatgatgaaaggaaaacccttgaatagccacgtcactagattctttccacaacaaagccaaaccaccactatgcccacgggcctcaacaacaaaacaattatcaaacccaaacgaactctaataa

SEQ ID NO: 249153 - DNA, 1031 bp, Cannabis indica
tgcattgtaaaaggtcgctgagaaactgaaatacctttgctacagcgagctatttcgagaccgagaaaaaaatgcaagctaccaaggtcctttaatttgaattttgagtcaagtgtggcaatgaattcattgagggcaactgtgttattagttgctgcaattatgtcgtcgacatatataagtaaggctaggaaaaaaccttgggaggttttgataaataatgaacgatcatttttggattgagtaaatccttgtgaaatgagagttgaacttagtttggcataccagtttctggatgcttgctttaggccgtataaacttttttgtagtttacaaacggcattaggagggatcactcctttgggtttgtatccttgaggtaatttcatgtaaacatcctcatggagttcaccatggagaaaggcattgtcgatgtccatgtggtgtaagtgccagttatgaatggcagcaagggagaaaaggagttttaatgtgttaaattttgctacgggagcataggtatcaaagaaatcgatacctggtttttgtgtgtagcctttggctacaaggcgtgcttttaatctgttaaccgagccatctgggttgtattttattcgatacacccatttgtttccaatgacgtgttggtcagagggtaaggatgtgacaatccaagtatggtttctttctagagcatcggtttcatgatccattgctttaagccaagcagcatatttggatgcttctttgtatgatttaggctcggatagagcttgagcagctagtatggctgattggaaggcattggaaaatcgataataggaaatgaaattggcaatgggataatttgtagaggctgcaactttgttgcagatataatcttgtaggtaaaggggtttggtgatatttctcccagatttagtgatgtggggaggaggagtgggattgttgatggtatctgggaggttttgtggggagagaattggggaagatgaagagggatttgggggagtatcattcgaattttcaga

SEQ ID NO: 249154 - DNA, 810 bp, Cannabis indica
cttgacaaactcgtgtgtgtcctcattaatcgtgggccagtaatatccttgtctaataatccttttagacagaatttgccaacctgcatgatccccacggaagccttcatgaatttctctaatgatttcatttgcttctgtggggagaacacatcgaagtagtggcattgaataccctgttctatatagtttgccttcgatcaatgtgtagcgatgtgctgaatacaatagttttcgcgcctcttttttgtcatttggaagttgtccgtcgagtaaataattgataatatgggtcatccatgttggagagctcgcttagcatctctaccgaaactagattcaattcattcaggtcattttgcgaggccagttttgctaaggcatcgtcgttggagtttagttctctcagaatttgcttgattttaaagtaatcaaatctttccaagttcttccaaactttctctaaatactttgccatttttaagcctttgacatggtattctccgagcaccttgttcacgatcaactgtgaatccctatcacaaatgagatttttgacttttaacgcctcaactatctttaagccggtgatcaaggcttcgtactcaacctaattattggatgcgtcaaattggaatctaagagcgtagtgaaacttaaagccttatggcgatattaatattacccctacacccgtaccctattcattggatgcgccatccacatataacttccaagtttctgcgtctcactaatcaggtggaatttatgctggagttataccttctatcaagaagtcagctaaagctt

SEQ ID NO: 249155 - DNA, 621 bp, Cannabis indica
ggaacaagaatataagatagatgttgatcttcaggaacaggtgaagactttagactagaaagttaaagctgctatcaagagagccaccattgcttagggcaaagtcactcttcgggaagcattctccatgaaagaggaacatgagcttacaaattatcaaaagcttattgaatggctttaggctggagaggaaagtattaagaataatcttgcacttctccaaaataaaatggacaatgctaaagttttaaatgaccgtgccatgagtctgaagaatgtcttatttgctgaattggaggatagagtttagaggttggaagtcgagcttgtggcccaagatgcacaagtggtatgagacaaggctagatatcaagtgatgatctttaatgttgtgtattttatttatagtggcaatcccaacttcaactggaatgagttctcaaaggatgccagatatccctacttgttggagtgtgaagcatgagagttgatggagaacatacacttaatgaacttgatattgtcaatgttttgagggttcaggcatataaccctgacgatcctgctatcaccagtagatcttttcaatctatttattggtgatacccctaaactaggtta

SEQ ID NO: 249156 - DNA, 588 bp, Cannabis indica
ggtagcatcccactcctagtagggttttgtttaatcaattaggaaatctcttgtggatgcagtgtcgtgcttctagagagatttttataattaatgatgcttctcttttctttttgatttttctgatttgaggaggaaaactgacactttcactttagattgataaacttggtttttgtattcttatgagaaaccaagcgcttatatcatagtagtgcttaactctggtgtgcgaaattctcgaatatcactgcagcccctggctcctgtataccagggtaacacctggctcccgtataccaaagtgtatgtgacatacatgactcttgcgtaccataatttttatgaatgatcatgtccgtgcatagatcccgtatactatgtcttatttcccccccgagtgactgaaaaaatatcttcattggtcacttgccatatcgaatcccattgggctttcttgatcacgagtctcagggaattgtaacatgtgtgagcactcatccacttatctagagattcgtgggttggcagtgtttaactcactaaagaaataatcatagttaaattaagaccaaatctacaagcttt

SEQ ID NO: 249157 - DNA, 953 bp, Cannabis indica
ctggtttcacactctcaaataaagattttttttttcttcaaactttaaagaattagcctcataacaaataataataataagagtaatttgcggtataaatacccaagtttagctcctagttacaaataaataattaagtttaatttttggcggtaataatacctaagttatatttttggaactctgtaggtacttgaccattaaatattaagttattatccacgtgtcatttttttattggtatatttaaattaatttttaaaaaatttaaggacttggaccaatcaggaattgtcacgtggcaatttacttaacacttaacagccaagtacctacaaaagtttcaaaattgaaatccctaaacgcccagacgtgcggatccaagctttcaattccattcttaagtgggtttatcttattcttttttatttatttatttttttaaaagatgaaattttgttactggatttttgttgaatagctttttttaacaatagtatgttatatatattttccaaggttgcagtttcatatgagtttgaattgatttcgttttgggttactgtcgtgacatttgcaaggatttattctttctataaatacttatcaatttctctaatttaatacacatgtttgatgaattggctcacaaagagatatgtttaacaaaatgattcaaagaataaaataaattgaagatacataattgttaacccattctttttaatcttttttggtatatatattttataaacagaatgattcaaaaatgcctgaagcttgagaattaatcgatcaagtgccacacatagtgcctaaataaacttaaaaccttgaattggtcgaagaccctacaatccaatatccattgccttattatttggtacaatcatttagagttcatcgtaatgatgtcaacggccacacatcgaattggcagctctgtctttgct

SEQ ID NO: 249158 - DNA, 894 bp, Cannabis indica
tttcgtaacatagagacatgaagtatgttgtgaactattgaaagtgctagaggtaaggctagacgatatgctaccagtccaaacttctcgaaaattttgaaaggccctgtaaacctaggataaaacttgccctttttcccgaaacgtttgatcccctttattggagacactcgtaggaatacatggtctcctacctggaattctacatttctacactttgagatttcataactcttctgcctactttgagaggcaagcactctggccttgatcttttctatagcctcattggtctattgcaaagattatggacctaagtatttcctttctccagttttatcccagtgaattggagatctacacttccagccttataacatctcatagggagccatccctatggcactctaataactgctattgtatgaaaactctatcaacggtacatacttactctaggagccttcaaaatccaacacatatgcacgtaacataacttccagtatctggattgtcctttcagactgtccatcagtttgaggatggaaagttatattgaactttagtttggtacccatggcctgctagagactctcccaaaattttgaagtgaacttcggatctctatccgatataatggatttcagagccccatgtaatctcactatctctttcacatataactatgcgtactgatccactgtaaaggttgtattcactggtagaaaattggcagactttgtaaattgatctactgcaacccaaatagaatcatacatccccgttgttctaggtaatccaaccacaaaatccatggtgctatcctcccacttctactcaagaagtgttaaaggctgcaacaatcctgcaagtctttggtgttcaaccttaatc

SEQ ID NO: 249159 - DNA, 529 bp, Cannabis indica
aggttgcttcgatatggaattcaagtccaacctagctgctgcctttgtaattcagctcctgaaaatggaccacctattctttgattgcagggtatcaaatcattatttaactttgattaaacagtggctgaattggaaggctcacaccagttccttgccacagttgattaaatggatcgggagcgccaaaatctcaaattttagaaagaaggtgttggcagcagctgttgctgccctagtttacagcctttggaaggccaaaactgaactcatttggcagcaaacacaggtacatacaggcagattaattgatgacatacaatggattctcaagaactggattaacatgtttttacctaggaaaatcaaggctatagatagagattgatttggtggtttgtaagtgttttgtaaagaggaaaaactgcttgtatatagaagctaggcccttgattaagtgctattagtttgtaaataccattttgtgcaatacaattctttgatttatcaaaaaaaaaattgtctttaa

SEQ ID NO: 249160 - DNA, 716 bp, Cannabis indica
tttttaataattaattaatccatattaaaatagtttataaaatcactgacgtggcgtccctatggattagtgtgttacattattaataggtaaatcgaacatagtctattacatgcagatatttttatcgagaaaagtcaacaaaaataggctaatcaagtcgtttacaataaaaaagacaaaaaccttaattaacaacatcttcaactaaatgacacataaggcaccagctgtaaaacaacaaaacagtgggaagaaaactagatttacatccccaacgaatatttgacaaccacacatatcaatgataatttgtcaaagatcttccaataaaaattggataaaaacaccctaattattcaaattagaataaaaatgaataacattgatgaatcacaaaacaatgtatcaaaactcaaaagaaaccgagaaaaatcccaaaataacctaggcgtccaaatccaaaaaaaaattagagatcaaacacaaatgtaaacacattgtcaataaaaacaaaaaaaaaaaaacaatagtaaaataaacactcttaaaaataacacagggaaataacacaactgaaaaaaaattaaaatttatataaaaataatgaaactactaaattatatggtaataattttattttattttattaaagaacaatgcatttggcgaacatttagagttacatacaaatcaggcatatattgtgttaaaat

SEQ ID NO: 249161 - DNA, 887 bp, Cannabis indica
atccatgtttccaaacagatgtctatccttcctttggttttcttccgattaaagttgattcttccaagattcacgtcggtggagatagtggcaaatggtttcaaatttgatatttccaagcaccaataagagcgatgaaacgtgggaactttgtctttgtcacgtggcaacggcaagtatatctcgaaggctactactactactctggggaagctcgtaccgtacgcaccggccttattgcttaggtggctttacgaacaagttctattggtgcgtagtactactcgcgttgattgcgcttaagtttaattttttaaaaaaaaattaaaaatataacgatttagataattaaaaattgtcaccctcacaatttacttaggatacttagagagtttaaaaaatataattgaagtattattgctacaaaaaaattaaatttatatatttatttataataagagttgatgcaaattactcttatttctattatagttaaaactctttaaattaattaactgttgagaaatttaaagttccatctatcttttatactcaatttatcaacatgattatttatgtgtacattcttgtacatttgacacgttattgatatacctaatattattagttaaaaactataaaaaattatttcaattgtaatatttttattttttttaaaatattttgtttatgtaaatgtgccacgtgtataagagtgtgcatattagccatctataatagtaattaattgacaccttaaatttgctaacagtctagtagtttagaaagttttaccgctaaaatttaaacttatagggtcaagtgtaaataaaataatagttggaaggatttggctgctaaaaccttttttcaaattgttattgtat

SEQ ID NO: 249162 - DNA, 683 bp, Cannabis indica
gaaacaatagaggaaaactgaacatatattggagcatataatattgaataaaataacttacatacaaatttcattatttttctattactattaaaaatagagcagtacaataatatttggaaaatatgataaaaaaaaaaagataaaagaaaacaacattaaaacaaccttaaaacaataataaaataaataccaaaataaactagtaacagaaaagggtaagttggagaaagatggtggctttagaattacagtagagatggagccaacgctttgagaccaaagagactgaatgacatgaacttagtgggagtttctgaaagatttctacaagaaggtcatcacagagcaagctctccatctctctctctctctctcacacacacacacaaccacactctcatctttctcgattcttcttcttcttcctccttcacatactgtttttattttgttacctactaaagaaggagagagttagcttttatttgggtaatgttatagatttgggaaaaaaaaaaagaaaaaaaaatgaaagaaggtgaatagtagagagagagctcaaatacaatgaaaaataaataataaaagctattacaccttaaaagaaaaaagataacgtgtagaaaccagaaagatgtatattaagctcttcatgattagtttttttttaaaaaaaaaaa

SEQ ID NO: 249163 - DNA, 1270 bp, Cannabis indica
tctctctcttcaaaacacaaaaaaaaaaaaaaccacaaagctccattgctggcgacccacctccggccaccgactagccccacgtgccagaccactcaaactccctggtgccggcgacctcaacccccaagcggcgtctctcctttccccgccattagtttgggatcgtaagtcaaagtttggtggtacaaactttgaacggatttttcggtcaccttcggtgtccgtttgacgagccgtcttcaccactagactcagctcgtcgaggagaacaacctacactaagctatttcacccagttcgctactttttctagtgacatttttgtagctccgcccctttccggtgacttttcggggacatcgtgtactgttttaacaaacagtcggcatgggtgtgatctactcgtcgaggtggtcgttttgatatacactacccctatttttggcgatatttctcgtacatcaatttttactgccaccgatagctaatgtgcatcgcttaggtgaggcttcggaactctaaattttaaatatagtcatattatatgtcattagactcggttttgaatgtagaatgcggtgatgataattatttaaccatttaatggtataggtgagagtaatatctaagattggactaaacaattggagctcgagtcttaacaacttaagatcgtcttttggacaaagtttaacgacttgggagaggtagggactcaacttgattattggacttgatttttatatgtcttgtataacattggaaaaattaatctgcatattttcctggactattctagggcgtcaaagtgttggaatatgttttaccaagatctagatttactaccatgtatgttgtttgttaggctgaaattagtctaagtttcgggtcgtattttcttagtttcactctttgtttctagttttagggctattttacgcttgattcttttgtttcaggtccttggatgtttaatgaaagtatttacaagaattgaggacaagtggtgaaagaattgagaagaaaaaaaaacgagacattttgctgcccaatcccgtcgcaacggggattggcagagagttttggaaaattttgcttaagccttcgtcgcgacgggcaaatcctccgtcgcgacgaagctccagtgacgggatttttgggcagtttcgtaattttacgaattttaaagatgagacttggtttaaatagagggagttcgtgaaaattgagattcattcagatttggagccctagaaacaaaggagga

SEQ ID NO: 249164 - DNA, 669 bp, Cannabis indica
ggttcaattcaagcttgagagacttccactgctttactttaagtgtggcatttggggccttgaaaaacaagaatgtagtagtgctactattacggtaagagatgaagatggccaaattattccaaaatatgtcgtgtggttaaaggaagaagacgccatgccaaattgcttcatgaaaatcaaacatgataagatacagagacatgaggaggcagagcttcaagatgacagtgctgaagtggtggtgaggaatggttgttaacctcgaaaatcgacagagtggattttcgagattcatcaacaattagtcccaacggttgagagatatctagtaaaagagtcagttgaggaataaatgaatcaatgcatatggtctaaggctctttaatctcgagaattcatgcttgcaagtctcggggtatatccgtgcaactcggaggacaacctcgtaactactcatgagtagagttagtaagatcaacttactaagttacaattgttggaggattttcatagtgatgcgttaagaattagatcttgtcataaacataagattcataggtctctttccaatcattctaacccatcttgaatttttcaattccgatatatatcgagagagttatgactaaaatactaagaatgctgaattgtgacaacttgacatgc

SEQ ID NO: 249165 - DNA, 889 bp, Cannabis indica
aaggtgactttgtttttttaattcaatgttgttgctcgatttatttattttaattctcttttttcttttttcccctgtggttttagataaatttcagtggaatgggataacaagtaagaagaagggtcaacagtggggcaaagagaagacagactttcataaaaggaatgatctgaaaaaagagaacccggggtgttcggatatgctggttaatgaagaagaagaaaaagaagatcaagagaaaactactgtagatgttcctatagactttgataagcttaaaccttgtagcaccttaccccaggtttgttacctcgtgctatgcctatgctttggttatttattgcaatttcttaagatttttctggtctttattttgagaatgatagcttctttgctataatgcaacacaggtaggcaatacagtggcatatcgtctggtcgagttatcagcatcctggactcctgtgttttttgtagtggttgttttttgttttaatagggcaagtgagatgttatcggttattcaaacttaccgatgttagttgttttttgttttaatagaccaatagttattatataattttatagttatggatttattagtataatgaactaatatgtaatatttattaattttgttgatgtgaattattataatggtctaatttataaattttacatttagtcaattaaaattattattgttatatttaattgtatttgtatataattaatataaattattatttataatatataaaatttgaattaaaataattaattattttatattttttaaaaaaatatttaatatagtggcacttttggtgtgtcactataactctaaaaaaagaaaaataggatatagtgacactctttgtgtgtg

SEQ ID NO: 249166 - DNA, 1184 bp, Cannabis indica
tttaaaaaaaaaaaaaaaaatactagatatgtaactatagaagattgaatcttgagacttttaagacttttaaaagttttaccattagtgatcataaacatagcttggtggatccacacttctccttaagagaaggtcttaaatttgtatctcctctagtcaaaaaaaatttaccaattactaaaaattttaattttaattttaattaaactatatataagagtcccaaaattaaattttgttccataccataggatcaacactgcatagtatcaagtaaatcactccatatatgaacatgaatatatttttttaataaattcagattactactacaaatctagaaacttattctattattatttattaattatagagaaattgatacaaaatcaaccatcatctactacatgtttaagaaatgaaagagatagctagagaaacctatagagattttgttcataaacgaactacaatttggctcttcattaatattggttttcatgggaaaccagattttgaaggtgttttctcatcttctaaaagcacagaatcagatgcacttaacttaaatccaggaggaaggggaatcaagggaatggaatttggaatgaaaggaaatgtgggcattgtgggaatttttggaatggatggaaatgagaaaaatttagttacattcataatttcagtaggagataatggtgaagaatcatatgctgccaagtgtatggtcgatgagggcttctttacatcatccaacaagccgcgggatgcatgacacgtggttgcaagaatcagcatagctaggaagaaaagagggagtaacaagaagtttaggggcaaagccatgatttttttatttttatataataagttgtaagagaataagaaaaagaaaatatagtgtttgtagtgacaaaaagtgagagtttaaaaaggttaaatgagaatgagagtgtgaaaggtggtgtctagtggttagtgttgatgagtttcatgtcagttctacttcaaacctaaaaaattactagtaagtaacatatattgatgattaaagtcatgctttttgtgtaattgtcatttatgacagaagatattaacaaaaagtatctaccattgtaataaaatattgatgttaattttcttaacatgattagtatttataattgataaacttgctccat

SEQ ID NO: 249167 - DNA, 687 bp, Cannabis indica
tatatatatatatatttgtcaaacttgttggttctccaagtgatgacgtttgtgagcaggtattgaattcaagcatgcactgtagctgcttcttatattttactgtgactgctcataatgttggcaattatctattacatagcttttgcttacaaatgtgaaacgacatgttctagctatttttgctgaaccttgattttgattaaagtatttgcaacataagtgcaaatgaaaatattggtagtatgttttcttaagtgttttagaaggtgattgtactctaattattcagatgatggaaatatatggtaatattgtagtagtaatgagtcactgacatggctatttctttgagataattatgcacgaaaatttggaaaaaacatcataagtaacgctgataatttttattgtagaatatacccttaattttataatattttttgacaagtatatacatgcttattgttttctttttctctctttttatatgtacgctagtttttttttcttttttaaacatatatatgtatctcctctcattttttttttatagactcatgtatttccaagctatatatatatatatattttcattttataataatagtgattcttttttaaaagatgggatacttatcaatattttctctattatttttttaataaaatcttttctaataacac

SEQ ID NO: 249168 - DNA, 1386 bp, Cannabis indica
aaccaaacacaaatgtagggctattggaaaaatgggaagagatagaaatcgacccaaatgtccccaccaggaaactcaaagttggcaaaggtttgttgctcgaagtaaaattaactttaataaaatttctaagaccaaacctagacatttttgcctggtcgcatgaggatatcgtcggtatcgatccttttgtgatatctcacgccctaaacattgatccaaacttctgtcccgttcaacaaaaaagaagattattagacaaagaacgggcacaagcattaaaagaaaatgtagaaaagctacgtaacaacaagttcatcattgaagctttctacgaggcttgggtagctgaccccgtactggtacccaagcccaacataacatggcgagtatgtattgattttaccgatctcaacaaggcatgccccaaagattgttttccacttccaagaatatattagctcgtggatgcaaccgccaggcacaaaattctaagttttatggacgcctatttagggtataatcaaattagaatgcatccaccaaacaaagaacaataagttttcgaacagatatgggtctgtactattacaaggtcatgctgtttggtctaaagaatgctggagctacctaccagagattggaaaatcaaatgtttaaagactaaatcggacgaaatatggaagtatatgtggatgacatgcttgttaaatctaggaaggctggagggcatatagatgacctggatgaatgcttcaaaatcctcaaaaaatacaatatgaaactcaatccctcaaagtgctcctttggagtcacttaggtaagtttcttggttttattgttaatgctcgaggtatcgaagccaatctagagaaaattcaagccctcttggatatgaaatcgccaacaaaactaaagaattccaaagcttaactggttggatagctgcactcagtagatttgtttcaaagtcaacatacaagtgtgttcctttcttcaacatccttcgaggtaataagaaatttgaatggacggagtaatgcgagaatgcctttcaagaattaaaaagacaacttgcaaaacctcccgcactctcaaaacctctggacgaagacgagttaggaatatacttagctgttacagaatatgcagtgagtgtcgtgatgatcagagaagaaaaaaacatccatcatccagtctattctatcagcaaaagactcgttgatgctgaaggacagtacccattggtagaaaagcttacttattgccttatcttaacaacaaggaatttaaggccctacttctaggctcatcctatttgcgtatacattgaccaaccattacgccaagtattgcaaaacccgacgcttctggacagttactcaa

SEQ ID NO: 249169 - DNA, 496 bp, Cannabis indica
taccaatgagaaagaatagagagaaaaagcaaagaaaaatatcaaagcatttaattttattatgcttaaactgattttacaaaaggggaaggagcttatatagctctgtataatcaagaagagctgtaacagaattgtacaactgtaatataatctttgtaacaaacaaaacaacccttaactaacttaatctaaagcttaactaacctaatccaaactaatcctaagataagtcaagcataattgctagtttgtcaccatgtggtcatgaccactcgatcatcttaattctaacagaagttaattaaaaatcaaacgatgctctgctttaaatctcattccatcaaaattcttataaaattaaaattttctatttcaataatagttatgtgaatcttctaagtacataaatcaaatttttcaatttattctgtcaagattctgaaatctaaaaaaatataagcaactctcaatgttgtgtagaacagaactagag

SEQ ID NO: 249170 - DNA, 1201 bp, Cannabis indica
ctgcgtacttggttggatgagtaaaagcatccaatgaaacatgttcctgcatggacaaatatgtataaaattatcataataataaattttataaggagttataaatattgaaattatttattttattctacatataccgattattatatgggacaataagccatttgtctgaatttgtcatcctagtcattcgagtgactagtgcttgacaacaattactatcagcccctgcatcggtggcaatcgcacccggattcaaaaatttatatactcaattcaacccaccaatgtccaatagtctttctttcatgtacctgataaaaagtcataactactaactgttgctgtcaaaataacattatcaagtttattattaagagtaagtaatcatacttgcaccaaactcctattggttgggctccaaagtattgcatgatgtatatttcctgaatgtcacttttaacaagccaaatagagtcatctgcgaccccaaatagctcattatcaacttggaattggattatggatgacttgggccaccttctaacgaagttccaaaaggtaatgatggaggaagtttggcgtggttagacataatgaccatgaacttttaccttactcgacctctcagggtgttttagcggctgtgttggaggaccaagtaaatcatcagagggttctgtgcttctcttcacggtttgcttctgaattttcttggtgagtggttgtgtctatatatatgaaaaaaataataataaagttagcaatgtcattaatgaataaacacgataagttaagtaaacaaattgaaacataccaaatgtttttaacaggtgtaagatagtctttcgaccatgctacataacattttacaacttgacctattgtcgtcaatgaatcgtcggctatgggacacgggagcagtgcattctccacattggcttcttcgataaatacccgacaataatctttgtgtaggtattcatccatgttaatggaaaactttccatctttcaaatatttttccttggcaatgtggcccgaagcaaccttcagtaccatgccactaggctccaacagacagtgcatccaacatggtaaggtctgtaaatccaaaacaaacaagtaacaattcaatttctaagttggccatatttataattttgcattagaataattcgtaaaataacattaagattac

SEQ ID NO: 249171 - DNA, 722 bp, Cannabis indica
ttggagagatgtaacgccttatcatatagggacgagtaattttataaactagtttaataataattaaataattaattattaaaatctgtgataatattacaaacttcactaaatgaaaacattaaaaatagacatcataacgacactaaaattgtgttccggggatgcctgttgtaaaagttttacaaaaagactaaatacaatgacaagttaatatacaaaatcaaaatacacaacgaatacagcccaaaacaactcctagcaactcgagacacaggctggtagggtcaatatgtacattgttggagaagattatcacctcatggttgatctctttcctttgcctttacctacaccacataggacccgtgactcacaaggactcaacaagaaaagtaataacaacaatcatataatttattatttgaatattatcatttatactcagacaatcagaatcaaacgatcacgcattactcataagatggttggtaatacaaaaccattatgccaataatagaaattatattcatttaataatataaattatatgtatgttacctcataaagtaaccatctttattaaatcacactgcctaatcaggcaagtcgatgcgctttaatatgataatcctgtattatattgcctaatcaggcaagcccatgccatagcttggcacccatatatcacacaattggatcaccaaattaggtgagctcgt

SEQ ID NO: 249172 - DNA, 549 bp, Cannabis indica
aaaaaataattgctaaaagatctctacttgttaacaaattccataaaattaattaataattattagtaatgtaattttaaataaaataaattttaattaagtttttataaggaaataaagtatcaagttacaagttatttattatttatttttcttttaatttttaaattaatcacaaccattcaacaatgatctaatggttaaaaatatgtaattatgctgattacatatttgatgtaaccattgaaacctcctccatatatatatttatgtatacttttctaataaatatccaccttctaaaactcaagctttcaaaagatgaaaattaagattaccaacaaagtttttatggcttattaattttttatatgaataatgtgagcataaaatttaaacagccgcacgcgtgaagcgtgagctaacttctagcattataaaatagcactcgcctttaatcttaatccccatacagcggtgatgtaacgcccttacttatataaattaagatgccataaataaactggcgttaagatactaatgttgcct

SEQ ID NO: 249173 - DNA, 682 bp, Cannabis indica
aaaaatattcttatatcctgttcatgaagtttaaacaagtccttagttggtaagccacatggaacagtttgtgagaaagattgacctagacttcaagtagacactgaggggaactgaaattgcattgtggtatcattattgctggccgtgctttattttgtataggaaatgatttggcttaagatttcttatgtgctttgtcttaacatgatgtgtgtactatatttatgatatgtctatatgtgtgctgaggtggatatccacacgctaatacagatgagtttccaatacagactatgcatttttatggtaaaatttaaagcatctttaaggtgtattttctttctttcttatgtttaccatgatttcgtggtactagaagtctattgcttttaagagtaaattaagttcacataatagtaatggtgtaaatgacataatcttaaccaaaagatcaaactgtaaacacctagttaacatgaataccagaaatatagcataagaaaactgaagcatatttatgcatctatttgccatacaaaataataagctgactacaacaagaaaaaggaaaatcgaaacttcctaacctcatattgctggtagcttatctctttgcggagtgaaaatcaaacctgaggcatgattaatagagcaatcatagattaggacactgcaaact

SEQ ID NO: 249174 - DNA, 681 bp, Cannabis indica
tttttttcttttattattatttaatctttattaatcttattatgtctaataataatctccgaagaattaaaaaataatgtacatatatatctaatatactattaaaaaaaaaattaagttgtagatcgaattagaaaaaaatatatcaatatcactaagtttaagtaaacatatttttacactagatgtcaaattttgtatattttttacatttttatttatgtttagtattttaaaattttttttttataaaatttgtttttcaattttatttttcaaaaagttctttaattacaaaaatacatttattacttatgattagtctcttttacatattaactccctttctctctttttttttctttttctgtttcttctctttatttttctctctttttaaatttaaaaaacaaatgtaatattaaataaataagggatatttactcaattcaaccaaaaatcacatattactactttcttattagtgggcggtattttgaataattttaccattgattttttttaaatatatttttaaaagtttaaaaaattcaaaaattactacttacatattaatgttgatataatgtacatttaaccattctttttcaatttttacatgttagacatgattttctctctctcgtcactcaaatacctttttttttacttactctttac

SEQ ID NO: 249175 - DNA, 1471 bp, Cannabis indica
aaattctcacatacaaaagcacagtagaaaaacttaaccgaagaataggcaggccgaaaacaggcaaaaaaggcaagtctctgggagcctgtgatttggtttcttctctcccatcctctccacgctacgataattagtcaaaagatttcagcaatccagattttctgaaaagcagcatataaaagatcaaaaaatacatgaaatgtgggctggaagtcagctgattttagtactattcatcatgagattagttggtatcagcctaacagattatgagaaggcaatctaactggtgttataaacagaaaagggcaatgaactaagtctaagttgataaacgggatgtgcctaagtagttggcaaacaaaggaaaaatcttttttagcttacggttttcattgagatcaaccggaagacatgttatcttagattgattgtccattgtgctacacaatgcttgggggaacccaggctgtgttggggagcttgtgctactgcggcttgaattaccatttgacatatgtgtcttcacttggtggtttaagtagacttccaagctagaagaattacttgcagtatttctcttgctcttcaacctaccccttgtaggatagagaaaataaaaacaaagagtgacatcaaatgagaaataacatacgtaagttattaggaaaaataaaaggttttgccacttgggatacctgtcctttcgcttttcacggtatctctgcaaagacacttgtctgcttgcctgaccatctgcatctgaagaacacgaccaaacattttaaacttctcataattggtcaaggaaaaaagcttcctcacttggctaagcctcaaatgtgtctcatcattcattagtatcacactaaatgcacataagtattttcaaatgtgatgcatgctacattacagacacaagtgaacaactcaaatttcactgaactaggagaggagataaagtaggtgttaacagagtcaaggaatttgtgatttcaagagatgaggaaagatgttggtgggaatacaagctagcagaagtggcagtttcataactttcaatgtgaagttagcaaagctgaaggagaagcaaggatacagagcaactagagcaactccgatggtggcactcttcagaaaatctccacattatccaaaaatataatatcttttttacctctcttctacattatttttgacaaccttacttctaaaatactccaacagtctaaggttgccatcatggtcccacacactaataatgtttgatataaattttattaaaaaacgaaaaaaagaggatggtaaggttgcctaaaataagcaccagtcttgataactaaacttctccagtggttagctctctccaagcattctgccatatcagtaagcactcttccaagaaacccttgttggagatactcttagtggtcagaaagtttgcaatcactttaaaaaaaaaaaaaaa

SEQ ID NO: 249176 - DNA, 598 bp, Cannabis indica
tcaaataatgaagaaaaaaacaacaaagattggaacataaaaaaaaattaaagaatgctcaaatatagtatgacatatgataacctgtaagcctatactttctgttgactgaatttttagccaaccaacacggagtcgtaataatgagatttagaccaaaatcgtaacaataaatgtaattagtgacaccaaaaattgtaataaatgtaaagaaaaacatcataatttaaagaggttcgaccctagatgttggtaatagcctattccccttatatttttattgatcaaggatgcaaaagtcaagaacaagctcttaattgcaaagaatgaaaagtgtttactttttactaagtgctcaaaatcaaggatcccctttcccaagtcatggatgaccattcatacaggggaaagggtcggtgcttctcgcttcaagagacccgaccaacgcggagctatctcaaccgttttccttgattttcagaggtggttgaagtctgatttttatgataatatctcgccattttggtagatttataactatctttgagcttcttgtgagatttaaatatttgaaatagtcactgacgatgagggtctc

SEQ ID NO: 249177 - DNA, 888 bp, Cannabis indica
  modified_base (713)..(713): a, c, t, g, unknown or other
  modified_base (800)..(800): a, c, t, g, unknown or other
actaagcgtaagcttcaatgggccggtgatatttgaaaattttgttctgtaatatttaaatagtagtaatgtaatgatgtgtattttattgagcaatacaatttaataagtgttttttaaattcaaataagaattttaatacttgctaaaattgttagatttttgaaaaaactctttattttgcacccactacaataagtgagctttttgttggtgcttttatgtttaaaatttgtgtagtttttgacctagattgtttaaatgttggtgcttttatatttaaaaatttgtgtcattttgacttagattgtttaaatttaaatttggaaatcactacaattaaattaactatgcttttgcttgcaattagcatatcatctacatacaacatagatagacaatagcacttttccttctgacatagacacaactgtcaaaagagtttctcttgaagcttgagttggtgacaaagacatcaattcttttatattattgttttgatgattgcttcaagccatataaaaaccttcttcaataaacatgaagatcctcctttcatttctcctcatgataaccttttggatgcttcattaattaagatctgtcatttcaaatctccatgagaaaggcttactttacatctagttgttccaactataagtcttcagtggcaacaatgcttagtaagagccttatggatgtgtgtttgactntaggaaagagatctcattgaattcaattccttctctttgctaaaaacatctagctactagcctaccttgtatctagcctcctccacncaaagaattcctcctttaatttcttactgtgatccaagtcttatttttattcaagactcaatctcatcatccatttcctttattccac

SEQ ID NO: 249178 - DNA, 1464 bp, Cannabis indica
ttttttaatatttttaaaattacaaaaatactatttttttagttaaaaataaaataaataaaaatctagaaaaataataacttaaacacaacagaataaacaaaaaacaaaataagatatcactctcattacaatatgtaaatcaattagagatcaaatccaaataaactgcaaaatattacaaaaatatatttttattaatgattaaagagggtaaatgaggtaagataatgtaagtgagaaaaaagattgaaacaaatgggaatatgacacgcaaagtattttttttttttttttaattttgtaggaaaattttactttttggtcctaataaaataccccatatcaaaatttagacccatttataatttgtacaaattgattccattaattttaaaagattcctaaaatacccctaaattaaattttccctctctttctcagactttccctctctctctgtcctcctttcttcacgcgacccacgaaccttctccaccagtcgacccaaccttctccaccaatctccagccgacctcacccctcaatcacccacaaacccacgaactggcctcacccctcaatctgtctctctccatttctcaaagacgaacgacgacgactcacgaccaccacgaccacgaaccaccgagggaacccgaagtcaaacttcgccaccaccaatccaaccgtaagttttttatgattaaaaattagaatttttatagatttggatgcgaatttgtgtatcttcttcagattagattgttttagattgtgtatgcaaatttggatgtttttatgcatattcatcagtgatgtctgtttgttttaacaatgttatcgatgagatatcgataggttatcgatataatgtcgaccaaacttgaaagtagtttgaccattagaattaactgttttgttaatgtatatatcaacaggatgtcgtaggtgtgtcgataggatgtggacacaataattttagttgattaagattattattttaaagaatttagttgatttatcgataggatatcgtatgtgtattgataggatgtcgacacaataagcataaaaaattttcacctaaaatgtcgataatttgtcgacagtatatcaatatattgtcgacaatgtgatttaattactttgtgtgattgctaaggtgataatattgaccgaatatcgacatgatgtcgacattgtattaacaatgttgttttgctaaatagatgtgatcatatatttagaaaatctacagcatgtcgacaatgcaatgtaattgttcactgtaatttctgtttgataatttcgacagaatatcgacatgatgtcgacctttttgattttttcaacatttatatttctttgttatatattttttcagatggctcccagactcataattccagcatccgagcattttactggccgcgtgaagacagaagtgttggaaattatttt

SEQ ID NO: 249179 - DNA, 749 bp, Cannabis indica
agaaggacaggtcactatgtatgtgcattggttatcgagaattgaacaagttgacaataaagaacaaatatcttttgccaaggatagatgatttgtttgattagttacagggaaagaccatcttctccaagatttaccttcgatctagttatcaacagttgaggattcaaaaagagaatatttctaaatctactttcatactcgatatgggcactacaagtttctagcaatgtccttcggcttgactagtgcaccagaagcattcatggacttaatgaattgggtgtttaaggaatttcttaataactttgtcattgtgtttattattgacattcttgtttattttgaatcaaaagaagcacatgagcaacacctctgtatggtattacaacatctcagagaacacaacactttatgcaaagtttaagaagtgtgagttctaactgtcccaagcgagtttccttgggcacatggtaagtaagaatgggattctggtagatttgacaaagattgaagctgttcgggatcggtcaccacctaagacaataactgaagttagaagtttcttaggcttggctgggtactataggagatttatggaaggttttgccaagaatgctactcctttgatcgagctaacctgaaagaattgtaagtttgtgtaaactgataaatgtaaaaatagctttcacgaattaaagaaaagattgattaccgcaccagttctgagcctcccaatcagtgatgag

SEQ ID NO: 249180 - DNA, 2219 bp, Cannabis indica
attcggttcaccattctttgataagtagcaccagtattttttaatccgaagggtataaccaagtaacagtatacccccttgttggtcctgaagctagtacattcttgatctgcgacatgcatcttgatctggttgtatccagagtaggcgtccataaaggacaacaacttgaatcctgaggtggcgtccaccattttgtcaattcgaggtaaagggaagcaatcttttgggcaggccttgttgagatcagtgaagtctatacaaacacgccatgtcccattcggtttgggtaccaataccggattagccagccattccggatgaggccattggttaacagcttatctacctctttctctaaggcgtctgcttttaccggatcaagaggacgtcgcttttgctataccggaggcatgtctgggttaacatttaagacatgggtgatcacatgggggcttatgtcgatcatatcccccctagcactacgcaaaaacatctgtggctgcctttaatgttttgataatcttacttctttcatctggctctagattttttcctagacggatgaccttggtggaatcgaggtcgcacacatttacttcctcagtgtcctccataggttctacaactgtttcggatcccacgcggggatccaactcatcttgttctgtcaatcttggttcctcatccctgtgcaccaccagcaccgataagtgcattgcgtggttgtagcattgccttgtctctccttggtttcccctcaccgtccccactccggcttcccaagcagggaatttgaggcataagtgtcggatggaggtgattgctctgaaatcaaccaaggatggtgttgtacgctattgggcaatccactactacgaaggtgcagtatttgaaagtgctctgtggggtgtagggcagagggtgacaggaattcgcactttccccattgggataagtgttgtcctgttaaatcctgtgagctggagcctctgggtgatagatccctgtccgtgaggcctatggctgtgaagtcttctttgaacaataatttcacggagctcccattatctactaatattcttggcacaactttattggcgatgggagtctctatgaccagaggatcatggtgagggaaacgcaccagttttgcatcgtcttctatgaaggtaatgggttggtccatgagctggggcctttgtgctgggagttgagtgacttcccatacttcatcatgttttatggccccaacataacactttagctcgtttctggtggttcctccgatatgggacccaccggagatcatggccattctcccatttggtcttggtggcaatccaggtgcctgctgagggagtgctcctccggggggtacactgggcgcttgttctctgggcctaccccctggtgctccctgaggtaaagggcctcctactaaagttgggttaagatgggataatcgactcttgatccattcatacaaatgacctaatcagattaggttctcaattttgtcttttaggttcttacattcattggtactatggccaatgtcgttgtgatattcacaccttttgttgggatccctccaggaactatccctatacaggggaggaggtttctagtaatgtgtatttttcttggtggcaaagtatacacgctcctgcgtgtctgtaagctccgtgtattgagtgtactgaggggtgtatccccacgctgtcgtttttcctcagtctgggtgctgtcctttcaggacctcttgctctgagagctttgaggaggtccagtcaggctggtgacaggtgcggattgagacggggcttggacactcatccccgagggattgcccatgcgggtcccaaagtgtgataatgcgggagtcagggcgaggctttgattatatcctagggtagcggagaattgtatgccgctcatttgaggagtggccggaggcagggctcctgggagttgagctctgggtacacggtatcctccgtaagccactatttgggcttcttccaagttgatatacttttggacccttttctggaaatcttggagattagctgctccctcttgttgtagttcattccaaaaatgagtccccgtgcagatcccagcttggaggagggccatctgttgtccgtcgtccaccttcttggtccttgaagcctcttctttgaatctttttataaagttctttagagtttccg

SEQ ID NO: 249181 - DNA, 727 bp, Cannabis indica
tacattgtacagttttgaatactttttggaatcacaactagttttgtgaaccaattatacgaatctttatcttgtgctatgtagttttcactcacatattttttgaaaaaaataaataaaaattcaggagtcattgtaagatttttttaggtggttaattttggagttcttaaggtaatgaactaccaaaaaaatatatgcattttgttagtataagtagtacccgtcaattcaatatatatgctctcattaactaagtagtctcataactacataatattagaattatcatgcttgatattattcaaacgatgtgtgatttcataacttattagtcttttcctataggctagttatgatttttactcccgaactttgacgtgtactaaattatgcccctaaacttttaaggtcgttaaaaatactctctgaactattgagattgttagatttaaggagttttgtctaattttagtaaaaaaagtctatcactaaaatagtaaaattgaataaaattaaacaaaaatctttaaatctaacaacctcaatagtacagggaaaatttttaacgaattatttggtacatgttaaaatttaggggtaaaaatcctaattagtgtttcctatataaatcacgagactcttataagatgtgtaaatatatacattaataatgaattaatatagttgatttcgtttatttagggaaagattatggaattaatgg

SEQ ID NO: 249182 - DNA, 656 bp, Cannabis indica
gtaggcaatatattgtaaaacttggggaaaaaaataatatttttgtaagtttcccataggaatcaaacatagtaaatttgttgagtttgaggaccacactctaatctatctaaaattgttcctgctcaaagccaaacaacttgcactgggagatgacctgccgaagtgcaagagcctttgcaatttctgggtcgcaaaaattatactgcaaaaatacagtgtggtgcggtacggtttgcactatcatcattatcaaaaattatattaaaaaccaatctaataaaattttaacaataaaaaaaattttattaaaatcttaacatcataacatatatattaatcattaaattttatattggattgtctacctaatatatacatatataatatatatatatttgttattatatggaaagaaaagaaattatattaaaaaaattaataattttgtaaaatatagtgcgatgcgatttaaataattattaaatttaaaactacaaatagtactgtgcgatttgacaaaaatacaaactaaaattatattatttcaaactatattttttttatgcagtgtagtgcggtactaaacgtgtgtgtgtgatgtggaaggtttgataaacacgagcatatatcatattccatatggatgtgtaaaa

SEQ ID NO: 249183 - DNA, 810 bp, Cannabis indica
aaattcaaaagaagaaaaaaaatgtatgtacaaaaaaaatagaatatacatttgatttattgagttttgaaatataattgtattatatgcattagacttttaaattattattttctttacattaaagtactatttatatatacataattttttttttaataaaaatttgtggattggattggatcgtttactaaaatttattttagatgatatggtcttagtaaatgatattgactttaaaaaggttatgaagtagagtgctacaattaagttactactagccaaagggagtccagttctagtaatttttagtggggttttggttgcttagttcttgttatttggtagattttgatcaatttgataattttctaataaaagttttattctagttttctactatttttcaggtgtatttcaatgagctaggagcgctgtttgaagatgttatagctttattgtctaaattttcggggatagttttatcccatgtggctcgctctgagaatttagcgacccatgagctatcctagttcaaggaggttccagcgccagtggcgaacgtttgcgtcgtaaattcatgagtgattataatcactttgtcaaaaaaaaaagtatatatgagaccatacaggtttttgcaccatttttttttatggttttgatgcatttttcggtttatgtgccttttatgacttttatgctatttattatggtttgtccctatttatttaaggtagttttttattatggtcaatgagcatgagaagtgatccatttatgctcatgatttctacttcaatgactttt

SEQ ID NO: 249184 - DNA, 726 bp, Cannabis indica
attaatagtgtatgaaatttcaggtacgtttagtagcgcatataaggatcatattgtattaaataacaagaaacactaaatttagataaaaatttgtattatactaatatcaccaccatacgaatatgaatcatagtttttttttactttgaggagggggattcaaacttgagattttctttttgtgaggagaagtgtagaaccattagactatgtctatgaccactgaatcatattgtttaattcataagaaatgatacatattaattagctagtattataatacttagaaatagtttggggtagaactcagacctatagaaccgcatcccaacctgagcccagattccaaactcaaaccttagtcccaaacacggacacgaccccaaacgcgatcctagtgccggccacgacctagacccgaatccaaactaaacgcggcctcgaaccgaacatggacttgatcctgacccgagactcgaacctagtgtcaaacaccagccctagacccagtccaagttctgaactcagaccctagtcctggacctggacccaaacacagactcaatcctaccgcagacccaaacccgaacctgtgacagtcaatagtcccgtgatccgtaaggggaaataccgggtaagctgtacaatctcacaccgcctggggaaggtcaagcgggatgattctgagactgtgtaggtatgggactacacagttgaagagag

SEQ ID NO: 249185 - DNA, 558 bp, Cannabis indica
acataattattaatatttataacacttttctaattttgtaagccaaaaatagcttattttaaaattttccaaacggagccaatgtaatgtagtaaaacaagaataaaatgtcttgttgatttattgttatcaaaatccgaaagaagtgtattgttttgctgtttcttttctttgttgaaaaagattggcatcattaaatcctcgcgagtaaaccactatagaaatcggagagagtaacatgacaatatcattaatcaataaaaattaatttaccaaaaagtactaatacaattggaatagctagactactaaacaaaatgaatctaaagtaagagctagttttgtcaatgaatgagcaacactacagcaattctagaaaaataagaaaaagaaaaatcactaaaacaagtacaataagccaaagcatatacaagtgaccgactatttaggtgtgcaatcagtgctaatgcatagggtccaaaatttaaaaaggcccaatataatttttctgatttttttttttaacccaaccttctatcaatgtgtcatgccaaataa

SEQ ID NO: 249186 - DNA, 1596 bp, Cannabis indica
taaaataatttccaacagtcttgcaatttgttatctatgtatattatacgctaagtgttctaatagccaattcgtcttgtcaacacctctttacatattgcgaggtagatgcctcgctatgtattatcgatgtcatccttgcgattatgcctctgacgtgaaattgtttctcgttaatacgtgaatcaatagttcgtacattcttgtctcgctaaagattgtgcggtttgcgagttataaatataccctattgactctgtattttatgagttattccatttaatataattgccattatatttgttggttcatattctctgagattcacacatgtaaccttctgaagtaccaaccgaatttttggtataagagaagcaacagtgggcggttaaagaagaggtaaagaagaatgcagagacaactaatcatgattatttgaagatagataatgaggggttttattaggttagtaaggggaaaacaacaatagggaagcaacatatagttgagagtcacccagctaatgcttttcaagtgttgtctgaaccttccatggcaccaggtgaaggaaatataacaacacctatggatgatgatactgtaacaacaaattgctctgatgtggtgaaaggggataggaattttaattctgagcatgccccaatagaggatattgcaaggctacaaaggagacagagcagaggaggagggtagtacttcctcttcgaaatggatagaatcctaagttggaatgtctgagggatcaatgatcaacaaaagcagaattaagtcaagcaattgtttaattctcaacaaattggtcctatttgttttctggagacaagagccaaggcccagaaacttgggaatttgaatgtaaacgatcaaaggttggtattttctgtctaacatagcttggaatgcaagagggcggataataatagcttagaatccatgtagcttcactataaatattttaaagtgtactagtcagcttgtgcacatggctgtattgaccttggatggcaaaagtaatttttggtcacctttgtttacaggttcaatgacatggatagaagaaaggaactttggaattacacttaaggcattagaaccattgatctctaaatagtattgggagactttaatgacattttgtcgaaagaagagcgagttggcaagagaaatggctacaagtgtgctggccgacctgaacgaaagtctcgcgctagatggatgacctaatcacataattaaacaaggtaaagcacatggtcaaaaccctaatccgggaaacccgaagccacaaccctaggttatgttatactctcttcccaactacgtcactgaaatggacgagaattgagaaaagtggtttttttggagaacgttgccaaaaccagtttaccggtttgacaggtactggtaaaactggtaaatcagtttttataccagtctccccaaaaactcaccaatttgctcaaaaattgtcgaattgccaccaaactttccagagtacctaaataatgtatacacaacatattccaaccagaaaatcacataataacccaatgaaactcaacttaccattaaaca

SEQ ID NO: 249187 - DNA, 544 bp, Cannabis indica
ctaactcagctcaatataaatagtccctctcatgtaattgtagatatactgtttggaagataataaaaggttcacacagagcaatttactctgttttctttttcttcttttctctgtatttctctcataaatatgactgagtttgttgtgttgtgactgtaatctttaacaaaaaatattatgtcttgcaaaaagtcacttgctagttcaatcttaagattttatattgcttctgaaagtaacccgatacattacttttgaatatggttgagtggtgcaatttttaataataataataaaaaaaaccatgtcttgaaaaaaatcacctactagtacaattttatagttttctattgcttgtgggagtaacctagtatagttttctattgcttgtgggagtaacctagtaccttattggcagcttacttttgaatatggctgagtttgttgtttctatagttttctccttaacaataagatataatcccaatatatataaatcaaaattagctttatacaaaattatgcatgtgtatgtgtggta

SEQ ID NO: 249188 - DNA, 2620 bp, Cannabis indica
agttgtacactttattaggtagtagaaagattcaacatgcttaatatatttataatgaaagaatggccttatttgaagatcagcatttcatattcattggatacatgccaattttgcataccaatactaaaaaaaaaacaattagacaaagataaaactattcaacaacttctctttaagcagctgattctataagatattattccaacagctagtctgaaaaaataaattctgaataaatcatttgttgaaatgaaattgtatgtaatgaataaatttggtgttgcttagtctgaactaacaatcttccaagtgtaccaaaacacgatacaaagactaatccatgtcatgatgatcttcatatctgcttcaaatcaaaaatagcaaggtggaaattccagagggctccaaagaagttcgccactttctggactcaccgacgacgacgacgaagaagaagaagatgggtaagaaaaagaaagtgatcctacttctgttggtgattgaagattcatcccagcctcctcttgcaccctctccataatagtttcttccttgaaacattggctgttcttatccttttcaacctttagctcattttttagtttgaataattctccctgcattaattctcctactctttcagtgcttgaatcaagtttcagcctcaaacattctgatactccattgaaggcgtaaagagaagctgagaattttctttcatacttcattctcttcatggcctctccaataatagtttcttcatcctcatacttttctgtctccattggcttaaccatctcttccgcaatctcgaaaggatcacagtagtagccaggaaatgaatgcaatgagtctacaaacctgagatccacaccccctatctgatcaaactcttctttattctcttctttacattgatttaccccatcaaatctagaaccatgattcttagtactactctcattagtcccaacaagactccattcaaaactctcatccatgtaatcagctgtagttatatcactaatgttgttactcgaaacatcattatgttccttcatcctacaatattcttgctcattgaacaaattatcaaacagggtatcttccctatgatcttcctctgcatgctgatcttgttggatacagggaaaattgaaagccattgaaccacgaacattgttattgttattactcaagttatgattattactgatatttctagctttgagcctaagaaggagaagattgactattcttgagggaagtgctggctttgcatgaggaggagtgcaaggccagaagttggttcgagtattagctcctcggagcaaacaagctgcttcatcataagctcttgcagcctcctcagctgtgtcataagtccccagccacactcttatcttctgtatggtgtctttgatctcagccacccatctcccggatggccgctgccttacaccgacatatctctttcgtgtcctaccaactccattcaaagcaacagctgctgctgctgctgctgttgctgaagttgtctcattgttccaacccttgtttccaactgacatttcattactgctttctctctcttcttcctcttgatcacttccttttctctttctaaccatttttttcttacttaatgaagtatatctattatttattacactctcatgcattgactttaagtttctctactggctataagcctgtatgtgctgagagctgttagttaaatctgttacttgctttgccaagtatttataagaatgagtaaaatagacattaatgataaattatcttgaatgtaagagaagatttgataagggtttaaatggcttgtaactacatctttgtactattgttttttaagttcggcaatgtcatgatactaaatctgatatcatgacatttctcactcaaattctcactttccaggaaggtgaagttgtctgaccaagtcagtcttttaattcttctcaaatcagttactacacttcttttagctatgaccaattagaggacaccatgtggatatgccatattgttctaaactttaaaatgtcacttaaaagaaaatggtaacagtggaaatatacaagaagaacacttggacattgtagaaatcaaatatgtaaaaatgacatattgtcctattagcttattttcacctttgattattaagttcgttaataccaaaacaaaaagcaagatttgcgattgtgactcactaatgagtccgcaggccccaagcaacaaacactataatttgtttgtttattatttcattgaacttatcaaatggctgctaattaactatgatccactcatatgaaagtaataaataaatataatcttggcttacaaaaatctgagaaagagacgaaacaaccgaaatgtacgtttttactgtcgtcttttcaagcattgaaaccaccactttcaatattatgtactgctagcttaaaaaatataattaatatgcttacattatccaaaaaaaaatttcccctaaatgcaaagttattaaaattggtaatatataaccattttaccaattttcctaaactacccctctcatttggaatcaacctctctcatcctctctcttcgt

SEQ ID NO: 249189 - DNA, 1453 bp, Cannabis indica
tagggtgttacagagcgatacagttcggtgcagaacgtatcgtacttatacagaggctgttttatcctggggacgccgtggttgctagactgccgtgcacacttcgggcagagccgcgaaacgtcttaaagagagcgacattgtccgcgactcagccatattattctatcggtaattcgttccaatttcactgtatttaatttcggtataacaatatcaccagcaagcttttctgtgtatattagggttatttgctcaagaaataatataatcattcgaatctttatattgtgtttgttagaatattttatatggacttacatagtgttgttcatagagtgtcaatattaatatatgtggataactatatgcatggtataatgtcgattatgcaattaggaccataatgggatggtcagttttattatctccatttgaggcacatggaagcacccaaatgactataaattggcccattaaattatagtccaccaccactagcattttaaacccaaaaactatgtccactctacccctagggtaaattagtatacatatatatatatgtgtgtgtgtgattttagtggaagaggaatatatatatgggtgatatggttaaaagttttacaaggggatgctttccataagctctcttaatgcttagaagatgttgtggtgaatcaaggagactcacaattaaagaatgcacaatattaaggtatgtttattattattcaatgccctaaataaaatgattgatcttggatgtttatgagtattaattgtgtttattattattgataatagtatactcattgtgtagtaattttaacaattggtatcagagcttgggcatttgattttagggcttattatttaaaaaaaaaaagaaaattatatatatatatggattattcgtagagaaaatttgattagaagatgattactgagttaatccatattttaaaccatttttcccgtttccgttttttgttgaaaatgctgagaacccaagcttttttaaaaaagtttgttaatggccgaatatgggtatgtgatttgcgggtttagagtgtttttcgggtgaaatgagtttgggaaaaagagagaatatgaaaaatggtgaatttcccctcaaacggcgtcgaaaacggagcaccgcaggtggtgtttccagtcggtcggaaaaccgggttcgctgtcggatcgcacgacccggatttgacccgcatgcccagctgaagttcagggatgacatcaaaacgacgtgtcgttttttgggctctccttcagacaaacgacgtgtcgtttcatgttaagggatgtgctgcacttccagcgaacgacatgtcgtttttacaaaacgacatgtcgtacggacagaccagatttttcaaaaaaaaaaaaacacacacacacaatttgcgtagcgcgtggagggttcttttggacc

SEQ ID NO: 249190 - DNA, 704 bp, Cannabis indica
ggtccagattaaaaagttgttgcgtttatttgtttgtaatatatagatatagattgtgcacttacctttaatcataagaacaacattaaagctaggccattgttggtggtattattattgcagtcttgcaactttaattatgttttggtccataatatagctaaattaatggtctttatattctaatgcttatgatgatattagtttgttttctatcccttaggaggttcttaatgataacactgagtagactaaatttttgttggtttatagcatgacaatattgattttaaatatatttgctgtatattattttgtgtaacgctctgatgttttggtgcgctatagtgattttccaaataacaaattaccttgctaatcaaggatttttttttttaaaatcgtgtcaaatcaaaacttcaataaaattaataaactttatgaacatacaaatgtatatatattatataatcgggatcccgtgctaaaacttctataaacattttgaaaatatttttacaaacttgtcgcatagcgactacaaaatatatcccaagaagtcccaatgccgaacactccagattgctttgtcttgacatgtacaatcattaccagagctcagaactcatgttcagcttctgcctttcctttacctacacagaaagtagaatctgtgagccaatagactcaataaaaaaagcata

SEQ ID NO: 249191 - DNA, 1476 bp, Cannabis indica
catagaaattcaaatttcccaagcaatatttgagaatggataaaggtgtatttatataattagcatcacatttgtgtggtgtggttattagaaatcgagttgttaagtataattaagatagttcgccctttctcaaatgccctttctcaaattactctctcgcactcgttttttatttgttatagttaactaactacggaaacaaattatggaagctattcagttaaaagtgcctaccgtgcgttgcaagtgcttaacgggagatggaattcacaagataattctggtttttggaaaaagttttggtatttaaaactttctccaaaagttatgaattttctttggagggccctctctaattgccttcccactcttgtttcacttcaaatcaagcaagttaatgtgactagtatttgtcttctttgcagtggtgatgtcgagactacttttcatcttatggttacttgtccttttactatggcttgtttggaaagggggttgggttttactgtcatgattggagatgctgaatttggttactggtttgagagcttctgcaatgctcacccatgagatggtattgagaaactgtctatgatcttatggggtgtttggggagctagaaatgacttgctttggaacaaaaagcttgcttctgttgaaagagtagtatctgctgcagttacgtaccttgaactttggaaaattgctcagttgaaaaatggagatgcttcgacatctactagccatgcctcggctggttctgagctctggagtaaaccatctttgggtaagttgaaggttaattgcgatgcagctatttttttcaagagaaagaagtcatggtttggggtggattgctcgtgactcggctggtgtgcttcttactgctgctgccgagaagaggattggtgatgttgaccctgtggtggctgaagcaatgttaatgaatgaagctttaagttggcttaagcaaacttggagagatggtggttcgtttgaaggatggattcctgctggagtctgtttggagactgattgtctagtgttggtgaatgctattaataataataggcaaattctttctcctcttggtttaattgtttcagattgtattagtcttatacggtctctttcgatgtttgatatttcagtttagtttgttaaacggtctgggaaccaagcggctaattggttagctcgttcatctggttcatgtcctgaccgtctttcctgtagggggtctgtccctatgggcttggaagctattttattagatctttgtttcaaaaaaaaaagtagtaataaaaattattcctttctaattcattatctccaattaaataccacctaaatttaagatcctaccaccgaaagagaaaaaaaatagtatagtaatttagtaggcaatgaaaaaaaagtaaaaactttatatgatatacaaaatgaagtgcaaattgtttcaaatatagtata

SEQ ID NO: 249192 - DNA, 652 bp, Cannabis indica
atttctctgttgcaaaaatccccttgaattataaaaattgctccaaaattcccttgcagttgcattatgcttatttctttcaacaatatgttgatatatcactaacatgatgttattttagcccaatttaagagtctagacaaaaaataaatgcataaatagcattctaatgatgaattatgagaatatgtatatacattctttgagcttctatgtttaatgtcaataaactgaatattaagtattttaaagtttttaaataagctcttgtacataagcatattgttttaaaaaatgaccagaaaggtaactggaggggaatacttgaaactggtatagtttggagagaatttaagggtcatagtagttcaggagtaaaattcttatttattctatttatttgtctttggagtagaaggtaatctgttgatataaattttaccatgcttctgttttatttattaattaatttaaaatgtttttgatacacggccacagtacaaaatcaggcttgttaatccatttgcattgctcacaatactgaaatatggatgtttgtgggtatatttccatctttctttacaaatcatctatatgagtttttgagaatgcctaaagtataaactgtgttgatttattattacaaaataac

SEQ ID NO: 249193 - DNA, 1194 bp, Cannabis indica
gtgagtagatctaagatcgtggtaaaataatatccaacaggaaataacttatcgaaatccgaacacccattctatgttcccaataaactccatgggacctcaactttcactgaagatgtgcgacaagctcgactccctaagggattcaggttatctgaatcgttgaaatacaaaggtacacctaatcccatagattatttagataaatttaatataattatggaagtagaccaggtaccacaactagaaaagtgtcgcatccttgtagtaaccctagaggataacgctcacgattggttcagccaactgcccgaagcatccatatcaacttgggagaccttcgtagatctattcttgatgcactttcaagccatgatgacgtacaaactgccttaaacaactctggctaacattaaataggaaattggtgagtctttacaagattattttaagcgctttaacgtagagataaagttgagaaggcccccgaatctttgttggtatgtatgttgattacaggggtcttgctaagaactgagttttggaaagagttacaagctcgaagaccagagtcattggtggaattctttgcaatggctgagccacacaagagaattgaaaactctttggttgagctagagagggggaaggagaagcgcaagtcacctgtaccactaccgtgctctcaaagccctaaaggaaagaattctagaggttgaagtccaagaagacgcaacccgcagaggcaacaaagtctgaagcttgctaagtccccttccgagatggaaacgtctccaaagagaaagggaggcccacgttttgtcaattacactaaactagtagttcttcgcaatcacatttatgcaatcgaagagtaaaatggagtgttcagaatacctccaccaattagaggaaaccatgataagagagatccaaaaaagttctacaagtatcataaggatatcggccataccactctggagtgctggttcgtgcaggacgagatcgaagaactaattagacaaggaaaatttagcaagtacaagaacaacggagaaaatcatccccaagcggatgagaatgagaatacaaataatgcgagtggttcacgaactcctcgcaatatcttaaccattattagaggaccacatgttggtggagattctaagaaatcgcaagagccaaggaggcaag

SEQ ID NO: 249194 - DNA, 720 bp, Cannabis indica
attctgttttccccaacataaaccgccaaatgccctcttggaacatcttttgaacttgaaaaaggtctctgaattaggtgcttagcatgaactatgcttggaaatctgaatcccatcttatgtgtatatatacacactttgaagaccccacttgatgtgatgggatatatgtagatggggtttattgaaaggaatagtcctttacaaatcacatgctattgcctttcctactcatcaatgcttattatgttttatgttcacatagttgtgtggtcaaaagccttcatagttgccatcctaataattgcaatttgcagcctttatcttccttcaatttcaggctagtcatcatgttatttgtaggatcagataatgaaatcacattactaattgttgcagttttgatatgaaaatgtgtgtccttgtggatatgggacatgcctaacacatctaatggcaattttcataatctcatgagttggttggtggggctgggaaagaaaagtaagaaaattgcagaggaacacaataccatcataccatgtgattccacaagaactatatgcctctcactagacctacatagcatgcaatccatatagtctgtcctacatatcctaatcctatcaagggtttaataaatacacacacaagagtcaagactgggatcaaaataccatctcaagttctcaaattttttcaaatattaaatatatctct

SEQ ID NO: 249195 - DNA, 565 bp, Cannabis indica
aaaaaatagagatgtataaacagggaaaagtgaaagtattcagaccaaaaaaagttgatttcttaaaaacatttacattcaaactgttcgtcaaaaatatacaaatgacagaaaacttaccatatggaggagctgagtctccaaggtcatgccaggacattattttcgtcttcttctccggcgatgttcaccggaatcggtccacgaagcaggtgttacttcggttcggttcaaagtctagattttatgcaaaaaaaaaatggggaaaatataggaggagacctttcgtttcttacaggattgaacaatttattattttatttttagaatttatgttttatttattcagtttaatatattttagattttgttttaattcctatttatttatttttatttaaaaaaaaaggcctattaatctggccttacacgtgttaagcataatagactaacagaggaaactcaaacggaggtggacagaataacacttttagaaactttgggtactttacccgctaaaaacaaacattgggtttatgccggttacaaatctaaaacattgggt

SEQ ID NO: 249196 - DNA, 622 bp, Cannabis indica
agaatttgatatctaccaaatcatatccctcaaacttcgacatgtactaaagcatgtcccctgaacttttaaaactgttaaattcaaagataatttggtatatgtcaaaattcaagagaaaaaaaatcctcattaacctattattaatgcataaattaataacaaaattaaaataggacttaacattttaacactctctctaataattatatttctatctaaactctaaaataccccatcataatcctactctctcttcttggtccttttttccaaatcttactaatctctcttcacaatacccaaaaactttgccatttgaacaatttttggaaccactcttagtgaaagatgaacaaatttctatgaaataaagctttaccacaagtttgttgtagagagaggaggcaaatatcaaaatttttaaagttttagaataggtatgtgattttttattaaatttgttcttcatgttaattgtattcaagtataatagattatattagaaattttgaaactataaattataaaataaattgagattcatagtttgaactaggaaaattaatgctctaagtctttatttttttaattaaaaccattgtttgtctgtttacttttc

SEQ ID NO: 249197 - DNA, 433 bp, Cannabis indica
gtagttgaatgtcagatccaacatatcatcaaaaccgcaaagcattaacaacaccatatttaaaatattagttagaatttcagaaaaattttcttattacgttgactagcaccattagctacatgaggagcgaaatctgaatcatcatcgtcaattactaggcattttcatttagccttgctagcaactgatttatgacccaattttgaagttttttatttttacaatggagatgaaaaagtagaactacaggtaatagccattatatatatacgaaatgaaagatatataaaaaattaaaaaataagacaattggaagaagaagatggcgaaagttatggctgggaggtagttttctttggttttgaacgtgactttcgaagggtaatggctggaaggcagttttgaattaaaaaaaaaaactaagagaaag

SEQ ID NO: 249198 - DNA, 409 bp, Cannabis indica
ctgcatcgtcttttttgcttcaaagatacgtggtgcatttttctcattgaaccgttcatgtaactttgtccagatttcagcagcattgtcgtgatacattatgctatcgacaatctcatcaaaaatagcatgtagatccaagaagtgttattgcatctacaccagttgtcatagtcttcgtgatcataggttgaggaagacttccattaacaaatttcactttgtttctagcaagcaaagtaatcaacatcgatcttctctagatgttgtaattctcactacctttgagaatttttggaataagaacagcacctgagttatcaccattcgacagaaaataaggattcgagaggtcattggcattagtcgatcgtgaattctcaccaagaacagagtacatgttcaaatc

SEQ ID NO: 249199 - DNA, 816 bp, Cannabis indica
taattaaaaaaataagaataaatcacacaatatagggaagacaaactaataatcacattacctgaattaaagaaacatcatctaacattcttcatatccctaaattgggaatttagttcaaaaagctcatgttcacatccataaaaattgaaacagaagttaacataaagacataaaaaggagaagaaagaactagttggtgatcttcctccgggtcgccacaattgcttcctttgcctcctccttcatctctagggtttaatttttgcctccctttacctctaaaacacgcaacccttatatagacattagggttgctatctttgaatggtgaaagtcaaaaactgccaaaaattctcgtgtttcgcccatagtcgcgactacaaagcctagtcgcaaccataggctaatttcgaaaaacaagctctctgcctgctccatagtcgcgaccatgaaaaagggtcgtgaccatgaaaaatggtggtcgcgactactaaagcaaatttgacagcttcagcatctttcagtaaaatatgcataactttcacatttgattcaagattggttggaaagaagaaaaagaaatctaaagcttctatgttttgacttttttccaaaatttgatcagaacatagtcaaatttaggcttgaagtttcagctttattttcttacaaaattttctctattctatagattattgttttctaaaatttgatcgattgatgtattccaagtgtaaaatctgaaacaaaaaaaaaataataataataataataagcgtaattctatttaaaaaaaaataacaaagaagaaaa

SEQ ID NO: 249200 - DNA, 1274 bp, Cannabis indica
ctaagcatttggcgcagtaggagttgttggaataatggattcatctgcgactttgctagcagcctcgtcagtgacttcttcagcattcgcaacttcaacgtcctcagggaaaatatttcccccacctccttgggtctgcgtaggcgacatagctcgaaaagcctcagccatttcagctgcctctgctccaaggatcgcgaagtcaaagtctggaattttggaaagagtcgtgtatatgtagtcagaaacctcttggtcatactgcttctttccattctccttctcggcctccaaatctggagacatctcctcaatctttgcctgagagtttttggcttcaagttcgacttgctccttagacttatagagttcctcgagctctttgtccttggtagtcgcatcttgcttcagtttcttgacattcccctgaagctggacgttctgcttcttcaaaaactcgacttccttggaaccagcaacgaacgccctgaaaacatagtgatgaactacgaagccaattctgcagagcgaggcataagttcctcagtaggagtcctgcgacctttgatatgaactcatcgcccacgaacttctcttgaagagttaggatgtcgcgagctcgaacggccgggtcaatcacaactctcttccctttgtcttgcgaaggcttagctagcttcttggatgaatccccggcagggataaccacgacgtcgctcttcctcttctggggaacgacgggagaggttttcgctgttccaatcttccacttgcggttgagcaccggagcttgcttcaggaaagtgatttttgcgaggacaagaaaagataagttaaaatacaaacaataactcatagatataccgcatgtacgcgatgtgttacccgatgttggtcgagaggtctgtttagaaagacgcttgtctatcttctctttctgtttctcatatggctccttgtatattggctcccgatgaaggctggcattcttcagaattagcttgtgttcccgcaacttcaaggtcgtgcacaataatcgccagtagcgatcttgaatagggaggcaaccgagaacttcagcgacttctctactaaccgagtccagaacaggtcgagccggtctatctgcgatcaagtaaaaagtatatgataatcgatatcataaggtaacattgatattaactaagtattgagaaatgcgacgtactaggtcgacgattaaagtcagtcctaatgcctggtacttcaaatacgtaaaaccatttagatttcca

SEQ ID NO: 249201 - DNA, 2245 bp, Cannabis indica
caatattgagtaagttatggctactttattgaaggttgttctgtgcccatcgcccacattgacatccagcgcccacgttgacatatgacgtcaatctggatgctggatgagtagaaaaatgtcatggggatgtactttttgatgcctaagtgatattttgacatcacttaatctgtttctgtgttttggtgaggttggtcaccagttcttggagatgttatttttctatataaatgagagactcgaaactcttcatttctaagtgttcttaaccatgttggttatgagaaatgcaaaatagtgaatttgacttttctggcttcatggatcttggttattgtggaaaacagacggatggttgaaatagaatcaaaatcggataagcaaaacccagtgcactaggtcatttgtcaacctaggcgccgggtgcttatttcggagcttccaagatgtcattttgaaacttccaaggttctagaacttgaggacgatgtctcctaccctatttttaaccattatatattgaatgttcagattttatttggcatttgaatgatcgaaaaaatcgcaccaggttgattgtcaacttggacgttgggcccagcataaggtcaacctaggcgttgggctctacttccagggcctcaggtttttagttttctctctgattttgctcattattttttatgacgaaaaaaatgctcggaacactttttttgaaaacttgattggaaacaacccaggtcaacaatatgtcaacttgggtgctaggcccagtgtcaggtgtcaacctgggggctgggtcccctttatggcccttcaaaagtttcgtttggtccccaaaaatagttgaatcttactctttattgaaaacagagaagattctcacaaaagttctcagaaaacatcattgaaattggcccaaattgacaaaatatcaacctgggcgctgggccagcccttggtgtcaacctgggtgctgggccttgcttctgacacccaggaagtgttatttcttccccaagagaacatattttcttgtttttgatgaagacaaagaagatgcaaaagtcggatcatcgatctgatactcggaaggtgcccaaattgacaaattatcagcctaggcgttgggtacctggaaggggtgtacgctggtgggtttggttggtttatgctatattttattcaacccaatgtaaagatcgggttacaaaaatctaagtgcaacccgcccaattaagaaaaaagaaaatagtaatctgcctaataaaattggtcagtttagtcgggttaacccgtccaaaccgaccactaatatttattttttaatttatttttttattttaacattcaattgttatgttttagtaaaatataataatgagacaaatatatatagattgaatttaaagttaaaatcaactaccataaaaaaaaacatattagtttcaactttatattttttaaatagttatctaaattatatgatatataaatatatataataaaaatatataaatatattaaaaaaaaatctcttaatcggattggtcaggttaattcgggttgattggacgggttatatttttgttgagttttttggtttgcattttttgttgggttatctcagtttggtttggacgattattcgggttggacactttataaaagtttatgtatagccctagttcctgggtaccgggtgctcaaaaatgaacttactctgaatctaattatgatacctcaaatatgttcgtggtatgtctagtttgacccatgtgcactaatacggtctcggaaactgaaatcctagttgaagatgtcaacttaagcacaagatgaaaccctaggtgtctaggttgacttccggggtgcatgttcatgtaatttcagctcttggggcctagatttggttactccacatcttcatggtatagaatactaaaagatagtgagttggaaacaagttatcaaagttcaaacttccattccaaagttcccaaagtcaaccttggtgtaaggctagggacccctcccaagtcgacttgctatgactcaggactactcaactccgagatgtcatctttcttaccacgtgtcaaacatggatgtccacatcatcagggctacttttggtgtaagcaatatccttttgagtgattagctcgagattaatgaagatgaatttcattcaaaaaaagctttaaaaaaacttttatgaaaattttattttaaaaaaagc

SEQ ID NO: 249202 - DNA, 399 bp, Cannabis indica
taaaataaataccaaataatattatttattctgatttacttttataaccaaatttggtgaaaatattaaaagttctattccattccatacaataataaacatagtaattcttattccatggtctttatcaatcaaaagaataaaaatttatttatactcttcctattaccattcccactctatttttattttatcaccaaacgccacctaaatttgcaacattagaatagtaatatatttgagaatcttagctcccatttgttgtaatatttttcttcattcatatgttccatgacatattactttgctataacaaatcgtatttattttaaatgtggtcaacttttgtaaaaaaatagtaaagtaccacattctttgagttaagattttggtgtataa

SEQ ID NO: 249203 - DNA, 590 bp, Cannabis indica
ctcataaatcgaggtagtatgaagttgtcgctcttatccagttcatcagcaaagaccacgcctccagagtcaagcatttggctatccgacatgttgctcatcagaaagatagaagatcttttcagtgtagtgaaagtgcaagaataacaccagtgacctcacccgcataaaagaaatttagaaaatatgaaggattaacaaaacatctcaagaaatggctgggtgtatctcaatagcttaattatcatgtcgctacatgagtattaaggtattcagacacaccaaccatttcgagaatttagttaatcctgtaaggtgtaagtcgcacatgtgaaactaaccatgtgtctcaaaaaatggttgggagtttcccagtgacccaaggggcttgcgtttttagcatgaccatagagttactgggacacccaccattttaagaaatctggtcaactccaacatgcgactaaaaaagcaagaaaaatgaaaaactagctgcatgtcatgaatggttgggtgtgtcgtagtgacccaaggaacatgcatacacttgcgtgaacattaagttacagtgacgcacccaccattcaaaa

SEQ ID NO: 249204 - DNA, 737 bp, Cannabis indica
ttttaattttaaaatttgggccctaataaaaaataaaggggtaagtttaaaatttttaattgataaatattctcttttataatcaaagtatcaaatataaactcataacttatcaaaattagagttcttaatgcacataataaggatatgacctataaaattggatataaattaaagagtaataaaataaagataaaaataaaaataagaaataaaaagtaagtataaagtgtaatttcctcaaaaataaaagtacaattaaaaacttataatactcaaaaatattattgtgtcacgatcaaatattttatttttgtaaaaataaaatttataaaaaaatatattagtaaactaattttacaaaaaaatttattagtaaaataattttttatggtcgcagaaaagaccatgaattacactatgcgaccataaatgatcatagatttacactgtgcgaccacagtataaaataagtgaggttattttacaaattttaatatttaaaataattagtttggtaaattcttcaaaattaaacacttaaaaattcaaattattttattaaaattatttatttcaacataactttaagctaacatcatccattctacttaaaaggaatcatcattcaacactttaaaacaaatttatttaccagctctttatattttatagtctccaaaacaatcccaatcaatatgctattttttctgtaaaaaatttaactattttttata

SEQ ID NO: 249205 - DNA, 613 bp, Cannabis indica
tcaatatataataaaaaaaaaaaatcggttatacttataaaaaaaaaataatctgtaaagcaagcaaaatacaaagagatctttgacaaccatcttgctcccttctaccgaattgaacaggtttatatttcttaaatgctaagtgcatatttacttttatgaacatttattatgtattctatccattatataaaaaaatatttattatattataatataaatggaggataaaaaaaaatgggtcttttaatatagggagccttgtacaatgacccaaactcccatatactttggccggcccaaatttgagtatcaactgttttttattatctaaatttcgctaagaaaattcgaccactgttaaatgtgtagcatggtgttattgtatgctaccatcttaaacattagagataatatgttacatctattttttagtatcaaatttactcctcaaataataaaactaatgttgaaaattattttaccaggatcttaggtctactcacaagtatgttgattaacatcctaaatatgaacttctaaaatgattataaaataaacacatataaagtatgggaaaccttacattgagtgcagcggaataaaatgtctc

SEQ ID NO: 249206 - DNA, 768 bp, Cannabis indica
ataaaagtaacctgaccaaaaccaacctgagtctcttcccttattacaagaatttaatattgtgacgtacacatttatattgttacacataaatggtcgtactggtggtcgtcctttacccatttcccaccagctacaatacaggtcgtaaaattaattgaaaattttccaatagaaacacggaacaccataggcacaagaatcagtattaaattctaatgtgaccgaatttgtatgtatatatatatgtatacatagggaatgcgaatgtgcggtcgagcccatcacactacggatacagaacagaatcagacggtgatggaatctccatatttggggcaaaggacatatggatcgaccactgctcactctcacactgtaaggatgggttaatagacgcagtgatgggttcaacaggaatcaccatttcaaacaacctcttctcccaccacaacgaggtcatgctgctcggccacagcgatgattacactcccgactcaggcatgcaagtcaccattgccttcaaccacttcggcgagaacctcgttcagcgcatgcctcgctgtcgacgtggctacatccacgtcgttaataatgatttcactcgttgggagatgtacgccatcggcggtagcggaaaccccaccattaatagccagggcaaccgctacactgcgcctattgaccgcaatgccaaggaggttttttaatttcacccctttaccttaatatttatatatatctacctttcttttttttttctttttt

SEQ ID NO: 249207 - DNA, 1455 bp, Cannabis indica
gcgatcaatgattagtctaggaatttagaacagttcccttggatatcagtggttagtggtcttctagatgtgtttccggaggatttaccaggattaccacctgatagggagattgagttttgcattgatttgattcctggagctcaaccagtttctattgcgccttatcgcatggcacctgcagagttggttgaattgaaaaaacaattaggggagttaatggataagggttacatcagatatagtacttatccatggggagctccagtcttgttttccaagaaagctgatgggactttgcgactttgtgtctactatagaaagctaaatcaggtgacaattaaaaaaaaatcctctatcgaggattgatgaattatttgatcaacttggtggttcaaagttcttttcaaagattgatttgaggtcaggctaccatcaattgaggattagggaagaagatatccctaagactgctttcaggacacgttatggacactttgagtttttggtaatgccatttgggttaacgaatgcacctgctgcatttatcgatcttatgaatagagtctttagacctttcttggataagtttatggtggtattcattgatgatatcttggtgtattctaagacacgtgaggatcatgctgaacacttgacaatagtattatagacattgagagatcatcaattgtactctaagaaagagaagtgtgaattttggatgactgaagtcaagttcttgggccgtgtaatttctcaagatggtatcacagttgatcctgcaaagatagactctattctacagtgggaaagaccaaagaatgtcactgaagttcgaagttttcttaggttggcaggctactaccgtcgctttgtagagaatttctctcgaattgctatgcctttgacaaagttgacaagaaaagaagtaaagtttatgtgggatgatagttgtgaagaagcttttagagaattgaaggaaagattaacttcgacgcctgttctcactattcctaatagcgaagaaccatatgtggtattcactaatgcttcaggtactggattaggaggtgtactcatgcaaaatggcaaggtagttgcctatgcttctcgataattagaaaccacatgagaagaattacctacgcatgacctagaacttgttgcgataatctttgtcttgaaaatttggagatgttatttatatggcgtaaagtttgagttatactcagatcataagagcttgaagtatctttttactcaaagggacttgaacttgaggccaagaagatgggttgagtatatggaggactatgatttcactttgcagtaccatcctggtgaagcttatgtagtagttgatgcactaagtagaaagcctcatggtactttggcatgtttagctctcaaggactggaaaaggacaatcacaatgggtgattataacttgca

SEQ ID NO: 249208 - DNA, 921 bp, Cannabis indica
tgtgtttggacctatttacttaaaagcaaagatgagtgtctagaacaatttaagatatggaaaaatctaatagaaaacaaaataaatttaaaggttaagacacttagaactgataatggtctagaattcatcaacaataagtttgataggttgtataatgagcatgagataactaggcatagacagttgtgaaaactccacaaaagaatggagttgttgagcgtatgaatagaacccttttgaacaaagtgagatgtttacttcttaggttggggttgggaaagccttattggggagaagctttagctactgcttgttaccttgttaataagagtcttaatagagtcatagacttgaagacaccttatgagatgtggtatgggaagataccaaacctgaaacacttgagagtgtttggatgttcagcatatgcacatcaatccgatgataagcttgatgctagatctgtcaaaggaacgtttctagatatcctataggcacaaaatgttatagaatttggataaaccagaatggaaaacctaaggtgattatttctagaaatgttgtgtttaatgaaaatgatttttctcacttgaaagctgagaaagacagtgtgttacctgacgcagattcatctagaaagagggaagagtttgaaattgagctcaaagatttgaaccaacaagtgaaaataattacaacacagacacatatccagatgagactgtggaacgaccagatctgtctgactaccagcttactagagataaatacagaagagaaatccatataccggcaaggtttgcgaaagctgatctgattgcacacactttgttaatagataattcatgtgacatatcagaaccattgagtatagaagaggctttaaattgaaagtacaagaaggagtggtctcaggct

SEQ ID NO: 249209 - DNA, 871 bp, Cannabis indica
atctcatctgccagttgcttggaaatttggttattgtattcatatggttttgacccttcttacttagggcataaaatacaacattggcattcccaggatgataaaggatttcacagtcataatcctttaccaactcaagccaacgtctttgtctcatgttcagctctttctgggtgaagaagtatttcagacttttgtgatcaatataaatctcacatttctcgctatataagtaatgccgccaaatatttaacgctaatactactgccgcgagctctagatcatgagtagggtacctttgtttgtattcttgtaattttcgagaagcataagctattatctttccagtttgcataagtacacaacctagaccttatcttgaggcatcacaataaataacaaacttttccttgtcagaagaaagagttaatactggaaccgtaattaagcgttgctttaactcttgaaaactcttttcgtaccgatccgtccaaataagcttcagattcttttgggtcaatttcgttaaaggtgttgctatcttcgagaaaccttcaacaaactgacgataatagccagttaaacccaaaaatctcttcgctttcgtagctaattttggtgttggccaatcccgaacagcttcgattttggctggatcaaccacgatcccatccttgtccactatgtgccctaagaaagagacacgtgataactagaactcacactttttgaatttagcatagagcttgtgatcccgtagtcgctgaagtaccaatctaagatgtaactcatgttcttttgattctgaatatactaaaataccatcaataaaaactattacatgtttatccagaaaatccttgaatactcg

SEQ ID NO: 249210 - DNA, 677 bp, Cannabis indica
tctcattatttcgtttaaatgcagacgtatctttgtaaattaacaattttgcttcctaaactttgataacatcgtacccctcaaaataaaaataagaaagatttaatattttttttggtaaagttatactcatatttcgagcggtaaataatgggattggccacatgacatgtgaacgacaaaaggagtaaattaactcagttaattaaagagtcgaggtataaatagcctcatcgtagtatgaagtccatacacgttcttctcggggtaaagcataaacttgcaacattaagttcaagacgcttaacacattcctagtatacgactaaagatgctaagcttgttagaatttaggaacattcatagtgttgacattgttaacattgagaggcttaatttgcttaagcttactcaagttcatcacctcaaaaatacaatcaatatgttttctaaagaatatgttactcgaaacacacatctaaaggttggtgtattctccaaggaccatacatcaaacaatcaagcgcctcgataattgcatgatacatattacaaagactaagtcaaataaagcagttggtcttatttaaaatgaaagtggttgcatgttatttcccacccaccagttgaaatatatgaaacgtgagaaatgtccacattttataactattgtacac

SEQ ID NO: 249211 - DNA, 761 bp, Cannabis indica
cgaccgaccattggtggttttttggattttcgattccactggtttcggttccaacagtgttcggtaggttggtttgaaggattttttcggttttctagattttatgcttacccctagtcgcacctgatacccaccatattgttgggactcagaatcaattcacttcttgtatagattctaggtctttcacctacaggtgagtgcacaccttatctacctatgatgacagagacgctaggttgtgaaacaacaatatgcataaatcatgatcaacatggctctcatcagtataatcaaaagtaggaaaataataagaataacaaaagaacatatatcctttttattttctacaaaaactagcagcataatggttatattttgaataaatccaaaatcataacctgcataaatatttgcacaaaaatataattgggcactcagtgtcccaaagcagtccagaaacatatgtaaattaagttttcaattttttgaaaaatttacaaatcataaaaattagaatatgtttaatggtattcaacacatattaaatcaagtccaataatcaagttgagtccttacctctcccaagttgttaaactttttccaaaaagaggatcctaagctctcaagtcctgagctttaattgtttaatctaattttagatatcactttcacatataccattaaatggctaaataattatgatcattgcattctacattcaaaactgagtccaacgacatataacctgaccatattaa

SEQ ID NO: 249212 - DNA, 561 bp, Cannabis indica
gcgcctgttaactcttccctacggtcttcgatcatgcaacttccttttgaacgaggctaacctgcgatcggtgggccttctcgcttataagaaatatacttgtgattacaagattcccaagtattcttcttggcagcaaataactgttccgcccgaggaccaggcctgggatctcttggctcaagtacaataccttcaaaatactgccctcgggaattcggtgaagaagcatcccgaggtaatcaatgtgtttgttctcctactgtacttagggctgagcgtaatacattagtcaccttccaagactcccatcgtaatttttatatttggaattcccttctcgtggaccgcattgcccataagtttaacagttggtatcctagatttcacgcccaggttaactgtcacgaggcatacttcggtatagctgagaaatacggtactatggaagatagggcgggtcacatagatgcgagctgggatttagaaccgattgagccttttgatatattcaaaattacaggctgtagggattttagtggatattatggtccctctacc

SEQ ID NO: 249213 - DNA, 913 bp, Cannabis indica
ttgcactctaccagaaaatgagaggtgaagggtagcccaattatgaagcttcaatttaatctcttcatcaagaaaaggatcacaatcttctgccttctattttgttggcctcattggaataccaagatagttaatagagaaataaccctctgcaaaatgtattgtatctcgaatttcttgtttagtcattccatcaatcccaccaaagtaaatatgagacctatttggattagctttgaggccaaattgcaactactaaatataaggtatcctgcatcctcctcgaaaccactttttgcatatatcgcaaccactccaaaatctttacaatatttattctcctccaccatcgttgtgctcatcttcatcctctcgaaattttcttttacaagcttcagattgcttttcacttgacggtcctcgaaaatttctttgaattgcaagctttggatttcttttgcacacacacaaatcgagattaagaaaccaaatcagagctaatagaaatttaaacaataaaaaaagaatgttgtgcttacctttgtgctgccacgagagagagaggagagggacggagcggaggagacggatggcgtggatcgtagtcgcgaaggagagagaatcaacaaatgaaaaaaaaaaattacaaatgacttcaaaaaaatgagatttgatttttttggtgggtttatatattaagagatggaaatgaaatttcatatctaaattgcgataaatttaagcatgggaattgcctacgatttaaaactgtcggcaattcccacttaaaaatacacgagattttttcagacacgtttaaaaattgttgcttatacttctcgactgtttaaaaccgtcggaaataccatacttttctcgacgcttttaaacactcccttaattttttttagca

SEQ ID NO: 249214 - DNA, 2482 bp, Cannabis indica
tcagcatttgcatcgtgaagaactggagcaatccctataaattttgggatcgtatcatagagatatggcaagcggcacaaatcccacaatctttgcattctatatatttaatatgtattcttaccaattatagatattgtaagtaaaaggtaaactttccctcaaacatgtagccctataaatagtgatccgttctaagagagcatactcagagatttcattgttagagctctaagagaagaatcacagtattctttgttcttaagtcaatacaaatcaaggggagtaggctatcaccaaattgctttgggacaaacctctttaaaaactctgagttctttatttatcttttcatatcaaatctgaattatatcctttatcgcttattattatgactcattgtcgttggctaaaagcgaggtcaacaatacgggtgactagtgcctgacaacggatactatcaatcccaacttcagtggcaacgacagtaggatttagaaatacatatattttggttaatccattgaagtctagaaaacgttctttgaagttcctaataataaaacataattaataactattgctctcaaaagaaaatcatcaagtttataagagttttaaatcatacttgcaccaaactgctataggttaggctcctaaaatttcatggtgcacaatttatgtatgtaagtttttacaagctaaatcgagtaatctttgacctttaaatcttctgcaacagtaaattaaaatactttcgatagtgactactttctcacgtagttttgaaacttagtgaatgagttagtttgtcgtggttggacataatgaccatgctatgttgtcttacttgtcctctcaaagtgttttggaggctgtgttttaagaccaagtaaatcttcaaaggcatgtttgcttctcttcacgggtagcttctaaagactgttggtggttggctgtttctatatgaaaaaaaaaataaagttaaaaatttcattaatcaattaagaaaataagataagtaaacaaatcaaaacataccaagtgtttttccaaaaggtgtaataaagtcttttgaccatgctacctaacattttaaagcttgatctactgttctgaatgtatattgggcgatggacatgaaagcagcgccttctccacatttgttttttcaatgaatatccgactataatttttattaggtattcatctttgtgaatcgagaactttccatctttcaaatattattcctttacaatgtgccccaaagtaaccttctgtaccatcaaactatgatccaaccgaagtgcatccaacacgaaaaggtctgtatatccaaattgaacaagcaacaattcagtttataaattgaccatatttataattttgtgttagatctattggtaaaataataataagattacctcttctaaactacaaacagttcgtggcagcggtgctgttggagcaaaaaccttcctacaacgcgatggtggtggtggagtagtgacattggcagcacctgatggtttttctatgggattgcaggcaaggtaagcatgggcttgttcatttgatgctcctccaacatcggttgtagatgcatgagatgtacccacaacatcgatatgtaaggaatgaactagacaaaggatctcatccatttgctcccacaactatctgtttctcccctttatctcatggatgtgtctctccaaatcttacaatgcttagttcgacccatctattgtcttccttttagggtgtggaatgtggaaatatttgttctgggtgattcctaaacccgtggctcaaacccaacaataatgctcatctgtcccaacaccatggttaacacaaccctcttcccttccgcatgcacaactccctcttccacttgcttattaaattcgtcctaagagcataacaaataaagttagaaatggtaaactgaagcataacaatataaatgaaattatactttaaacttacactaagtttaacgatttctgtagttgggccctcaacatcgcctttcgtgttcatgtgaagtcttctccatacttcacatctatcaaaatcagtaatttggtggcctgcctctttctccattttttctaaccatccttacaccacctcatccggtgcgatggttgtaaatatttttttgccttgctctattgggccttttatctcctccccttgaattctggactcaatcatgtagccacaaactctctccattgttctaaatcacttatgctatgatatatttttggtagcttctcgggaagttggggagccacatctttaaaattaaaagtacaatctattagggaatttttccaatccttccacatctctccacctttggaaatggttaattttttatctgtctccaatatattgaacacaaactgaaaaagggacaatcgtagtaataagtacaaatcataataaataataaaaaacatgaataata

SEQ ID NO: 249215 - DNA, 2906 bp, Cannabis indica
aatcccggttaggggattagggtttcataatcatttttgggtagcgtgcctaattatttagggcgttacagatacacaatgctttacctgtggcaactgctctgtttcaaaaaaaagttctaaatttagcagcttgctcgttgtgtacacaagcttgggagtcgattggccatgccttattctactgtaagcacgcgaaagctgtatggaaacacttttattttcctattgattatggaaagacactgaatttggttgatggtgattatcttttctatattgtaaatctccttagcaagcatgagtttgaaatgatgatatgcatcatgtgggtgatatgatatggactgatcgtaataagatcatacatggagaaaagagaaaggaaggttatgctttggttgcatatgctactaattacatggacaattacaataaagttaacaatcttcttcctcctactgttgcattatcttcacctactgctgcaccttccaccgatattgctgcaacacacagtctcccaactgaagtagttccatggaagccaccattgttaaacaaggtgaaacttaatgtcgatgcaacagtaaatacatcagaaaaagttctaggtattggagcaattattagaaaccatgatggccaagtcgttgctgcattatctaaaccagttcaaggatgctttagatcagacgaaatggaggtaaaagctctctttcatgcgctaaattggataacacaactctcgctgagaattgatcatgtgaaaactgatgctcttcgtcgttcaacagcaattaataataaatccttagatttatcttctttttttgatttaattttagatatccgttgtcttctttcttttttcccaggcatagttgtttctcatgttaggagaaatgctaaccaagctgctcatggtttagcaaaatatgctctagggttggatgtagacacttgttggagaggaaaaatttcttctcctattttctctgttgttgtaaacgattgttgattataataacagtgaaactttctaaaaaaaagtactctatgaaataaataattaaataataaataataaaaaaaatcatagataaaataaaagtaatatcgattaaagtcttacatcggatataattaataatattaaaaagtgtataaataacagtaacaatgtatgggttatcaattgattttgcggtttttttatttttacatttcaaaacaatttttgttttttatatttttacgaaattttacatagaaatctctattgcaactagcagagcaacttaaattgcaactaaaaatcgtatagcaacccacatagaaagaaaccactttagaaacccactataaatttttttttagaaaaatattatatagggagattccctagtgatttttgagtggaacccatacttctattaattaacccattcaaaaaaaataaagaaaaaaatagagaaaaatcaaaagaagaaaaaatggaaaaatgacaaaaaaaaaataaagaagaagaaggaaaaatgagaaaaaaatttgaaaataattaaagaaacaaaagtaaggaaaaaaaaattgaaataaaaggatgaacaaaaaagaaaaaaaatatgagaaaaaaaataggaaggacgaaaaaaatgaaaatagaagaagaaatataatttttttttttttaaagaaaaaagaataaaaaggaagaagaaaaaaaatgaaagaagaagaaaaggaaagagaagaaaaaaaaaacttataatatacgggatctaatacatactgaatatagctactccctcaaacattaattggttttgagatcatcactaatttgttcactagtaaaatcaattaacctaaaacaaaccaaacagccccaaatataagctcatatcatttatcctattaattgaaataaaaatagtaccatattatttgaaaaaaaaaacacttctcatcacaaatttgttcatggtgttttaggtaaaaatttatattgaattattcacaaaatgacaaattagtgtaatagtaattaagtaaagacaaaataaataaataaatatagaaaaagacaatattatgtaacatgtattcttctaaatgagaaaataaagattccagaagggtctatcgtttccttctctcgcgacgacgatgacggtgacgacggcggtgcgacgacagtgagggtggcgacggtgcgaggacggtgagggtgcgacggggacgatttcaacagatattcgaaggctgggtttctctctcgcgtatacgaaggctgagtttcaaccgtctttggagggctcacggcgatgacgggcactgctcgtggttgacgacggacggacgggcttctcctctgcgcgctgtcgacgactgacggagaactttggtctatgaacccttgcaatcggattggtttcgaaaaaataaaaccttagagtattagagtattggttcttgactttgtaatattggaacttagagtattagagtattgattttgaatgtattttgttctcccgtgcttgttttcggtcctgattaggactactattagtattaggtttttactagtagttgcattagactagtattagaattatattgatgatttttaactaagtattttaatagaattaggatttttttccgtctctgtagtttagtatagttttatactagtattagtattggtattatactagtattagtattagtattagtattatactagtataaatgtcttgtgtgttgacatggtttgatagttttttttaattggtttgttttattggtttctggcgttatttcttggttcttagttttgagtttgttcggctgtccatgacatcgagtagttatcaacaaatggaggcagcggagaatat

SEQ ID NO: 249216 - DNA, 658 bp, Cannabis indica
tattataatttagagaaagaaaatagagaagagatgagaattttcttaatattttattccaataggtgatctcctatttatacacatacaagagtcaaatattaagaaactaagagaaagggaaactaggaaaaaagggaatgttgattacattaatggtaataaaataaaagatttggacatccacataattaatactatttataacaattatcaatttatttcttttttttttttttttttttgtacgagagagttctagtagaagctaatcacaaagctggaactaagtcattccaacagcattcttcatcttgccccaatgccctttgcgccagattgtgcgctctgcaattgtgggatcgtttgacatgtcggagttggacatcagggaaggcagataaagaacaacggatatcctcaacaacatctgctagtgctgaaagatcgtctttcttgctaagaactttgtcgactagcaactttgaatcagtctctattacggctagtggtatttgtatagagatacaccactctaagctagcacgcagagacagagcctcggctatcaatggctgcaggttcccagctgcaggagcagaaagaccggccaccactttcccttgccaatcaagaagcactgctccaaagcccatct

SEQ ID NO: 249217 - DNA, 984 bp, Cannabis indica
tactgagtctagaacgttcatacgataatactatcgatcataatgtcagcctatactcaatatgtcagtcatactctagccatattgatgtgacaacatcgatcaatatttcagccaacgtacatttattagtaatcagtacaactctacgtatactattactgcaatcaatatactctaacaggcataaacaacatgtatgataaacatgtaattacatatgcataacattatactaatcttaccttgtttttgaattcaggtgtgtcggccaacctgagtggaacaactactcggcgaattacatgcccttaaatcacatcgattgttaaccggtttacacaagaaaatctcaaaaattccaaaacctaaccaaatcgattacaatccttaccaaaccttccagacctgtatattataccccaatagacatcatccaagcaacagaacaacctaacatgctcaatattaaaaatcaccattaaagagccaagcttgagttctaaaactcaaagcttgctcaaacaacactacagccactcaaaccagtcaaaaacaacatatctaagcataatttaacttcagaaaacaatattaaacaacaacagccactacataactcaaatacccaaattcatgcaaaatccttaacttgaaactcaagaaactagcaaggaaagatactaggaacttaccttggcttggatacactaagatcttgctggaaaactcaaggtttgctaaagaaaaacagaaccctagctggttctaggagggttcgaaaaagagagagagagagtttgagggaaaaagtggttttgtctaatttctaatttttgtaaaatgagtaaaacaaaatgattttcttattaattaatatcactatgataataaacatactaattccactaaagtccactaaaggacaaaaagttaaagaggcaaaatgaccaattttccattcccacaactaactagtcataa

SEQ ID NO: 249218 - DNA, 1407 bp, Cannabis indica
ttgtataaggatccatggaggtggaggacaaattgacgaaggatcaaagatgaaaaagaacagttattaatggatagaagagggaattttcggatgaacatgaaaaaaccagaaggaaactgctaaattgaaagagaaaaaactgataactgctaaattgaaagggaaaaaactgttaactgccacagagcaccaaagttgggcagacgctctacgtgaagccacaagactgaaactaacttaaggaagaaaaaaaaaatagaagaaaaaattagaatagaatagagagaggaaattgatttttgattgtggtttcataatgcaaaactaaaaatggaaaaataaaataaaaaaatatggagaagaaacggaaaatagatgagtgtatgtgtgattagaatgtattttggtaataaaaaaataataaaaagtataaaagtaaatataaagtgtataaatgtttaaaataaggtgtaaatgtattttggtaaataaaattggtttggtattttttatgtaattttttattttattatttttaaaatattttttatttttaaatatttatttatgtgggctaataatattgtattatgtgtatactgtatttatgtggatgaggagtgttaattacaacctcttagtcaacttccacgtccgaaattacatgttggaatattttttttaatttttttcatagtggtattcgttatagttataatatcatccctgtaaattttaaaaaattatgaatagtttacaatgccgaaaacagagttcctgatattgcagtttactacacgtgttcaaaaaacttcaaatgtatttttggcacagtaaactatttaaaaattttcaaaaatttacaggatgatgttgtaagcttaacgaacaccgccataaaaaatttgaaaaaatatatctcgacatgtgttttcgagtgcggaggttgtaataagaggttggcagtagcactcctcttatgtggataatatcttatttacacatggacaacgaaccttacaaataacggacaaaaataagtgaaaatattcaaatgatgctaagcacaaattttggattttagtgataaaaaataattttagggtaaaagctgctattttgctgcaataactcaaaggctaattatgatttttacttttcgaactttaatatgtactaaatcatattttttaaatttttaaggtcattaaaaatcctctgtaaaccattgagattattaaatttaaggcgttttatccaattttggtaagaaaagtctaatataaatgaaagtttagagagcataatttgttacatgtcaaattttgagggacatgatttggtagatatcaaagtctggaaaacatgatttagttcatggataattatcgaattagtaaaatt

SEQ ID NO: 249219 - DNA, 550 bp, Cannabis indica
gcaacctcctaacacctgatggctcgaggtgggatgtggaggttcttgatgatctctttgttgatagggataaacatttgatcatgtccattcctttgcatgacaacaacttggaagatcattttgtttggtctaaagagacttcaggtttttatacggttaaaagtgcttataatatactccaaaagcttaaaggtggatggtatgagactaatgataataacttttggagtaaactttggagcttaaagttaccactcaagatcaaaaacttgatgtggcgtgcggcggtgggttgccttccgacgatgatacaacttcgaactaaacatgtggaggtaagctctctctgtcctctctgccatgtggaaaatgaaaccattactcattgtttggtcacttgcaatgtgatcaaaacatgctggaatagggtgggaatcgacaccattagtgactcaagtatccttttcttgattggtgcacctcggttttcagcaagctgaatgctgaaaaaagtctcttgtggttgctgtgtgttgggccatttgga

SEQ ID NO: 249220 - DNA, 640 bp, Cannabis indica
cagacgcccaatcagcatcacagacgcgtgagacaagattggagcaaggccgaatatgaagaccataatcaagagttcctttgagataacgaaggatacgcttgactactttccagtgaggttcacggggctgatgcatatattgagaaactttgttgacagcaaaagagatttcgggtctggtaatcgtggcatactgcagagcacccactaaacttcggtagagatgaggatcaggaaataaatctccatcataggcacttagtttgtctccaccaaccataggaataggaagtggattggcattttccatcttggctcgacaaagaagatcaataatgtacttttgttgactgagatgtaacccggttgtgcagtgatgaatctcaaccccaagaaagtaatcaatgggccctaaatcttttaaggcaaaagaggaatgaagctgagatattaaagctgatatatgcacttgagaacaaccagtaacaaggatatcatcgacgtataccagtacaaatatcgtgtaagaggatgtgatcttgaagaatagtgactgatctgctttggaacattgaaaaccaagatgacaaagtgcagttttgagcttatcaaaccaggcacggggggcctgtcgtaa

SEQ ID NO: 249221 - DNA, 615 bp, Cannabis indica
ttaaactcttatccgtacacccagccacaacctttcatttcaacaagtagacttttgactttaaaaagaaaaactaacaaccaattgaaaccaaaccaacctttcagtgtcatattactattaggacctgtttaaaacttaaaattgaacgggaaaggattagattgaattagattagactgtacaaagttgaattatgctaatagactcgactattttatttatttcattttttaaaaacttaaattaaaataaaaatatataataataaataaataaataagaataattcccaataaaaataaaaaaaataataaaattaattaaattataaataaaataaaataatatatcatatatgatcaaatatatatcatgaatatataataaaatattttatcatatttataattaataaataattacaaagtaaaataaaaatatttgaataatataaaattatctatactaaataataatttaactactaatttaatataaatattaattttctaaattaatgatataatttttctagtaatttaaaaaatatatataattttattatcatatcatttctctggaaattaatttaaataactaatggtttattaa

SEQ ID NO: 249222 - DNA, 652 bp, Cannabis indica
ttggccttgccgtgttctgaagaacccatctttatgattgccaagatgcatgtcattgtctcatcaccgttaggagctcgtcagagctgagatttcatggcgtcgatttgaccatttctagatccctcatggtaaatgatctctagattcttatcctagtttatgtgagctctatgatttcaagatccatttttatttttttcaatgttgaatgttgatagacgttatgaattgaggagctctggtcgtgctccggctagtcatcatttgatatgctcccaatcttgtttcaatctcttgaaatagttgttgattcgttgtgaatctcagagtataactttaatcacaacttttattatgttgagtttaatagtttaatgtgattagagatgtattataaattgtcaatttagtaatcttgtggctattttgaactgtaatattatttacactgtaatgagaattgtaatttggactgttcttattatttgtaggaattatattgctaattgttatgtttttttaactgattttgaaatgagaaatgcctaatttaaggtttctcaattttaggaatttccttttaaagtttttatttgaattcttttatttattaattaaaattttaatttctaacacaaattatatatat

SEQ ID NO: 249223 - DNA, 2124 bp, Cannabis indica
ccagagcaagaaggattagggagactcctttttaggaagagattgagagaacaaggcaatatgtgatggaaagctctccaaataaagtgtttaatcttggagggtatagggagagaccagagggatttccaccaatgaaggtaaggattaggatttgaggatgaaggaacctgaacagagtcaagggtgcaggcaagatggtaagcagacttaactgttaaaatgcctgaggagtgaaacccccaaataagtgaatctggagattgaggatcaattggggttgagaggatacgatcaacttggtaagaagggaaatagtgattaagttttcgggtattccaagttgagtcctcatttaagaagaatgagacaaaagcttgggactgatggatagggtgtaaaattgtagggctctgaatatttgaaatccaatttggagcagataggggaatagtggatccagtgccaattttccaaactaaccctttttgaagtagattgcgcccccaaaggatacttctccaggtgaaagaggagttgtggccagggggggcatgcaagaaatcagagtgtttaaaatatctagcttttaggacagagtgaagaagggaagacctatcattccaaatacgccaagcctgcttagctaagagagcttgattatgagaagaaaggattcgaaaacccaaacccccaaagaatttggatacagaaatagagtcccagtttttccagtgtatttttttcgtgccttgagatccccaccagaatttagcaatcaaactttggatttttgaacaaatggatttggggactttgaaacttgacattgcaaaagaggggatggcttggactaccgctttaataagagtctctttaccagctttagagaagaatttttcgttccaggaattaagtttggaggaaactttttgaagcaggtaatgaaacattgaatttgaaaccctgccaacacaatggggagcaccaagatacttgctaatgaagccttctcccataagctggagatcttgacggaaaagatcttgggccagagaagtggtgttgggggagaagagaatggaggatttctctctgttcaccaattggccagtagctttatggtaaagatcaagaatactattgagggaattactagcttgagggtggacaggagaaaaaccatgctatcatcagcaaacagagatgggacaaagggggagctcccctgcaaatccgaataccagaaaattggtcctgagtttcttgaccgaattgcagcagagagaccctcagcaataagaaggaaaagatataggagagaggggatccccttgcctgataccacgcgttgaaggaaagggatcagtgagagagccattaatggaaaggcgaaattgaacagttgaaagacaacgcatgatcagggaagaaaactgaattgggaaaccaacatgattgaacaaatgagttagaaaatcccattccactctgtcaaacgctttttccatatccagcttaatagcggcccaaccaaccttcccagatctcctagaatggatagcatgaatgacttcatttgcaagaagaatattgtcagtgatttgacgacctttgagaaaagcactttgattgatactgataatggagtgaagcacaagcttaagccgattcgcgagaattttagaaagacatttgtagaaagtgttgcaaaggctaatcggacgaaaatcacggacatgcttgggattcttttttttagggatgaggacaatatagtttggttgatggaagagatgtccccctgatgattaagaatgtggagcatagctttagtgaaatcagttccaagagtggaccagttacgtttgtaaaagtgagagttgagtccatctggtcccggagctttgtcagcagagaggctaaataaagcattcttaacttccgcttcagtatagggttcagcaagaaaatcgacttgagtggtggagagcctattgggaatcccttgaagaagagtatggacagcctctacacaaactccatgggaggtgaaaagagagttgtaaaaatggagaaattgagacgtgataattgctgaatcatgagttatagaaccatcag

SEQ ID NO: 249224 - DNA, 659 bp, Cannabis indica
cttactacttgaatgttgaaagaaggaccgtgataagagatcttcaaggtattcctttccaaagtcctccatctttttactttttgtatccattggaagaaaaccttcagccatccataacaaaatcaaattttctttttcaaattcataatctttaggaaatatggaacaatatgcaaagcactgcttgagatgtgtaggtaagtgacgatagctcaaccataaagctggaagaatggaaccctcctttttgtacagattgttccatgtgtcgctattgagtacgttcttccatttttcagcatttcgttcaccacgcaaaaatccaccaaggcattttattgccaagggaagacctttgcacttgcccactactttttttccaaccgcttgcaactcttcaaagttgttctcatcaaaattattaccaaatgcatgtttgacaaataagtgccaacaatcatcatccaacaaagtttgtatatgatgaatatgtccagtggccatagtagaggccacaattttgcttcgggtagtcacaagaatcttacttccatttgctccagactcaaaagaactcttcaaactgtcccacaaagaataagactcgttccacacatcatcgtgaacaaacggaaacttcttccccttcaatactt

SEQ ID NO: 249225 - DNA, 1742 bp, Cannabis indica
tctagcattgggcttgtcccaaataactagaaacattagtgactattgtttctaaaaatttctagaaaattattttctactcatttcttacatttatctagacttttctactaatctttggtaattacgatgggctttgtcttaaattaactaacaaatatgtaataactagaaatttctagaatagtttagaggaggtgatgacttctaacaaaagaacacaagtaatacagttaagtcagaacctaaccatctcaagattaagatcctttgagctaagatcaactaagtgagattaacttagaaaatatataatagtaagtttatgatatctttgtcactgtcaatattagtccagtctgatgtatagccaatacatccaacaatatactttgctaatgccctagaaatgacattccacatatcattgtgtaagtaaactttatcgttaattattatgtcaatgtaaatccagtgcactgataaatcatgggactaaaaactttgaagcatataatcacaattacttttcaatgtgatgacgtcactgtatttatgaataactatatgttttggatttaaaagaaattttatattaaaaccataaacataaatattacacgtaaacttaaatgacttctaatattttattgatagtaaataagattatattgaaataagttttatttagggtataaaatccaaacaacatgaaaccaaccccaccccaaaccccataccaaagatctggacctagccctagacccaaacctctactcgaacctagagccagactccaaaccccagacccaaacttggagtcaaacacgaacccaaatctttgacctagatctaaacctaaatctccgaccccgacccacacctcggacctcaacctcaaacgtagacccagttttgagagagaaaatgtaaaaaaaaaataatatgtgttaaaaaataagaaaaaaaatgaaaatagaaaacagtgttttgatattttctaaattttagtttttttttaactcagtttttgaaaaattatttttagaaaatttgacaaaatgccctttatttatttttcaaaattgtttactgtctttaaaaaacaaatacaatttttaaattataaagtcaaacaccaccttattgttttttattcaactcatcatgttcatctttttcttttttctgggattgaaaaaagggtcgagaagagagaattatctggtgactctttcttaggcataaccatgagagctccaactatgccaatgaatgttcatcaagaccttctaagctaggtcacccccacgtacaatggagtgtgtcacatgggtaccaaccgagaactgtatcaagttgagaagctaaactgagttaattaattagaatcagttaggcaagttgttaggtgtagatattagttgttagtttctggtaatagtaaccaaattgtatcttgtatctataagctatttataactttcttattgtactctgtacatttaacgattcattaatgaaaatagagtattttctttcattatttctctcctctctcaatctaatatggtgacacatcaggttcatttgtagctcttcttcttatttctttcctccatggcttgacgtggaggagctcagactcaaaacacttcaaacacgtccaattgtttctctattttaaaatcaaagactcgatcattttttgatgatgctcgaaatccttattttctttctag

SEQ ID NO: 249226 - DNA, 1230 bp, Cannabis indica
gcacaccaggcgcgatttcatctataggagtcgtcacaccatgacctacgtttgacggttgttcaggattaacagctggtggaacccttgcgtttcctgggttctgcaatgcaggatccaccgcctataaatttgtcggatcaaccaggcccctacgagttcgtaccaccatcgtactcatggttagattttgaatgaagagcaattcttgactctgctctcaatgaaagcaccaaaatgttgacctcgcttttagccaacgacagtgagtcttatttagtaagcaataagtagtttataacgattgatatatagtaaaacaatataaaggcacatgaattttatagaggttcagccccgagcagttcggtaatagcctaatccttgttatttgtattaactcaagaataaggagaaagattccttttcttatagctcttacaacagtatctctgaatatgaattcttagataatatctctctaccataatgttttcgaccgaccctttgcccagtgaacatgcatcactattaatagggctatgagcttggagaagaagtatttcccttttcgttacaatagatataagcagaaagattccataataaacatagaatacactgatcgtgagatttggacagcttgccatatctctacaatctgatccccaagttatagggatttctttgatgactcacgatgcgaaagctgaattcgctaagtgttggtcgttctgcgcagattgttgttcgctttgcttcaggcatgcatatgaggcatcctgttcggactatattctccgaccagatactcgaagtcagttctacgtgtcaccatcatgtgatgccacgtcagagtgcaaaaattgggataacactttccattgtcctcaaacaatataagaacatatatatgaatatatatattcatctcttttattatatttcaatcaattatatgatgaatattacgtttgcataatcttaggatatatacaagattttattgaggacgcataatcttcaagatatatgcataatttatatctattctctaccatatatcatagataaataataagaacatataatatatatatataaatttaaaaataattatatgagaataaaatatatacacatgtattaataatatagatatatagataaaaaagaaaaagaaaaaaagaattcttgaaattgtttcagtcagatgaatatatatatata

SEQ ID NO: 249227 - DNA, 1210 bp, Cannabis indica
ttatatatacaattgtgatcctagtaaatttctaatagtcccactgggccacatatgtatacatataaatgtgttaaacttactgagctcaaaattttgttatcataaccatagacatgtacaatctcgtccattaattatatcaatataggatcaaagcagtgttcgttgtatcaatcacaactaaacccatcaattgtcacatatatcggcatagtatgttaacgaaaaaatcatatgtcgctagatgtgaatagcgagggataaagtacgttacatttaggaagacgaaaacgacacgtttcgactgcgaaagcacttagtgtataatgtacaaactaagtataacagtcgggttggctcgagacctaataagcgaggtgcctatctcgttatgggaagacttcctgacacttcacccagttaaactcagacatcttctcagtgaggctcacaatactgacgagtcagtagttaacattctaacgagcctcaaagaaatctttgtaagtcagaactgcgatcatcacaagatgtgcatcgtcgacctcggaaggaaaaatggccctagcttgctagtatgatcactagaaccaagcttctgttgagacatccccaaatacaacaattaaagacgtgtttaaatacacaatcattttgacccagtaaaagcggaaaaatcatagctatatgatttttaaataacaaccgcagttacactacgtgatatgtaatcaaaactcataattttaggggataattgttgtaaaacgatcgcagtcaactttgtaattaactgtccactatgtaattataaatagtggtaagtaatatgaaaaaagggacagaaaaactcatacaaaagaggccctgagaaataatcagaattctgaataagattgactcgtggactatgcagagttttaactgtaaaactatctaaaaaatcctgtgtgttcatattttccttgtacatcctttattttttcctgtgagtttgtaccctgggacgagggatgaagagcccgatcctggggttgcccaacctatgggagaaggtacttatgaaacaaaaaatcgtcgcctaagacgccctttggaagaggcccagcggcggaatgctgaattagaacgtgatgcaactgcggccaggacgacacaggggacgaatgctcaaaattaacctaaacctagagtgagaagaccgcga

SEQ ID NO: 249228 - DNA, 1632 bp, Cannabis indica
ataattgtctttttcaacaccaactattgtctatctcatacgggtattcatccaatccaatttgcactattttacttatagtgcatttgaatttccgcactaactgcaaattttatactttagatccaatcaaatccgcatagtaactcaaatcaaatccaatccaatgcgaattaattggatcgattattttggttggttgttacttttaatatgaacttatttaatattattaaaaatatttttacacataactatcaacaaaataaaatactccaacaataaattaaaataaataaaacaaaaataacaaattcaagtaaaaataaattgtatgcataaaaaatgtttgttttgttttagattatattttctttataaataataataaaatatactggtggcattattcttctattatgcagagtagctggtggcttatcgatcaatgaaatttaatatctgtcaaacgaatacatgcttattgtgtgatgttcaggctgaatcatggagcacctttactttaattgtcatttcaacaggatttgcttacaggagatcaaaaaatggctcggatggagatgtttgagcacagatttgagcattattctaagatggactgatagagcaaaaatctctaaattttggagataatgttagtgtatctatagctacctaccacatatatggatgattggaaacaaagtacttggtttcaatgtgtacaaagcatcacggtaagctgtgtaatagaattcagcaagatgtaaaagatagattaaatatggctactcccaaaaagatgaagaaaatagatattcattggctaaagcaattgtaatacctttttattgagttgtttgtatagaatgttttctgtagttgaatatattaagttattgaagctgattcataaaaagaaaaataaaaaaaaaaaaagaataaaatatagatttggtttactatgttttaaattattatttttacattaaattatgtattgtatatataaacttttttaaaacatatataaatatttgtggattagattggattggttacttttaaatgtcaatcaacattcaattctcacaaatatgagattttaaatttttcaaaagataatgcagattagattaaaattaggtattttataagtgtactcctactttttcaaacaccaattgaaattattactattattccattgggtagtttagtaacaagaacacacaacaataaagtcttcgtcatgtagacaatttatacataaaattactaaaggtaaccttagatttttctaagtcttccaattagaccaagtccatgagttcgacagacattgaatatgatggtcgactaatattgtaaaataatttagttaggaagaattatattctatcacagtgacattattaattatttttgtccctaaagatagggatttaacaaaattataaataccttatttatatgattgtgtatattaattgttcacattcaatctatttttgaaaaatttagagtacatttattaacactttaatcacttttttttttttaatagtcatgaaaaaactgttagaaaaattaataatatacccaagatctatttgtatataacatagaaca

SEQ ID NO: 249229 - DNA, 683 bp, Cannabis indica
gtttttttttttttattttgggcccccggaaagtgtgggccctaggcacgggcttagcccgcctatgcctggggccggccctgtcttaccctatcaaggagagactgaaaaatgcccttcttactttgtcccacataggaagggagaccaaagtatttctcatgtcaagaaaccaaagtgacacaaaatgggagccaagggacatttgttctcataaaaaatatgagtactgaagcacatagcagacttggaaaaattcacagattgcctagaagctttcctatacaaactcaagagctgtttaaatcttataaaagcaaactcattagtcttaaaaaagaaaaggctatcattaacaaaaagcaagtgagataaaggatgtccatttctgcaacaagatagacaatacataacccattcgaacaatcacgacgaacaagagcggataacccttccgcacaaatgagaaaagggaagggagagagagaatcaccttgacgaagccccttagcaggagtaatttgaccaagaatttccacattaagattaaaagaatagtcaatcgaggagatacaatcctgaattaaattaatccaattctcatggaaactaagcttgcacataaagtaacatagaaaagattactccaacctatcataggccttagacatatcaagtttgag

SEQ ID NO: 249230 - DNA, 1206 bp, Cannabis indica
gaacaaagtgaatctttaaaaaaaaaagcaatgaatttagtacaattgtgaggaacaagcctcgattggtgtcacaaggctatacacatgtagaaggtattgactttaatgaaaattttactccagtagcaagaatagaatctattcgtttgctattgtatattacttgtgttattgatatcatgttatatcaaatggatgtgaagtcgacctttttaaatgtgattttaagtgaggaagtatatgttgagcaaccaaagggatttgaagatccttattttccacaccatgtatacaaattagaaaaagctttgtatggtctgaaacaggctcctcgtgtatggtatagaaggttaactcaattattaatttctcatgattaccaaagaggtagtgtagacaagactcttttcatcaaacacatagaatcatattttatgattgctcaaatatatgttgatgatatagtttctggttcttcatctaaccatgaagtacaggttgttaattaaatgaaaatgaatttaagatgagtatggttggtgaacttacattctttttgtggctttaattcagacagatggaaggaggaacattcgtgtctcaaagtaagtatgctaagaatcttgtcaaaaagtttggccttgaatcggctaaacaggtaagtactccaatgagcaccacttggaaattgacaaaagatgaacatggagtaaaagtagaccctactctttatcatagaatgattggtagtttattttatttaactgctagtcgtcctgatattagttatagtatgggagtttgtgctcattatcaaagtaatcctatggaatctcatgttgtactattaaaaggattattagatatgttaatagtactcttgatttttgaatatggtattctaaagacactaattctagcttggcttgctttagtgatgcagattgggcaggtaatgcagatgattgtaaaagtactagtggaggttgtttctttcttggaaataatttggtttcttggcataatagtaagaaacaaaattctattttcttgtctattgctaaggctgagtacatagctgctagtagttgttgtcctaaattgttatggttaaaaaaaatgttgaatgattatgggttggaattgggtattttaataatttctttataataatactagcaccataaatatttccaaaaatca

SEQ ID NO: 249231 - DNA, 1211 bp, Cannabis indica
atcggatgtattgggtacacattggactagaccgatattgatagtagaaaagatatcaaaaacttattgtcttatcttttctaagtcaataccacttagttgattttagatcaatagatcttaatcctgagatggttaggttataaattaactgtattattgtgttctttgacttgttcgttaaaggtgaccaattgaattagcacaatacttacatcttggaaacatgatagtgtaattgagtaggagccctaatcatagatattgaatctatagcgtcaataactatataaaaatgaaatgatgatttcctttgaaattggcttaacagacataaatggaagaactcttattttagtaattacattagtttactgaaatatcatttataggaagataagtgttttgaggataaaatacattaaatggtcgaacaataaatttgtccctactcgatgtaaatcatctatcgaggatttttgattatttagatggaaacaatagataattcatagcgtatctatatttggtttatatatagagcattctatgtaatcaacagtgcaatttagtatctatagtagagtcaggaagaattaataagttaggaaatttacttggtaaatcttagatctacttatttaaagcttggttacataggcccatggtctccacattgtcttggataatatcatcttgtagactcaactaattaatttaataagtcaattagaattcaaaaatagactatgtcttatgtgagaatttttaccaagtttgggcattttttagaagaaaagagaaatagacgtttatttgttttttagtacaatttgtgggtctaattaataaacatatttaaattgtattttatttgataattatttataattattaaaataaaattggtatttaaataattagaagagataagtggtaaaataggtattatctcgatttttgcctacttaacgtggcatgtttacgtggacaatattagtgccatgtggcattacagctcaccgacaaggaggtcaagtcagtaccttagccaacagggatcccaacagtcaaacagaatgataagtgacagaccagccaccacaagggggctggctggccagcttcaggacagcacaaggccggccaacttgctcccaacaggtgcctagccgacaagaattagatgtggcaggattcttgtgcacagt

SEQ ID NO: 249232 - DNA, 1123 bp, Cannabis indica
gactggataactgctttgataagaatctcacgccctgccatagagaataattttgatttccatccatgaagcttcttctagatcctatctcgaatggagccaaacaaccttgacttactatgtctcgcaaaacaaggaaggcctaaataaatctcatgacactcaacaccattaactcccaataaatcaatcaaactttcttgatcagaactcaaaacattggggttaaaaacacaatgcagacttgtcaaagtttactagctgacccgaggccgctccataccaactcaaaagttgtcaaaatctcacacaacacacttcataagccttgagaaagaacaaactatcattagcgaacaataggtgtgaaataacagggccgccccgacctagggctggcaaaacaggtcaaacacgataacacgactcgaaactcgcacgagagttagcaagtttggatttgccttaaatgggttcgggtcgtgttcaggttgacttgtctaacccgtttaataaacgattcgtgttcgggttgacatggctaacacgatattgacccattaatgatctatttaaaattattttagtactttaatgtgtcataaatagattataaacgtgttattggttgacatgtttaaacaaaatatgcttataaacgggttacacgggtcgtgtcgtgtcaaccagtttataaacgggtcgtgttcaggttttattttttaacacggttattaaacgggtcgtatttgggtcaagcatgtacctgttatacatgggtctcaacacaacacgaacatgacccgcaaacacgaattgccacccctaccccaaccacaaggaagcctaaacaacaacttgtttttacaatcccttctaaccaagctccaaaaggccctcaacacaaagtaaaaaaagataaggggacataggatcaccttgtctaagcccacgttgaggagtgattgagccaatgacctcaccattcaacaaaatagagtactcttcagaagagatgcaatcaagaatcttacagatccaaacaccgtgaaatctgagcttcaccatcatctgctccaagaaacaccactcgacccgatcatatgttttgaacatatcaagt

SEQ ID NO: 249233 - DNA, 1110 bp, Cannabis indica
ttaaaggaaagtaggtagtagacatatataactgttaacatacctggttcatctcatttgatcagatcctgattttggactagtttccatttttgtaaagttcttatgattcttttgtttaatttagaaaaaagctagctaatttttataccactttcaacaaagctagagcttaacttagaacattgtcctattcacactgaatggttatggattaagatattgtttccaaatggaaggtggataatctgtaactcaaattttgcattaaattattatcagatcgttggaacacctggaagttgaaacatactttgaccttggtcatagtaagcttatcaagatattattatctaggtaattgtttagaatctccccattgaaacttaactttgatttattctgtgtggaagtttggctttccaattaagcaaaaataaaaataaaaaaattctatatattgaaaatgttgttccccaaagtttttaagatttttttctgaaaaaacaaatcctgcatcgtttacaaagtaacatgtaaagcaccagcctttgaccttagatgaaagctgcatggtaaatgtgccttccaaaatttgagcatctgtatggtttgattccataagactaagttcatgccagtgacacacatataatgcataataagcttatctcgacatagatatggcccaaatcaaatttcatttacttatttatattctctcatggaaaagaactctgtttttcaatttttgaatacttttaactttactagttgttctggtatcgttggctgccttttttcattttttagaatcagatttttatcattgttttttttatttatttattttaagttatttgattcatattttcaaaccctcttctctctattttatttaaaagattaacttagttgcatagtatatgcattaatgtcattgctcagccctatgaatattgttgtcaattgcattttattcagctgagaagaataaaggaatttttcattgattggatggaaataaatatgccaaatgttacttgctaagataagtaaaaatgacagtaaaaatgacagtttgatctgcctaaatatttaaccatacta

SEQ ID NO: 249234 - DNA, 663 bp, Cannabis indica
ttcataacacatcacactttagattatttaaagattctcaacgaaatcgaaacattaatcacaacaatagttagtcgatgcaaattatgagacaatttgatctaccgttgatctcatcacgaaaaatctaaatatttagaccatataaagtttatcaaggattcttaatctaacatatattatcaaataacgacttatttttgtctccaaaatagatcagaatcataaaatatgagcaatgtactatatgaagtaacagtataaacatattattattcccactattttctcatatattgttgactaataataatgtttcgaattgaccattttcagagttacagtaatcattattgatgtcctacctcaaaatagatttaatcaattgaactcaggtgtccatgttagttaccttctcaaggcttattgttcaataatggtacaaaataaataaattcattattagagattagctatagactttaattcaccttaatttgacaatcaaatagtttattcttaacataaacatgttggaaattattttatcatgattttaatttattattcatgtatattgattataaattataatcttacattctaaatatgaataatcttataataataatcaataaatatatatatataaagttaagaaaa

SEQ ID NO: 249235 - DNA, 695 bp, Cannabis indica
ggcatatgaggaccacgaggggaatcatatgtctccatgagttggaatactcatggacactatcgggccgacccagtagtgcatttaagaatgctgtcagaggttagcgggtacatttttattggcttttctcgtatgccgcttgcacaggacgtggcctaaacctccaagagacattgtggtgcaccttgggcacgagtctcaacacgagatgaaacgggtagttattcgtgggctagtttgcatgcgcacataggatggatacaccatgctgaaagagacagaggtctaacgtatgctactagtttggtggcttgtctcgaggacctgccaacatgcgtaggccatggtgccttaagaactggaccatggacgtatgagagtccttagtcgatgagggagacggttcggacagtatcgaatggggcacgattagaagcattgtcacgtctgcttagtgttggtatcttgctgcacatgctaccttggtcacgaatgactagctgagcgtcgatgttgggatttttcttatcatagtgagaacctatgaaaagtacgagtatcttggccagagcgtctcgatgcatggatgcactcatggatgcttgcgagcatgacttagtgggagttgttcgagagacggaagtatgcacgaggcacacggtcgcgcgaaaaatgagctcattgttactcgg

SEQ ID NO: 249236 - DNA, 1133 bp, Cannabis indica
tatttaaatatccaaacaaaatatacaagccttgatatgaaagcctcgaaaatataattatttaagttgagtatatgtgtaaatatagccagattaaatgttgcattcatgtattctctgttgttttaatatcacaagttagctattaaagtgcacgagacaaataggtaagtagatgttacatgagagagaggaagagagtttttgaaacaaacctttactgttagttgattttgaattctttgcactgttaaatcctgacgaatggacttcaactgatcacacttatacaggtaattcttttgagaattttgaaccataagcagagctttttctagtacttcttccggtcttacctgtgagggcaaaaaggatcaaaagctaattataaatacatgaaaagcaacagttaacaaaccaaccaaatgagataataatattacagtagctggatcaggggcagaagtaagccgcagataacgtttctcaatttcctggcatgtccccttgacagtaaaagaatcccagtcaatgtcttcaacggccctgctgccatcatcttcaaaattattgctaagcgccatcacagttgcccttctagaatataaatctctagacacagcaccttttgatttgaagtgatgaaattctgctccatttccttgccgtttttcaaaacgcttggaacgactttcacgtctccttctttcctctggtgaatttgccagtgccactgtacccgtgtaatattctgttaaactttgttccttgtcactatcactagatgcatcaccattgccagcagcaccaaaattctcaatgagacgctgcctttttcctggcttttgggtgattttgtttgtccctttttgctccactgaagaaaatcttgcgtcagttaaatttccatccttgctcccagtattcatcattaaggtctgcacaaattaaaactattacagtctgaaacaaaaaaaacttctatcttctcctttgtcccaaaaattaagttatttagcaatttgacaatctggtgttacaacataatgctacaaatcatagcaaagtttaacattaaattctaaagaactaattcaatctttgtatcgtaataaacattttgtatttagtat

SEQ ID NO: 249237 - DNA, 629 bp, Cannabis indica
agcttagcaattagtttaatttcgtttttgaattcatcagctccttgtcctgaacacattaatagtctcttcacagcgatttatttacctccgtctagcataccctaatatgtcatgacaaagataaatatttcgctatccaaattgggaaaagaaaatgttctaaacatgttaatgtgaacttactttgtatacaggtccaaaaccaccctctccaagcttattagcctctgaaaaattatcagtggcaacactaattgtatgtagatcgaaaaatggaagctccaagtcgtcgtcttggcttttgtttctctctaaaaacaaatgaaaaacagaacatacaatatgtttaaagacaatcaaacacagcaacatacacggttcggtcaccaaatcacgttcactaatcaaaaagtacgacgagaaaatcctctcgaaactcactctttacaacctctagctccttttgtactcaggtttgtcattgtttcaagatttatgtatgttttatggacggatgataaaacataatttgtaaccacggtttttctctgccataagtgaggctcctgaataaagttttgtaggaagtcagtctaagataaatgacctctgtctcttaaaaaaat

SEQ ID NO: 249238 - DNA, 2107 bp, Cannabis indica
ataactaatcagattgtaaagggttatatttagggcacaaaacccaacagataaatgaccagtttggtcaaaatctatatttctttcaaaaaaaaaatgttgaccacattggtactagctaggaagaaccatttaaagtttagccaaaactttgtgttaaaatctaaatttatgttgctaatgcagatttgagggatgacaaacagtatctaattgatcatcctggtgctattccaatcatatcagcacaggcaagtcactctctcttacattaaaagagacaagataataagaaaagatatagagagaaaaggaagaatctttctcttttttttaatatttttttccttaaaaaaattattttatttctaataccatggagtagatgatagcttatggttcaatattgttgcagggtgaagatctaaagaaggcaatagtagatttgaatgaaccataactatgattaatgatcacagttcatagtagcaataacatatattaccttaataaatttgttatgtatttttataatgaataaacacgtttattattttatgtagaataatagtagtttttaataatattcaattaacaaattattttaatttattgtaaataatatttttattatgcttctaaattctttttgttgatttttagtattttttttttaattttttcaattcccttaagtctcagttttaaactgacactaaaaggtgtttaagtgtcggttataaaatgacacagaaactcaatggtttcggttgtaaaccgacactaaaagaaaaaacatatatgtatactttaagtgttagttataagacgacaccaaaactcaatagtgtcgatttataaccgacaccaaaaatttgactttttgtcattgtagaataggtgtcgattctatgaactgacactaaaagtataagtgctagtttaaaactgacaccaaaagtacaatttgtagtagtggaacttaataggaaccaaattcgctctatcacttacattactacttgcaagtcgagctaatgcgtcagcagtcgtgttttctccccttaaaatttgtgtgagaccgtagcttttgaactgtgcgagcagatcgtgtattttgctcaaatatgctatcatcttttctctgtgagccttgtattctcaagatttgtgatttaccacaagctgtgaatcactgcagatttcaatatgttcggctttcatctccgggcaagttttactccggcgatcaaagcttcatatttggcatggttatcggatgctttaaatccaaacttgactgcagcgtgcaagtgttggccccaggtgtgacaagggaaattcttgcaccggatagttctgtagtcgacccatccacatgtagtttccaagtcggcttgtcttcactgtaacttggctgaggtatttgtactggctcggggttgccttttgatatgctttcttccttgcctgtgcattctactacaaattttgctaaggcctgacctttgattgttgttcggggttgaaaagtaatgtcatactgacccagttctaccgcccacttgagtaattgtgtagaggcatccgacttttgtaatatttggcgtaatggttggtctatgtacacccgaacaggatgagcttgaaaatagggccataactttcttgttgctagaatcagatagtaagtgagtttctctatcaatgggtatcagcctttggccttaacaagtctcttacaaatgtaatagaccggatgttgtatattgttttcctctcagatcagcacgacaattacatcatgctccgtgacagccaagcatatgccaagttcttctccgtctataggttttgagcgtacgggaggatttgcaatttacatttttagctcttgaaaagctttttcacattcctctgtccactcaaattgcttgtttccctacaggacgttgaagaatggaacacacttgtctgttgattttgaaacaaatctactgagtgcggcgatccgaccagtcaaactttgtacttccttggttcttattggtgatgtcatatccaagagggcttgaatcttacccaagcttactccaaaggagcactt

SEQ ID NO: 249239 - DNA, 1039 bp, Cannabis indica
tagttcataattatcctactactcttacaaacaagtttaacatgagaatatcaattactattatcaactttgctacccacacaatgataccacaacccctttagattttttatattaatagcactatatttacatacatagatatacacctatatatttacatgtattatttttattgtgtatgcactaggttaaattattttatcattcaatattaaagcttaaaatagtcatctcaacccaatgaacccaacccaacccatccttaaattattgtacaaagtagggttgggttgtataatacaaaaaattaaaacagtttatagctacttcaaaccgcaatcattaggttggcccattaaaacacctctaacccagccaaccagcccatgtgcacccctacggctagcaccatataaagatgacgccttgtgattggtataattcataaaaattaatgtattaaattatataaaactcaatacttaattgttcaaatagcgatatgacactttgaaatgtctcttttagcatttctttagtaattaatagtcagtggattaatatatgagcacttaacactatttagaagtgttgttttgtgattggttaactatactccataaaaattattattttaaattatattatatgatactcaatacttaaatgcactaataataatattacatttgaggttgttagggcccttttagcatctcttctttgagcttattattgcacactagtagtgtctagcaacttctatagatgacaccgagcattgctattaggcactagtggtgcctagcaccttctcgacatgtcgcgttgcgattgcgctagtgatactccctaaaagctatgatattaaattatatgggacccgatactaattggatcaataacgatattgacacataggagggtgctaggcaccactggtgccctttagcatttttcagatgacaccctatgattggtttaaaaaaaaaacttatttagttatataaaattcgttatttaattacaccaatgt

SEQ ID NO: 249240 - DNA, 621 bp, Cannabis indica
atcaaggcaagttatcgcctatgaatgtgcatggagatgatctaaactctagcttgtgcttgttatatggtcaaatatttggaaaacaagtacaacctaacactttgagagtagaatagcctggtgtgatattgaacatcccttcaataggggattttagagagagaacaagtataggaagtctactatgttgagtaggagtatgtgaaattttttaaggggcagcaacctttgctttctttttaggaggagcacgatcacgtttgacagctgagagcaaaattcgagtcatcgtcttcaacaacaggacgtttcctcttattcctattagctatagattttaaactcatttttgaatttttctttggcacagggaaaggggtggataaagaacgagtaataactatatttatatatagattaagagcaataaaaagagaggaaaaatagatatgtaaatcggttaatgtgagttaaaaaaaatggaagaaaagaaagaaaaggaaaaacgggttggattaatgaacaatctaatatctaaatgggttggattatacatataagcacatgtcgattaattgattggcaatcataatagtaatctaatatctaagcattttc

SEQ ID NO: 249241 - DNA, 2175 bp, Cannabis indica
ggataacattttccccccaagttcctattcgaaaatctggtcagatagggactttctagctctcgtcttgtttgtattagtctctgttgatcagccttgtctagctaagtgttagctttttgcctggcatgcttttggatttttgatcttctctctctataaacgtctcatcttctcttcttgggtatctctttttgtacctgccattaacaagtttcaagctttttaagcttttggaaacttttttattctcatcttagtttgcaatctctttggtataatgatcctcatgatagttttacaatgtttaatgtgcgaatttttgataaaaaaatatttgatttcccccttcgctatgatttttgactctttgagtcataggaatacaaggcacatatttgagttttgaaagaaaaacacacattaggcttcaaaacttaccttggccgacatgggaggtctttcttgagacctggccggccctaaggcttgatcatgggagttggctagctttaggattttaccctataaagctagtttgttcatgcttgggtttgggaccctagccgaacctttcaaggcttgagaaccctggtcagcagggtcttggttccaagtggtagccagttttctgtcctcttttgacattggcaagaatctggctctgtaggcttatacacccttagtctcatatgtggtttccttggaaactctatatgaaactcaatggtgagcctattatagttgaatattcaacttaagacttaacatggcttagaacctataaggaactctaccttagtcatagcttggtatgtggcctctataggagctctatctgggtctttttctggctatatatggttcttgcatggcctttgcctcatgcatgtgaactgatttaatatctggctttaaggctttcatgttcttgctttggcctataggccctctattttttaacactactattatctagccttaatgtgatctatgacgaacatatgatcgtcctacctttcttcttatagccttgatatgtaagggtccagatttactttgtcaagccaaagtatgcctgcacgacttacaggcaggtttagtagattattctaagcattaaaatttctctgcataaattctttgtgctagtttgatgcattgtacggtatgggtgccccccaagcgaccatgcaagcatgtctcttcgtcacttgctattcaccaagtttcacaaacttggcatgggttcttccttagggtgctatccatagtacgcatgtggaactaaaagagtaactttaagaagttaatcttctaagcaagtagtttagacacagtcggtcttatgtgtaacaaaagcttagagcttagtgtttgcttttgaaataacatagtggctacccctacacggcttagcaaagtagagcccccgttgaagaacggtgggagaccaggcctagaaggttgtgggtactagcgcttttatgggttcatgcacgatgaaatgttagaggaacttaattgacaagttggctagtgagagtacttaccgagatgtttcctattttagtgtttgggtaaaagttctgacttgaagttctcgtcatactcaccagacttgtatgcacctttatttttatcttataacatggtgcaaaccttctcagtttggttcgaacatgcttactataaggatctttgttgtcaaggaatattcttcagggagtaattctcttgtgaagtatttctttcctcgatctatttgttgatcggccaggtaactctttataggtagccattctgctctgagttggcttggtctcttcttctttccttttgtcaatcgatcctgttagcaggatgttgtgtacctcttagtcactgaagaccagaagtatgagagcagaatgttggtggatcgggttagctagggcaagaccaggcgtccagccacattaagagagcattgcctcggttgttggatgaggacatggcttaccagcatctgaaggtaatggtcggccagattgtggattctacggtcgaccagcttgttgaggacatagtgtgtgagccttctaaaggcccaatgtaacgtccccgcttcaagcctccattgggcccttacacccacggaatgaatgactcttatacacgagtatgtcactctgg

SEQ ID NO: 249242 - DNA, 803 bp, Cannabis indica
agaagtgtttaaacaactggagttccaagctttttggtcggttcttctgggccaattggagctggaggatttgttgtttgaacaggaggtgcattagcagtctgaccggaggttgaagaagccgcctcagtttcgccataggccacttgggacacacagaagtcaaggtagatgtcattagcatcacccaagtagtcaaacttggcgtgaggattagccttccaaaagtcaaagaagagcccaagacccgctgtctccaaggcattaaccttctctttcagctttgtcacctcagccataagctcctcctcctccttagcttcattctcctccttcacctaatgaagaattgctcgaagaggagtcctctcatcctgaagactgttcacttcagcagataaggtctcgatggtctcctcaagacggtcagaaaccgtgagatccttagtcagctcagttatcttcttctggatggcaaacagattcttgttggcttcacccaactcctaccgaacagctccgagttctgtcctggcgtcttcagcatcctacctcgccaagtccacctccgccctcatggtatcggacagagccgtgttcctggaagcggcagacttagccctggagtaagtgttggccaacttcagatcggcctacacaaaggaaaaactttagcattcgagctaagtatagaagattaaaggaaatgtccagaaagactaacctggtgaactccttcaagaatccgccaccaacaagtccaaagaagagtcattgtgtgcaccagccagttgctcactgac

SEQ ID NO: 249243 - DNA, 528 bp, Cannabis indica
gacacgcagaaaatgaatgcaaaatgtttcagtgacacgtgtgaagtgtcactaaaaattgtctttccagtcaccctcattagtgacgcgctttgaagtgtcactaaaaatttttagagttactcaatgtgtgtcactaaaacccaattttccagtagtgtaactttaaccctacaattagggcttcatattcagcttcattgttagaagctgggaatgcaaaacgcaggggcgcctggagctggagtccgtttggcgatatcattactattccagcaccggattcgctttcgttcgacgccccatctatgaagactttccatgctggggttcacggtactggcacgcttgaagtagcttttgcttcattacactctgttatgaagtctactaaggcctatccttttatggaaatgcgtggtacatagtgtatgtcgaactagctcaattccatggcccatttgaggagccttcctgacgcttccggcttttgtaagactcaccgaagcgggtgatttgttagtacct

SEQ ID NO: 249244 - DNA, 521 bp, Cannabis indica
tcccagaaaccccaataaacagtccaaaacgaaatcaaaaatcaaaattttgccacactaaagcagagccttaccgaaataacgaaaaaattgtgaaaatcgtgcatacctgaatcgatgaaaagtgaagaatcgcggcggagaggcgacgattcacggcggagaagctgtgaagatcgaagagaatagatgagacgaggcaaaggggcttaaagggtttagaatattacaaatgaagtcgtgcccaaactacgtcgttttgtctataataaatacatttctttttcgagttttgtttatatttaaggttttttttaattttattagtaaaactttttaaactagaaaattattaacaaatttaagaatttgaattattaatgtgtgcactattttttacacgtgatatgtctatattaatatacttaatattattatttaaaaattataaaaagaaataccaacgagtttcgactttagaagtctgatatcaatagagcaaagagtggaagtcggagcaa

SEQ ID NO: 249245 - DNA, 838 bp, Cannabis indica
tttattattttattatataaatatttaaaagaattaaatattataagaaaaaaattattgtaatttataatataataaataatatttataaatatattaatatgtataaaattatttaaataaattagataacaaatgtcatacctattttagtaattatatatttgacaactatttaatcatttagcttaccaaacacttatatactactttttcaactcacagctgttttaaaattatatttaccagacactcagtagctttttctcacagcacagctacagctgctttttctcgcagcacagctacaactgctttttcccacagcacagctgtgccaaactgaccctaagtcacaggagaaatcttcagaaacatcacatatatcttggtatatgcgagatttgaatatttccttcttggtcctacgtcatgcgaggcgtaataatgcaacttgactctgtcaaggtcacatcatctcgctgagtttgggtcaggtgaggtttatccttgagtggtgtccttctgacagctcagcaatcctcaaggagagtgagtccacgtgtcatcttttacgggagcctaatctcaagtttcttggtataatttttcaccctataataaaaatctagtgtgcaccattgaaaatttttatggatcaaagcaattaattgaagtaaaataaaaacttgcgcgtaaataaaaacttactttatatgcatgcttggtaagatctttcaaaagataattaattattcttttaagacttgtgaataattaattaaaatatgatcagattttctctcgaggtaaaggacaaggtcctaaaaccatgcaa

SEQ ID NO: 249246 - DNA, 710 bp, Cannabis indica
tgctctgacagggagtgccgaggatgcaccactaaaggatcttatgtcgttctagaactttactattccatagtttattccatagcgaaggggccacctcacaatggctggctctttctagagcttgcgcaaggtaagcagatttactcgtaaacctctcattagactctaggatccaaccccatctatccacgtcctagcccgaaggattaccccctttcaaaatagcagagactgtgtcattatcgaacaacctttttagctttgaaatgtcccatgagctagaatctatgaggagatcggccacacagttcaatgggaggtttgcgtagctaatataattatttttaatattataataaaaaatatttattaatataaaaaataatcattcaaaaataatgctaattagtaataataataaaattacattatttaatttcatgaattattatttagagttatttattaaaattttaaattttatactattaatatatgtatatagaattttaaattactttgttaaaaaatattattcatatataatataaagtaaagcacaaaataagtttaggtggcatcttagatttttttttattctatttttaaaattttatgaattttttctattttgtttagaaaataactacaaaaatacatggaactaaatgtcccagtttataaatgatgtaggcatcatccatgta

SEQ ID NO: 249247 - DNA, 1187 bp, Cannabis indica
ccgacctgatccagattatgtacggatctgccccgccccgccccgctggatcagatactcggatcgaattagatctgaccctccttatacggatcggatcatatccgacccaactatttttttttaaagaattttaaaattaacttataattttatatttattttaattttatattaatgggtctgggtcccgggttcgggtcccgggtcctcagtcccagtccgagtctgggtctgggtctgagtccaggtcccaagggatctgaatcttgaatcaagttttttttaaaataaattgaaatcgggtcgaatcagatccgatccagaaaaaaattaggcaggacggagcggatctgatccaagatccaataagtatctgaatgtttttaatcagaggtgatccgtcaggccggagctccaacccgctccaactaaatagatctttttgacatgcctaattaacaatgtgagactctctaacatggagttctaatacatattttagctcatttttatatataaaaaaaactctaataatagtgtataaaatggtctaaatttaatataaaatataagataatcttccatggaagatataaaagttgagttattttgtaatatttttatattaatttttactattgtgctctaatacataattataaatcttaatgtaaaatttaatgtcttttaatgttcatttaataatttattaaaaaaataaaataatactaataatataaagataaatataaaatttaataataataataatataagtcatttttttgtaaaggagtttgttacctaaaattaataattaaatattaaaattaatataatggtaaatataaaatcataacatgtattgtgatgcaaattttatatcatgctatgttgtgattcaaatttcaatcactttttgttatgtgatatatttacatcacaatttagcacactattaggataaaattttaacaaagtgagctatatttttattttgcatttgcatcactcatttgtatcatttgtatctctattaaaaatgctctaatatatgaactaaattttacaccataatagatattacttttttatatactcttttactctttattaatgtaattaataattatttacatttttatttatatatttaatagaatttttatacactttcaattaaa

SEQ ID NO: 249248 - DNA, 463 bp, Cannabis indica
gaagctgatattgcctctttatctcaggaagtgtccagcctcaaggacgaaagagaaggcctccggacccttcttcgtaggttggagaatgaaaagaaagccaagacgaggagcttgtggttgaggttcagaagcataagttggaggctgagtaacagaagttcgaagtggtgaggctcggagggaaggtgaatgccttagagacagctagtctcgagattttttatgaatttcggaaggcaaatcccaaagaaaacattgattacttgggcaattccaaagacatgtttctcgactactatgctgctcaggtgacctacggggaatccgaggtgaccacttccacctctcccacaaatcaaagttttgaagtgcctcgtgctcagactaatgatcctccagctccttctgacccatacaaggagtctggaactccagccgtttgaatgcttcccttttctat

SEQ ID NO: 249249 - DNA, 807 bp, Cannabis indica
cacttgataaaccattaaagatattctcgatgtggtcttgagcaaatagaggatgacctatagaagctaaggtattgacaaggctcttgatcttgagtaggaaatcactcaaagatcctttcatgcgcagattttgaagctataagttctgtatttacctacatttgcacgattcagtgaaatgtagtattcattgagatgaagccaaatttgtgcagcagtatcagatcccaccattcgagttaagattttctcagacatggaagacagcagccaagaaactaggatactgtcttattgatcctagtcttcaaattctggactgactcaattgagccttcgatcttcattggtgagaaatttaggtggagctagatctggatcaagatgcttctggagtcgactgcctttgattgctgcatagacttggtaacgccatggcaggtagttgtgctcatcttttcgaacagaaagggaatgagagaatgtaaatggagtctagagatgttttaggaagagtgttgttggctgtgtgagaaaaacctccttgagcagccatgaacgattttgcaggaactaagaggaataaagagagaagagaaagagcttggctctgataccattgtgaacaaaggaaataaatgaatctcttgtactgatagagaaaaggatttcagagtttatatacacaagttttaacaactaacaaccaacaatcaagctaactaacacacagttacaacaagaaaatttagttaaatacttaactaacttaactgacaaaactaactcttagcaaaaaatact

SEQ ID NO: 249250 - DNA, 536 bp, Cannabis indica
tttctatgtacgagataagtttggttacatatacctctaaattttctaatttatagccattggtagttcttaatccttatttgaagaattgatatggttatatcatgatttctaagatatgatcaaatgtgaaagttttaggcttaaattccacatcaattgggagattttcttgatggtcgaagtaaggtgaattaaaacctgtccactagaacggttggagtcaactggagctcccattacacctagaagctatgtggctgttggctaggctcgatttgcaccactgggtttacccagctaagtctaccactctaacaatgaatttgttatgagttgtaaagtggtgactatttggaaatcaatataaggatgtgagaactaaattcttgtttaaagatcatatcttgttaaatgactcaattaagcttggagaaggtaactaaataaagacacccgagtttaatggatttaatccattttgaggcagggcattatgatagtgattactgaaattctcaaaatggtcaattcaa

SEQ ID NO: 249251 - DNA, 788 bp, Cannabis indica
ttatgaaacttgaataataattaagaattatcattttatggagatttatttgaattcaaaatgcattatatatgtcatatatagaattttatgttttctcatgttttgtgcccgacaatatcaaaatgcggtgtttggccattagcatcacattttagtatctttagtataacaaggcaatatagttagacatcaggaatgttgagagttatccgaggtttggaaatgaccaaaatacccttaggtggtttagttacgttttggcttagatgggggcaaaatggcttttgccctaaagagaaattttgtcttttgtcggtttactctaagttagtaatttgaattatgtcgtagtattacatagatagtatcctttaattcattttattcaaaaattcaaaaatagaaaagttaagatacacatctctctctctctctgtctctctctgtctctctctctctcctccttttagctcaagagaaacccagaagaaaaccatgtgttctctctagttcttcgacaaattcttgaagatttcaatcttaagaccagtctaaaaccttgaggtaaactttctccatgtgttcttgatgatttcttaagttttaggttaggttttgttgagatttcccttggttttgggtctgtggtgtaagttgagtttatgttttggacgaattacatggttgtttagactagaattgggagaattaagtttaggaactcaattttcactctttaatggtgaatttatgattttgaggtaatactaagttttgattgcttg

SEQ ID NO: 249252 - DNA, 914 bp, Cannabis indica
gtttttgacactgaacattagaccagctggacaccaaatccttttctcctgaattattttctgtcttttcatcatctacaccagtgaaattagcagatgcttaaccagttttatttggatttcctttggcatttcggtttggaaattttccatgaagtttatgcccaggtggatatccaatcaatctaaaacaacgatcgatagtgtgtccattcattccacaatgtgtgcaattgaactttgatcaaaatggttgaactgcaccaacaaattgtccagcaccagtagcatttgaggaattttcagtatcactggaagcaatggatccaacaggtccagaagttaaactcctttgcctttcttcttgaacaactgaggcatatgctttgtttacagtaggaagaggatctctcatcaatatttgtgatctcacattgctgaaagaatcatttaacccaaccaagaactcaagaagtcgatcctcctcctgctgttcgagaatgaccttcatagcaccacaattacaaacaggttgtggtctaagttcacgaatctgatcccacaacgatttcaatcttgtaaaatagctagtaacactgctcgaaccctgcacaagattctgcatagtcttctttgcatcgtaaattcttggagcattcttttcattaaatctttcatgtaactcagaccaaatctcagctgcattatcaagatacataatgctgtcagcaatttcagcagagatcgcatgaagtatccaagagattacagtgctgttacatcgacaccaagcatcaaaatcctcatgttcctcatctggttgtggaatcttcccattaacaaacttcattttgtttctagcaacaagagcaatcatcatagatcttctccaggtactgtaattttcactccct

SEQ ID NO: 249253 - DNA, 776 bp, Cannabis indica
ttgatatctgatcgttcttttatccattctcaattacaaaggacaaaactctctatttcagaattcatcttccaagaaaagttcccgtggctcaacaaagatatcaaaattgtgacgtacatttctattgacgaagaaggctttcaattcaaacagataatatttgattttctccgtgaggatattgtggttttgtcatcgtgtcagggtctcatttgttgcaggagttgcttccctactcaagacctaacaatctacatttgcaatccattaaacaacgaaatgaccaaatggagttgggattcacttggaaatgacagcattatatctttagcttttgatacatctcagaatcacatacacatttttacagaattgaagtgagtcacagttgaggcatttgagattggagaagaagaagaagaagagaagtgtttgtaaataagacaaacgatttttaacgtggttgaggagttaactagccttagtccatgagtcgatgttattcaataaacttttacttgtaaatgccttaggaaaatacacggaatgtctgttctcatgtttgcctgatccaatccaatccgtacgatccagtccaatctaatcctcaaaatatggatatctgtatatgcgcgaattggattgaattgaaaattataaaatccgcacttgtgtgaattagatattgtttgacctcaaaaagtaactgatccaatccagtccgcacttaattatatatatttttaaaaaattataatatatataatatatat

SEQ ID NO: 249254 - DNA, 699 bp, Cannabis indica
atttgagactaattctaatactttttattatttattttgtcaaatttttgtagtcacacaatgtattagttgcagaattgtagagagaaatagatagtgacatctatgttcataattgattgttaattgtttatgaaaagtacagagtatgagtttatagagctcaagtacaagactcaatacagttactagtaacctgtaatcaactgattcacttaactaacttgtctaactataactaactcaggataccttaactaattaactaactaacaataacttagttttgatactctctctctctctttcaagatgataatatatatatatctatcaatcttgtgtttaatagccttgaattggttaggaagaagaacttttatcatcatgtttgcaagttggtctttggaggaaataagagatgttttgatgagtctcttttgctgttggagtattgttttaccaggatctagatttactaccatgtatgttatttaacatcctaaatatgaatttctaaaacaatgtaaatttaaacacatataaagtttaagaaaccttacattggttgcagcggaattaaatgtctcattccgcttagatctctaacactggtattctttcagtagcagagtatcaccaagatctgagtccgattctccttcacttgaattggattcttcacagtcttacacacta

SEQ ID NO: 249255 - DNA, 1011 bp, Cannabis indica
agaattttaactgcaaaaccatataaaaaaacttttgtgttcatacctttctttttctgtttttattctgtgcaaatctatcactgttagggctcaaatacagttaacaaaaatcggcgttaacacttagatatgcctatttcttcacatgacaataagaaatggtatgacctcttggttacaataggtgcatgtaaagtgaggtagactagatgattttacaaaaatccaacgagactgcatttctcaccttatatttgtcgtgtggctacagtgcacagcttatatgtcgtgccactgtagcaacgacattcacctcctttttttttcttatgtatttatattattatttatatttataaaattaatattttatttatgaaattaagaatttaatttaagaaaattctacaatttacctctttttttggtgtactaatgtactcttatctatttcagtattcaaaaaaattttttagtttaatttttttttcatggtcgtgtacattataattttctaagatctcctgtaaaattttgtaacagccagaaaaatttaacacgctagatttaaggttcaaactgactgttacatgcgtgactcttttatttagagaggtgcattataaaagcattttttgatctattgtgtgtaaattgaatgtaagtattataaattattgttatttttaattataatttaaataaaaattattacatttttgtcacagtaaaaataaaaatttaaacacacattaaatttaatgtaatttttttattatgaatgtaatgtgtcgtttttagtaatataatatttatgttagtgcaatataatattttaatttatcgagtttcattaattttatagaattattattattaaattaattagaaaatttatttaaattataatttagatataataattgtgatgattttagttaattaagataatagtaattttttttattttattaaaaaattaatataattataagaaatattttctca

SEQ ID NO: 249256 - DNA, 1521 bp, Cannabis indica
aagggggctgctcattgaaggtcacacttttgatttctcatggaatgattggtccagagctagctgaggcaatgagacttcgagaagctcttagttggatcaaagattggggctgacagaatgtttgtgtggaaacaaactatttatgcgttgtccaagctttatggagctctatttatatgatttctttgtttggtaatgtaattaatattgtaaagctttaatttctgaacttggagatataattgtctattttgttaaacgataagcgaataagatagctcataattttgctagagtctctttactctactctggttgtagtttctgtttggaatctgtttccaactgattagttagtaatagaagttgatggttaataaagttgatttttctacaaggagagagctggaacaatcatattggctcgagtgagtgattatataagtgttgagggactaagacttgctgtaattattttcttgttgttcttgagaatgatatctcttattcttagtcaataaagaatggtggcgtgttttctaactagagtaggattaagttcacattaattctcatgtgtttctgtgtctacatctataagctatttacttttatctctctgtttatatttctgatttactatatgtttgatgatttcttctttatttaaaatttatttgtttaagtatcatcttggagctaaaattacataagttaattcctacaattacaaccttcatttctgcaacaccatagtaagacagcaaagattattactaactattactaatccttcacttgtgattaatctagcatgaaatcaagatgaaaagttaagaggcaatcatataagggccctccaacttagatagtgtacgtatcaaaaactactctacaacctaattatatacatatcaaacactacagtgatgattgacgagaatgaatgttccaatgtgcatttcaaatgagtcaacttttcatcagtcatgtcaataagttgagaggcctcacagtacatttttttagagagagaacaccaaagtaattagatatgtgctgagtctctcaccctcttttcccacataatcaaatcatcacatggtctttattctcgagtcacacttggaaaaacaaccattgtttttcttacagttgaggctttgccttgtaaaaatagagaggatctcaatagtgaagagtgatatcccagttactgattatgcttggaattgttactgtcaaaagattgtcttcatttttgtacttaaaattctcagtacttaaagagtttactgagcaagacttgggttttgtactaaagtatgcaccaaacctgccaggtcttcttccctaaattcttattctacacttaaaggtatcaccaaagctgtcaacttcctcaacagctctactagagttgtacatgtttagtaatccatagctgcaaattcaatgttcttgttgtaatccatagctgcaaaaaagtaatcacattatgagaacatattcaaattt

SEQ ID NO: 249257 - DNA, 1964 bp, Cannabis indica
attttgcttaaataagctatcatcttttctcctcaagcttcatactccccaaatacatgatttactactaaatgtgagtcggtgcagacctcaatgtttccggcatgaagttctcgagcaagttttaggccggcaataagggcttcatattctgcttcattgttggatgctctaaacccaaatttgactgccccgtgtagatgttgccccccaagtgtgacaagggcaatccctgcaccgaacaattgatcgatagctgacccatctacatgtaacttctaggtgggtttgtcttcgttgttgctcgactgaggttcttgaactggctccaggttgttttttgaagtgctctcttctttgcccgtacactcaactacaaaatctgctaaggcctgccctttaattgttgtttggggttgaaacatgatttcgtactagcccaactccactgcccatttgagtcaccgtccagaggtgtcaggtttttgtaatacttggcataatagttggtcagtgtatacccaaacagggtgagcttgaaagtaaggccttagctttcttgttgctaagattaggcaataagtgagcttttctatcagtggatatcgtccttcagcttcaacgagtcttttgttggtgtaatagaccgaatgctggatatttttctcttctctaatcagtacggcacttacaacatgttctgtgacagccaggtaaatccataactcttccctatccaaaggttttgagagtacgagaggttttgcaagtttcctttttagctcttgaaaggcgttctcgcattcctccctccatcaaatttcttgtttcctcgtaggatgttgaagaaaggaacacacttttccgttgactttaaaacaaatctactgagtgcggcaatctgaccagttaaacttgggacttctttattttttgtaggtgatttcatatccaagagggcttgaattttttcaggattggcttcaatacctcgggcgttaacaataaagccaagaaacttacccgagctgactctgaaggagcactttaagggattgagtttcatttttcatttcctgaggactttgaagcattcgtccaggtcatctacatgcccccagccttcttggatttgacgagcatgtcatccacttatacttccatatttcgtctgatctagtctttgaacattttttttaccaatcttttgtatgtagctccagcattcttgagaccaaatggcatgaccttatagcagtataaacccatatctgttcggaaacttgtatgttcttggtctgatggatccattttgatttgtttataccccgaataggcatccatgaagcttaatatctcgtgtccagctgttgcatccacaagttgatctattctcgaaagtggaaaataatctttggggcacgccttgttgaggtcggtgaagtcaatacatacccgccattttttggtaggcttgggtaccagtacgggtttagctacctaggccgggtagaaagcctcgatgataaagttgttgttgcccaacttttctacctcttcttttaatgcttgggcccgttccttgtccagcagtcatcttttttgttgaacgggctgaaagtttggatcgatgtttagggcgtgtgaaattatagaatgatcgataccgaccatgtcctcatgtgaccaggcaaaagtatctaggtttgctcttagaaattttatcaaggttgattttacttcaagcaacaaaccttttccaattttgagtttcctggtcggaacacttgggtcaatttctatttcttctaattcttccaccggcccaacgtttgtgtttggctccccaagtcggggatccacatcttcgtccccgccttgggcgattccctatttgtcaatgctcttccccttgtccgaactctaaccagaggattcttcccttttggccttggttagggcaa

SEQ ID NO: 249258 - DNA, 758 bp, Cannabis indica
aaacaactaatgattttgttttcaagggaaagaaatctcaaggaggaactcacgcctaattacctagttggtaattattatgctataattaaatgggcatagatttcaatatagaacgataatacctatatagtttgtgtagcatttagaatttttatgcttaatgtcacctgtgtgtttaaatttatcacgagagtagaaaatttacatatatgttgagatttatatgtcctaactcgaatataagtttctgtaataaatccgctatcacataaaaattagaatttaggaattaaattatattaaaccatataaagtagatgcaatcgaaattaatcatcctaagctttaatcattgttaatttcaccttaattatttattttctttattttttattagaaattaaatatcttttctaatttttattgtcaccaaatataattaggaacttagttgtttggtaattaaatacagttcttgtgggatcgacctcactcttgtgagtctattacttataaatgatacatatacttgtatgttagaattaccataacaaattcaagctcaaaaagccatgaagagtcatcactaaggccaaatataggccagaactggccaagttattgggaccaaagccacgtgccgactagggtgccaagacaagattatgaacagaccaggttcttaggcttgaagccacaatccggccatgttcctaggctaaaaacatgtatcggccaggttcctaggtaaaaaa

SEQ ID NO: 249259 - DNA, 679 bp, Cannabis indica
gggaaacctcccaatcccaattgggatacacagtttcccagcacagctaaagaattcatacccattaaatcattcaacctttcataaatgtctggaaccctgcgtctgaaatgttttggagaataaaggttgtcttttgatgaatgaaattggtattggtaagtaaggtggcattggagtcaatacgaaaaaataaaataaaatatgctgacaaaatatgcatatacaataataataatatttgattgagtggaagaaagttacgaaattggttaagacttttcaccgaacatttacaacgcagaaccttgacatggatatagcgaattagcttctttttgcatggtttttcagatttttcaatgtaagataagagtgagtctgactgagtttaccattgttatatttgaaactgaaagacgttacatgaaaaagaaagaaaaagaaacacacacacccttacgtaatacgtacaaagataccgaaactaaagtttggttttttttttttttttttactttgtaaaaaaaatacttgtttttttatttgttgtatattgttggttcgtatgaagttattaatattattgaacatcaccatatgagttaaagtatacaaggcaatattatacttttacctactaaaagtaccatatattattattattctaaaaaaaagt

SEQ ID NO: 249260 - DNA, 689 bp, Cannabis indica
gattatatgcagctgaaaatacaaactaatcaaaatcaatctaatgaaatgtaattaatctatggcctctagctataaacaaaataaataataaacactaaaaagaataaaattcttcactaagttattttaattgcttataagaacattatagtttatataatggacaagaaaagtgaaaatatgagaatacatttttttattgtaaataaagtaaaggagagaagtttggacatttggaatgttgaaatgaggcattaagaaattagtgtgtcaatgttatatatgtgcaccaaggagaatgaattttcttatgtatatatgtatgacgatgggaggttgaaagaaaagagataatagaggttatttttcgaatccaacaaaatgacatcatcattgggatcctcaatatcagtgttattagaatcaatctcattccaactatggtcaacaccaacatgatatcccatatgtttcttcataacctcaggagaattaaattaaagagacttcccccccttatgtaggatcgaattcccacaaaatccttcaacaacctcctcacttctccgcgcagtcgccgcgccaccattcaatcggccggcaaatatttcgtatttctcattcccatcacgcaaccactgagagcccactaggttgtttcgccatcgtggttgagccctcatcca

SEQ ID NO: 249261 - DNA, 754 bp, Cannabis indica
ttatttttggctcatatttattctaatcattgtcttgtcttcaatggggagatgttccaattgaattgtagattattattttaattgattactattaataaaattgtatgatttattaaaaaaatgtatattctattctttttatgtacatattttctacatacattaaaataaaattaaacattctttttacacaatgttttttcttccttcaaatttgttattttttattttatttaatttaatgttagagacataaaacaaaaataatttattttattttgttgttagttatgtgaaaaaaaatatcttttaataaatattaaatagtttaatattaaaaggtaactaatttaatccacaatttgggaattggattgtatttgagttattgtgcggattgaatctaaaatataaaatttgtacattgtgttgatgcactgtaagcaaaatagtacaaattaaatttgacgaacactcctaaatttttgcacttgtgtttttgacagaaggtcatattatcatgaataatatctatatatttatataaagaaaagtaaaaaaataaattaggtggcatttatatatatatatattaattttttttttcttatttttactaatctatgagactttttcattttgtgaagaaagtttgatgataaatatttaagaaacaatctcacattattaaaaaaccattttaatatgtgtcttatatagtataaataagtaaataaataattcattttta

SEQ ID NO: 249262 - DNA, 1496 bp, Cannabis indica
cagcgagttatgaatatactctaataattctatatttaatgagttattccttttacattaaatgatataatcgttattatatctggtggtttatattccacttaattgacatgtgtcattatctgaagtgtaaccgaatttttggtataacaattgttgactgagattttcggcaactaattgaataatgtaataatgagagcttagggataattaatgtaggtagtttttacgtggttcaagtattaatgagctgtagtccatgagtctctgttaataatgagagagtatttcttacagagaatgtttctgtggtttttttttcttttttctccccctcttaatttttacgaggggtatttataacgattggtgggaagaagaaaaggagtaacttgtctttaagtggtaactatgggcatgcacaagttcccagaaagtacaaaatagggcatgcacaacctgcgtagtaggccacgtaggtgttaggtgagattagccttcatcccttcctgattgatgtgattcttcataatagagccatcactagctcccttgattgtcgtaaattgccctaagttgggtttgtgacgtcttacacgtcctcttatgggagttcccaaacattttttccatgccgtattaaatgcaaagtgactgttcaactccaaccttactagcctagagaagcccatccataccttagctctcggagaaggagataggccttttgctcatgtccaggagctagcacttcgaattgtactctttcttaaggtggtttagataagtcttcaactcatctccgagtgacgtgtccatgttagccacatgtcacacacaacgactgccacgtatattgggaataaactggagcaacaacaattaccccttaaaaatattttttaataaaaatgctttttaaatgattgtacgagtataattgtcttaacccaatttgaaaaattgtatgcttttgaattttggcagttcatgatttcgagacacatcattagtatttatttcccatcttttccaattctttcttgtttctattcgttgaaactttgttcttttactctaacggtgatcaatctcaaggtataaaattgaacagaaatcattattccaccatttctgctttccaaaaacttcaagcttttcctgcgaaaaaccatttccggtttctctaagctttgcatgccctctttgtcattgacatattttctgcgcatttcttcggatatacttttcaacctcaggaattcacagaatttatcacgtcacccatctcaacttcagttgcaaagtattttgtcgtgcgaaaacccatcttcgaacagtaagtatttcatccattttctctagtcttttctttttcctgagttatgatccttattttgtaattaattgcatctttttttactcaatttggttttagtaattttgatttaattttttgggtatttcttagggtttaatcagagtaaaactta

SEQ ID NO: 249263 - DNA, 723 bp, Cannabis indica
acctatttctcgagtagaatggttgggacaaagactggtaaaggggttggcactagaagcactaataagatgtcgagaagcctggggatgccctcaccagtgatggtgaatagaatccaggcagcggtttgcgaggttgcagttgaaaattgtgcttattttttgtcttcagagctgggttgaaagggacatctcggtctcattttagccttggcagagtgtggcttccagagaactcaaggactatgccatgtggagtagtggagtggtggagatggttgttactggcctgaatgtgtcagaacaaactctgaatacagaaaagaggtctgctctttttacctattttaggtgtgatttgcatatttataatgtgtgtgatatttataggaagtcaaagggtgctacttatggtaatgactcttctttgttgaagcaacacaatggaaagaggactgagctttttccaaaggtaggggtaatttcaatttactttgtaactaggccaaggacagttgtgtgtttgggaaaggactcaacaactttgaccttcctcaaaaaaatatgacatgtaatatttgtgaatctgacacatggttgactatggttttaacacttttgtgtcattgggctggggtgttaatgtgggttggggtgctaataagacaaatattgtgggtcggggtgttaatgagaaaaatatggagggctgtgatttgagtt

SEQ ID NO: 249264 - DNA, 571 bp, Cannabis indica
acctgaacttggacttggactcaaattagaagtcgaccctggacctcggatctagccccgagtccaaggtctgggttcgggtttggatccaggtccaggggtccaaggtccacgtccgggttcgagttcgggtccaggtcaagggtttgggtccgagtctgggtttggggtctataagtctgggtcagttctgggtctaggtctgaggtctgggattcgagtccgccacattcgagtctgtgtttgggtatgggtttgggttggggtctgggttcgggtttgagtctagatccagtccagggtttgggtccgggttcatgttcgcgtccagggtctgggaacctgggtttagtaggttttgccgtcaaaaatttggtttttgtggttaagtgttaaaaaatttaaagttcaagtggtttagccgccaatatgattccttccttttttttaaccggtttttccaaaccaaaataagtaaataataataacaattttgtatttgtagaaaacataaaaaaataaacaattaatgaagattttttcattaattgtattttctcaaaataaaaaa

SEQ ID NO: 249265 - DNA, 505 bp, Cannabis indica
agttgagaagatcaattgtttggattggttaaacttgtaaattgtaaacagtgattcttttgtccttgttctgttttggctgcaatgaaatttttactaattaaaacaaaaaaaaaatgtaaataaacaaattatttaaaggtagtgtttgtatattaatcagaacagaagtaagattttatttatatatagtaaataatctgaaagattgtacagtattacttataagtcacttaatagttttttctttttttccttgtacatgaattaactcagtatgaaatggcactatagggcaaaagccacatgactctcacacttgatgtggctaacagagaatttattaaactctatcgagcactaattaaattagtgtaaaatatgattttttttactgctacattgacttacatttaagtgaataactttacagactactcatatataattatatatagttctactttctaccggtacttttttttttatttattatcttaaataa

SEQ ID NO: 249266 - DNA, 716 bp, Cannabis indica
aattaaatctataccccagaccgcaaatggcgaaggactagtgatagaattcaattggctaggtggcctagcacataggtcgctattcgctgacacttgtcgcatttcttaacgaagctagttgcatctgcccgtaacgttggtcagtaatatccttgcctcataatttttaaagtaagggaattaccaccggcatggttgccgtaaatcccaccatgtacttctcggagtatgtagttgcgttcattcccgtcgatgcatttaagtaacggctggctaaaacttctgtgatagagtttgtcatcaaaaattacgtatcgagcggctcgatattgcagttttttagcttcggtcttgtcgccaaggagtactcctatttttaagtagtttatgattggggtcatccaggagacctttttgatcgtactgacctccatcatttcatcttgatgaatagttggatgggttaagacatcaacaagaattacatcgagtaattctgcttctctcgtcgaggccagtcgggccaagacttctgcatgagaattgtaagcatgaggtattctactaacaattatctttttaaatttgtttaataactcacaagtgtaagaaagatatttggccaaacgccctcctttggcccgatattctccgttgacttggcaaactacgatttgcgagtcattgaaggcttgaaggtattcgactttcat

SEQ ID NO: 249267 - DNA, 786 bp, Cannabis indica
attaagtattgtcttctttggtagtagggaccacctacttttcttggaaacccaaaagccaatgtgataaatgaaacttggttgttgagccatttctcgggaacccaaaagccaatgtggtaaaataaaaaaaaaatatggcacttttaaaaattaatattcatttgagctcagaaatgacattcgggctgagcccagtaacatccgaacccgaccacgcccaacccgcgcatacccgacccgaaacccgccatacccgaccacccgaaaatcgggttcgattatgcatttccaagacctgaaatctgaaaacccgaatatgactacccgaaaactcgaaaatccgacccgtgtgcagccctaatttcgtccacctcattggccatgaccatgacctcttccttggcttcggccacgaccatgacctcgtctttaattattatagtttgtggcatttatttctggaagtgccattgaaccaataggtcgtgattgatgattcttcattaatagtttattatttttctttgctacaaggagacatgtaataagttcagaatatttcttagaattacgtatcctatattgttgttgcaatgttaaatttgatgcatggaatgtagaatacgttttttccaacatttcctcttctgtgattttctacccacataattttagttgagaaacaattctgaacattgctgaattataatcattggcctttctaaagtcttgaaaaggtagaccgttccattcatcacgcgtggctggaagaacaacatcctt

SEQ ID NO: 249268 - DNA, 555 bp, Cannabis indica
ctctcctacaccaactacaagagtctctcaataataaattcagcctcaaagctctcggcccccttaaatatttccttggttttgagatagctcgatcaaccgaaggactctttttatctcaaaggaaatatactattcaacttcttgaagatattggatacatcaacagcaaacccacaaaaactcctatggatccaagattacgacttgatgatgaacaaggtgaacctctagatgatccttctccatatcgccaattaattagaagattactctacttaactttatcaagacccgacatcacctatgcggtcaataatctaagtcaattcatggctaagcctcgcactcctcaccttcaagcagtccgggacaaggcctcctatacacacctacctccacattgaatctgcgggctttttcagattctgattgggcctcttgccccactacaagaagatcaaccaccgatttttgtgtctttttaggagattgtctcatatcatggcgcaccaaaaagcaacctacaatttcaaaaagttctgctgaagtaaa

SEQ ID NO: 249269 - DNA, 831 bp, Cannabis indica
ttaagcaatggcttaattgtgaagaaaataagtttttaggtttatttgttaattaagagactttgcattgtctattcaataaataaaataaatgacaattagatttgataattaattataattattaaataaatagtgttgacatttataggattgaaattagaaaatatggtattattaaaagaagaataagtggttgaaataaactggcaaaattgtaaccagtgaagcccattagtgtggccggccactagattgtaatttttgcctattattattatttttttttaatccatatcattaaatcccaaaccctagttgaaatactataaaaggaacatgatgttctcattctcatccaacacttttcaacctaccaaacttagttttcatttgttaacaactagtggatgagagactctttctatagtaatttcgcaccttattcattgttcttcaccaattcgagccatagtgatggagtaccatgcccacacatagcaagttaagtatccaatcagagtgcagacggtggtaaccaacctgaaggagagaaagagatccaggctcagatcttgatattattctgcgacaaaaaggaacaaggattagagatctgagcggaatgagtcattattattctgctgcatcaatgtaaggttttctaaactcttatgtattctgctgcaccctagaattcatatttaaggtgttaacgaaacatacatgttagtaatttagatccgcaccatagaattcatatttagtgtgttaatgaaacatacatgttaataattttagattatgttaaaataaatctcaacaatacat

SEQ ID NO: 249270 - DNA, 549 bp, Cannabis indica
aggaggttcggtagtggtggttgggtggtcttggtgcctgggtctggttggtctcggtggtgcgaggaagaagaagagagagtgaggaagagaaagagacagagagagagaaggaaaatgaaagggagggtagtttgggtaaaaattgaaaataatagcatttaattgtataaattaattaggagtctaaattttgttagagggtgtttttttaggcattaaaaatgaaatttccctttgtatatttttctggaatataggtttctcggggaattttatatgcgtttcaaaaacttaaatatattcaattttaataatattttatttttataaaatatataacttagttctatttatttattttttaattttttcttctaacttatgttcttaaaaaatatacttatcaaacaaaaataaattatattgatatattataacgaaaagttatatgaaattttattgggaaaaataaaaaaaaattatacatgatttaaaaaaaattataaaaataaaattagtattaacataaattaatatgaaaaaaaa

SEQ ID NO: 249271 - DNA, 1162 bp, Cannabis indica
tctttggcctttcaagctttggacccttatccaggaggagttgaatctgttttatgttgttaaactttgggtaaagttagcaacgttttgttatgatttctgtgtgcttttcatgagtattttcgtgtacttggttcttgctaactttgctttgtagggatatttttaaattaaaaaatattttgattatcaaaaggggaggtcgtaaagtttttttttatatataatttagttgttaaaatattatttaatttaatatgtatttttgatgaaaaataaatattgtttttatttattctgtgtttatgactaatttatttttattaggagatatttacataaaagagaaggaattctttttatgggaatatttttataatatgtttatatgtggtaaaaattaatttgttatagcaaattgtgtgatctttttatgacaagatatgaagctatcgtgactatgatatatatgaaaacaaaataagattctgattgatctaccacatcaactagtgatgctattaattactgcatatcttgaaaaattcaagactaatttttttttaaggaatatttttaacagctctaaattgtgtttgtagttgtctcaaaagtttttatgatttataaatatagcctagagagcagtcatacgttatatctcttctattgttataattttcatactccatatttgcgagaagagtgttctttgtgtaaaaacctagagtgtttagctaggttttaattttgtaatagtgttcttttgctgttcatagaataggttgaagagttgccctgaatagagaaaggttttcatgagaacttatcaaagactcactttgagaggaagtgagtatgcacatcaaaaacctaaaggaatttcactgtttgatgtggttcaaaggtaatattagacaaggggattacaaaagattgtgacaaatctttagagggattctaaactttgtaatctttgtaattttactaattgattttattattcgaaaaaataatgataccacgtataattctcttgtgtcaatctgtaatttctacaatcattttgctactacaaatagtatttctatgtgatcaagtaactaactttttactataagtcttttccattaccattcagtaaatattagtgtagaaataa

SEQ ID NO: 249272 - DNA, 483 bp, Cannabis indica
atgacagagactagatcatccattaaagccttagagaatcagatggggctattggcgactcaaatagctactcgcccccaaggtaacttgcctagcacaacaaaggtgaacccaaaagaaaattgtaaggcaattaccttgagaagtaggaagaagtatgagggacctagtgagagaccaccagtggaagaagtgggtcaagatctacaggcacctacaccagatgagaggaagattactgagggtctgacatcaaaagaagcttctccaccagttagcattgacaaccatgtgaaaatcccttatcagcagaggctctgaaagaccaatttagacaagcagttttcaaagtttctagaggtattcaaaaagttatacattaacatcctctttacaaaagccttagaacaaatgccaagctatgtaaattataaaagaaatcatgtccaagaagagaaaaatggaggactatgaaacagtggc

SEQ ID NO: 249273 - DNA, 961 bp, Cannabis indica
atgctagagtctgtgcgacattgacctccttgttcgaaaaactgcatctcttgaggtggtgcgtgacatgtccaactacgaaggtgatactgttagtagaggagtccaaggcatccttcgggtacgtgatggactatttatcaaaatgtattgataatagcctatcttttcatgtgcacgctcatatttatatgatctcatagccttttattgtgctaacaccctttcattctcttatatttatttatttgttattatttttttagggtgtaactcaattcatggtctccaatcttaattcttaaaatttacaagagaaactagctgtcgcagaagcagcccttaaggagcagaagaagctctctgctcttttggatggaaagtatgagcgtgacaaggatgaacttaaggacattcttggtaagaggctgacagaactcaatgatgcgcaaagacaactgaaggagagaaagggtcaagtgggttattatattgatcagaactttgctcttgcgaagatgaatatggcgctagagaaggcgctagaaaaggtcactaaagaacatgactcaacggttaaggctttgaaggacactatttagaagcatgaggagacggcagcgagagaccatcagaactacaggtgtgccttcgacgaccaattttatcaattgtggaaaaataaccaaaaacttaacctttcacacatgccaccccagaataaagataaggagcttatgaagtgcaaggcaagactccttcgagaagccacgcttccttccacaactaatattcccggtgctgctacttttatggacacgcctgaagatactcttccttgagagttttagcctttgtgctatttatcccgagcgcatatgctccttagttttattatctttagacaaatttcatgggtagtttgtgtttttctttccttggttacttttcatccaagtac

SEQ ID NO: 249274 - DNA, 1037 bp, Cannabis indica
gaactgacctggatcaaaagtatataggccattgtggagagtcccagtcagaagagtgcttcagtaacatggccttaacataacaaacatcaacatgaaattcaaagaagacattattgtcaagagaaaatttggagacacttaatagattcttagtaatctcagttacatgaagtagattattgagagttaaaggtttggcagagttattcgatgcaacaagagtttgaccatagtgtttgattgacaaacatgtgccattacccacatatatttgatctgaaccattttaatcggcagtactcatcaagttttgcatgtgtggtgtacaatgatttgtggaaccagaatcagaataccaactgccaacatcagcaagagtgttctgagccaaattagcttgcattgaaagagaatctgcaggcgaaatagctcccgtgaagctcttgtcaaatcgataaaaacaatcgatgatagtgtgaccaagcttgtaacaaagctggcactaaggtctattatgatgttgaggcaattttcctcctctggttccagtattagaatctctcccaggattgtaagatgaagattctccttaagagaaatttccaagataagagattcgattagaatggaattagaggagttaagaggaggaaacttttgataggatgggtagtactgacctttctgtgtatcaagatgtttgaaattcctggttaaatgagcaagatttgcttcaagttgcaacatattatcagatcttggtgttgaatccgcaataacaagattgacactctaatccatctctttatcagacttctcaatccttgactctaaagctaaaagtagagcttcaatttctgctacagaatactcttctatattcgagtattggaaaagataatgaaggtgtcctactcgcttggtaatctcttgaagattattgcaatgtaatctcgagctgacagagattctccaatagaggccaatagatcaacatattgcttccctttgagtaggtactcatccaatgatag

SEQ ID NO: 249275 - DNA, 495 bp, Cannabis indica
gtgtgtgaggaaatttttgctatatatatatatgtatttttttatcattttcttttcaggatcttgataccaatgtgcatgttgattatgatatgaagcttaaactatataaacactggctagatatatacaagacctctgggaaaaatgattttcattcttccaaacaaagattgttcttcactctatgtaagtgaagtgagcctcattagttcttttattttcctttatatcaagcataaccaactctgataataaattttccatggtttatatatatttttttgtgtaattttttccattgcactaatatattcacatgattatgttggcatagcttgctcccacttatgctttttctcgtgttttcctctctttctaatgtctttccttcgctctaggcaacagttatcgggatatattgcattgcaataaaaagcccttttacctcaaaggcttggaagatgactcgagcatcatggatggatacataat

SEQ ID NO: 249276 - DNA, 831 bp, Cannabis indica
atcccccgcattgtgtgtctctaggggtatttataggtcgattacctttcaaggattataatttatggatattcatgaggatgaacccccatcgtgtaattggtaggtggcatattttccatgtggtctttaccgatgtcagattgtactggttgtactgacgatgctttggatgtgtgctactctagggccttccttatttgatttacccccgctcttagctgttagatcattttccatagtacatagggacatgcacgcttaggtggtgtgagagacaacctctgacatcatacataggaaaagagtgagtggtggacccttagcttggcatgtgcatacgaacccctgtaggttaaaggagtaccccggatcaatacttcttgatggaaggtccatgatctttgcggtagctaacggttttgccttctagaggagagggttgctgattcgcgaacacctcccttatggtctctattctcgaggacttctcccgcggaggtctgtgaagactggtccacagggttagagccctaaccctctgggatgatggagcgaggcccttgggcagcttgatgacttcttgtctctccttaattattcctcgcgggctatgcaggtgaaaaagttgataacacaagagaaagatacgctatggattatccatcgttctaatccaaatagtcaaggatcctctatacatgatctacatcgaatagggacaaacttactattctaccctttaatgtattttattcgtaaaatacttagatacctacaaatgatatttcagtaaactaatataattactgaaatgagatctcaaccatt

SEQ ID NO: 249277 - DNA, 839 bp, Cannabis indica
agttggtttcttttgagtagtataaataggggtcatgggtcttcaagttgtgcatccaacaagagtgttcaaagtgtgttcaaaagagtgagagtgtgttctaaagtgtccctaaaatctttcaaaagtgtgagttatacacaagtgtgtagtaaaggtgtctagtgataaaataaagagtgagtgcttggtgtgtattgtggtcaagttaaagtgttcaagtcttggtgtaattgctttttcaataataaagtaattacgtttttcacgtgttgtggtgttcaacactactaaaaaaattagtaatctggtttattgtgttttctcacaaaataaattgagtgattaatttaccagccaattaagatcatggccacaactcaaaccaaataagtaaactcttaattttttcttaattacttactgatttggtttggtgctcaaatcgataaacttggaattgtaaatttttatagaactttcaaatttaatattggtcaaatcctacttttcacacatgcattgcccaattattgaaaaaataaaaatcgaaataatatagttattaatatttatttattcagttaaatacaaagtggaattagttaattagttatcatctctgcctcttgacaacaatctctatcttcatcatcaaattagagaaggtttaaaatttacttattatattcactattgttagaatcatgagtctactaataaacaatattattgtaatggaattcattaaaagatcaaaattaacaaacattaataaatataataagtttgtctataaattagaactttgggaccatttgcaaaggcagtaaaatagt

SEQ ID NO: 249278 - DNA, 998 bp, Cannabis indica
ttttttccactaccattcatctacatagagaagaaaacatgttataaatatagtatattagttatgattaatattaaatgctacaagaaaattaattatttaccatatcatcgattaatcgagcatatcttttgcggctacaagtatggggaagtcatttatttcttatctctttgtacttgtcacttttagcctaaaaattaaaacaattatgatttcatctcaatcttaaacaattataataacccatatattgattaagctattattaacctgaaattctaaactagttttctctttgatgaatgccctccactcaattacagttttgatgttgtcaggctttaatttcacctttcgtgttcatttggcacctttttgactttagcaaccaaccttgatttagaagctcttcaaagatcacccatggactgaaatatatagtttttcttccattctttgtcaactatatatcgtgcctaagaaattgaaacatgttaaaagtatattaaataagtaaataatttttaaatttattaaattgtttaaatcaattaagtacaagaaacatacctaaattgatctccacaaaacctccttcatttcaagagtaatctttctccaatcaggtatagttactggtactacttccctcacaacttgtccaaaaaatgaagataagctaattgatgcttttccgattggttggcccgatgcattgaatttgaccggtaatcgaccatgtagcaactgttttcattttagtttgacctttttttttcttttccataggctcttctaaaggggcagcaacatcaccaagtataggtgacgagcctatggacctccttcttaatgagcccttagtgtttagtgcaggggagtctatggttggcattgctatagaaatttgaggtgttttggacctagtatttactgttggggaatttgacattggagtaagatattggagttggtgttttggaccgagaggcttt

SEQ ID NO: 249279 - DNA, 501 bp, Cannabis indica
tataatccgcacttagtgcgaattgaatgttgtttaatatatatctaaatttatcttttttaaaaaaaaaaaaaaatagctcataaaataatttgggctttaaaagacatgtttgggcctgctagtttgattccctagccctaaacactctctctgtcttatatactccctatccctctccctctccctctccctctaccttctctcccagacgcacccattctcaagttccagtggacgaaaatcaggcaaaggctgctctcctctgctctactaagctccggaggtaaacagtaaccacgggccaagcttttttctttaccttttgtttgctcaatggaattatgaattgataaaacacacaacatcttcaattttttatatgtctctgttattttcataagatctctgtcttatatactactgtaagtgttagttatcattactatttaatttttaagttggtttgatgtgatttagtttggtgcaattttgtttgaa

SEQ ID NO: 249280 - DNA, 1010 bp, Cannabis indica
ttattgaaaaggaaaaaaaaaagtctcatatcaatattagatatcatatattaaaatatactactctacctcaatagcattacgagagaaattgattagggtaggcaaagctcttgaccaatttgtaccttcaccacaacgttcaaattctcgaatcgaacttctacgtttggcaccttaattccgactctgttttgttatgacgggcgaccaaattaacttatgctttatttatattaaaataaaaagaattgaatgaacagagtataattttggatacaataatgaagtcttcaaatttcttattattatacctatcaaggcgttctttaatggcggaaagaagcttattattatcttgatcgtttgtagccaagactttcttgacgagattttcacgtccttgacgatcgagtttagttacatcgattgtctatgcgcctgctttaccggaaagcggctttctgagcaaagcaaagttagaacgtttctgagaaggtaacctggcgatggctgcccatagcaaagcaaactcagtgggtgagatttcaattttaacgattgaaaatcaaatcgatttgggcttcttcttcttctccgaacacattcagtcggtagtgagatttcgaatataacgattgaaaattaaatcgttcatctgatatcgatatttgggggagatttcgattttaacgatttggcttcttattctccaaacacattctatcggtagtcggtagtgagatgagaggaatgctcgatttaaaaagttaccaatcgtattcttaggatttattttattatatataaataaaatttctcataaactattttatttttattaataaattattttatttttagccgtataaaaaaatttcgtaggatttgttagagagatatgtgggtcgtaggatttgttagagagatatgtgggtatgatattttttttaatttaaaaaaagattttttaattttttgggtttaattattgggtttatttatttgtt

SEQ ID NO: 249281 - DNA, 569 bp, Cannabis indica
gtaaagggttttatttagggcacaaaacccaacactaatatcctttattaacgtgccatttattttaaacagttatttatatcacaatgatgatcactagtagattagtctaaatcctcagtattcataaactgttgtttgtattcattaggttctttagtagatcattaaattctctcaaagaagattattcttacaacttctgttttggaaacttaataaaatgaattgatgggaacatgataaactataacagaatctaagatttttgagagtattagttcccttattgttttcccaattattgcctacctgtcgtggctcctccacgtagccaaaagtagaagacacgtagagaacaacttgtcaataactgaacaaggtattacctctggtcctcaaccataaagatatcaagatcacaaggagacatgtcaacactaaccgtccaggttagtgccgaacaactatctatccttcaagattctaagatggcaatgtggactcaaacaagatatatagtcactagcagtgtaacaccctaactagcataggcgtattacgtgatt

SEQ ID NO: 249282 - DNA, 627 bp, Cannabis indica
aaggtgaaccaaaacatacacaaatgaatgaaaaatacttctgttattttattgatattgaataatctggattacattgaaatagagttttattgatggcataaaacccaacagtttcgtctgcgacggatgatggtcgaggtgtggaagaattttgtatacttaagtttcagaaatcgaaaaggatacttaagtttattcacttcgcccataacctgaagacaaatcggagcatgattagatcccacaattggatacttaaccacccgagccttatgatatttagtgcaccaattttcattagcagctactctatccaatcgcttacgaacccaattgtgagcattcctcgaattttgccaggtgaaaaatcctccttcacaacccaaatccacccccctcccgtattgaaaaaaaactcccgaaggaactccccttcctttctgttgaaactttgtcacccctccttttctgaagcatcaagaatgacattgaggtgtaaagaccgcttagttttaatttggaaattagcagataattagagcttaattatgaaaattatttattagtattgaattaattatttatgatgatttagttgaattcagaatgcattttatatgtctt

SEQ ID NO: 249283 - DNA, 1040 bp, Cannabis indica
aggtcagccctgaggtcatgggccgcacccaacctattgaatactaaggtaccaggtggtctcggtgtctgtctggtttggacggtgggttggccagaaatatcagtttggatgaagttaataggtataactccacttgaagaactgttaggtagaatctggccatctatcgctaggcccataggttggacctgtgaccggggaatggacgactgaccattatgagtctgggcggtatgcccagtagcaattttttctgtaccgcccagtgggatactggacacagtagctagttgctgattagcaacctgataggctctccgtatcagtacggtagcctgccttgtgcggtcatcgatggctgcttgctgagccttcaatgtttccatctccttgtcccaccacttaatgaattggcatcgctgctcgtcgaatgcaaggtttatagtagcacggagatcctcctgatcatggtgcaaggcgttattatggtcttgcatgagtccaagggcagcttgaaggttttggatctcaatgtcatcccccgctgtcctctgagcattggtgatggatgggactccagtgctaagagtggtttggtcgactgtagaattggtatttcctgtctcttgcacacccaatgttatcccaaccagaggggaagtcacatcgtggcccacagtaggtggttgtgtgttggcctgctctggattggtccctggtggcacccttgtattcccagggggttgtacagtagggtctgtcaccattaggttaagacttaagacaaagaacaaactttggttttttctctcaatgaaagcaccaaaacgatgacctcacttttagtcaatgaccatgagtcaattattaagcgattagaaatgaaatagaaataggagcaaaaaccaataagcaataaataacaccagattttgaagagcttcggcccctttagtatggtaatagcctactcctcttagattgtattaactcgagaacaaagaacacagtgtttctctctcaaagctcttacaatg

SEQ ID NO: 249284 - DNA, 658 bp, Cannabis indica
tatatacataataataaattttatgaagagttatacatactaaaattatttatattaaatctacatatatcgattattatacgggacaataagtcatttgtctgaattactcatcctagtcattcgagtgactagtgcttgacaacgattactatcagcccctgcatcagtggcaatcgcacccgaattcaaaaattcttatactcgattcagcccaccaatgtccaacagtctttctttcatgtacctaataaaaagtcatagttaatatttgtcactatcaaaagaacattatcaagtttattattaagagtttaaaatcatacttgcaccaaactcctattggtttggctcccaagtattgtatggtgcacaattcctgaatgtcacttttaacaagccaaataaagtcatcttcgaccccaaatagctcataagcaacttggaattggataatcgacgacatgggctaccttttgatggagttccaaaaggtaatgatcgaggaagtttggcgtggttggacataacggccatgaccttttgccttagttgacctcttagggtgttttggaggttgtgttggaggactgagtaaatctacagaggcttttttgcttctcttcacaggttgcttctaaagtttcttggtgggtag

SEQ ID NO: 249285 - DNA, 706 bp, Cannabis indica
cctttttgcacaaattagaatccccagatatttgaaaggaagttcacttctaacaaaaccaagacatccgatccaacacttgttgcacttcctcttctttcatgccgcaacaatacaaggcgaattgcatgtcatttggacataatctagaagacatagaaaaaagtttaagaccttgtaacatatagtaaatagatttaaaatcaccatgacaaaagagtaaaacatcatctgcaaagaaaagatgattaagttctaaatctgagcacttatcatgatatttaaaatctatttttttccccacctttgctagaatacgagaaagaatttcatgcataatacaaagataaagagagacattgaatcaccttgtctaagccccctttttacttcaaaaaagccatgcattgatccattgaagaatagactaaatttaggagtttgaatacacaccatcaaaacttgaatgaatttggtagaaagtataaagcagttagaatctcttcaatgaaaatcccacttctagcatgtcataagccttccttaaatttagcttaatcattcggtcttgtgtgttttcttccataatgtttcaccaaaatttacatatgatttttttttttttaaaaaaaatataacctaaaataaaactaaacatatatgacttggcgcataacatttatttgatatattaaaaaatatcact

SEQ ID NO: 249286 - DNA, 505 bp, Cannabis indica
agagagccgactcgatggaagattagaataaagtttcactatgctttgattaatttttcataaggtattctatattaagactttattttttaattgtttttctctattttaaggtgccactttttctttatttttcgctacataatgtttcttttaaattttgtaaaatatgtatattaattgttcctttaaatttttcagaaacaaataataactgttaaagtcatatattggtatgacttatcataaattatttcttcacatgaagaataactacaatattagtatgtaaatattaaaattaacttattttttattattaataacaatgtacatatcataaatttgtagacacaactatgttttattaatgaaatacacgaacacaaatttaacttttataaaaacaaatcgctcaagatattcataccactttaagtacctaaatctaaaaaaaaaacaccaaaccttaaataaaactaatatttacgtggctcggcacgta

SEQ ID NO: 249287 - DNA, 890 bp, Cannabis indica
acttaaatagaattcatatattatatatataatcatgaaataaatcatgtgaaccatgcaacaaaaaatgttatttctaatctttattaataagtaaatcttgttatattgaaatgagttttatttagggcataaaacccaacatggtgctccaaccagacatcattgcctacgctgggaagtcattaatggtccatcaaatagcatctcgaattgtgaacacactcccgttgtaggcatctcaagcttggacacttgaatcccacaactctctcaattcatcaatcaattgtgtcatgaaaacatccatgtcttttccaggggcaccatggcaccaaaagagacaacatcaacgactcaggtttcatgcacttccaagggggtaagtcgtacgggactaaaataacaggccacatactgtaagagttactcatgttaccaaacggattaaacccgtcagtggccaatcccaatctcacatttctaagttcaagtggaaaggatggatggcgtctgtcaaactgcttacactcttctgcatctgcagggtgcctaagcacgccatcctctttgggtctcttagagtagtgccaccgcatgtcctctgctgagtgtcttgaactgcataacctcttcagtctcagaattaaaggaaagtaccgcaaaacttttctagcaactttttttctatctccctttctctttttccaatgattctcgccacaaataggacaaacttcttttttttttcattctctttccaaaataaggcacaatgatacttgcatacatcaatggtttcataacccaaactaagattacgcaacttcatcttcgactcgtaatggaacttgggtaattttgtatcctttggaaataactcaatcaat

SEQ ID NO: 249288 - DNA, 706 bp, Cannabis indica
aaatatacttggactaataaaacggttagagaaaggctagattgggttgtggtctctgattcctggtgtgatctttaccctgataattccttgcatcacttagggttttatggttcagatcaccgtgtcctcaaagttgtcttagaaagcaccaaaactaaccccctaagcactcatagaagatttaggtttgaaaatagttggcttaaggacactatttctacacccttgtggacactgcttggaaagagtggcatgacactcgttctaccagcagtggctttcatagtttccttgctaaacaagctcattgtatttcctctcttaaggcttggaataaacacaataatcgcttgttctaatctaggatccaacaccttatgcaggatattaatcatattcaaaataaggatgtactcactagggacgatgattctaaactcactcagttacactctaggttagaagccatgctgtacaaagaagaaatctattggaagcaaagggctagagtccgctagcttcatgcggtggataggaatacaaaaaaatttcacaaacatgcctcatcccgtagaaaatctaaccacataaaaatacctcaagaatgatgaggggatattatcaacactcaggaaggaattgtaggcctaatcacatccatttctctgacctgttctctcctagggaagtgatctcgaagctg

SEQ ID NO: 249289 - DNA, 835 bp, Cannabis indica
ttgtcttaaaaataaaaaatataatccaagtttaaaaactgcatggccggtcattttgtctcaaaaaaggcctatgggtcgaaaagacttatataaaaaagtgaacaatattcagacagtatgaatcccaagctcttggtatggatcgttttggtctgagggggtcggaggttcaacactctgagcagtagggattttgttgctctagtcggctggagctgtggaggtagttgccttggggttttctttggctgtctgagccgtgcaaaaatcaagatacatgctcttggattgaccaaggtaatcaaagcttccttcagggttggccttccagaattcatagaaaacctcaagagcagctgtctcaagggtctccacctccttctcgagctcctcctctcgagcctgcttattcttgacatcctccctagtttggaaagaagagtccagacactctccctctcatctttaagatcattgccctccttggacaaagggacactatcggcctccaactgcttggtcgaaggcatctcttgcagttctttggtcagctcctcaatcttggtgttagtagtaagaacttcttgttcacctccccaagctcattcctcacttccccaagctggctcctcacgtcccgagtttcctttctggccacatccacctccctctacagtgtgttggtggtgtcaaggttcttggcagtagctgatttagctcaggaataagcataagccatcttcacattgacctgtacagaaaaatgttagagtctgagctacataaaagggaatgagataaaaaaggagatatttacccgagtagcttcctt

SEQ ID NO: 249290 - DNA, 702 bp, Cannabis indica
aaacattaggtatttaagtgtataaaatcggaaacattaagtatttatgccgcaatttaccctacaaaataaaaggcattagagatttaatattatttgttttaccatattaatttattttaaaacatttttatttttggtaataaataagtaaatatatttagataataatttttttatataaatatctattttaataaaattaagttgttgcaactttaaattatgcataaaaaattttaattagataatttgtaaagacatttttagaagtaactctgtaattactaagtagtataattattaagatggtaatcaatatatatataaatgaaggtttaaagaaatgtgaggtggtcctttcaaaaaaaaaacaatataaggtggtaattacactatattttaaaatataaagtgtgtttggatatgaaattgtaattacatatgaattcataatatcttatttgataaaatagttagtaattatattggaaaataatattttttttagtagtaacctaaaaaagaaaaaaaatatatattttttagtagttattaattaatgtttaaaataattttttgttagcaatttgacagtgtaattacactcaatttttatgtagggtcgtgcgaattagagagcgtaattggaacccctcaagctcaactacttctaattacacagttatagtgtaattacat

SEQ ID NO: 249291 - DNA, 697 bp, Cannabis indica
tagggtctggccaaccaagactcctcgatggatggatgttgactttgttgataggagggagatcacacaattgctggagtttagtggatcgaggtgtctgaagtgatcaatttctctttgcaaatttccattttgggtgtttccacccacttccagtccttgtcggttgaagattgacttcttggcacttcactccacttggggacaaagtgctatcctctgaccgaccaagggtactcctgttgatggttggtcgactagaagctgtacaatgggggttgttactgagctagagatccctggctagccccctgtgctactattttctaggatatggctattctcaccattaaacctttgaggaaaggtctatcctccctctagtgagggaagatttgttccagttcatgagaaacgaggttggtcagcatgtcgatagatcctccctgatctatcaatgagtcttcctttaagtggatctctattgagatcctggcctcttccatcagttctctggttgaactgccttaacagattgctggcctcccaattgcggctatctaacactgcttggtgagattaaaggatgtactcttggtcatccatccatctcaagaattcatgtctctactgagcgaatacataacaatcagcagtgaatggttcttcagttaggcctgcatgactaataactttc

SEQ ID NO: 249292 - DNA, 530 bp, Cannabis indica
aaatgattatcagacagacctaatatcattcagcccatctattggattagttaattggttcttagacatgaagatgactgagtaggaatacaccataattttgaccaaatacaaaactatgacacaaaatgtaggaagtataaacaattgtaccaacaaaacatgatgaaagatcttcaataaacattggtattatgtgagatacttcatgatagcatgattaaagcttttgtgatgcagcataacacgacttcgtcaatgctcaagttacctgtccaatattgtaggaaatcatccttaaaagagaaagggaaatatcttcaggtctgtagtcatcaagctccttattttcagaaatagctttgccaaaactagaagcaatggttgaggcagagagaccaatctgcaataagatattatggttaattgatgcctattcatcccaatgatttaaagaagcaaacaattcaggccggtgtagcatatcaaaaagtccaccagtttatgcatttccaagtgttttctaacag

SEQ ID NO: 249293 - DNA, 674 bp, Cannabis indica
tgttcaaatgggaggagtagaatagagttttagaagaaaaaaaatgacatattcagccaatattgaatagtttaagtttaggaaaataattttggtctaataaatgcattagtcaaatttgccaataaaatgaagtgtacttattaaatataagccccctaaataaaactatttttatataaaattactaaattaccttcagaaaatttaatcaaaatgataattttttttcatatcaaaatttgatgtaaagaagttttcttttcttcttattcacgaaaaaaaaaaaaaaaccaagatggaatgaacttattttcttttcattctttcactttcatatttttattttcttctatatttctttcatccttgaaatcgtattctttcctctctttatttttatgtcctatcattaatactcttgttatttctctataacattgatatgaaaatggaaatcttaattattatggatatagtcccgattttttgttagtttggccatctcaaatggatagtgtatattttaagtttaatttagtctaaaatataccataaagttatatttggcctaatttgtgtattagtactccaatgtacaagttgaaattagttataaaagttaatattaacattagaccatctctaattgaagatttaaaatttgtgctaaa

SEQ ID NO: 249294 - DNA, 906 bp, Cannabis indica
attttatcaatacaactaacagtctaaaattttattaattatgaattcaaatttaattatttgattacatataattaaaactatttggttaaattgataaaactgtattgattaaattttactttaaggtaccaaatatgtacaatttaaaaatatgaggtaccaattaagtattattgaaaatacatggtaccaaatatggttttcatgaaaacacaaggtagtaaatgagtatattccctaaaatcaaaacgcaaggtttcgccgccaataactctaaaaagtgtatctatgtctctaatcaaatttttatttttattttattatttacgttgtaacctaattttattttgggaattacccaacatactatattttaattttttttttaaatttacggtttgagttgcttcggtagtttttatgtgggttactatacgaattttgattgcgatttaaaatgctccattagttttttgtgtggaattccgtaaaaatcaaaaaaaaaaaaaactgttttgaagtataaaaataagaaaaccccttttattttttattttcattttagtactttataaaggagttcattttcattatttattgtgctcaatgttatttttaagtgggaaattgtaacaaatggccttaaatatcacactgatgaaatttaatgtcaattttttttttttaaaatgaagtaaatggacttttataaatgttaatacccttggttatatagatgaagctcaactctatttttttttcgatttgttctactgtttgcgtggtgaaaaaacatatatacctccaatgaacataaactcaatatacctcaatcaaatataactatacctcatacttaaactaatattttatacttttttccttctttcgttcattatatac

SEQ ID NO: 249295 - DNA, 1020 bp, Cannabis indica
ttttttcttttttcttttctaaagatttatgcatcaactttggaattgggtgtgattggaattatgggattgactcattttcttgctttcgctgtataatcttcattgggtttctttttttcttcttttattgtttttcctattgtgatttttctgaatgaagttttctgtttgtttttaatctgggtttgttttctatggttctgtttcattattatgagtgattctctttctggagtagtgtttttcattgatttggataaaggaagtgtgaaaagtccatatgaatcaatgggctgaaaagaagaatcccttgattttggattataacttggcaacccttcaagcattttatttccttttcttgagcgaatatgatccaaatcccttttagaaatttattttgtgtgttaagagtatcaggttctgcgtacgttaaaaccaataagcaatagtatcacttaaccacattaggtgcttgaagtagggagttctagaaaccaattttccattaatactatattatgtatgcttgccaaaatttcaggtccaaattgctggtgattttcccagaacaatagtacgattgcaaatatacgttcttcaaaatataactggagtgtttccctgaattacatgctcttgttattaaagactgtcaaggaaaaaagtactaggaagccaataaaagtgctaactcctacatctctagctgcttgggcattttccagcagcaattcttttcattagattattaacagtcaattaattatgctaagattctgttcaatataagccttgccgttttttgtttcttccaagtttgtatttatatttgtttcctggctgaacatttaatcttgggaaggtaggaaattctaacatattacttggtaaatcccctggcagaatcgaatacatttaatgattagatatttgaatgtatttgcttgttttagcatcatctactttcatattttctaagtactctattttctattaacgtattaaatcattgat

SEQ ID NO: 249296 - DNA, 1898 bp, Cannabis indica
taaaaattaatattttttttgaaaaacatataaaaattaatatttaaactatttattttatatttgtataaaataaaaaaaaaatcacgtgtataacaaattttttaaattttatttttgactagttaatttttttaaaaatttcttaaaattttacaaataattataatatatatataattataaaaaaaaattaatctaaatattttttaaaatactgaaatagattataatgaggtttattgtaaattttttttactattaaggataagtccaatatgctttctaatcatgataactaactgtcccacacaacagttatacctttgtcatctgtcagaattaataataaaacttcactcatttcgaagaagccacattatgtgtattcaattatttacaataatttaatttaatttaatttctacaaatttatattttattgtatatatcctaagaaaatttgaggaatgaagataacatatattaacaacaacatggcagaaataaagttgaagaattattatatctatatatatatatttgtatggtgaaaattaagtaagaaataattgttaaatttttagttttggaatcatgcatatgttgaagatattattttttaaatgaaagtgttttatttaactggaaagacattcatcccttacaatagagagtagatttgaaagagtattatgctcactaaaaatacaatgtggcataaaacaagattgttttgcaacacaatgaacagtcctatttacagatcgtttgacaaaagaaattaaaatattgtttaaactgtgatgacatttggaccatactattaatagcttgtaccactactaaagaatctaattcaacttccacatcaaatagtcttcgttattttatccaactcaaagcctcctttacactaattgtttctgcaatttcaggagctaccaatcctactttactaattgacacaacctcaattagcttagcatcatgtaatagagggaaatgttgtaaggggaaatgttgaagatatcattaagtaatagatgagagttaaagttagtgcactgcaataattcacaatataaagttttcttttttaaaaaaagaaaggaaaataaaacaaaatatcaggtaataaaagaataaacaaaatcacactatatgttactttgatcatgataagattcttaaaatgtgatcaagagtaatcgaataattgaattatctacttctcaaaattcaaaaaataagaaaacaaaaacaaaaaacaaacaaaaaggtgccaataattatgcttttatattttattggcttgaatatttgattacaaatataatatattttcaaaacaaattaattatattactaattaacttaaatgtaaagataaaaatttaacttttgtctagggctttctctctatgttttgctcttgtcgtcgcctggtgtcttctttctctctcttcggccatgattcaccatatcttttctgggtttggtgtgaggccatggtcgggaggatggtttgttcgacctttgagactggattcaatggtggctattaccatgggttgctttttcgttcctacgatgtctttgctggtcaacgatatctcttcggctaagtcttgttgatcctcaggcattgggtcacgtgtttttccaaatccttctgtggtgccagctctggaatgggtcgttcagagaggggcttttcttctttggtggtccatttcagaactggttttgaattagtggtttcgatgggtctttggcatgaccttatggctcgtatctgggctttcgggttgtggtcaataacgtttgggatgtggtcggtgagactaggatcatttgttaattccatttttggcatatttaattgacaaaaatat

SEQ ID NO: 249297 - DNA, 2919 bp, Cannabis indica
ttctgggatgatgagttcggggtggtggatcgaactgtctcagatctgaaaccatcttcgatcagattttttttagtttgtgtcggttattaaatgaagcaaatttgtttgcttcattaataaccgacgcaaaatgtgtaatacttttcgcgtaggttattaaatgaagcaaaaaaaaaaattagcatcagttataaaatgaagcaaaaaataagactattttcgtctacagttattacgacggttaccccaatcgacgcaaatcgtttatatgtcacttaaaaattgaagcaaaaagttattttttgtagtagtggtgaaaagaccccaatttgcaagtgcatgggcactgccattagacgtcctgggactccaaagaactgcacactccattcaatctaaggcctccaatagcttagtttttctaattgcgtagagtttttccaattacattttccttctttttaaaagaaggtaaatgaatctatttaacttaaaacttgaaaatccaaaatttttagatcacgaaaattactttcttttgccctgcccttcaagccaaacttgaaaatccctaaaactaaacttgagaaaaatgaagtgaaaattcatgctcatgttgaaggattaaacgtgttaaatatatttgcttgatttagtcaattcataagtgaaatcatcgagggtaaacgttcttctctgcgtgaagccatgtggcctgagcccctttatcttattaaattctctttagccaaacctttgttcttacctcctattaatattgcttttgatcaggtactttaaattttcatgtatggccccaccaaaagctcgcaaacctaaatttccccaaaatttgttagtgtaattcgaggctacatattttgagtcaaaagtaactttaatggcctcatatgtcagcccttttatacgatcttatggtataaaacaaggcaatgactttgtgtgtcaatcaactgagaaggacaagagtagttgttttccacctggtcacctcgctagcaattcagagtgtaatacaagtggcctagtaaaaattggggcattgagcaccgaacacatacacgtagggctatccttcctccgaagagttactttaaagattattgcaattatgtaggaattactccactccaattaaatccaaatagttataggattcttgcctctttaaggtcttcataccatatgctgggatgaaaaggtcccgagccatatgaaatcacctgcatgtataccctcatggcaagtccggtgaggaagaattattctgaaggtttcttctacctcagaacttgtacaggggatcacaggattattgttgatctccctaataagaaagaattcaaggatcaattcttttagacaacagggcttcacccttgtgctcatatgttcaaaagccttgtaagcttcataatccatttttcctgtttattttatgatgattttacttgtgcttatttttatcttaacactcatttttcctctgacagagatgatgttaaaacccattacatctgaaattgtatcgaattattatcaaattttggttaatttggcatttgggatgaaggcctcaagatttcttcttcatgagccaaaccaagtggcttgtggttctcttggcaaagattagtccaccatggacataaaggagcaaaaatattccacatggtcatcagtgaaggttcctctcgaggaagaaaaacatgacaaagaggcttgtgctgcttttattaaagccaccgtccctcgagaagctgtccatactcgtgaaggggctccctaaggtaagattgatcatttttataggtggtccccaaccgtcctcaaccctgatcgaaatgtcctggttaaattttctagtagccagtataattttttcatttaaaattgtgttaatcttattacccataggtttgatagttggtatctcaaatttcacatttaagttactagcagcaactcatattatggtattccgaaccaatatagcagcaatgtatactggacaaaaactttgggaacttagcccaatcaatattgtagatatttatgagattactagctctagggagtatataaaaatacttgagatgattctccctcaactgaaagctgcttatttgatcaaatagttttctcgatagattgaggggaaaagaatcgatgttcatccacctaggggaattaataatagagacaaaagagccctatgttccaagggatggacctacccatggtcttgaggaatggctcaccaattaaagataacttgctcgaggaaatggacctatcaaccaaccaaagacctcaaaatattaaccctctcatactagttgacgagcaagtccaaccaggtcattaccttagacagaatgactagaaaaattctaacctaggtcgaaaggcatgagagaggtagctcccgcctaatgcaccgaaggatctcgggggcacgtggtctcgtactaaggaaatcgatgaatccatgcataggaccaaaatagaaacaacgcccgccaataacaaggttgatcaaggttaagacgagatgaacctaaggtttttagctagcgcaactccctaatgggtatgatgaatacgaagctgaaagtcaagcccgaggcgaaaactagcatcaaaggcatgaaaattaatcaacttgccaatgaaaataataaccacaatgatagccaaaataagaataatgacaaaaactacagacaccctccgaggtaagaaagtgctgacagtcaaaatgttggcggaagaccacgtgctgattctacgtttcgaaggatgggtccaatgtaaagaccgcttagtttaatttggaaattagcagttaatcatgtttaattatgaaaagtatttatagctatttaaataatt

SEQ ID NO: 249298 - DNA, 649 bp, Cannabis indica
ccaatcctgtagcctactcaagctgcattagcactactagaacttactaaggccactatggctactaactctttcaacaaaagtaaaagagaaggcatagatggtgaggactcaagtcctaagaagagtaagagtgatggcccttatcaccttatgtatttaatctacaccaagttgataaaaacccaagaggccatctatgtggcgaatgaacatcgagttccatttcgagttcctaaacccataaggcatgatcaagccaagagagatgcctcaagatactgtcaataccataagacatcagccacacaaccaatgagtgttgaaacctcaaagatgaaattaagactctagtcctaacaagacacttacccattatgcacaacaaaattttcaaggaggacatgtcaactaattgaaactccaccaatggagccagaaggcatttagcatttcttgagtttttttgccttatttttacaaagacactctctttttaacttttagttattaaactattacctttattttctataatgtaaatagctaaactcacatctataagagtgctacagtaaccagatcttttcctattatgccaaacccaccaaagagtaaaatatgataatacttaacctatgaacacttg

SEQ ID NO: 249299 - DNA, 1327 bp, Cannabis indica
tatcccctcctcgcgtatatcgactatgggtccttatacgtcccgagcaagaacttgcctcgtcacgtaccgaccttctcttttaggaacgcgttgatacatgccttctgctaggatttgtatgtgccctttctctattagtttcagaaggacattgacagtgtctcggtggcaacccacctgccctagattaagttccaggatctctctcgttgccacgagggatttcctattccctagtctgaggttgcctcctgctcgcattcctacaataagattttggtaaatcacgatttccattcccctaggttgttaatacccagggtctccgaggcacttcttaattatgtgcctagtcattcggttgctcatcttcaggggcatcctaaatttcctaaggttgttctttctaagcgttctgagggtacccctgagctgtctcctgcctcctggttcgtgagccgtgaggtctgcctcgtggcctccttactccaagattaggttggttttgagcattgtcttcttgagccgccctggcttcagctgcctcccgttccaactcagcatttcgttggtttgcgccctccaaatgtcgcttgagttggcaatattccaactccaccagtgctacgtatttagtgggatcataagcatcctcctccccatatacatatccacagcttcaatattagtttcctcattcccagtttctgggttttggtcaccttcacgttggcttctcctcaaacgtgttgaccatgtagattgtgttgtccaagaattaggaggcctccgtgagcccgtcggctcttttccagcatgatgagtagtctcttcaagttgattgttatctttttccctgttatcagccatgaagtaaattttctatcacttaggagggatttttttgaggttttttcatgtagactctcaatgaaagcaccaaactgttaacgcagatttttgttaacaataataagcctactttcgtgataggattagcacagaaattatcagaaatttaagaaagaataataaaagtaaaaatgacacgaagttttttacgtggtttttcatttaactctacatagtccacgagtcaatcttattaggacttttctaatatagaactagggttcttcacaatagtgtattcttttttctctcaaggatgttccgtccctttttctgtatactctgcccctatttatagtaacataggctggcagttgattacattcaaattcgaatcccacaacaatattttctaaaattgtgggccttaattacgctccacgtaaatgaatgtagttattatttgaaaatc

SEQ ID NO: 249300 - DNA, 719 bp, Cannabis indica
tctcatcattcccccctcttgaaaaggatttgtcctcaaatcttcacttgcatcaaaagggctcaattcagacacattaaaagtaccactaacattatattctctaggtaaatcgagtcggtaggaattgtcattaatcctttcaagcaattgaaacgaaccatctcctcgaggtagcaatttggaacgtctttgggctgcgaatcattctttcttcatgtgtaaccatacccaatcaccgggctcaaaaacctgcttgtgacgacccttgttaacttgctttatgtattgctcggtccttctttctatgttgagtcgtaccttctcatggatttgcttcacaaattctattttctttttgccatctaaatttaaatgctaagaaacaggtaaatgtgatagatctaaaagagtcaaaagattaaaataatgaaaaataaatggtaaaccctttgcatagtggccgaccatatgagggaaatgagcctcacttagcaactttcccattttgtcatttttcaatcccattttctcaaaaatgccaattttccaatttaaccatttaaatgccaattctaattatttaataactaaaaatgaattattaaataatattgtcctttaatatatttattaagttagacatgtaaagtctcttaaataataaataaacctagaatctcttttatttacaatttcgcctttgcttagtgaaaatt

SEQ ID NO: 249301 - DNA, 661 bp, Cannabis indica
aattgatccaatgattttgtatctgctcatttctcttagcagagttaatgataacttttgcacaaataaaaaaattaattactatctgaaacgagcagcattgatttgtgcttaccagatttattggaattcctttcaactttcaaggttgaatatttgttaaacgcttgtttgccttagatatttcagcaaggttcagttttcagcttcaagccactctcttcaaaagcgcctccattccaatcttttccaagctttcattcctttttaccatgatgatagaatttacaattttcttttatttctgtcttctatttatttccagcaataattagcatcaactaaatagaacccgccaacaaaattaatagctaaaatgattcagaaggcatactaagaacacacatcactcttatttgatataaattctaaattcaaaagctcaaaagataacaattttagaattatcagttgcctttagttttggcacgatatctagtcaataatgtttttattttaacatggttttcccttgttttgacatgacaataatgtagctctccattctagaatgtaacggatattataattgatcaaatgtactttgtattgaatttgaagtgtttcattgcagatgtgaaatgttctaatgctgttaatg

SEQ ID NO: 249302 - DNA, 1055 bp, Cannabis indica
gccattttgcatcttgacccttatggaattaatcatataccaaaaggtcagtgaaagtaatatttgtttcatatataaagaatattttacttgcaagtgatgataaaaatttcatatgtaagatgaaataattcatttctcaaattattattttgagataaaagaatataaataacatatataattttaattaattagagagtagccacaacatctttgattatataaaattatgtattattcatctcatgttacttttatctttaactatgataaattcaactcaaactaacatttgtaaaatgatctggaatgagaataaattaagaacattcatttgcttgtatttttaaaaagcctaatgtatgtctaagagtttgaataaaattttgcattgcatttgttttaaaattgttaagtagtatcaaaataacttaagaccactttatacaagggatggcgtatcttttttgagatacattatattacattcatgcataccttattgaaatgaattgacattatggaaatatatttgaccacttacattctaactttttatattgattcacgtaaattatcaagggaaacacaaaaaaaaaaaaaaattaccactaagttgtattatggataactaattatttctattatagaagtcagattcatttattattttgaggatacatctcgtatggtactgtattgtagagtttcatactaggcctagaattcagaattatattttaggccattaagaaaattttgcgaaaaaatttagctacactatttatggctaagaactataagagtactggtcgaagctagcatatcgacattaaatatttagtcataaagagacgtgataagtggtcattaagcatgcaatactgaattaggtgatcgtaatatccttgactataggcaagtcacaacacaaattcaagaatcgcaaagtaaatatgagattcagttaccctatgtagttttttgttgtacaactaaaattattcaatgaaactctaattttgatattttctcatatttatgtgcacctt

SEQ ID NO: 249303 - DNA, 812 bp, Cannabis indica
ctaaattttaaaaagggagaacctagtgggaccctcataaattagggagaaaacaaatggaaaggttcttcccatttttatagggaatgcatttccctttccttacttaatttattttaattttaattttattaattaaaaatgaaaaagacaaatataccccttaaaaaatctataaacagaaaataattacatgttttaataatggcaattttgtcaaattaaagcattccgattacctttcctaattatgaaaatcgatcttacagactaaatatttatatcgtaatattttatttataataaatcataatattaatggaatttaaatttatttattaatttaaaaatattattcaaattaatataatggaagagaataattaatctcaccctttttcaatgtatcaacattaccctaattaagggtatttatattattaagggaatgacattttaatattaaaccttccaaacaaacaaagtaatgtttaacaataccattccattgctaacattaacctattccaaacaccccctaagattatatcccttatatgtggatatattcttttttgattggcaataataatagaatatttagtaattttgtcttctgaattattattattatttttttttaataatactaatattactccttaaaatataccgttggttaagaatccacttgaatttttatatttattgaaatttagaccttctattatgttctatcctaatattctatttaaatgctgacatttctttgtaaattaataactttgttccctaaactttaacaactatca

SEQ ID NO: 249304 - DNA, 644 bp, Cannabis indica
atttttaaaaggcaattttttgatttaggcccctaaaatcagtggaccataggcgcaggcctaacccgcctatgcccagggctggccatggggacgccacatgtgtgattttataaactagtttaatactaataggttaattaattataaaaaaccgtgataatattaaaaacttgactaaaatataccactaaaaacggacattataacagcataaaaagtgtgttccgagtatccctgttataaaaagttttatgaaagaactgtatacgacgacacctcaaaaatataaaaaccaaaatacacaatagataaagcccaaaaaaattgatagcaactcaacatgcaggccgatggggtcaatatgtacattgctagagaagacagttatgtcatggcaactctaacttttccttgcctttacctgcaccacatagcacccatgagtcacagggactcaacaaaaaaaagcaataataatgataatatagtttattctaggcctccaataatacctcgatactctgttggattagagtgatatcatcttcccaactgtcatgggacttggattagattttaagtgtagcatcttaattcttttgagcaactcctctatacatttggactaatttagatacatt

SEQ ID NO: 249305 - DNA, 1060 bp, Cannabis indica
caactcatccaactagtaccccttgattgagttttgcccgtattccaccagaactttgccataagcctctcaagctctttacaagtatcaacaggcagtaggaaaacacacatagcatagtttggtaatgcttgggcaactgattttaataacacttcttttccagcccttgaaagcatcctcccttcccagccattgattcttttcctaagtttatctttaagaaaacccaggatagaatttttgtttcttccaatagagtatggaagccccaagtaggtaccattttcatctgcttcaaatattcccagcaaatcacatatggtatccctttgaccaacaacagtattgctgctataaaaaacagatgattttgaaaagtttattttttgcccagaagccaattcgaaagtatgcaataactccttgacattaaaggcttcttcttccgttgctctacaataaatatagctgtcatccgcaaatagcatatgagaaattattggagcttgacgagcaattttacaccccgtgagtagtccactttgctcataaattttcaaaagacacgaaagaccttccgcacaaagaataaagagataaggagacaaaggatctccttgtctaattccacgagacgctccaatagggcctatttcatgtccaccatgaacaatagagaaggacacagaactaacacaatacatgactaagttaatccaccttccatcgaaacccatcctttcaagcatagctctaatgtaaccccactccaatctatcataagctttgctcatatccaacttgagatccatgaacccctctcatcctcttcttttccttttcaaaaaatgcataatctcataagagatcattatattatcggaaattaaccgaccttgcaaaaaagcactttgtgtctccgaaataattgtaggcaggacatgcttaagtctattagcaatgacctgggaaattattttatagaggacattacacagtgcaatcggacggaaatctcccatatcaaaaggttgcttttttttaggaatcaaaacca

SEQ ID NO: 249306 - DNA, 1738 bp, Cannabis indica
atatttatctaattctaaagtatattttactaaatcatgccttggttagcatttttccaaacataaaaaacaataacctaaaaaaaaacaaccaacatttaaaattaaattaaaaaaacttgattaagcccatagatatagagttgaaagttgttaaaactcttagagcatccatgtcgacttgaataattggcaattgtaattgtagtatctaaactaagacaatgaaaaaatactttagcctccatttcattagatctgaaacattcttgtactagtttagatagagcatctaccacatgcccttgatgatctctaataatcgaccttacccttaagatttttgagtctgatctatgttcatcttaaaccccaagttgtttggtggcctccatagaatattctcacacgactgttgagaatggttcattgtcgctgattctgtgtttctgattgaggatgagccactcataatagagtatagcgaatgtcgtcctcttgctcgatgatatttttcaacaaatgaattcgcataggtagctatgtagatgttgttgtttcgaactcccctatgaagaactctatttctttctttccagatggctcacattatgcatattatagattcaaaattagctttgaaaaagcaaggaagataaatggatcaagtagtctccattaaacaatttgtgtgcttgtagataatcaatggtgaactttgtttgctttcaaactttgttctttggcaactaaataagacatgaacaattgattctaaagcatttgaacacagaatcaatcactttccttcttaatagagctgctgctactcgtagagcattttccattaccctccatgcagatattttaatctttggtggcaagtttaaaccaccaaatggcttttcaccaatttctatgattatcaaaaggggaagactcattgatacctttaataatttcagtcaaatggaatcccaatttgaatgtgtaaatacttgttgtataatggcaaattaatcaatcctgagatagaaagaaacttagtgggatggcaacaatttttccacatctataaactgaaaaaatgcattaagaagaagaagattccactctttttggtttgtaatgagatgtgccatacgtagtatagcatgacctgaaaaagttaaaggtttgaagttagtttgccctagaatccatttatccaaaatagccataacatggaacccattcccaattttaaagcacaacccttcaatgagcactttgttggaaaattatatttaatatataataaataatcattttaggctaatgtgtgaatgagaaattgatgccttaaatatgatccattgatagctgctaataaatgcagatttggtcaaggatgtaatcaccaaaataatgataaatattgttattgatatcagaaattatggtgaagattgtgattgatcatatcactaattttttagaattttcggcattaattccctagtgttcacacttagttttccaccctatatgaagcctataaaaggaggtttcacctttcattctaaacacaccaacaaaaagagtcactcactaaaagctctattgtcttctttttctttatctttttcgtaagttttaaggtgataaagtgaaggttttaatctgagttcgttggagtagtgaaagtggtgtatatatctgcttgttagtcattatatcctaggaagtggttgctcgt

SEQ ID NO: 249307 - DNA, 598 bp, Cannabis indica
ccggcaaatccgaacaagctcccagggaaaatcatgctaaatacactgtattcactattctgactgaagatgtagaaagtgtgtacatggcaactcagtcgctggccccatataagaagcccaggcccatgaagaaagattccagcaagagggacatgacaaagttttgtcggttccaaggagactacgaccacgacactaatgaatgcaacaacttgaagcaagaaattgaattcctgataagaaaaaacaatctgcacctgcagaagtatgttaagaccaatcagggtcaaatgtggctcagattcctacacatcacacgaaaaatgtagtagaactttgagttagagggtagagatagatttagttaaactacaacttaacaccacaaaatgaaattacttctttgttatcatacagggtgtttaagttggccaacatagtaatatttggaggaattggtccattaagattcattgacgaaaggttcttgaaaaatgtagcataaatgaagaaaaataaaagattcagaagcaataacctatatgaaccaagtgtaattctcttaaataacacaaagtcattgaccaacgcgaaa

SEQ ID NO: 249308 - DNA, 2178 bp, Cannabis indica
tttatatgctaccaacactagtacggtagcggtactgagtgcattggtacaacatatgatgttcaaagggtacgatacggtgctatcaacactagtacagttaagtacgtagtgcatgtgatataacactcagtagtactcggggtacgatttaacgctaccaacactagtacagtagcgatacttagtgaatgtggtacagatgtcatacttctgttaagaacgttcttgattatctatttagcattgtggataggtgtatgagcgcttaaatacaagttgataatatattatatgctatatgcttttcttactgagtttgttaactcacagatattattttcatgtgtaggcaaaggaaagactaaggctgaacaacaatgagtccagagctcggggatgattatatttgaggtcaaaaaatatttaattcgcacaagtacggattttaaattttttaatctaacgtattctacgcaagtgcggattttaaattcctcaatccaattcattccgtgcaagtgcgaatatatatttttgaaaatgagcgtccattaattagtaatattagacctcatgatcattacaaaataagtagctgaatagaagaaacattcaagctaccatattgtctatgggtaaaagcccatttagccgcgttatgagcggcaaaattataagttcttggaatacaagtaaaaatgcagccatcaaaacatctagagagttccaaataataagaagtgtagttctcaatctcccaacacgaagacaaatgattgaaagcattaatcactattctcgagtcgttctccacgatgatgaattgttacccttgagctttgtcacttcaagagctaaacaacacgcaaccgtctcgccacaacaagcatccacaaaatctaatctggacgtattggtcgaaatcaccttaccagaattatttttagcaaccaccgtaatgcaagaacttttcaatcccgctttaatatcatacttaagttttagccaatcctcctgaggaggaggctaccactctaactttctaccacaatgcaagtgtaaatattcacactttacgaattagattgaattagattgaattcgatagtataaattagattacatgggatacttgaacaacgtccctaccttttaatggaaaaaaaaaagttataaggccgactctagcatcaattactattgtactacattttgaagttgtaaggctttccaacctacctcacccttttcattttcaatatgtgataaaagtactagaggatttaagaaaaagtgagcatttttttgtcggcttctagtgtaaatgtcattctcactattcactaaaacagtaaatttggtttcatcaatcaaatttgtgattaaatacgctccataatatggtcccccctcatctcatttactttcctatcaattatgtttttgtatttttaataccataatattttttggttggtagctataataacttgctctcagttttgggttggcagctaattaaacaaaattaatttgttcccacattagattaaatactttgttaggatctctctcattcagtgctatttggaataggagattttcattatgttgcttcttcatgtttgttgcaaatttgtttattatattgtaattttaattggagaattattttatatgtgaattttagctgtaatttattagatttttctattagttgctgtaaattgtcatgttgatttcagtaaaaatacaaaaaaatcctactttaaagcgtaaaaataaaaaattccctttttatattttcttttaaagaaaatcatgtttcgataataataataataaaatctatgattaagtagtattactattagactttttttctactgtttaccattcatcttataagaaactattgacattacactaaaaaaacatatattaacattaattaatattgttaaaaataaaaggaatctattaaatataatttaacacaaaaaattaattaaaataataatcaacattaataattaataataatagggtatttattggttttatttatatttaataggcttaggcatatttataaataccaaccttattataacgacctctcttcatcaaggttccacaatccagatctcttcctctctctctttctctatcatc

SEQ ID NO: 249309 - DNA, 1104 bp, Cannabis indica
ttttttttaaatttttgtgatttttacattcaattgttgtatgttaattaattgtaataataaaaaaaatatagattgaatttaaagttcaaatcaactacacaaaaaaatattataatttaaactttatattttttaaatagtcatataaattataacatatataaatatgtatatataataaaactatataaatatatatatataaaaaaaaaactcttttaaatagggatggtcgggttagttcgggttgattgggcgggttggtattattttcaacccgcctaatataaagattgggcgggttatattttcgtcaggtttttcagtttgtattttttttcgagttatctcggtttggtttgagtgggttatttaggttgggtggtttacaaaagtttgtgtacaaccctatgtctaagcttaattatatttttcgtgtcatgtcgtaccaatttacaattctgtatcgtttaagctcatatataatttttcttttgtcatatcgtgcctaagcatttatctttttgtgtctctaaatcgtgttcgtatcgagatcgtgtgatcatatttatagcagtactatatctatgtatatatatttgtattcaaattttaatatattgtaacaatcaaaaaaatattttaacacaaataaagaagaagaagaagaagaattagaagataaaagccgccccataatgataaaaaaacaaaaaaaaaaataactatattatgaaaaaaagaaattgttcctatccaaagacttaaaagggctttcatttttgttttttttaagttggatagtctaatcgagctttttagtgacaaacccaacttgcaattacttttttttttcttaaagttatatttatatatatattatatataacaatggtgtgagtggaataatcactgggattttaatttggcaaaatagaagacttgatcatgagtgaatgcatgaacctcttcttaataattagtacttaaattgaggctccattgtaataactatagtactgtccacacttaaaactttttggatcttattttttaaaaaagaatttaaaaagatttaattttggaactaatatttatagt

SEQ ID NO: 249310 - DNA, 898 bp, Cannabis indica
caagtaattttcttaataattctaaataaaaagcttacaattatttgacagcgtaagagctctctagagaatataactttgactcccaaaataatggatgactccactatttataggagaagaatacatgaattaagttttccaaacaattaggattaaattgggaaactgagctagtttcttattatttctttacaatgcatgttaattccataaaaatagggatttaaatgagagatatttatgggaaacatccttagaaattttgatttagctgcatttaccctggacagagtattcgacttaatgtcacgctagatgctactcggatgataatatttaccttgttcaaatatttaaggatatcattcttggatataaattaccctaattggatacatagaaggaaatatcgtccgaccaagttcaaggaggttctccatgtgtcaccttactagatgccacatcaccttgtgtggaattcaagataacatttgccccctaattctacatgagaacaatctgttcacacgtgcacttactcggtgattaagtcagtcggatgggtgacacgtgttcaatcttcgtactctttcttgatcctatgagaagaatattcgactacttctttggtatttgggcatttaattccctgcttcgaaaaatgagcattgattcgcgtgctgacagttgtacttccctaatgagtaccgattacactttttttggcggggcaacccaaattttgaaaactgtattactaaattgtcattccaacctcctatataaaggggtttaaacttcatttgcaatcttttacacattttcaaacttaagagcagtagcaaagatttcatttttgctccaagaattccaaaatttccaccaaggtttagaa

SEQ ID NO: 249311 - DNA, 525 bp, Cannabis indica
tcatcctagtgaagcttttcccatgtttttcctggccaattccaacaactcagtcatatccctcacaaattggtatgttgatggacagacaccttgagacttctgtttagccacctcgtgtggcatcagcgattgtctttctaagacaatctccagtggactcattcccactgcagaagattgttgaatgttatagcaaaattgggacacatcaagcaattaaaacccagttcctctgacttgcagtcacataatgtggcaagtactcttccagcaatgatgcattctctccgtctgaccattagtttgaggatggtttgctgttgaaaactttctgtctgaaccaggcatgttgaacaatgttgtccaaaacctccccgtgagtttggaatcccgatcattcatgatgtcttcgggtaacccaaagtacttgaccacatttttcataataagttctgctgccacattcgctggacacgcatgatgcgctggaatgaatatgccatacttcaagaatcgatccac

SEQ ID NO: 249312 - DNA, 543 bp, Cannabis indica
cattgcaatctctttcttagtatctgaatctccaatcttttgttcactagttaaagagtactccaggttcaaaagtgtctgaatagtgactacggttgaattgaactccaatttctttcattatgggcatcttcctgttgatatctcatgaaagaaggagagaagtataattgattaaaatgtgtacaaatcaattgaaatgaaaatgagtccagtgaggttaatcataaaagagagaagaaaaaaaagacctgaaaatgagattggacaacagctgcaaaatgaacaagaatacatgatatcaaacaaagaagacatatatatatatatagatagatatatgtataaagattagacattaatgtagctgcaatgcaacacccttgaaatcagaggaccttgactcccactggacaaagacacaacccaggcatttgctgagacaataataagaaacagaatcacaaaaactcagttaattttcttttcatgatactaagataggataataaaagaaatctacaaaacatagaaataaaaatc

SEQ ID NO: 249313 - DNA, 744 bp, Cannabis indica
ttgagtttgaccaatttataaggttattttttttttatttttaggcctttgtatggtatttgatatgccatatatatgtaaattaggtttttaaatctcatatttaatgtttttatttgtttagatagttttatttgtcattgatgttggaaaaatcgcaggagtttgctaccggtgctggaaaatcactggagtagcggtcgatgtcgaaaaagtcgtcggagttgctgctgacgtcggaaaatttttcagaattggcattgtcactggaaatatcattgaaaaaataccaagaaactggtttcttaaaaaaaatcgatttcttgatgaagaaactactttcttggtgatttttccagtgacaatgccaattctgacgacttttccaacactggcagttactccaacgacttttccagcaccgacagcaaacttcaaaaaagtcatcaagattggcatagtcgcaagaaaaattaccaagaaactggtttcttcataagaaaaaaccagtttcttgatgaaaaaccagtttcttgatgaagaaaccagttgcttgatgatttttctggtgatttttctgacaacttccaattatgacgacttttctggcgttggcagcaactccaacgacttttccaacaccggcaactactccggtgactttttggtaccaacaacaaactctaaaaaattcttcggaattgacattttcgctggaaaaattactggaaaaatcaccaagaa

SEQ ID NO: 249314 - DNA, 902 bp, Cannabis indica
attgtaactctatttagttataacctctcaatcagaattataatttatttggttccaaatgtattcttgaatagaggttctactccatatatataatagctagaatcatgtgggtggttgaagctcagtattacttgggatcacaagacaaatagtattacttcatttgaaagctcaaatgtgattcaacttgttcaagaatatgaaagaatgagtaatgtttaagaaaattatgttccatatttcccacattcacacctattattataataacaaaagactccaaaaacaaacacatctcattcaaatacaatcttaacagcataagaatgtacaatctcacaagccattcaaatccaaccttatccatgctaacattttggtacattcaaaattgcattagataatttcttaatgggaaattttgacgataatccagttataatgattcattttttaattgcaaaacctaaaaaatgtaccaaaaatttcaattaaaatttactatatatacagtatactcaaaaatacagtgaagacggagattaatacatcatacacggactctggaatcccaagacaacgtcgtattaaactaacaataaaacctttcaaattgtatttttgaaattatattactttacgatcaaaagtgttattaaatattttattatatataaaagaaacttaattatttgaaattttaaaatgtgttttatatttctcacctacctatcataatcgttttttataacctcaatgctataattatgcaaaattcttttgaaaaaaaaaataaaaaaatcatgcaaaacatttttttttatgaaattcactgtacaaatatatatggttgtagttaataaaactatatattctaaagtctcaattaaaagtacatc

SEQ ID NO: 249315 - DNA, 612 bp, Cannabis indica
aatgcacaatttattaacagacatatatgtttattcaaatcttaaaccatataaaaaaatcaacacaatataaataaaatgagaaaacttatcaatagtgaaacgtatcatcatgaagctttctcagaaaccaaaagtacatcattgattccacttctaaagaattgccggccagaaagagatcaattttctgtcacgcaaacagacaagtattactaaaaccaaatcaattcaaatcaaggtaatattagtcaataaaaaatagagagacttatctgataattaagtccgaccatcgcaagcacccacgggcttcaaatgataagagaagtcttagcaccatgaattagcaagaacaagagaaatctccataccagaattaccagatccaacaaccaaaatcttcttctccctaaactctttcccagatttgtacccagtcgagtgaagaaccaccccgggaaaactcctcgtcctttgcgtctctttgaactaagtttcgttctcgcaatgagataaatggcgaaagatcgggacacaaagtcatgaatttgtttcggagtcgccatcggaccaagggaacgagccagaagattcatcggagaaaaagtt

SEQ ID NO: 249316 - DNA, 1513 bp, Cannabis indica
aatttcggatgcacttatcacatctgtctgaattgattattgttaacgcagatttttcgttaaccaaatttgagcctcacaatatttatttcacacagaaaaaagaaaagctataaaaataaagatatgaacacagggttttttacatggttttccagttaaaattctgcatagtccacgagtcaatcttattcagatttctaattatttttttaggaactctcacgtatgaatttttttcgtcccctttttactcttgtttatcactatttataattacatagtggaaaattaattacaaggtttattgaaatatgtttacagcaattatctctaaaattgtgggatttgattacatatcacgtagtgtaaatagggtttatgctttgaaaatcgtatagctgtgattttcacgctttttgtaaagaccgcttagcttaactttggaaattagcagataattagggtttaattatgaaaattagctattaaatctaaattattaatttatgatgatttattcgaattcagaatgtattttatatgtcataaatagaaatttcataattttgcatgtttagtgcccagcaacattggaacgcggtgtttggctattagaatcacattttagtattttttagtatagcggggcgatatcgttagacattgggaatgtcgtgagtagtcaggattttagagtttcccaagttaccccttagtggcttttagtgatttttggtgttaaagggaaaaatggtctttttagcaagaagtgatttgtcttctgtggggattgaatatttaatattaatctgattttttatatgattaataagctgatatttacttagataaaccattttgttttatcatttattttgaaaggaattaagaattcatgaaaagtataacttctctcaaaactctctctcattttcgaacactctagaccagctagggtttgtttcacttcttctcaattcaagctagtttctgcaaggttttggagtgcttaagctctaggtaagcttttgactttgtcctcttgggttttcttgaattttaagaaagtggatatgcatgattttgtggtttatgttgctatagttgttagggtttgatgttgttttctggaagttaggtatgttgtttaatgttgatttaagcatgtagtagtggctgattgttgagttaaccaagctttgagtttagaagctcaaacttggagcttccatggtggcttttgtttcttagcatcttatgatgttttattgcttttgaaatgttctttgggatgtatggagcaggtctggagagtttcatgtggattggggttgatttgagtgagttaggaaatttttagtctttcctgcactgaaccggaattccggttcagaggggcctataggaaccggaattccggttggctcccaggaatccccactggaattctggttggggaaccggtctaccagttggggcagttttggcaaccctagtttttcccattttt

SEQ ID NO: 249317 - DNA, 704 bp, Cannabis indica
tctttttcacatacctttttttttcattcacatgatatcgtttttaggtctactcctttttaaataatatttctaacatgatcattatattgttcatatataatacttgtacttttccttttttgttaatctaaaaattttatacaaaagaaaaattaaaacaccaagttcatgatggtggagattctagagacaagaggctccacctcctcaatcaattgtcatttctcggtgatcattaatcattatgtaattttgtcccacttgttttaaatatgtttttgaacacgatgaggaaggaaaaaaaatgaacttatctttaataattttataactgttattagattttaaactattttttatataatttttaaattaaaatataactaaataacttgaactaattttgaattgacatactaatttgacacttaaagtattaaaaataagattgagtgtagaattacctctacttagaggtcattcttactatttttattaaggttatgtgtataataattttaaattataaagagtttttgttacaaatatttcattaaaataagtgaaagaaaaattaattgctaaatgatttttacttaataataaattgtaaaaaattaattaataattattagtaatttaattttaaataattaattctaataattaaaagtttataaagaaataaagtatcaagttac

SEQ ID NO: 249318 - DNA, 1464 bp, Cannabis indica
agatcctggtaaaataaattccaacatatatatctctttgtctctctcttaacttaacataaaaccctaatctactcttataacagccgctccctccctctctattttttgcgatgcagccgctctctccctctctattttttcaagctgcgattcaggcaggcgacctgaacacaggcgaacctatcactccttagacgaacccgtctctccttaggcgaacccgtgcaatggcagggtcaaatggcttccgacgatctctcttttcaatcggtttttttttgtttctctctctttaaatgtgaaaattgtttgaatctatcctggatctaggtgtttgaatctcgtcggtggatcttcagagttacgttcgacgtttcgagatggttgtcgacgacgatttgttgtttgtggttcacaaatctgtgaagtatgatctgaggtcgacggtgcctattgaaatggagtaagagattaccagaaggataacgaagacgaaggctatagcggcatttctgtacattttcagtgatctgatggggatgttagtctctctgtgctgagtagtacggactatgttgccattgattttgttaacctaataataatcttgtttgggctctctttctcttaccttttttctttccttgcctattgggctacgtggtgtactgaaattaagcttctcttttctcaatttttatttattttagtttatactattgtatgttattatgtgattattttgtaatttttggtgattattttgtaatttttagtaaatttacgaagaaaatttaaaattgattataaaatatttatttggaggtaattatgtaaaataagttttagaaaaataaatagcataaaattaaaatgtaaaagtaaaaaaaaaaggtaaatctcctataattagtaaatttcttaatatatatgagatttatattagttattatattagtatttgtaattgttaaatttaatagtattaatatataattaattaaattactatttataatttttataatatataaaatcagaattaaaaaattaaatatatattttttaaaaaaacaaataagatagtgattctttttgtgtgtcactatatctataaaattaaaataaattttttaaaaaaagatatagtgacgttttttgtgagttgctgttactttttcagtctaactctagatgcttatagtgatgcgcaatgagtggatgcaaaaggtttcagtgacacgtgtggagtgtcactaaaaacttcctttccagtcagcctcattagtgacgcgcgttgaagtgtcactatacagttttagagttacttaatatgtgtcactaaaacccaattttctagtagtgttatggctcacacttaacaagagattgaaaatcagaaatttttgccttcagaaaagttgagcactcactatccttctatagccgacctctctctct

SEQ ID NO: 249319 - DNA, 545 bp, Cannabis indica
tggataccaattaccatcatccatgttgctatttgtggcaatgttagcttgtacctgctgagatccattgctgcttgtattcaaaccagaattcataccagtagctacaccagaagtcataccagtttttacacctgagaatgacttatcaaaccgataaaaacaatcatgtgctgtatgcccaaaccgcaagcacagctgacattgcactttgttattgacatcatttccagatcttcctcctcgatgatagaaatttcctcctcgaccaacgcagaattctgaccagagaatgagccaaattcaatccctcgattaaaatttcagttgttagagaaatttccatattgaccagttcctgtagactgagagttaccacgaccaaaatgttgttgtttgaaccttctccacgcaacattggcttccatccatgaatcttgatcatcaatcacaagatttgcactcagatccacatcttttccagacttctctatcctcaattcagaagctaaaagtaaagcttcgatctcacctactgtgtattg

SEQ ID NO: 249320 - DNA, 588 bp, Cannabis indica
ctatttggagtgaaatttttttcacatcgcccacatagaaggactgcccagctgccgcactgcaaaacctaataatttccgcgtctaaattcaccgcgtgtgggccccacgcacctctatttgccgctgcccaaaaatccacgcactggtgcgtgagggcgcgtccggcatcgactccggtaacggtcgacacccgtcacactcctaccccttccccgtcctccttgcatcggtctccgacggttcttggcattttgtggtttgatacttttgccttctttgtgtttgggtatctattcttttgattttactctcttccttttctctttcgattgtttttgctttccagattatggcagagataaaatcagattcaaaatcaatcgttgtttttgatgtggttcccgtgatgtctaaaatcacgggccataaattgattggttcaaattatttggaatggagtaagacgattcgactgtacctgaggatattgacaaagatgatcctcccaaagaaaaaggcgattcaaggaaaatatggctctgtgaggatgctcgcttgttccttcaaattcgaaattctatcgat

SEQ ID NO: 249321 - DNA, 693 bp, Cannabis indica
atgtgaatcatgcaacattaaatgttatttctgacctatattaataagtaaatctgattatattgaaatgagttttatttagggcataaaacccaacagaagggtcccaagcaggtaactagtatgattaagatttcacttcagttagcagaagacatggtcagatcgggcattgagtttgttgttggcagacttcgtaacttgacactacaatctgatttgtcagcacaagttaaagctgctcaattagctgatccagaattagtgaagatccgagaagaggtttcagctagtcaagccaaagattttacggtgtcagatagtgggatgctattatttaagaccaaggtttgtgttccaagtagtgcggaacttagaaatgagattcttgaggaggcccataccactccatgttcattgcatattggcactaccaagatgtaccaagatcttaaaccctacctctggtggagcgggatgaagaagaatatggtagaatttgtatcccgtgcctaacttgtcaacatatcaaggctgaacatcagaaaccggtaggtttattgcagtcattgacacttcctgagtggaagtgggaggatatcaccatggattttgtggttggattacctagaaaccatggggttgcacgattcgattttgggttatggtagatcgattcacgaagtctgcaca

SEQ ID NO: 249322 - DNA, 675 bp, Cannabis indica
tatatttagaaaatacagggtccattttgtcatttaacaaaatacagggttcaattaataatttttgtaaatgagaagatccaaaatagtatttaaccttttaaatttaatattgaaagtatcaactttatcctgagaagaacatatacgaacttcatattatgaggagattattgaatctgggtcttttaattaatcgagttaatttattacccttattgtaaacgtatcacgcagttagacccatatatttattaattgaaatgtgagtataacaattattattagttatcaagttattaattattgaaaatagtgttcaaggttctgttatcacatttgttaagataagtttcacattttccatatagttctttattgttatttctttcttaatttttatttttcaataatgcttattagcagttaaaacaaaaaataaaatttacaaaaatacttaatatttgatatgattatttttttttcctactaatgtacattttatttatttggtaagattatataatttttatcagttgctaattattttttgatttaatttaagtcgggtttaagtctagggtcagatttaattaagttcgggttagaggctgggttcagcgctagggctatgggatggaatttgggtccgggtctagtcggagtctaaaatat

SEQ ID NO: 249323 - DNA, 1011 bp, Cannabis indica
gagttattatcgtcattggataacactacaataataataggatataggcacgtccaagtgaggcacgacataaagtggtgccaataaaatacttataatgggccgacacacctaatgtcgtgcccattttctcataattttttttttaagttttaggggcacgggggcacgatatcctagacatggggtatgacaggtcatatccccattattttttaagttagaacatcaattcaggcaataattttcccgcatttatagttgggcacgacaatgtcaggccccctgccctgacatggcatgccaattgacataatgggcacgacagtgtcggcatcatgttttcccccccttttttcgtaaaaaaaaaataaggcttgagggagtcatctcgtctaaaccctttacccattcactcgttctctctgtctctctactcataccgccagttccttcttctcaagccctcacactatcggtctttctcttctcaagcccaccccgatgatcttcttcttctcaaaccctcacaccgctaacaatgacaaatcatcagtaagttttttctctttcaggtctctacgggtagctccaaccggccatggcatgggtaacacaaaaagttagtttcttcattttattttcttgagatacattattaatttttaatctacactttgaaaagggaagactaattggttattcataatatacatgttttactcttgaatttatttttcatatttgattttgtttcctttctctttgatttggttttctaattaattttcctttctcataggtctctatgatttacagagaagacaaattgattattcattatatataaagacaattaaactactgcaaatatgatgttttgtgtcgattttgatgtaaatgaaattaaaaatttacgcaattaatttgtggttgaattttgcatcgaatatgtactgatgcaaggtttgtgttagtttgaaggcatttgtgttggttcacaactgatgc

SEQ ID NO: 249324 - DNA, 997 bp, Cannabis indica
tttttaacatgttagtcaattgattacacaatcttaaacttatccaacaaacaaaacaaacactttgatttttcttttgttgatgacaaaacctgcaaaatgaacctggataataaaagcatatatataggccacttgatatgagaataaactcattttggtaccaccctcgatgcatgaatatgtgtaccaaagatcatattatataaatatctttctatatgtataaaattgaaattaaagatggaacaaagaaacaatttcttggttcaaaaagagtactgccataactagtggtccaatggtaccattcatggtatttaggctataatgtatagaaatatataactgaaataaactctgaaaacaatggtggacaacctgtaaaaaaaatataagtaaattcataaaacaaataaaaagaacattgcagttatcgcccattctcattctcttcatctcatttgttctgctagctaagaggtttcttggtccccttgccttataatatattcttaattataacaaaatttttcttctccttcaaatgttactgtgtgtaatatttaatttaatatatataaataatataatttttgtcaagactgatatttaataatatagtaacattagtaaatttattagattttatggtattattatgaaccttttaatacttgggccaagcctgccaaatgcattgggtctttaaatacgtttgtcgctacaagcctgctaactcaaatgggtcttggaagagaaaaatcagtggacccagcccaatagtgtaaggaaaaaagatggtattgttttataaatatttttttataagttgtttataaaaatatggagaaattcagaaaactggaaaaatgaataaagctaaaaatttattattgggtgtaggattttaatttcttcttctgctgagagtaggattttgaagcttgtatttgtttggtgtggaattgagaattagacaattatcaattttttt

SEQ ID NO: 249325 - DNA, 895 bp, Cannabis indica
tgagctgttctctaagccctttgcggcgcaccttgtctggtgcaacacctgacatgctgcactgaaacattgatgagatccttcaatgaggtaggtaggtcacatgtcaattctcataagtgcatgtgactaaccccatcctttgatctcatcaaacaactctagtagttataggcttcacaactgggctgaagatttcagtgaaatcaaaaccaggctacttatgaaagcctttggaaacaagcttaggcttgtacttgttgattgtcccatctggatttttcttaattctgtaaagccatttacaaacaatggtttgtctccttgctggtaatagaataattgtccatttgtgattcctttccaaagctaacacctcatctaacatagttgaattccattgttcaatttgaagagcttgagctactgaattgggaacctaagtaacaatatacacctttggtttttgtatgcttgattttgacctggttctcatctagtgagagttgggaaactgaggaagaggaattgtaaaaaaggagcatagttggtgttaagaggttgctcaggtagagtagcaaagtgagataagatattggtcacatcaagtaaaacaacttctagggcaggtggtgcttctgttccagtaggagtaacattgttgtctggtgtctattcattctcagagccactactagaagcagtgacatcatgtgactcagcttgatgactagaaataggagaatcgggatgtgaatgtgatgagcgtgattagagatcgtgagaatagggaattcaaggagaacaagtaaactaggagcagcaggcaagtagttggaactacttacagttggaattataatagagagacttgctgcaagttcttgtacagtga

SEQ ID NO: 249326 - DNA, 579 bp, Cannabis indica
tagttttaagcttgacatgtttgattacaataaaagatgtgtggatgacatcctagatcaatggttatcttttgttgttgagaataaggtcaaggaaatatatcttaacataagccctgacacttatgatgacactgatgaagatggggatgtgggtcactccgacctttgctactgcttacctaaagtattgtttgacaatgcaacatatttgactattttgaatttggaatggctaaaggtggatgcttcttattcatttagttttccatctttaaaatctttgtcattggaaggagttgtaaagtcagatactgcaaaagatgatgtggtatttaagtttttgttgggttgcccttctcttgagaaattgaggttacttgattatgagttcttatgtattgacaatacgccccaactactgcaaagtttaagccttaagttcttggaatttaaggatgtacatattaattttacattacaagttgacactacaaatcttgaatctttggttctatgttgggttaacttggacaaaatagatctcttcgcttgcaagaaaattagaaatctctcatt

SEQ ID NO: 249327 - DNA, 1945 bp, Cannabis indica
cccaccaaaactgagccatcatcttttcaattttctgacaaactgaaacagggagacgaaagcaagacatagcataagagggaattgcctggattacagctttcagaagcacctctttaccagctttagaaaaaagtttctcattccaagctgaaagatgagaacctatcctatgaagaataaaatcaaagctgaattttttggaccgaccaaaacactgcgggaccccgaaatacttgctaatgaaaggttttgcttcaagcccaagtgtatcaaagaagtaagaagagactgcagggggagtattgggggaaaaaaggatagaagacttggagtagttgactttctgaccagaagcaagattatagagagtgagagcctctttaagggaattacatgaagcaaaggaggcagtggtgaaaatgagggtgtcatccgcaaagagtaaatgtaaaacagcaggggcagttcgagcaatagaaatgcctttaaataatcccaagttttcctgaacacgtaaagcagcagttaaaccttcagaacaaagcaagaacaaatagggagataaaggatcaccctgtctgatgcctctggagggaaaaatgggatcagtgatttgcccattgatactaaaccgtatagatgttgaggacacacactgaaaaataaggttaataaagtgaggaggaaactggaagcgttgaaggatagccgtaagaaagctccattcaacacgatcgaacgctttctccatatccagcttaagaccaacccaaccaatcttcccatgcttacgatgatttatggcatgaacaagttcttgagcaatgtaaatgttatcaaagataattcgctcatagagaaacgcaccttgagtagaagaaatgagatcccctaagacaagcttaagcctattggcaatggttttagaaacaatcttataaacagttgagcaaagactaataggcctgaagtctttaagggttgaggcattagtttttttagggatcaagacaatgagggtgtcattaatggaggaaaaatcagcattaccattaagaatatccagaactgcagtggtaagatcaggaccgatgacagaccaatttttctggtagaaagctgggttaagaccatctaatcccggggctttatctccagaaagttggaataaagcttgcttaacttccccagcttcaaacggagaatccaaaaaacttatttgttgcaaggtcaaagatttatcaatggctgcaaagatgaggttagtagctgtagcatccgagctttgggacttaaacaggttatcaaaataggcacaaacctcatgacaaatgtccgaaaaggaagtaacctgcctcccatcctcacacttgagttttcgaatattattagtctttttcctagcagtggctttattgtggaagtatttggtattcttatcacccgcattaagccaatggattttagatcgttgtttccaaaaaacctcatgcttatagagaaggaaatcaagagtggattgaagcgtggaggcccgcttaatgtcctccctattaagaggcaaattggaatgaagagtattaagagaattttcaagggtatgaatgcgagatgataaacttttaaaagaaccgttccagtctttgatggcagcaatacaagattgctgtttagagaggaaagatccaagaggtgtggtagccgaatgagagggaactttgctccaactatccttgaccgtatcaaaaaaagaaggctcagtgagccagaagttctcaaacaaaaatcttttattcctaggagtgtgtaaactggcgtcatccagaacaatcttaagaactctatggtccgaaccatagaatccaagatggtaaagaacagccctagggaaatgggtgagccaactagaattgacaatgccccaatccaacctttcacaaag

SEQ ID NO: 249328 - DNA, 649 bp, Cannabis indica
acccaaactcagacataaccccagacccggactcgaaacaaaacccagagtgggactcgggacccgaacccaaacctaaactcaaacccaaacatggaattggacttgagacctagaactggaccatagcttgtcaaccagacctagacccaaacttggaacccaaactgcgaccccgggacctgaatcgaaaccagaccaagacttgtgatgagatccagatcttaactcgagatatgggaaccagggtttgacaagacccatagtcggtgtttggatcttggattcggactaggacctgaactcggaccaggacccgaacccagaaccgaacctaacacccaaaactggaacctaaacaagaactacactaggaccgtgacaaggacccgcacccgaacccagaactagacatggaccctgccccgaatccaaacaaagatcaaaaaccgagctcgggcccggacccagtcctagacccagaccgagaccaagacaaggaaccgaactgaactcgggacctgattgtagacacaaacccaggcctggacctcgaccaagatccgtccctggaactagaaccgaacccagacccaaacccgaacgtagacccagacccaaatcgggatcgaaatacgggtcctagaac

SEQ ID NO: 249329 - DNA, 764 bp, Cannabis indica
tttccctttggcgggcctataattgcgagtcaatcctttgtgcccataaactactacttcacctgatcggtaaccttgggattcctaattaaaactacaccttcatctcggtgggatcccagatcgcttgaagcttcctattcgcctttcggggggtcccccgtttatagataggggctatctcaaggtagacaggactaagactactctacgatatctttccgtggcaccggtagtaagtactatatggtttgggtctttagcaggattattgatagagatcaatcgtttatttctggatgcgttgatatttccctttttttaatgatagtaattgggaaggggtgacgaaaattaaattagagatacaatcaaaaatttgtgactaatccctctccttctcttcttatcttaatttttagaattcaaaataaattcgaaaaagaataaaagcggattgatccgcgtgaaactaagaacttaggtttctaggctaaaaatttaactaataatagaatgtgaaaaaaaatggactagctgtggcaacaatatcatacaaaaaacttcaatattgtacagctattataaattctaaatactaaattaaatatttaagtagaaatttttatattacttattattactatattgattgcaacgaaatctttaataattggatttcaagttagcaacttctatttttttccttcctttcttcttcttcgcttcggattggaaaatagaaaaatagaagagttgaatca

SEQ ID NO: 249330 - DNA, 546 bp, Cannabis indica
taattttataaaatattgctaactattcgtataataaactaaaaaataaaaattaaagtataattttttttaataaggacaaatgttttgatcaaaagaaaaattgaaccaggtgaatatatacagataagataaaaatcagaccaaataaatgagaaccaatgaaaggtcataaaatttgtagatacagactaaacttaatttatatttctttctagctatatttttccaagttcttattgatatgtttttctaactttttcttcctataattctataaattcttatttattggcttcatcttgtgcatattattcattttttttttaagaaaagttaatattattcaatgtttgtaaatgtgaaattaagaaaaaaaaagtgataaaaaaaaattaattacatacttaatagataaaatgtaagagtactcacaatagtttgaagttttaaaaattttaaagaattgtactgaaaacatgttagtaaatgtttttttttttaattttttttttaaaattttactattcatgctttatatttata

SEQ ID NO: 249331 - DNA, 725 bp, Cannabis indica
gactttgattttcgccattgtggtctgaattgaaggttcatccacggttcttgttccttgatcatcggtagacatggcagatgatgaaaagaaagaaaaagaaaagaagagaagaataagtcgatgaagaattcaatgaagaaatgaattcaacattacggactgtgatcgtcgccggagaagagaggagaacacacggcggggataagctgaaccagatcagaatcgaaaggaagcatgtcttccttgctctgataccatattgcggaagagagtgaagcagtaaaaggtttattgaattgaatgaattcattgtgtacaaacagtaaaagaatatatacacagccacataggtcggtggacaacaataaccaacataactacctatcctaaagaataggaacaacctaactaacataactgtctaacagtgacagtcctaacttagttatatgtatataagatggcagaggaaaatacagagtaagtatgtaatcttgttactaattttagtaatgaatttgtcaaactttttgttctattgtctaggtgcatgtttaaggccatagagaaacttctaaagtagacaaacttgtcctgaattgccactttcaaacccttcaggttggctcatccatttgttcttacatccatttgttctacatcaagcctattcttagctgccttggccaatattactcgtattgaggtttactttaccaatg

SEQ ID NO: 249332 - DNA, 836 bp, Cannabis indica
atgtattttatccttcaaacacttagctacctataaatgtgtaaagaccgcttaactttaatttgaaaattagctgataaataaggtttaattgtgaaacttgcataatagttatgaattttcattttacagagatttagttgaattcaaaatgtatgttatatgtcagatataggatttcatatttttacatgttttgtgcatggcaacattaaaacgcgatgtttgactattagaatcacattttagtatttttagtgtatcagggaaatatagttagaaatcgagaatgtcaggatttgtcgagattttagaattgagcaagttacccctaagtgattttatgatttttggtgtagaaaagggcattatggtcttttttccttttgggattttttgtcctttagtgagattttatttgaattattaatctgatttttggctgatattacttagataaaaccaagttttatttttcattttattaaaaaaattataaattaggaaaaacactctctttctatttctctctttctctctctcaaattccatagaacccagctagggtttggtcattttcggcataaactaaggatttccagaaagttctttgtgatttcaagctcaaggtaatgttctagctcacctcttattgatttcttaaagttcaagttaggtatcctatggtttttctttgagattaggtgttgtagttgttgttagtgtttgttcttctttctgaagttaattcaaggttatttatgttgaattgaggtagatttaagggctgttgtggtgtttgagcaagctttgagtttaagaactcaagcttggct

SEQ ID NO: 249333 - DNA, 1036 bp, Cannabis indica
gttatgaattgattaatattgagatatagttaatattgttatataatgaaaagattaattggttgaatattgataatgtgatattattatgcatgtgatatatgggctcacctaattaggtgatgtgattttcctggcgacgtacttggcataagtacgagcgtcagtaataatgagtaccgagcgtaggtacgagctcacctgattaggtgatgtaattttcgtagcgaagtactgaatgtaagtacgggcgtcagtgatatgtgatgagtaccaagcataggtagagctcacttgattaggtgatgcgattttcctggcaacgtatcgggcataggtactggcgtcagtggcatatgataagtaccgggcgtaggtacgagctcgtctgattagacgatgcgatattggtgccagattatttcacgggctcacctgattaggtgatgcaattatatgatatatgggtgcaagtttttggcacaggctcacctgattaggtgatgcagttatgtgacatatgggtgcaaggctatagcacggactttcctgattaggcgatgcaatacaagattatcagattaaagcatcgacttgccttattaggcaacgtgatgttatgaagatggttgctctatgaggtaacatatatattaattatatgattaaatcaatatgaattccattattagtataatagttttgtattaccaaatatttgtatattaatgtttattcgtggcagatgctagtagtgatttaaatttcatcttatgaacaatgtgtgatggtttgattcttattgtgtatgaatggcaatattcaaataataaactacatgattgttataattacttttcttgctgagtccttgtgactcacgggtgctatgtggtgcaggtaatgttgggttttatgccctaaataaaactcatttcatataatcagatttacttattaataaagataagaaataacattttaaattacatggttcacatgatttatttcatgattatatgtgtatataatgtat

SEQ ID NO: 249334 - DNA, 485 bp, Cannabis indica
ttttttttcctaataattgtttccagttgctccttaagaattcgggagtgtttattttgctcgcgatgtccgtccatctatcaccaaattagcccctaaggaactaaagtgtgtctttcttggttattctcatctttaaaaggatataggtattattgtcctaatctcaacaaatatcttatttctattgatgttatctttgtgaaaaatacacctttttttcatcttcaactactcctactcgtcagggggaggatgatttgttggtatattcaatcacatcctctacgcctggtacatgttctgacgagtctcttgttccttcacctgcctcgatcataactcccacaatgtcttcacctcctccacctccaccactccctcagcctcctatagtgtaaactaggcaccccctcctccacctgtttcatgtcctacacctgcatctttgtcatcagatatagaaatcaaagatgatcttccca

SEQ ID NO: 249335 - DNA, 780 bp, Cannabis indica
tcttcattattctcgtgactaatgggcaatcaatgtatgtatattcattgaatctagacacatctattattagtcgaacgtggacgctttatcatatccgtacattacacctccctatatactttgcctatactttctttcttaattattaaagactcaaaaattgttttctctaaacaaaataataaaacaacaaaatagattaattaaatttaataagcagttttttttttatatatatatatgaaaaataattttgattaaaagataatctattcaatccatcgcctctttaaaaataaaccttgagtacccaaataaagaagcttccttcattattatgattttttttttttgaaacaaagattgcaactttcattaaagcaaatcagctaacaaaataactttcaaaccagaagggacagaccctctactgaaaatacgatcaggacatgaaccagaagaacgagctaactagttagccgcttggtttccagatcgtttaacaaactgaactgaaatatgaaaaataataaaggaccgtgtaagattaatacaatccaaaataataagaccaagaggagaaagaatttgactcttgctattgatagcattaaccaacaagagacaatcagactccataatcaccgctgtaggacgaaaatccttagcaacacttccttcttcccatcatgattcaacccaactcaaagcctctttcaagcttcgtggtgaaattgaccctgttgttgctgaggcttccttcattattagtaataa

SEQ ID NO: 249336 - DNA, 1560 bp, Cannabis indica
attgttgaaaccacgcacaacttgtgtgtttttacttttatacactgtttgtttttctggtttctcctggagttacaaagttgtattctgtaactacggaaaaactgttttcagtaccagtttcattattccgcatttgattaatcacttaattaaataattaaactgggaatattaaaatacagaatttcatatataatccttttgttaggagtgatgacatggcatcctaattgagctttgttgatcattctttaattttctaattttttaatttttttagttaaaaaaatatcatcttatcaattattattataaaaactattcatggactctaattaattattagtaaaaattctttattaatagtaatttttgtagccaaagtataactgaatttatttaatatagagcattgctattaggcaccagtggtgcctagcaccttctcgacatgtcacgttacgattggctagcgatactgcttaaaagctattatattaaactatgtgggacccgatacttagttggaccaatagcgatactaacacataagaaggtgctaggcaccactggtgccctttagcatttctctttaatataattataatgtaataaaggaaagtataatggtgatgacatgacagtttctatgtaatttcttttcctttgttttcccatattttcacatttttttattataatgcgatagttacaagaaatggtaataataattaaaaatagttatttgtgttgtcatcaaatatattaattgcttaattgagtaactcacgtcctctaatagtctatttaatacattaaggttttaataagttttttcaaaacttttaatcttcccaccatagaatcatcatatataattaacaaaatagaatcaaaattaaaaaaaaaaaaacagagtatatttacatataaaagaaagagaatttccacatggtcaaagtatatatatagggatatgattttgtcccgtgattgtactttcacgtaatgaatttcgtgatgtacggcagccatcagacgatggactcatttgatctgacggctgagattgatctgggggtaattagggttaaaaagtagaaacgtaccctgacactcctttaatgtaccccgagacccatctaatataccacggaatcacagaacaaaatcgtgtccttatatatatatatgtgagtgaagagtttgcatcattgccatctccaactaaaacttcaagtaagttttattgtaaatactttaattattcttcttttttctttttttccttacaaagttgtctttagtaagttaatgcatgactccatgttttatgtatatgtcatcttataaaagtgaagtaaagatattaatttctattgagatatataacggtatgatataataattcaagtaatttatcggttaatatatatttacacaaaatatttaagctcctatttaatatttttaggggaaaaaacaggaaaattccaaaaagggtaaaataattcaaaaaaaactgtgggccgacccaatcaacatttgtacagccca

SEQ ID NO: 249337 - DNA, 640 bp, Cannabis indica
ggcgagaaagagaaacttcaaagaagggttgggtctcggggcttagaaggaggctgaagggttggatctgtaaggtcaggaagttagtttttgggtttatttaggttgaaggtggccagaggtgacttttcgaagttgtatgagaaggaggacaaaagatagagggagtgtgtgtggacattagggttacagggagaaaaatgtaagagaaagagaataagaagggaaaaaagaaaaaaataatcatttttttataattttgaattatttttaaaatatttaattaattaaaattatgtggaccattaaaaatttgtcatgtgtgcattgtggcatgcccactatggcacttaacagaagtgaggtttggaaggttttaccaccaaaaaaattggtttatgtggttacgtgtcactaatcatatagttcaagtagtttttccgccaatatctcccactaaaatttgccacgtgtccacttgtgtacactgtggcatgtccaccgtagcacttaacagagtcttttgaacggaaggggaggtttggaagattttaccacgaaaaaattagtttatgtggttaagtgtcactaatcattgagttttacgtagttttactgccaatatcctattttaaaataa

SEQ ID NO: 249338 - DNA, 606 bp, Cannabis indica
ccaaggtttttcccaaacctctcccgaccaatagttttcttccaaggactatcaacctcacaggattgttgacgtgccaatctaactatcggattgttgtagtgacaatatcactcttctcgggttgtttacaaagtcggtgtcaacctcacctacaattgagttgtttttatatcagttccaacctcacctctcaatacaatggataattgattttgaaatacaaagaaaactctctccaataagatgaaatacaatgtgaaatcctagagagcattgcatgtacactagagaagataagaacaagtttggctcaagtgtatgtggttggtgtgtttatgaaaagatactaattccttagcttaggccacttataatgattttatatgatgaatcgaatctcaaccaaccttaatttttgagtgaaaaacaagtttatatagtgtaggaacaaaaactagctgtttagagccgttagcacatttttcaaaaagaatccttggacaaatggactacctattttaaaacggactacctatctgtgaaaaacggactaccgattttcaataggtagggcgaaaaatgggcaggttcaaaacatgcatt

SEQ ID NO: 249339 - DNA, 1151 bp, Cannabis indica
aaaatataattcatttaacgaaaagtattgtgtgccaaaaagttatttagatttgacacatagtaaattttgtactaaatttggcataatatttgctgtgatgtaaaatttacactacaataaatacattatttttttttatttacatttatggcatttctattattttattagtatatttaactatcacattaaattataaaaacattttatattatttttttagatcattgttattgagcaacagtagtgcttagcacccttaagacgtgtcgccttacgattggctagcgatactccctaaaagttattatattaaactatatgggacccgatactaaattacaccaatagtgatattgacacgtaggaaggtattggcaccactgataccttttagcatttctctattttttattgtcttatatattaaaataataataaaattaattataatgttattagattttttttttattaaaatattaattagatattaaattttacatcaaaattttacaattttgtattaaagcacaaagctaaaatttgatataaatttaccacaaaattactttttatgtcaaatatagcacaatttttacatctcccattgaagttggtcttattatgcttaaagttagagcactcgcattaatttctctagaataaaaaaaatttaaaaatcgtacgaaaatcatctgcataaatgctttaaattcattcttaattttaaagttttttaaaaaactttattattcatacgttacatttatagaatactattcattactcaacctaaatatgttttattaattattttaagttttaataattatttttgtatgaagatatatgtatagattaatattatatatttaaacttattgtttagaatttctttcaaaatacgtagtagctcaagagaaagttaggtgatactaggacccacgttacaggacacgtcgccttaattattctcgaagtcctttatttcaaaagaataataacagattagtcatctctgtgagtattcaactggaccacaaaatcccttgtttgttcatctctgcaagtaaagtatatatagaggatggtacaggaggagtaatgaaagatgacgtgtcactcaagtgttgggttttatgccc

SEQ ID NO: 249340 - DNA, 562 bp, Cannabis indica
gactcagatgaatctttaaactcatacccgtcctcgcccccgaaagtcaacccccgtacccgtctcattaagtgcgggtacccaaacccgcaggtataattgccatccatagagactaaaataaataatacaaatagaattgggttacaaaataacaataataataaaaaaaaataaaaaaattgattagtggcttttgatataattaatattatcattttgtgtttattaggaatactttttttttatccattaataaaaaatatttttatattatatttcattaaaatatattaatttttataagtgagttgtctaatatatttttttctttcacttaagtgtagcatataatttacattaacctaaaagatataatgtaaacataaaaaatggatatgtcttaaaatatataaaaataaaaataaaaatcaaaacaaataaaataaagtaagcatacaataaatatatataatttttggggtaagttaaaaaataccacttttattaattaattaatcaaatttacctctacttttatatttatttgaaacatacctct

SEQ ID NO: 249341 - DNA, 821 bp, Cannabis indica
gcttcgccatttgatggtgatgggcatggaacgtgagtttttgtggcttttcttaatatattgtactttatattgtgcctttgagcctgttttgattttctctgtttcatatcggtatcattactgccttttctttttcccatcacgaattttgaatctcagttgtggtcagaatgtgtgaaaatttaataggtacatccatgcattgcagtttgggatttgatttggtatccttattacacatatgcattgtgattgtgataactttttctataagccatatgagctgcatagaggatctctcttaaggcatcagaagatctagataacaaagtacatattgcgtgtagatgctttaggctcaggcaaaagatagagccaacttttgaatttacttcatggggtgcttttattcttttcaaattttctgggcaccttagttatcatatttgcaatttttttgcaattttagaagaagaattaaaaaaaaaacggaaaaaaattgccaatgagataactatgtgctcagattcatgttgtttttattgattaagagggagctaattttttcattgaggcactttaccgagattcagacgtagttcctcataatgattacctaaaataacaactttctgtgtttacttgttattaatgctattatcactgttacttttagggtctgtattctagaattcagattttactttacccactcaggactgcataaataacagctctcctttccttgtcattattagtagtcatattagttcattgttgtattattgtcatttttgttctgtcaaccgaagactggt

SEQ ID NO: 249342 - DNA, 634 bp, Cannabis indica
caaatgaacctcaagggtcatggaagaagatatcaatatttttgagctcgagtattggaagcatttgttgttacgtcataatctggatgtaatgcacaataagaaaaatgtgttagacaccttgcttaataccttgttcaatattcctgggcagagcaaagattgaatcaaatctcgcctagatttgaaagagttaggattcgggccaatttacacccacaagttattggtcgacgaatgttcttaccaccagcttatcatgctataactaaagcagaaaaacaatatttgtgtaattctatctcctaagtgaaagtacctgaagggtactcctcaaatgtctttgattgggtagatatgaaaaaaattaataattttgagtggtctaaaatctcacgatcaccatatattgattcaacatattctaccagtgagtattcgttatgtgttgcctaagaatgttagatatgcaattacaatgttgtgtttattcttcaaatctctttgttgtaaagtggttgatgtgactaagttacagaatctcaagttagaaattatagatgctttgtgttatttggaacaattttttcccgccttccttttttgtactataatggttcacctaacagtgcat

SEQ ID NO: 249343 - DNA, 605 bp, Cannabis indica
aatacaactttggctgctcaggtacaatttcatcgagttttatctatgcccatccgtgattgtcatgagaaataccttggactcccagcatacactgatcgggataaacaacaactcttcagtgaagtaaaagagaagatttggaggttaatgagaacttggaacgataaacttttctctattggaggcaaggaaatcttactcaaagctgtggtgcaatcgatccctacatatcttatgagttgtatcaagcttccaaccaccatttgcaatcaaattgaatcgatgatgtctaacttttggtggggaacaaatgagaatggcaataaaatccattggcgtagctggaaacttttatgcaaaaacaagtctgaagggggtatgggatttcgatcctttgtccattacaatcaagcattacttgctaaacaatcatggaggcttattgataacccaagctcactcttaagtcgattactgaaaagtcgatacttcccaaacaacagttttcttgatgcccctcacgggcactcaccatcacttacctggcagggaattctccatggtcgcgatcttttacgagctggtctacggtggaaaatagg

SEQ ID NO: 249344 - DNA, 1365 bp, Cannabis indica
atatatcttttgggagttggctgcaagatcgttttaacaactgggatttgagggagaggcagatggggcctatgctttgctgggctatttggcaagataggaacaacaaggtgtggaatgggaaaaccaagtcagtcaaaaatgttattgcttttgtaaatggtgatcttacaatggacttttgctcaagggaaaactttcactccctcttctttcttgattcatagtggagaaggggatgagcattggggtgcgccagaggttaataaactcaagatcaatgtggatgcggcaacatttgcggatcaaaataaatttgggtacgattgggttcgttgcgattctgggggccacatcttgcaggcgagaacggggtcttgggatggttgtgttaatctggctcttgctgaggatcttggtgtgaaagaggtactaagctggataaaggagtcaaagctttctcatgttactatggaatcggatagcctcataacagtttaagctttccggagctcggtgaatactaattctcctttcggttgttgcattgcagaatgcaagagaataatttcagattttgaatcatgtttgtttacgttttgttaaacgttctgctaaccgtgtggctcatggtcttgcctgagtctcatggttatatgctgagcgtagttattcggtggacactgttccgaataacattagtgatgtaattgcgcaagaattattttaaataaagttatcagctgttattcaaaaaaaaaaagaattccaacataaattaaatttatattttgaaacaaaactaaaatcaaaagtctgaagcaaacttaaattttgaacaaacaaaataaaaaagaataaaagaaacccaaatcttcaattatccatcaataatacaaaatttatttgataccctaaaacaaacccagaaatttccaagaatagaaactttatacaggatcctaaatcaaaatatattacaaataaaatacaaatgcaacaactgaaactaaaacccaggtgaagaacaaaggtcagacctgtaaacaaacccagaattaaaaactcaaacctagaaatagaacaaagaccacaaatccaaatgcccgaattcaagctcaaacctgtaaacattgagggatttttttaacaaaggtcacattcagagctaaaggagaagaacccacaaatgacatactaactctaagaattactaaccctgtcgattcacattccaatatggtggtcctcttcagcttgtcgatcctcattcctagcacgaaacttgataaccctttcaaccccgcatgcttctgacttcgatcccgtggtcactctccggtagatctgagtgatgagagattt

SEQ ID NO: 249345 - DNA, 855 bp, Cannabis indica
atgccataaaaaagtaaactataccctcacttcccatatgtatgaaaaacccataaccctatagtgttatttatttatttatgcatatgtaaagaagctactgaaactatcaaaaattttgattgaagaaatgattcagtgtatataccaagtggagatcaacacaacttatgtacttgcctttgggcaccaccttctcatcagaaaaaagaaaaaaaaaagaccatatgtactctttaacaaagatttgaacagtcaaatataaattgaaattatactaaaaaaatgagaactttgtgcggatcaatgattccgatcactgtgctcatttaggcaattgcgaatctagctgcattgtgactggtccatcattaaccaaactgacctataaaataagaaaaatagaaagtgaaaatctagtaagtgatctctacagaataggtcaaaaacgataactccaacaacaaacataacacaaggaaaactggacaaggtaagctcaccttcatctttgttccaaagataccatctacacacaacccaacaaaaggaaaggaagtcaacacaaaaactgatgcagggtatttcttgcaattagagtttgggtggtttattagaattaatataattttatttaattgaacattaaattgtagcttctaaatgccgtttgtcttttttattgttgttgactaaacaggtcgtttggcctttatctatttgcgatcagatcctttaaggcaattgagtttctacagcactcattttatttgagtggtgttgagagagaggtagaagaactcacttgatcgaattcccagaagaaagcctcagatatagaaaaaaaaaaaaaaa

SEQ ID NO: 249346 - DNA, 674 bp, Cannabis indica
taaataatgacaaatttgtgatgtcattttcgccaaatacctcggtggcagccctgaatatctttgctcaaacactacaaatgtcaataactaagtgtcatgagcggtattcagggttaccctcttactctggacgtgacaagcatgagctttttagcaacattaaagaaaaagtctggaaacttctacatgcttggaatgagaaaattttctcaataggggggaaggaagtgcttttgaaagcagtagtacaatccatcccaacttacgctatgagttcttccgggttacaaagaaattctgtaaccagttgaagagtatgatggctaacttttggtggggaagtaatcaaaatggcacaaaaattcattggaagcaatggaaatctctattcaaatcgaagcatgaaggtggtatgggattccaatcctttgttcactttaaccagacacttttggccaaacaagcatggaagatctttgatatgcctgattctttattaagacgattgctcaagcataggtattgttcaaacacctcctttctcgatgctaacattggccactcgccatctttaacttggcaaagcatttgttggggcaaggaattgttgataaaatggctgcggtataaaatcagaaatggtattcatattgcaagtgggcatgatcctt

SEQ ID NO: 249347 - DNA, 688 bp, Cannabis indica
aaaaaaaaaaaaaaaagttcaagttcgagtctgtgattttttttttcacccataagaaaaacaacactactcaaacccaaaacattccatttcaaatacaatataattaaattgaaaattttaatttattatagatacaaaaaaccccgataaagcaatttaactttttaaacttaatttattgtttgaatttatatattatatttattttatttgttttaaaaaaaatattcggagcttttaggtgcatccaaaaaaaaagcacctctactagcattcaaaaaaataatttattctattctggtgttcgcggtagggatagttcgagttgtaatatttttttcaaattaaaccgcatatgcaggtttttttttaatttcttaaactgtaactgtatcgcgagatcttaaaattacaaaagttacaccacgaaaatacagtatagtgtagtgcaatttgagtagtttatactatcatcattatcgaatattataatagaaatttaaaaatcaatctataaagttttaaaattaaaaaaagaagtcttattaaaattttaacattataacatagatactaatcatcaagttaatatattaaattgtctctaaaaaaaataataaaatgtatgcatatattacatatatttgttcttatataaaaaaagaataaaaatcatattgtaaaa

SEQ ID NO: 249348 - DNA, 558 bp, Cannabis indica
tttaccgtcctgaattactactatcctctagatgctttgcgttgcttttgcatttcaagggttggtattttttccatattaggaattttaaaatttatgctactaattaatgtgtttatgcatgttataatagagtttgaatatcttaaatattcatccatagtgaggcagatctaattacggtaggatgggtggattattttttttttgtacatctactattttagaatgtttatttatgtttttgtaggttttaaaaatttagggtttataatttttaagtaattataatgctaaaatttcgatagaaataatgcaatatgaaaaaaaagtcaaattaaaattttacaacacaataatatttattttaaataatcaattgttaaattatttaattaaatttaatactaagataactaaatatgtatgatactattttgaattataaattttaatatagttatttaatggttaaaatgtaataaaattaattaataattaattattattaaaataataaattagttaaaaaatataaattaattataatatgtaata

SEQ ID NO: 249349 - DNA, 808 bp, Cannabis indica
taacatacaaatattatactttaaaataatatgaatatactacaacaattctatagtcaaataaatatataaaaaaaaaacttaaataaacttcccccaaatttttttttttctctttctttcatgatataccatagcaaataaaaacaatataccactctatttatttattttttatttattaatatatcatagcacataataaagatatatcgtacaaaataaaaaaatactaaaaacttaaattaatattaaataagttttttttttctttctttcacgatatatcatatcacatacatgttagaattattataatggactaatacaatcataggtttaattccataatacacaatcattaactatgtgcctaatattactaataatcataatgtgatggttaacaacttaattatgtgttagaggcacatgaaagtacccttaatactatagttgacccattaaattatagtttactactattaaaccacttaagcccaatttgtatataactccttagggttataagggtatgagatttatatatatatatgtcttatgtgaagaagtggttgtgtgggttaatagtaagagaaatttacacgtaccgaccaaattttgaaaaaaatatcaaaactaacgctgatgtttttatgtgtgaaataaacctttagttctgcatttttttttgggcaggtatatacgtggtgcactgcttctcttttttcattttgtttgtacacgctagcttattttatttatttttttttttgcctaagcatccatctacctcctctatattatt

SEQ ID NO: 249350 - DNA, 802 bp, Cannabis indica
gtgggctctgaggaagaagaaggaacccacgatgacgagtatgaaggaaacttcgacgagtacgatgcctacgacgaaggcagctacacagagctggtactcttgagacaaaaggctatcgatcacgaggctgaaaccaaaagatgcaagaggtgatgctggccatgcaaaaggccatggaggtagcaggaatccacgtgcatcctaaagccatccctgctggacttggaaaggaaccagaagaatcctcgtcgagtacccaaaagcagaagtctagggtacctagccctataaggcatccctttgaagggaaccaaaagaaaaaccctacttgcacccccgggaaaaagaaaaaggtgcaggatctgcgaaacgtccgcttagatttcccgaaagggaaaggtctgcagaggggcaaactctataaagggagtctgggccctcaggatcgagaggaccgaaatagcgtttctgtgcaccaagagcccagagggagaggaagaaggggccagagatgtcctcccatcgatatgaggaatcagattaatgggaaccacggtgatctctgagatcacctggaccaaaagaaatacggacccgtagtctttacgagaacgctaaacgaaggaatcatggcagagctggccatactccgaaaagacatcgcccgagtctcccgaagacaaaaaggcgatcactccgacttcgactgtgaagaccgggagccttatgccaagcacatcctagaagcagagctccccaaaaattttaagatgcccgaaatggcagcttataccgggaa

SEQ ID NO: 249351 - DNA, 627 bp, Cannabis indica
ttggacatccacataattattaatatgtataacaatcatgatcattattatatattgatatggagcattttttgtttaaattttcttaaagttatattactcaacttgtaaaaaactataccttgtttcataaataacctttagctatatgagaatttccttaagctttactcaatttggcaggttgatagtataagtgatattcctcttgtctcgagtgatctaaaaaaacaaatgagtgagcaataataaaaacaatatatatttcttgaacagtaaactcaaataaaaataaaatttgttaaggtaaatactcattaattaaacttttctatcaaaataaaataaataaatatgaatgatataaataaaaagcaagaagaagatactcactcaaggaaccttgaagccatatcaaattgaaaaaaaaattgaaactaagagaggttaaggaagagagaaatgagtagcacagaaatacaaaacatatactaagtgaatgatagagagtgtaaaatctataacaataaaatacctctctaaataagcctccttgctatttaccttcaaaattgcagcgaagttttctttcatggtaattattctactacgtattatttatatata

SEQ ID NO: 249352 - DNA, 743 bp, Cannabis indica
aaatacatgatctgctcgcagaagtcaagagctacagcctcagggaaattccaagagaagaaaatacaacagcagatgcactagcccgatttgtgagcagcaatataagtgacaaggtgaaccggatgacgccaatagcagcctatctcaactattgggaaactcccagataaccgaaatgaagctcagaaaatgagaagaaaggcagcacggtacatcattgtagacgggatcatgtacagaagaggattctcaatgccattactcagatgcatcacaccaaatcaagctgcacgacttctatatgaagttcatgacggattctgtggaaataatgcagccggacagagcttatcaaagaaaattctaaggcaaggctacatctgggcgacgatgattgaagattcgaaagcttatgtcaagaagtgcgacaaatgcgagatattttcaaagatacgaatagctccgcccaacgagctgacacaaatgcaaagtccgtggccctttgccatctggggaattgacctaagaggacagttacctaaaagcaaaggcggagtgcagtacgcagtggtagcagtcgactactttaccaagtggactgaagccaaaccactcacaactatcacatcgaagaaagttcaagactttatagtgaagaacatcctatactggttcggactaccgtacaaaatagtttcgaacaacggcaagtagttcgacagtcaatcattcactgattt

SEQ ID NO: 249353 - DNA, 937 bp, Cannabis indica
gaaatgtctctacatgccttttccaaagcaagccactatttcttgcataaattgtttggttttccttaactcgtccttatgcatcctaattaatttgataaaatgattaaaaattactattttaacataaagataaacaattataatccatcagggacatactctagaaaaggctccacaatagatgtattcagtagaacgtatcggtgtgcaatttctaaccactcatctgtcattgtaaagtcatgctttctagaaattggacgaccctcaaataacacatcattgacccactcttcgttgcgatgcttttttttgttcaacccaattgttgacttaatgaattcattacaaaaattcatacactcatctgcaagataggactctgcaatacaaccttcaggccttgcttgatttctgacatatgcttttggtgtcttcatatgtctatcacatcaaatattagaacatcaataataaattattaaaatatcataaataatattgaaaatataaactttcataacgacttacctctcaaagggatacatccatcaaaattgaacaggtccacataatcgtgcttctcggccaatatgaatcacccaatgaatcgatcaaaaaagaacggcggaaagaatctctcaagcaagcataatgtttcagcaacttcattttcaagagcaattaagctctctcaatcaataactcgttgatagatttaattaaagaatttacataatcttaatatagcatcccttggacctttaggcatcaatcctcttattgccataggtagtaattgttgcatcaatatgtgacaatcatgtgacttaaggcccataagcttgcattcttccattaaaacacaattttgaatatttaaactatacccatcaggtacttttaacaaagacaaacgttcacaaaataagtg

SEQ ID NO: 249354 - DNA, 633 bp, Cannabis indica
atggcatatcttaaggaagattcctgaaaaacttggttctgtgataaagacaaatgaacattttatgagagatttcaacagttgtgtttacaattcatgggtagctggggaatttgaatataagtggtcaactatgatagagaaatttgaactcaacgagaatgagtggcttcaactattatttgaagatcgcaaatattggatacccacttacatgagaaattcctttttcgcaggtatgtctacaacacaaaggtcagaaagtataaattctttttttgataaatatgtaggtaagaatacttctttgaaagaatttgttgagcaatacaaagttgctttacaagatagacacgaaaaggaagttcaagcatgctttaatacacaccaaaagaaaccagctttgaaatccccatcgccatttgagaaacaaatgtcaatgatatatacacatgaagttttcaaaaaattccaagttgaggttttgggggtatcagcgtgcttctctcaaaaagaaaaggaagatggtcctatctcaagctttattgttcaagattttgagaagaaaatgaatttcatgactagttgggatgaaagaaagttgaatgttaattgtctatgccgaatgtttga

SEQ ID NO: 249355 - DNA, 778 bp, Cannabis indica
tgaaccatgcaacataaaaaatgatatttctgatcatcattattttagtgaatctgattatattgaaatgggttttatttagggcacaaaacccaacagattggcaatttgttgaggatcttttgaggtctctctcccctcgcgatttattaggtgaataatgacttgtctggaaggaactcactatcatttgttattaaatggtagaattcaaggcaacttcaagggaaaaaaggtctccgtcagggtgaccccatgtcccctttgctttttgttgtgataatgaagtatcttaccagactctgcaatcagtttgctgagatgaaggggtttggttaccacctgatgtgtaagcacttgcgcttgactaacttgtgttttgcagaggaccttgtcattttctgtaaagggagtactagctcggtgaagcttatttttgaagccttcatgtgtttctgcaaagttacagggttattgcccaacacagctaaacctcaaatatacttaggggggttaacaatgagaataaatcgaagattcttgaattagttcatttcgaagaaggcaggttccctctcaaatatttgggagtcaatcttcgtctgaccaattggaagatggctgattgtggagttattcttgacaaaatcaacaagaatctgaattgttgggcaagtaggaatttatcctttgcaggtcgggcccaattgattcactcggtcttacatgaaataaggaatttttggatgagcatcttcattattccttccaaggtcac

SEQ ID NO: 249356 - DNA, 634 bp, Cannabis indica
tagtttttctttaacattcttcattctttggcttttattactccatgtaatttgttcaccttcaaaagacaattgtgagagataacaaccatccacagctgatctgaaagctttaatttgtgctacacttcgtcttggaccaccaattttgtcttcattagaaattacttcattgaaatcatctaggacaaggcaaggagacattgttagctttattagatttggtaagttactaaaatgtgtagttaatacacttagtaaagtttaggtattatcagtaatatatatttgtgtataattagtttatacatattgatatataagttgataataattataaagattaaaattttatctactattactttaatttgatgaatttataaatggaagctttaattcaatattttaaatattttatatggtatcgagttcttcgtgttgattgaagagtgtacaattgtaactatttttattagaaaaaggtataattactaaaatttcaaaattctttatttaggggagtttgatatgttatatattcatttgtagtgaagtaatttttgcgattaattgtattgcggtcagatgggtagaatatgcatgttagatgagtatgaatatcttaaatatt

SEQ ID NO: 249357 - DNA, 915 bp, Cannabis indica
cccacaactgtgaaggaagtacaaagcctaactggacgcattaatgaacttatcagatttttgtccaagtctacagaaaaatgcgtgtccttcttcaacattatcagaggcaacaaaaaatttgagtggacagaggaatgtgaaaatgcattttaagagctaaagaagcaattggcccaactaccggtgttgtcaaacccctagacagtgaagagctaggcgtgtacctttcagtcacagagcacgctgtgaatgctatcctcacaagagaagaaggcggtgtacatcaccctgtatactatatcagtaaaaggctagtcgacgtagaaagtcgatacccactcatggagaagctgacctatagcttgctcttagcttccagaaagctgaggccctacttccaagcacaccccatataggtgtacaacgatcaaccacaactggttttataaaaacatgaagcatgaggccgactactcaaatgggccatagagcttggccagttcgagataacatacctactaaatacagccataaagggtcaagcccttgcagactttgtggctgagtgcaccaacttaactcttgagccccctcaagactcaggagaatagcaagagccagagaagaagcgagagcaagagcagcaacaaaatcttgaagatctaacatggaaactccatgttgatggaagctgcattgaccaattatccagtgcaggcatttcccttataacacctaggggttaacaactgcacagagcaattaaattcaggttcaaggccttaaacaaccaggctgaatacgataccctgatagctggcctcaagctagcacattaagttaaggctaacaacctggacatagcagcgattctcaactagttatgatgtttggttttgtgccctaaataaa

SEQ ID NO: 249358 - DNA, 731 bp, Cannabis indica
aaataaaagtaaaaaattaaaacaaataaaataaaataagtacactataatttttacattaaattttttggcccaaggcccccagttggcttgagacaggcccgcttctattagtataacaattaatattatcttttatatactcatcatcattaatcataatttcatgtatgtttgttttgtttttttttttttaaagaaaaatagaatttttattaattaataagtaaatcagacataattcattacatgtagatattgttcatcgagcgaaatcaataaaaatagactgaccaagctgtttacatcaaataggacaaaccctacaacaactttaactaaatgaatgacacataagccaccgattgtgaagcattaaaataatgtgaagaatattagatttttatcctgaatgaatatgtgacaaatcatacctatcaatgacagtcagccaaagatcttcttacaaaaattgtgtaaaaataacccaattattcaaactagaataatggaacatgacaaacttgttcaaaattttcgacattaaatatcgatgaaccataaaactattatataataattaagtatgcatacctgattaatccatagcaattacctcaattccatccatagcaattacttcaatttgatagtgtaatactatcaactaagtcttcctccctaaatctttaaatcagaaacagtttatttatctgattatcaaaaggtat

SEQ ID NO: 249359 - DNA, 2280 bp, Cannabis indica
taaaaatacctcttcagtaaaaatactaaaccgttattttggttgttttataatttatttatagttttattatagttgtcatgaggttatttttctgattattttacagtttatttttatttatagttgtcatgatgttgatttctagttgttgtttagttattttcttaatttttgttgagcaaagtgtaattttataatattataacattaaaagtgtatttttgtaaataaaaattttaaatcgtaaaattgtaaataaaacataaaaaatgatatttttgaaaattataattcaaatatttgagacactagaaaagaatataatgatgaagatagttgatttttatcgacaggggatcaagcgattttgaatctctgtaaaataaaaattccaaatttatatttgtttaattgatatatttcacattcatagcatatcacaattaaatctaaatgaaatgaagaaaatcactattgatttggttattaatatgagagcaagaagtttgtagaaatatgaagcctatgatgactgaatagtgttttcaaataaaaaatgaaagaagaaaaaggtgttaaacataaggaagaacaatattttattttccattccataaaataatcttaagagtgtgtgtgagagagaatttgcaagactaacataaatataggaagaaaaaaaaaatacatcttattaattagtattagaagactttcttttcaaatattttcattgaaaattagtggactcaaacatttgacataccaacaaaaacaaaaaagaaactacttacaaaatttacaatataggcttgttgatcaagtacattcaacatattcttctaacaccactaatttgtgcatcacaacaaaaaaatataaaaccaccttacttttatatccaaattatttatttaaaaacgtgaacaactcttcattttcaaagattcaaagttgagagttggagaagaaaagtatccaatatcagattcgtcgtcaaattcttcactctcttcggcaatggtctccaaaccaggggagttagaagtcttttgagggtaaataatgagggcaggagccacctcaagccaagaactcaagttccttctttccttaaccattttttactttgagcttgtaagaaaacaagacaaaaaagagctagttcccttgaacaaaaaaaagtagtatggatgattatagaattgaattgggatggtgaattggttttctctcttcctccttctgtctttagaaagaagagagattaagatgagaatcccacaagatatttctaaaggggttttgttaataacaaaagattttacactaatgatttaagtttggaatgaaatgaaggtctttatataggaagattttgggaaaaatatcaatgcaaatgggaagatagttatcattgagagcccatttgatggtattcattgaatccatgtgtaaaacgtagagtaaatgcttaaaaacagatgttccaaatttaggcgaaagctctataattgcatgtaaccaacctatcattccccacttcattggggaaggattttgagccatagataagttgaaacgtgtaagaaattgggtagagaggtctaaaaaagacaattgtattgctcaataatgttatggttctttcattgtcgtttatcttttccatgattataacgttggtattttatttcaaaatagaaaattgtgaacaaaattgtgccattggtcctcaagtcagtgaaccatttcttattggctacaattgtttcttaatcttataatgattgtgttagcagcattaacatcatgtgataccattccgaaagtagattggaactataatatgtgatgaataaaataataaaaaaaaaaaggccaaatccctccatttgattcatttttctttgctactaaagataaagctcttgtaaaaggaaccaaactttaagcgatagcaaccaaccatgtaaatggatccacaagcataaaaaaggaaatagcttagccgtttgacaaactttttttactggtttagctaacttcaataaacttttactttttttttttggtcatgtatcagtgttttgtatgcaaacacatttgttttgatctacttttcatctttagttatatcgaatcggtaatatttttcgtcccaatcactgtactcaattttaaccgttatatgcggttcaataaactccattctagccatcatacttttcatctttacttatattaaataacgttctgtcttcctgttatattttc

SEQ ID NO: 249360 - DNA, 482 bp, Cannabis indica
cgtttgttttgaatagagtgatgatggtgactggaggccctcgagtagtgggatgggaaaattgtaaggctttttgtttccccagattttcagaagccatgcgtgtaggtgggattgccatttttgttaatagtttgtgttatcttgttggtgtgcatgtaaagggcactgttcacgtaccttgtttacatgttgaccgtttgattttttgtaagttgtgtggcttatgtggtgcggagcccgaggtggaggtttcttctttgctttgtgggcctttgtttgtgggttgtattgggctagctttagggcctggaggcttgagtagttttggcgtgtgtgggctgccttggttgatgtggtttgttcatttttttgggccattgggtgagtttatttccatttgtggtatgcccatagggctggttcttaaatgttatttatttggttgtagtggtacaacgcttatggccgtgtgtgtgatc

SEQ ID NO: 249361 - DNA, 787 bp, Cannabis indica
attaaaaaatggtggtggatttcatttgctccaacatccttgttcgttttggtacaccaaaagctatcattagtgataggggcacacacttctgcaacaaaagcattgaagcactttttcgtcgttacagtgtcactaacaaggtagatgtaccttatcaccctcaagccaatggacaagtagaagtctctaaccgagaagttaaacttattcttgagaagactgtgaatccaacctgaaaagactggagtacaaagctagatgatgctttatgggcctaccggactacttacaagacacctattggtatgtcaccatatcggttggtttatggaaaaccatgtcacctaccgatcgaactagaacacaaggcttggtgggcggtaaaaaaaatgtaacatggacatggtggtggctggccaacaaagaatgcttgaattgcatgaactggaggagattcgcaatgaagcctatgaaagctcgagaatctacaaaagaagacaaaggcctttcatgacaagaacattcatcgaaagaattttgtagaaggtcaaaaagttttgatgtatcactctcgactcaaactctttccagggaagttgaagtctcggtggataggaccctttgtagtcaccaaagtttttcctcatggtgcggtggaggttgtgagtccaactacaggaaaggctttcaaagtgaatggtcaaaagttaaagccatattatgagtcaacagtcgaagaacaagctgcagtaatccatcttgttgacccagtgtatgtggaaga

SEQ ID NO: 249362 - DNA, 1202 bp, Cannabis indica
gagttgcacactatcaatgatccaggaagggagattagggatcgggttacagaaaattgttgatttttggcccatctgaggtgaaagcatcagtgggttgaagttgctgagtaagcattgaaatgatttgctgacattgagcatgggttaatggtgcttcctcagtggtgttggcagaaacttgtgaggattgaggggtgttccgagatgtggaagctccatcattcttacgattttgaggagtgttgttgtcattgtttcttggctttccatagccaggtggaaagccatgaagaaagtaacatttgtctttgtaatgacccggcttttgacaatgagtgcagtgaggcctaggtcttttgttcttggaagatgcatttgccacgggatttgtttcagttgttggagtggtactgctggtatgagttgcagctgtagtgaggggttgtgggggtcgagtgcctaaggttctttgcctttcttgatgaataaccattgagaaaaccttattgagagagggacatgggttaagaaggaggatttgatcttggatggcatggtatgactcatttaaccctttaagaaattgtaaaacttgatcgtgattaaggtgatcttgggattgagcagcagctgcacaagtgcagtgtattcgaggccttaactggttgatttcatcccacatggctgttaattttgtgaagtaagagctgacagattcttctccttgatgaaggtaagtcaaggattcatttaattcaaagattcggggaccatttccttggttgaatcggttgtttaggactgtccacatctcagaagcagtatcaagatacatgatactgctcttgatttcaggtgatacagaatgtaatatccaagacattaccatttgattgcatctagtccaagaactgtaaagagaatccgagggtaaaggttgaggtaaagtaccttcaagaaaaggggttttatttcttgcaccgattgagaggatgaagtctctcttccagggttgaaaatttcgatcagtgaggagaggagttgtcaatgcaagaccaggatgatcggcatgactgaggtaataaggagatcgaatatcttcataggcaggacgttgaactggatctgatctgatctgttctggtatgggtggtgcagatggaggcagattgccgacggaagcgtttgatggtggagga

SEQ ID NO: 249363 - DNA, 930 bp, Cannabis indica
aaagaaaatagagaagagatgagaattttctgagtgttttattccaataggtgatctcctatttatacacatataattaagagtcaaatattaagaaactaagaaaaatggaaactaagaaaaagggaatgttaattacattaatggtaataaataaaaaatttggacatccacataattaataatatttataacatcaattaaattttgagttatatttgataaatctacgggtgtaatttgtttttggaatatttaaatcaaatattttttaaagaataaagtattacttttttatttaaattttccttttctacaataaaaactaacacttaggtaacgtttagttagagataataaaattgaatggaatgagaaaaaaataatttttattttatttttttatttggtcccatattaaagtattagaatgtcatttcaataaaatatcctttctactattttggtgaaatgactattccattttgaagtggaaagaaataccattctaatctatagtgagttaaattaataattttttaatcaatttttttatgcatttaatttttttttttttacaatgtatgcattttaaattttattccatttatattcctattctcattttcactcctatttctatatttatattcatctgaatcaaatgctactttaatagtcgttataagcatagtctaatgacattttttgaggagatcctaaattttaatctcttctcctccaaagttaaaaaaaaaaaaaagtgataggtaatgttattatatttttttacaatgttacataggaaatctatgtatttatatattcactggcggacccaataaagcaccagtgtgggcttaagcccatgctgaaaaaaaaatattttttttacttcttaactaaaaaaaatcttttaattattttaat

SEQ ID NO: 249364 - DNA, 1345 bp, Cannabis indica
agcatagaaaacctccgatgccttctccgggaggcacccccgggacaatggcagcctttataaatacttagctattaatttgagtgttaacaccttcgtgtccacgtgtccctgtctggttggtccacgtgtattgggcaaaattaggggcaacagtaatgatttactttcatgaaatatggatttaaagcaatgaatatattaattgtgttgatttggatatgttcatgttggtttatgtattttttgataattgtatgtgaattacgacatttttccatgaaaataattttattttcatcctgaaaataatttatttgaattccttgtgaaaaattaagtaattttggagtgcttctaaaaattggctacactggccaaccttattatgttcctcttcgctatggagagggacaacatgtggttcgctctatccctcatctgaaaattagagatggagtgcttgtatgtcagcactcgttgaaagcagtgatgtcaaatctcctggatatctcagacaatgaagtagttctgagcatatccactaactttcgacataggcgtgttgttggtgccacctaaccactagtgaccaacctgactgaagtataagtacccagtctggttctgtttcagagaagacttcaaattaaagtaatacccaatctcatacagagtatgatgtggccatcctagctccgcatagagaacaaacatcatcgagaggtaatttaatacttattggggtgattttttgttgggcacatcccgaggtaagcagctatatctctaaaatatgggtgtaatggcaacactgcccctactggatatggcctgctgaccacgccatccaatcgagggccagccggtgtgctctctgatccctcgtgggtatctcacactggagacctctcactagtccaatggtcagtatcttgtcaaaagtctcatcaggaataacaaatgtgggagatacccgcctgtctccttaggacccatcatcaagaacctgaggctctgaagactgtatcaggacatggtctagacccatcaccgagggctggcctagcctatttaatggctgcctgtaacaccgtaactagcataggcgtgtttacgtgattttaaatgtactgtgcagctcgttgctaatcaacgaggtttacgaaaatcgtgattaattaaaattttactcatttaattaaatacttataacatttcatacaaaatactttgggatcccatttacaaaatactttacaaaaagtttactgttcattacaaaatatttgtcgcccagcgactaactacagaagccctgaggtcccgaggatcgtacgctcca

SEQ ID NO: 249365 - DNA, 589 bp, Cannabis indica
tatataggacgcaactttgaagctggctattgacaaggcggcgacacgggaggacgcggaagaggtagtggaagcagagttgctgaacaagccgattccggtgacaacgccgggcggagtggcggcagctgtgaagtcagctgctagactcaacgaaacttcaactatatgatcatacgtacttgcttttatgtattaatttgcatggcacttcttttctttccttcacttaagtagtacttatgtttttcttttttctgttttgagaaatataagaacgaataattaatcgtgggaattgtgtattttccttttgtctatttattcagctgcttgattttcattttcattctcatctcatttttgtcttctatataatgttgcgtaactatgcctttgcatggactggctattaaaaaaaataattttatatatatttgatcaaatgtctaaaattttattagttttgaaatacaattaaaaaaaatatggaaattggtttgattaaattaattttaaaagaaaattagtaaataaatttaattgtatattatttaaatttattttagagaatcttagagaatatact

SEQ ID NO: 249366 - DNA, 598 bp, Cannabis indica
cccaatccctagtcctccttcatcgcgtggcctgcaaacctcctcccaagccactaagtggtccctacctgaagattcgctgccttcccaaaagaagtctctcatcattttctccaatgttctaattactgacttaggtgctttaaatagagataggaaatataatggaagagatgataaaactgactgaatgagcgtcaacctaccccctttagataagaatgcacatttccaaccatctagtcttttagcacacttgttcattaatggttcccagaagctccattttctaggtgaaccccccaaaggtagacctaaatattggagtggccagcttcccactttgcaaccgattctgcttgcaagccttgcaacaatactttcatccgtacatattcccaatagttgacttttgctcatattaacctttagtccagatattgcgcaaaatgcttctactaacctcatcaacttgtataaagaagtagtggatgtctgtaatctttttggtttctacctcataaatgatggctcagcttgtttttcagtatgtaaagttatatcgacttgtattatattgtattgtagggagagaaat

SEQ ID NO: 249367 - DNA, 589 bp, Cannabis indica
atttaaggccatttcggtttggtgtatgtacaatgtgattgttcttgttccaattagttataatattaaatttatttttgaggtcgagtgatagaatcaagtgtgtatagagctattttccttttgtaatctttgcttccttggggtatttcttctccaaatagagatcatcaacacaatgtcttctaattcatttcatggtcttctatttcaattttttatgagaactttgtaatattttactattggcttttttatatagatgtattttaatatgattttggttttcataaattataagaaattgctgcttcagtccttaagctaacaaggaagtgattcaagtgatcagtattattgtaaattttatttgtgtacatgaatttaaagaagtgttcagtttattcattactgtttcataacataattgatatggcttcaagaattgattaattacaaagagaaatggtattgcaaatttcaagttgtagccaagattctacacttataagagattctattagattctatttcttatatgtagttctctgctgtcgagtgaatttcgcaacaccaaaatatattattt

SEQ ID NO: 249368 - DNA, 625 bp, Cannabis indica
gaagtcataaaagaaaaaaataaatatatactcatctttattataaatacaaacatataaaaatactttccttttaattagttttaaattttcaatttgacagtttggcgacctatcccaatattgtgaggaacaacatctcgtagcgatcagtagtagtttttattgtatatttttatatactagcaatttattatgtgtagtattttagagatttgtatacaatgtaaaatattatttattaattcaagttactaattatcattgttgtttttaaaaattattttaatcatttaatttttagttaaattttttatacatattcaatataattataaatataaaaattaaatttaataattattgcaaaaatagaagaatgaaatgtaataaagttaaaagaaaaaaaatgtgaaacacctacattggataaaaggtcacattttaagaccttttatcccatttttttttaaaaaaaagtgggataaaaagggaccttttatcccgattttataaaaactgtacccttttatcccggttcgtaccttttatcccggttttctcataagaaccgggataaaagggtacattttatcccggttttttcaaggactttttatcccag

SEQ ID NO: 249369 - DNA, 539 bp, Cannabis indica
cttcttgaaggttttaccatctatacagtaagacacaattcaaattaaggaaatcttcttctcatttaattttatcgatcaatgtagatcaaaacaagtaatgaaaatataaccgcagaagaagaagaagaaatacttacaattccggtaaaaattgacatgcaccatggttgttgacctgaggtgaggtgcccttctcggttctcaaccttcaatctcaggaggccgtctcagatggtttgggtaacctatataatcctaaaccctaatcccttgtgttctcttctatgaaatctatgatatctcattcatcaatggaattggacttacgttcggcccaatgaataccacagcaagaactatagccgggcccaataacaactgtagccctgaaattaggtaagggaagaagaaattacactctatatatattgtcctcttttatttttaccttcttttttaaaatctattatttttacctcttttattaaatattgtaccaattttgcccctgtcacttcaagatactctccatgtga

SEQ ID NO: 249370 - DNA, 725 bp, Cannabis indica
gaagagaagaaaatttttttggtggttgtggaagctttcgggtggggattttgtttgttgaattgatgagaaaaaggttggagtgggtagatgtaggtggggagggtattatgggaaaaatacaaaaagtgtcatataaaattaattatatatagtattagtttaggggaataatatatgggttatttaagcatggaaattcaaatttcccttaaattaataataattattaaataaatttttgcaatttactacaaaaaaggttattttagtaattaaattttttaccatttagttatagaaatatgtgaaaacataattactttattattataaaagtaattacaccaagacttgaacactttttactagaccacaatacagcaaattcttactcttatattttactaacgcttgacactctcactttaactacttaaatatttacacacactatttggaacactttagagtttcgacacgctagggacactttttggatgcacttgagacttactccctttcacaacaacaagggaccaagtcccctatatatacccctcaaggttggtgatcttattgttaggaatattttaccggaatctagatttactaacaagtatgttgaatcaacatcttaaatatgaatatctctaaaacaatgaaattaaacacatgagagatttagaaaaccttacattaattacagcgaaatataatgactc

SEQ ID NO: 249371 - DNA, 837 bp, Cannabis indica
ataatcaaacattaaaaagatgtcctagagataatgaacaatatgtagcttttgaatctttgtactttcaccataaagaaaaatgacttactcctacaatctaatacgaaagttttgattttcatggagccctgtggttaaaaacaaacaaacaaactcaattcaacaggccacatagcactgcagctttaacaatctacttttcaaatttcataatcaattggaagatatggaaggaaatggtataaaagggaaatgagacaggctgtattttacaacagagtaaatcaaataccatgtttgttggataatgaggaacttaatgttagcactttaatatgcatataagtacaaacaacgaattcatatcaatccctgtaatcacaattagatccccaattataatgctcaacatatgagaattaaaattccagaaaaaaatcaattatgatcgggcaaattacagataacttgttttgcaagtcagatagaatgaaacagtgctcttagcaccgaaaataatatccatatctcattctcaagatcagcaaaataatgtttttgaagaggaaaaaaagcacaaaacactattcatcaaaaactctaatcaaacacatttcgatctatatcaagtatccaaaattgaggcaattcactaaaatccagcagattaaaattataaaagttcatttaacaattatgctcaattttaagaacgatgaatgcccagaatcaaaaattaataattcgattaaaatagattgaaaactgaaatatacccatgagagtggcttcaagaagatgcttagccataaggatttgatctgtgggattaga

SEQ ID NO: 249372 - DNA, 565 bp, Cannabis indica
gaatctggttacacatttttaatctcccgagagactatttctccattgttaatggcaaaatcttgggggctaaagctggcacagtgattacggttgatttagacgaaggcaatccggccctatggcctaataaaaaagatatagcaacaaatgaattatttaaaaatgtgtctttcttattttttgagaggcaaatttgctaatcaaatcgtcgtaatgaagtttatataacaatttttttttcgatagacaacatagctaattcactcaatcgttcacgcaacatgagtgatcttaaatatgattttatcaattttaattttaaaaaattcgataagcaatgaatgcatttgaaaaggaaccaatattttttatgtaatcaagtatttcaattaagttactatttttatttggaaaaattttcctcgatacttttaattctgaaaacaaatctaaatcatcaatatcagacaatccattatatttcaaaacatcctcaagatttaaaaagtgatctttcaaaccatctccatccaatactattagtttcttcatgttgaacaaa

SEQ ID NO: 249373 - DNA, 4543 bp, Cannabis indica
aatacaatacaacctaatacagcgctccaaatgaacccttattgtacactgtatagatcaagccctattttcctaataagcaacatttcgaccctctaactgcagtaaatcactgcagaaacagtgcacaatagacctttcttctaaacttcccaagtgagagaggcacaaaactagaatgagaataggaccacaacgataccgagagttgggctccggtgatgctcatcatgcgtgtgccttgtctgttggcatcaggagaaaatagagagagggtgcagatcacaggatcatgctcgtagctttgtttgtcgatgagatgtgagtccccgatccgccattaatcatcggtgccagaagagatggaagctcagatctaagcttagttttgagaaaggaagagaaagagttaagtatagggagaggaaaagtcatcaggaagaaataataaaagaaaagaaaaggaaaataatttatttatttattttataattttaaattattttataattttaaaataatttttgtaatttttaatattatgtgtaccaatataaacgtaccacgtgtataagagtgtacacataaacagtctatgttgtcacttaactgtgattaatagatgtcactttaaatttacttacagttcaatagtttggaggattttaccacaaaaatttgagtttaaagggttaattgcaagtgaattgaaagttcggagagtttagccgcaaattactcaaaaaaaaaataatatcatgagttcgttattacgtaagcttcatgtatatgagtgtacaattttattgtctcattgaaaattatttgattgatttaattaaggattaatattattttggtttttatgctttataaaagtaattaattagcttttttattttgttaaattataaaatgggcgttgtattttgtaaaatagtattatagatgaccttgcattattttttcttgtacaataaaacttaataataactcgatatagaggtattataacataactagttacattttatatatctattcgtgctagaaattatcttcaagttggttatattttaataaaaaaattatcgaaaattgaggtcaagtacaagatccattttgtcatttaataaaacataagatccaatcggtaacttttgcaaaataaaaagtctaaaatggtattaactcttcaattaacaacttttatttcacttggtttatcttttgaccataatggctttatacttagataaatataagaagatatgattaataccaaaactaaaatatctttataattattgaagaagtaagaaaggcctcggtcttatcttttaatagagaaataataaaaggcactagtagtgtctagcaccctcctacgcatcaatattgctattagtgtaattaagtatcaagtcttgtaataacttttaaggagtatctcttgttagaattctttttcactcataaaatatgcaataagaaaatttaaatcatagataaatatattacatattattataagcgtataaaattagatttgaagaatacatttgttgattcaaagagaataactcaaatagcaaaaccgtaccttaatccatagatagtgatgatcttaaatacaaactcccactaagctagcatgatcttaaataataccgcaatcatgtatgagcaacaagctcctaaaaatccttaatccttaatgatttagataacacaaattatggagtttgtccttattatattttttagacaccttattactcttaaatttattttactaacaattaactcaaagtcaatgtgcatttgaccttgtagagctcatgttattgctaaaatacagcctggttaatttattgccatgacatatatctttaatagttttcaataccattcttaatttcgtaatcatatgtgacaaaactctcacagcaaaaatctttataagattttattgtataccataattatatctagggatgccccgatcgtgtccttaaagaaagctaaaactgctaattgagatttgcatgtttcttggctaatctcaagtaattagaggtggactacactataaccaaagtagcaaagaagtggagattttactctaaaagtgttacgccaacttctacaattgtaaagatgatcccccgcctctgttgaaccaatgcaagttgtgacaactgaagaggataataccacttatgtttcttaatagaaagtcacattaccttatcgtagtgggagggcttcaaggagctctcctaagtatggcttgtaagacactagtacttgtgatatgtttgaaaatttacatagatggtatcttagtcattggaaacaatgtttgagaaattgtcaagacatgtaaaacaaatgatttgctctaatgcaagtagcttacactagtaaggtgctacaaggctttttaaaggctaactctaatagaggtcacatgacttccatatatggagtttatttatcttatgaggagtttctaactactctagaaaagataaaggcaaagaaaagaatttcctaagcatcaatagtaagaggtcttatgaatactcttgtatgaaattagaccagatatttactgttgaatgggagctttgagtagtattaagtcctttcagaaaggaacatttgaaatacaagaagagaaaccatatgttagtttgtaagggtggtacaataaaaccctaaggctatactaactcatatttctagacttgcgtcaatgctagaagtcatatatatgagatggtgattactctgggggtggagcagtacttctggagaagtgtaaaagcctatgtggaatcactatttttaccagcaaggttgaataataaggatgccctaaaagcaattacgaaattattcatactcgagaatgtttgatacagactttggcacaattccaagcatggaataattgcttagtgtgacttcgttatgacacagatgcaatttccaaccagtaaagaatcctgcaccctaagaagagtaaaacatatagatgaggaatacataaattcatgcactacgggactaaagaaaatatgatggtcaaagcgattgatactgaataaaacctatcagatcctattacatagtttatgccaaatactacatttgatcaaggcatcaagtatacgagattaaactaaaattcacttttagttttatattagtgcaagtgagagtttgttggggttttatgccctaaataaaactcaatttcattgtaatcttatttactttcaataaagatcataaatcataccatgacctaatcatatgctttattcacatgtttgttagatgattatatttttaatatataagttttattaaattgtgaacatatagttactcacaattatagtgatatcatcgcagttgaaagtaattgtgattagatgcttcaaattattaatcctcacgatttatcagtgcactagatttatactaacgtgataatccacgataaggtttacttacacttgggtgagtgaaatgtcttctctaaggaattagtaaagtaaaccagaatcagatgtatcaactatatatcagattggaccgatattaacaaacttaccattatatcttttctaagtcaatatcacttaattgatgatatattatttgaacttaatattgagatagttaaactttagcttaaatgtattgcacgagttttttgacttgttcgttaccagcttacctgtaatatcccgaaaaataaatgatatttaaatagacatattttattaaagctgtaattattttgataatgaagtaagattatgatcttacttaaggtaattaataagggttcattgaatgatcataaagcgtaatttattaattacggagattatattgagatatgtgggtatcgacaaacaacagttatcacagttcttgaaaaggaaacccaagtacatcgtcatagtaggaggattgtgagataacttgtctgctataaacatgaagcacatgttcttgtctctgacacagacaaggatgatccattgacatacaaagaagcaatggaagaccctgattcagataagtggaacaatgccatggattcaaaaatagattccatgcgcaccaaaaaagtgtgggagtgtgaaactccacctaaggatattacatctataaggggtaagtggattttcaagaagaagaaaaatactgaagggaaggtagagacctttaaagctaggcttgtggccaaaggctacacacagtgagaaggcataaactatgagaaaatttctctcttatggcaattcttaaatacattcacattcttcttccatagctgtcacatatgattatgagatatggcaaatggacgtcaatactgctttactaaatggaaatatgaagtcatttatatgtaacaaccaaaaggatatgtgttaccagggaaagatcaaaaggtgtgctagtttcttaaatctatttatgtattgaagcaagcctctagatcttggaatatcac

SEQ ID NO: 249374 - DNA, 849 bp, Cannabis indica
tttttctttttaacgaataggaaaatatgtaacagaaaaataattttgcttatggagtaaaatcattctattttggaataaaaagaaagtaaactcacaaaccacttcaactgggataatttgagaaatatttcttttttttgtatctattaatcaaaaatactcttaacttatccattaatcattcatcgatggtactaaagacttcagtttgtggaaggagaagatgatggcgatattgatttaccggaaactggactcagttcttgaagatcaattcgagaagagtgagaaaactgagaaattagaaaaaggaacagatggttccaagaaggaagctgcagaaaccataatgaagcaagcaagatcagcaatcattatgaacttggctgataatgtaccgaggcaagtcattggagagagaagagcccttagaatctggacaaagctgaatcatctttacatggctaaatctcctgcaaccaaaatcttcttgaaagggaagttcaatggttttaaaatgaatacaactaattctctagaacaaaatctcgatgaattgaataaaattattttatctcttactaacatgggtgaaactatcaaggaagaagaccaagctgtgaactgtaggggtgtacatcaaaccgctcaaaccgcccgcaccgcaaaaaaaatgcggtttgaaattcttcgcggtgcggttgcggtttgaatttttcccaaaccgcgcggtgcggtgcggttttgaattattaaaccgcgatttaaaccgcaccgcaccgcatcttttaaaatttcaatttttatatttattttattaagcccatacatatgagcccaacccaa

SEQ ID NO: 249375 - DNA, 566 bp, Cannabis indica
cgtgagtatgttgaaaggttaagggggataagcaaagtgcgactaattcagaatctcaaaagactagtctaagagttttcgtgaaaggctatagcaagggaaaatatcttaactagcatctcgtaggatactaccaactatccctgaacaccgtcgaataatgcgagccatagctagagtgtgtcatctcggtaaaggcaaactgcttttgaattagaacaacaaaaggttatcagcacttactttattttatccacatgttgtaaatatgaaacttggggattgtccacgtttcataaacggttacttagaaaagatcaaaggagaataattcttattccttgaatccctataaatagggacaaaacctaagggaaaagggatcaatcatattgggaagaaaagaccctgtaagattgagtgaatattcacagtatttcctctgtaatctaagtacattaccaagaaatactcaaaaataataatgactcgtggagtatgtagattttaactacaaaaccacgtaaaaactcttaatgtgtcatatatatttatgaattataaat

SEQ ID NO: 249376 - DNA, 569 bp, Cannabis indica
atatttgatgtttaaaattatttcaaaaaaataaaaaatttcgaagttatttctccttctccatctaagtaccctacttgcctcacccctcaacagtccacctaccgacctccgttctccagcaaccggtgacccacaactcaaatgaaccctggatatgagatctctaccaccaaaatcccaaaggatagaaccgattctgccacaattggagtctagaaaccaatttcttaaattaaaataccagtttcataataaacaaatcttatatgagttttggtattcgtaactagtttcttaattcattgccttaacaaaattaattttaacaggtttttttatcaagaaattaattttttcatcaagaaacttatttcttaatcagaaaatttgttttgattatatagaagtaaaatttatatatgagtttttaagtttttatggtattccttcttgtcttcttatctatatgataattttatacaataaaatttacatgtcatatatatcaaaacattatttttccatatttttgtaaatattcccaagtaatatgtatgtgttgctgt

SEQ ID NO: 249377 - DNA, 568 bp, Cannabis indica
tttaaattttattttattttgatatagtatttgtggtgtgatgagagttttgttattttcttatttatgtactgtttaagtgtgatttgatgaaatactttaattatatatcgtttaagtgtgttatttgtcctatgcaatttgaatatttatgtaattgttttaaaattttagcatatatatatatatatcttttttattttaatttttttgacagaaattataatagaatattaaatataagtatattttactatttaaattatagaaattaaaaatgaattattagataaattaacatcataacttaaaaattggtaaaatcattcatcgattttttttaataaatcaatcaaatatgtttttattaaattttaagaatctgtggttaagcacaatgatattgtggcagtctaatcttttaggattctaactttctaaatttataatttctctaatttttcttatgtaataataataaaatatctataatttatctaataacctaataataattaatatgtattttattagtttttatttccaaaaatttctcacgttatcataa

SEQ ID NO: 249378 - DNA, 1427 bp, Cannabis indica
acagagaaagagaaagagaaggttgtagttgtggtgaccgaggttgcttctgtggatgatgatagcgataagactgtggaagcaatcgaagaatccgtcatatctgtaacccctgccccagtcgacgaggcaagctcatcagcaaaaacagaagcggaggaaccgaagaagaaggaagaagaaaaggaagaataagaagtgtgtgtcccacaggaggaggtttcgatgtggggagttccccttctcgtcgatgacaggagtgacgtgatcctcttgaaattcctgagagccagagattacaaagttaaggaggctttcaccatgttgaagaacaccgtcatgtggcgcaaggagatatatgtacacaacagtgtacaagtaatttcacaacttgcatggttatgaaattacttgtaacttaccactggctggttgttctttgcaaaattcaggaaactgtttgaacttctcagcttgtctggtgctttggttgaacttacatggcctgcgattctcaacaaaagacatttatttaggtatattcaagctttcgaattctatgaaatttcattcacattgtgcctgcagttgctgcaatttatttcaagcttaaagttttgtaatttaactctaagttgccatgtagctaaatgttgtttcagaaaaatcaagaagatggtcaatagagtcaatgaagggatttaatccattgattgagttgagttgcttcaagtttcatagtggcggtctcgtcatgtggagaagaagactcacgtcttaccctagaagtcttattgggcttgggctgatttttaaaccaaaaaaaaaaaaaacagagaaagaaagggataattctaaaagaagggggaggggaagtgattaatggtagcattggttaaaattatttaaaatttcatacatcttttgtatatatatatatattatttttttttgttatttttgtatatttataaaataattctaaaagaagacttctttcatggactaaacataaaagtccaacgggcttgaaaagtgggttaaaatgagttttaattctttatttttgtatttgtattgacttttttttttttacttttactaccttgaaggataaggtgattttaaatggtaaaaaagtgttagactatgaaaatactataaggcttattagtaatttgcaaatagtgtaacaacttagaaatatctattgtataatgtatagctattatttaatatgtgatgagaaaataaaatttcgattcaattgggatattagtattgtctcctagagtgcatttcgaaaaattttcttgtactctcgaagaggaaccgttatctaacggtaagtggcgttcagattggaagagaggaacaaagttcgacttgtcagtgccgagagacactggtgaaaataattattttct

SEQ ID NO: 249379 - DNA, 639 bp, Cannabis indica
tgtaaagctttattaagtgaattacaaatatgcctaattttttgttaaacagtcagctaatgtagtagctcataactttgctagagtatcacttttacattctaatcgcatctttagtttgagagatgttccaactaaattgctctcgttttttaatagcaaaatttgatggttaataaagtttaattttccattcataaaaaaatgataaatcattaagttaaaatggaagttagaaattacagtaggatgaggtatagatttcccctaaaataatacatgtaaatataaatgtgaaaatttataatatacatctgagttgttttggtaaattttttatctgttttagcattcaaaatagtttctttgttcactttttttataagtgtgcatattgtacttatttaagatcattggtaaattaaattttttttggtagtttacgctgccaaaaataaagttcaaatagttattttctaagtgtatacaatcttaaataactacaacgtatacgatcatgaaaaataatcttaaatgccgaaaaaaaatgactgcaaaagtatccaatgttttaattttaattttttttttttttgtatttagtaccccatgtatgcattctttactatcagttaatac

SEQ ID NO: 249380 - DNA, 825 bp, Cannabis indica
acgttcttgatgggttctcgatgccattgtctcaaggttagggatgatctttctcgattggttctagatatgttctcgataggttctcaacacggatgtcctaaggttagggaagacatttctcgatgggctatcgatacgttctcgaaaggttcttcagacatactttctataaatcttcaagtattcaagtcacgattatatccctattttatgagacaaattcgcattgacaagaaaataagaggaaccctatttagttttcttttttgctttatttgtttaagaaaagtactcaagttttatattttaattcttattaattttgggaaacttaattgatgtaattattacctataaatagtaaagtcatttcactacagcttttttagagagcagttaagttgcaaaaaccattgtaagaactttcaagagagatttagaacttctaggttcttttctcacaatttatgtgttatgtttgtttaattattattatcattatttattatttttaatcgatttaattgatttattgtcgttggctaaaaataaggtcaacacttatgtttctcttttatcttattcttccgttacattttatgtttgataatttgtcaattaaacttttttttaattaattagtatacttttattttatattgaactaaattaatcttttaaatggacaagttatgctacttaatttttaattatcgttgagtcaaagttaatttaaaggtcatcaaatggatagctgattctatactttcattaatgtttgttctatttttttgcaattttattgaagttcataattatatt

SEQ ID NO: 249381 - DNA, 1023 bp, Cannabis indica
agagtgatagagtgattactctacaaacccatattgtagggttaatatacttatcttaagtaagcaatagaagaaattggttacttgattaagtaacattggttattagttatattttagataacatagtagattattttactaaacaatgagctatataattaaatgtaatatgagaattagaatgattcactaagtaagaagataccattgattgcaatagaataatggtagcgtatgaatcaggaagtgaaaccttagtggtaataatagaaaaggaatacaagatttttggattatgatgtatcaacattgtcaatgggagactcactattagttagtatggtaatttatatcaaggaattgtcagtaaaattgagatgtgtacttgagatatgtatatttttggagatgtttagaaaaattattaagatttatattgaaaaaagaataggatttaggatcaaggtatgatctttaattaattattgttggttagggaatcaggaaatgaatacactcagtttaactatgtgtattcgttatgagtagtactacttttatcatatgtgttgaatcagctaactttatcacaatggtcatgtgtaagtaattgagaaagttatcaatcgtgttagcataagatgaattgatataggttgaaataagatgagatgaataagattcaagttaacattaagataggaactcctcaaggttaagtgaacaatatcaataaggaattgtaagaggtcaataaaaagaaatgatggaaatcagatttaattaacaaagggattgaaagtgggaaatataattgggaacgacaataatgcatctgctttttgataatccaccatgagcttaccttggagttaagcatacttaacttagggtaatctccagatagaatatctttcggggagtcatctcagaaagcgtacgagtgaggacaaagtacgctggaaagattcgtattgggatgaagaatcaacagtcgttctagaaattattaagaggaag

SEQ ID NO: 249382 - DNA, 689 bp, Cannabis indica
tcaaacctaacagccctaaaatttatccaatccaagcttaaaccaacatcaattcaaacctaaaaacatatctaaactccagcaatcacacagacccgaaaccaaagaaacatccaacaaaacctaactcaaaatctaggaaattaaagaaaagaagaagaaaatcttacctcaaggcttgaacaacacctagggttagctaactcagtcaagattttcttgatttgtgaagaaatttccccctgattcagttgagtccttaagcttcgaagaggagagagagaaaggtatgggaaatagaaattttcttaattttaattttctttattttctttctttattatctaacctaataatagtaataaaattaatattaaatccccaccttcagctagaataatccacataagacaaaaactaaaatcctataaattgactattctacccctccaataatacttaggctataacataacctagggatattttggtcatttctaacttctccaattcaacctacttctcattattataatctaatctgatacaactctaataaaacacaatataattgtcgtgatatttctgaccactctgtcgagttctcaaggccgccaatcttgaatacattttattctaaaaatagtatccacgataccctcatagtctgataaaatctccgtaattaa

SEQ ID NO: 249383 - DNA, 751 bp, Cannabis indica
ttcctttacctacacaaggtagcaaactgatgagtcgacagactcaataagatatgcataacatatatgaaagcaatgctctaccggctttatgcttaagccgacctgagctcatcaaccgagctcaccaaatggttaagaacgttcttaaaggaagtacgaccactgcaccatatgcactaaagtacaaactctgtactcgtgttggtagagtcttcacttactcccatgagttactaagtgttgtaccacatgcacgacgtaccccctagtactcgtgtcggtaacactgtaactactctaaaatcctacactgtactaacacccttaaaatcacatttccattagtgttagtagtgtaaacaactactaaaagcatacattcagatatatatattatttatgctatcttacctcgttccagattcaagcatgtcggtcaacttgaatgaaaaattctcgagttgaacggaggtcctaagtcacattacacaattgggtaaattacttgaataactatttcgaaaccctagctcaaaactaagggtaatcttaatgacatattcaatatactattaccataaatgctaagggaaaccaaactatgctcggaaaataacacaaatttggaaaagttacaatttcagggtcctggcatgtaaaccgattaatcgattttacaaaccctgtaaaatcggtcaaccggtttgcaccagcaaaccccaaaaattgcacaactcgtccaaatctt

SEQ ID NO: 249384 - DNA, 567 bp, Cannabis indica
atagtagcaagaaaaacacaataaaactcacacatgccattgttgagtcaagtttgagcttcatgaactcaaacttgctcaaactaaaatattactaccaaaaacagtacaagcaatcttaaaacatcatttgagacctacggaaactaaccttaaacgaaatttaccaacacataaccaaattcatcaaaatcaaccctaaacttaacaaaaccttccaataacatcataaatccataatagagcaagcttagggttgttacctcagattaagccctcaaattccacttaataacctctgaaattgaaagaaaattcccacttgtctgttggttcttgctggtcgaacaaagaagaagaagaacaatgaaggagtattctcatctattccctcatttcataaaataactaataaaaggttaactaattaacctttatttaattaggtggcagctctcaaacataggtgaagacacctatccaaaagtataaaattactaaactacccttacctctaaacctaattcaataatcggcttaggggtaaaatatgttggaaattatttt

SEQ ID NO: 249385 - DNA, 886 bp, Cannabis indica
aataaaataaaaaaaaaaatggttttagggaaatttactcaaaaaaaaactatttttggacaaaattataatattttaaccgttaaataattatttttacaattttttttaattttataattttttattttttagttacaattttaagatatcttacaaaaataacaaacaacaacataaaaacaataagattacaacacaaaaataacatgaaaacatcaatagtccgtattaaaaacttataaactatatttaattactcattattttaattttcgtcctactaatatatattgtttttatatttaatatttaattactcattatataaatttgcaataacgtttaattactcattattttaattttcgtcctactaatatattatttgtttatgtgcagttgaaacattattgtccctccgaactcttcgagaaatgatagcgagtttttataacaaattgcatgccgctgatgatgacaatagattggagtcagttacaaagattttacaactatgattacttttattatcagagttcccgctcaaataattttaagatcattattagaagtttttacaagtttgttatttagatttccaggagtgtccctaatctgtgttgctcatggattagttgtgcatgctcttcggatgaataattaacttgtttggctagatatgaatatcattattttttattgggtgtatagtattattttgattatcctggcaagaatcgtatttatttgatgaacattagatgtgtagtccatatctagcctgtatgacgttattatattttaatgaatttattcattgcaaaaaaaaatcttataaactataaaaaaatatttaaaattttgtacgactgtattttttttg

SEQ ID NO: 249386 - DNA, 668 bp, Cannabis indica
ccacaaaatgaccaatatcatattctcattttctaaggtaaacaaaattatcatcacacattgttgacttcttctgtccctgagatctccttagagggggtacttctgaaatagcctctatttgttaatcatcatttagatgacctctttcacaactagaatttttccaataacaagatattcatcagcaataggaccttcttcagtaataggcccctcatcaataatacacacttcaccaataataaacccttgtcatcttggatatcaagagcaatatattcatcaacaattagagcattatcaactagagtaagaataagattgttattattatcatctcttgaaaaggacacaagaataaaactttccttagatgactctcccatttcaagagatgttgaatgaatattttcagcaacattaatttccataaatttactagtttaagattcaaaaattcatgtactacgagtagggcaataaaagtgatagccttttgagtgcattggataaccaatgatataacaaagaactattctcggatttaacgtttttaaatcaggatcatatattcttactttaactgcaggccccatacacgaagatgattcgaactaggctttcttccagtccataactcaaaaggagttttttgtttggaatag

SEQ ID NO: 249387 - DNA, 840 bp, Cannabis indica
gacttagtttaggggacgttttactttattcatgtatgttagtgtaattagttaaatgattctgattgatctagttttacgattgtaatggaatttgctgcggaaggtgaaaggtgggaggagtttagtgccacggaaagtgggatttctgtgccttttgtgcttaaattgtgcctttgttagggtttctttgtgccatgttaggtggctttactgatatgaaaaaggatttctgttttaaggtattttgatgtaatttgtatcaagtatctattacaattaagatttttgaccttttaattttattttaattttgtggttttgactttatctagtaggatgatttaattatattactaaatttgtgggatttcaatggaattaattggtaagaatgaatttatgaggaaattatattaaggctttacttggaaagatttgtggaattttattaaatcagtttaaatttcattattagtgatttgaagaaagaaaatgaatggaaggaaagaaataatatatgattttggtaataatggattcgatagttatgaattggtttaaatattttgattttcaagttttaaaaagatccctaatatatttatagagtggttttttacaatttaattagattggtgtccaattagatattatataattatatcttggtatgtatttgtatttatggtatagcgttagaagaggtaggtattttgtcaagctatttgtggaaagtttgacttcttttagaatatgttattctttaaatttggaaaatctgtgatattggtagattttaaaaagtgatttagaaattaattagaataaaatgttata

SEQ ID NO: 249388 - DNA, 729 bp, Cannabis indica
actcatggatgcttgcgagcatgactctgagggagttgttcgagagacgaaagtctgcacgaagcgcacagtcacgcaaaaaatgagcccattattactcggatgcttggaaagctgaccttggcttagagaagtcaaggtgtcgctcgggtgttacgactacctgaaaaggttagcttgtgacacctagctcggtcaggcagactttatctgtatagatgtatgactgagctctgtttggaatatctctccagctaaatatagaaaataacataaatgtgttaccgatataggttagtacaaaaaatgagataacaatgaagtagataaaagtaaagataactaatcttaaaagtaatgatatatacatcacaatttacacagaaacttaacataaatacttatctaataaataattttaacgaattatattaaataaatatttatttaagatggtccacggtatcaaaatatcattactcattaacccacatatgcgacataccgtgtgttaaacgacacgtatcacataccgattgtctcactggttccagtcatcttctccagccaatttggccggaatttcagtcatcttctccgatttggtgcaagtgctttagatctatccctctttgtattcgtctgttatgtatctctctctacattatacataattgttttattattattattgatttagatctgattttatcttcttccccatcactc

SEQ ID NO: 249389 - DNA, 563 bp, Cannabis indica
tcttccacagatgagaaaaacccttcaaaaataagcgtatgccactgaaagtgacaagctcacggtattctttagtaaaaggcgaaagaatagttcgctttgtgcttaacacgtggctgcgtgaaattttacgattagttgccacctactatatagttgctgttttagaggaatgttttatgttctttccagtgtgggacaataatacaaaactactactattacttttatgattctttctaacaagtttcatcacatacggaacggagataaccttagaacttcagtagtgtagtttgttaactgcggtttcaagcttttaggctcctcaagtattgacacgaacttcagtccaaataagatttgcaggattattgatcaaaagctctaatgtaacatttttttagaattgtattttctccagttgacaattattcatgaaacacttttttgttgtactccaaatccaagtaatcatctttgaacaatgatatatatctattctatataaagtgtgcttatataactgaattcttggtttatgaaaaattcatgggtgactt

SEQ ID NO: 249390 - DNA, 718 bp, Cannabis indica
ctggtttttactccttctacaaccctgcaactaacgggttacacggactcggactgggcagggtgccatgacgatcgtaagtccacttcaggctacggaatataccttggaaacaacttaatcagctggtgttctaagaaacaaaatcgtagtagctcgaagtagcaccgaatctagaatatagggcacttactcttgctacatctgaactcatctggatacaatcacttctgcatgaaatccaaatccccacttcccacagtgccctatactatggtgtgataaccttggtgctggatctttggcctccaataccggtcttccatgcccgaacgaaacatattgagatagaccttcattttgtcagagatcgagttcttgcaaaagcagctggaagttcgttatgttgactctatcaatcaaacagccgacatcttcaccaaaacctttaccagtttccccttttgtatttctctaggaacaagttaacacttggtgtacaccagtgtcacttgaggggggatattgtaaatactaactgtcaagaacataacgaacttaacgaacataactaatcacaaaacagttttactgttgttctgttaagttcttgtacagtctgtcattttctgttacacaagtttgtgtaaggtctctgaccaaaccatattataatatcaaggtcttctcaactgagtcaagttgagcttttcattct

SEQ ID NO: 249391 - DNA, 877 bp, Cannabis indica
ataggcacacaaacacgattcataaatcgtaacattcccaaatcatccactgtaaagtcaccagtcttcccagccgaaaccctatctcgagatttcactaattcaggatctagcaactgtgcttctttgattcgctctaaaagagtagattgcagggtaatattagctaactgccctacaaccaactcaattttagcttaggtcatctcatttgctagctgctgggagatttgtttcacagtatttatctgactctgtcgctttctactcaatgcatcggcaacgatgttggccttaccagggtgataaggatctcacaatcataatcgttcaccaactctagacagcatctttgtctcatgttcaggtctctctgggtgaaggagtatttcagacttttatgattagtgtatatccatttcccgccatataggtaattccgccaaatctttagcacaaataccactgctgcgagttctagatcgtgagtagggtacctctgcttgtagtcctttaactgctgagaagaaaggctattacctttctagcctacataaaaacactaacgagaccttgtctcgaggcatcacaataaacaataaacttttccttatctgaaagaagggttaatactggaacggtaatcaagcgctgctttaactctagaaaacttttctcacaccgatcaatccaaacaaacttcaagttctttcgagtcatctccgttaagggtacaataatctttaagaaaccctcaacgaagcgacgattataccccgctaagcccagaaagcttctaactacagtagctgattttggtgttggtcaatctcgaacagcttcaatctttgccagatccaccataatccccatcttt

SEQ ID NO: 249392 - DNA, 902 bp, Cannabis indica
ttcagttcaccatacataattatatttttttcaaaattaatatctcaaaaaattatttatttccaaagtgggaattaaaccaatagatcaatgcaatacctctcctgcatgaagatccaggtgctcagaccacaagaagcatcgaagactataagaaaattttccagctttccatggctgtccattcatggttgaatcaacaaactcgttatcttcaattagtaccccaatctgcacaaaccaacccaagtgaattgagtcattttaggctatctttttataatgttcaaggcttaattacttaggaataatcagtttggccatactactaaacaatcttaatgggacctaatctgatgaaatatatatagctttaattattaaaaatgttgtgaattttgatggcagtacactctcgagtcacgtgatactgcaggattggtcgggagcaacatatttgaaactttttcgaccaattttgactaagaaattggtgtcgttagaagtaataaaatagaataaaatgaaaaataataataattttattcaatttttttatttggttacatttaaatatattggaatgtcattataataaaatgtatttttcaccattttagtagaatgactatttcattttaaaatagaatgaaagactattctaatgtaacataaaaaaaattattttttatgtaatttaaattttattttatttcatttctatttttattgatatttttattcttatacttatatttttattcctcttaaccaaacgccacatagtgttctccggcgagtgcaatataacatgggaaatttaattttttatgcttacatttggttaaacttttttttctaaacaaataataactaatatttgtaagatatgacaactttta

SEQ ID NO: 249393 - DNA, 1198 bp, Cannabis indica
attttccagctgcacccagattggaatcacactgagattttcttttttaaaattcccttctgagttccacggtttcatgactacagggcgattgttgaaaaaaatataccctccatttacaacattatccctgtcttcaatggtgtgaaatcgaatcaaaaacactccgtatgaaatcattcctactttatcaacctatctttccacactcttcttgcaaatccatcaataacagacagaggagggttagctccaagaacataacaaacaattgctgagttccagaaattaacttcctcttcaatatcctcatcagttatcttcaccttctctttttccaagttcttaaaagaattatccaaatttctttgaacattaccagatcgcagaattggagggataggggatttaccttgtgagatgttactgttacattgagcatttgcctccatgaaagtggcgaagtcagacctgatttcttcttacctttggatcgagcgaagtgaagatttgggagataaaggtgcctgaaacaaatctgcatctggttcatgaccgtccccttcatcgacactctcctcatctatgaaatgaatcggttcgatgccaagaacctcatccattgatttggttttttttgacatcagcagtagatacaggacccttctttcgaaccttcctcgtcttcatagctgttggttgcctcccttgaaccttcgatctcgtttttgccatggcgccagctgaggtagctgcgagaactaggagctagagagaaaaccttatcccttaaagtttccatctttaaccccaaaactttgtgaaaagtcattcattttcatctcaaaccaccccatttagccaaatgtgtaaaactcaccatttccagtctcaaatgcaaaccctaaaatgtggaaactcaatttagggaggaagctttgttcagttttcgagttctctcacagatggccaaacactctggtgtagctgcgcaaaggggtcgaggttttgagtttcggggcttgggaattccaactgtgtggtcttttggtctgttggtggcttcgacgttgcacaagggggtcgggggtggtcgctggcgttaggatttggtatggttttttagtgaagaagaagaagaagaagaaaagaaaataaaaaaaatattttttataatttatttatttttataatatta

SEQ ID NO: 249394 - DNA, 541 bp, Cannabis indica
tctttcttgaaaggcttgttaagaaaaactaggtggaaagttaggtctaagaggcataaatgaattgcttggaccaaccccttgacttctgcatgccaagtttgggtgttgcttgtatgtttggttgtatccattctgactgcccatgtaaaacgcagatgcaagattgaatgggcaattttcaaatatatgagtctcactacaaaaaacacaagaaacctcctcaaggtgaaccataagtgaggaaacactttgttgagccatgctcatagtcttagtcgacatagaagctactttggccgataacacagtaatggcatcaacttcaataacaccagcaactttcttacccaaaggtactctagtagtgggccactgataattgttgttggcaattctgtcaataatattataggcctcattataggacttagcaagtaaagcaccatttgttgaagcatcaaccaccattcgagtatgagcattgagaccattgtaaaatgtttccatttggatgcaatgaggaatgccatggtgagga

SEQ ID NO: 249395 - DNA, 731 bp, Cannabis indica
gttagccacaggcatctttctggccacctatctgagcttgtagagaatactctgaatgacttggaggcaagtacgtgtgtggttattgaggatgacgacatggatctttctccatcaaatcttggtttaattgcctcgtactactatgtcagctatgctactattgagagatttagctcctcattaaccgccaagacaaagatgaagggtcttctagaaattctatcttctgcttcagagtatgcacaacttcccatacgacctggtgaagataatcacgttcggaggctaatcaatcaccagagattttcttttgaaaatcccaaatgtgcagatcctcatgtgaaagcaaacgctctacttcaggcccacttctcaaggcaacctttgggtggaaatttggctcttgaccaacgagaggtgctcctttcttcgagcaggttgctgcaagcaatggtcgatgtgatttctagcaacggatggctgagcttagctcttcttgcaatggaggttagccagatggtaacccaaggcatgtgggaacgtgattccatgcttttacaactccctcacttcacaaaggagctggctaaaagatgccaggaaaacccaggcaaaagtgtggagacactgttcgatttggtggagctggaagatgacgagaggcgtgagttactacagatgacagattcacagttgctggatatcgccaagttttgcaatcgttttcc

SEQ ID NO: 249396 - DNA, 1307 bp, Cannabis indica
taagcggtattttggtaattaaaattacataaaaggtataaaagttgactttacattatggatgtatctttgtaaataaaatgtcaatttatattttctatgtaataattcttttttattagtattatttcaaaaatacataaaaacaataaaaaaaatacaaaatacagttgtacgaaattttaaatatttttaccatttttatgattttatttacagaaaataaagtctttttatgttgtactcttactaatttgttgttgatttttgttatttgtatgttaatttttgttattattttcatgttatttggatgttattttctaattacttttatatagttttctcgttgttttggaagaaaaccgtaaaaatgtaaaaaaaaaaatctttaaatgtaaaaatataatttttttacaaaaaatagtgccttatgtaattatcttttttttttacaaatgtaactttcattagataaactaggagtgtttataaaatagttgttccaatccaatccataaagtgcgaatatctgcacttgagtggattgaattggattgaaaaattcaaaattcgcacttgtgcagattggatgttgattaacatgtaaaagtaaccgatccaatccaattcacacatatttataaaattgttcaaaaagttatatacacaattaacatttcaatgtaaagaaaataataatttaaaaatctaatgcattattacacttaagtggataagttagttatgttagttataggaagttagttaggtcgtttgttagttagttggttagttgtcctaaccagctctacactgcctatatataatgctagtgctgccattgtaatcgattgactcataattcaatatcaataaaatcaattttactttcttctctaaaaaactaatatggtatcagatgtaatttattgaagcttcaagaaacttcatcttgcaccttcaagaactcatcaatggcgcaaactcggactactacctctgctactaccactgatcttccttctcctccattggtcgatgccaatttagctctaccaccacaccaaacttctgctgaacctcaaaatcaaattgatgtcccagttccaatttctcgatctactctcatttatcgccctacttacgaagatgtgcgatcaccatactatctcaacaatgttgatcacccaggactcatcttggcctttcatgtgctaatagattgcaatttttagccatagaaacgtgatttcaagctttccattggcgcctaaaacaagtctcccttccttgatggcacctta

SEQ ID NO: 249397 - DNA, 1429 bp, Cannabis indica
tatggattagattttgggactttttgatatgataccatatggatatggattagatttagaatttgggactttttgatatgatccatattgatagattgatactttttatatggatatggatatggattagatttggactttgagacttttttgatatgatctatattgtatggattggatatggatatagattagaatttagatttggatgattaatacttttttgatcaatagtattagttatattttgaattttgagactttttgtgatatgatccataatttcatattgtttagattggatatggagtagattaagatttggattattaatattttttgattaatagctatattgtagactttgagacttttttttatatggtctataatattgtagattagattggataatggatgtagattagactttttttttcttttgtgggtttttgattgagttttggttctcgttttctttttcatgtatatgttttgattaatatctatagtattttttttttgaagtaaaatagctatagtgttgtttgttttcaatatttaaattggtaagtaattgtgaaattaatgaatgagtttttgattgagttttggttttaattttctttttccttttccttaatatgtttgattaaatttaatagctatagttagtgttgttttgttttgaatattttttggtaagcatttatgaaataatgaatgggtttaaatgagttttggttctagtttttctttcatttatatattttgattaatagctatagcgttgtttgttttgaatatttaaattggtaagtaattgtgaataatgaatgattatttatttggagaaatagtttagtttaagttttgaattgaatgtcatttttgtatttgggtatgaaccgaattcaatttactattcagacccaaaaaaatattaatcataaaaaaaggtccaaccaatgttaaaaatcaatgaaaatagattttaaaaaattaaatttcatttcagcccataaattaaacttttgggctcagcccaataggacctgaacccgactacacccaaaccgaaaaagcccgaaccaatacccgatgcacccgaacacccaaaaactgggttctgttgtgcatttccaagactcgaagcccaaaaacctgaacccgaaacaccaaaaacccaaaacccgacccgtgtgcaggggcggatgtatttgaaactctatagaggccatggcccccccaaactttccatatcttataattttctatttatataatccattctttattattatatactatatggtggcccccacttaaagttttagtaattgttttaacttgtaaatgacggtttgagctttttagttttttcttttttcttttttgtttgttttcaaataaaacatattgtgcaata

SEQ ID NO: 249398 - DNA, 742 bp, Cannabis indica
attttgattaaaaaataaagtacgtaccttaaatgaaaataagaaaggttaggtaatatttctttgatccagtactccttgtaaactcaatgatgatcaacgtgtacgtagccaaatgtattcactaattaagtttaattaattaggaaatacggtgttatatataatatatttatatacgagtgttcttgaaattaaagaaaagaatatggaagatggtttaagctggctgctgaaagaaattgatgaaactattgtatgcaaatgcatttgaagtgtgagtacttgggatacgtatttatagacaaaaaatgatttaataatttaaatttaaaattattaaactgatttagaatgtcgactctagatttttaagaaaatcttttttattatatagccaaataaattcgaactttcatgagtactgtataaaacagatgtttttattatatattatttttgtattattacgtaggattatagtgaggttacataaaatccgtgatatataataaatcatattctaaatataattatttgttttacgtataataggattattatatcaatttttttttttatataatacgtatatttaaattattaaaaatattctcatatataatatcaaatttatattgactaaaaattattattattaataaataattacaccaactatattaaatttattcaaaattactatattaagtactatttttttattcaaaaatacattttc

SEQ ID NO: 249399 - DNA, 708 bp, Cannabis indica
cccaatgtggctaaaagtataaccttgaattagctcgccacaagttacactcaccgcactcaccccaaacttaatgtgaaacttggctcttgacaagtgagcaattaagttaggacatatgtggaaatgcaaattaagattggcgttagatgtaggattgggttgcacaacaataataggctaaatggctcaaacttgggtgactagggaaaaattgaatttatagggaaggttagaaaggctcaaacgtccaaagatggcctaaatcatttctaagttataaagctcgctaggatttcgcctcaaggattacactagctaattctagatgcttaaactctctcaaagtgttagctattctaaaaactcaaggtatggtgggataacacaagcacacaattgttgaaagcattcctcataggctagcatttagacaaaaataacacttaaaattagcattttcaacacacaaaccaaggcactccacaaatggaggaaaatggatatttttcatcatcgagcgctaccctaaaccaagctgaaaacacaagcagtatttttctcatttgcaagctaaaacataacatcacaaacatgacaaaacaacatgattaatacacataaagcttactacacacactactaaatttaacaacaacagtagacacataacaaacacaatcagtagcaacacttaactagcacact

SEQ ID NO: 249400 - DNA, 612 bp, Cannabis indica
caggtagcctcaaaacaacaacaaatatctcgtactaatctcacaccagattctgctgcactaggcatcacaccagctggttccataccagcagaaacgatttctggcaccccaactactgagccagcaaatgttcaaccttccaccacagtcacaagaactggtaggcccttgataaaaccaaaacacttgacagattacatctgtcatgcctcctctactgctcatccaattgagcaatatctttcttacattaaactacatcccactttatgagcagctgttcttgcaacatactcccaaattgaacctcaaacttatgctgaggcctctcaatttaaacattggcttttggccatggacaaagaaaccgaagcccttgaaagaaataacacttgggttgtcactaagttacccctggccataaagccattggttgcaaatgggtgtacaaagttaaatataatgagagtggggttgttgaacggttcaaggctcgcctagtagcaaaaggctacactcaaaggcatggcattgattactctcaaacatatgcccctgtggccaaatttaacactcttaaaaaaaatagctcttgaagccatgtacaac

SEQ ID NO: 249401 - DNA, 876 bp, Cannabis indica
aggggaaaactcagagtcgagatcagcgactattgttcactgaaccgttaattcgggatggcatcaaaattgcacaagtcgacttggacgaagtgcaagaagaggaaaaaactagaatacaacagttatttgcaaagtgctgggagcaaatccacctgtgacgatttttgaagggttcgtgaagaggatctgggggcatttgggtgttcttcaggtaagtaaactatccatgggactgattatggtaaagtttaatgatgaagcaacccgtgatcaggttgtggaggcaggggttgtgcaattcgatcgaaaaccagtgatagttcgaccctggtcagcggatttgaatgcaatgaacctggtgcgcactgttccattgtggattagacttcacgatttggggcttcaatactggggaaccaaaagcttaagtgctctggttagcacaatcgggaaaccgatcatggtggatcaacacacgaaagaccgaacaaggctgcagtatgctagagtgcttgttgagatggagatcacggatgcgccaccccgattcattcctttttttaatgagtttgggcagcttcaagaccagaatgtggagtatgagtggcttcccgcaaagtgtacccaatgttctaaatttggtcacacaaaagccacctgtagacatgatgaatttgttaaacagaaggctgaaaagcaagaacaccagcaagagaaaagcaaacaaccacagaagaaagattcaaaagcaaaggcagcaagcacgattcaacaggaatgggtagttccgaagaaaacaataccagttgcaacaaccagtcaccatggaagtccgaagaagaaagctgagaatggcagtaactcatttactct

SEQ ID NO: 249402 - DNA, 809 bp, Cannabis indica
agttcattactttgttatgttatcattaattaatatgctaaaaaaaagtgattactatttcttaaatatcttaattaaaaaaaatatttaaaaaaatgtgatattttagttatgaaaaatgctaaaaaaataactctccttgttggtatcataccactatcagtgtaattaagtaacaagtctcatataacttaaacaaataagatttaaaaaatatcgctaactaatcgtagggtgccacctatatatgaaaggtgttgggcactactggtgcccaatagtaatgctctttagttataattatgtgatgcttttttcagaatttattttttatttttttaactttttaaaaatattttatatttttatagaaaattaaaatattagtaaaatatcaatttgtagatttatgttgttttttaaagaaaaattattaaaataataataaaatatcaatttatagatatatgctttaataaaatattaaaattaagagaattaaggagagaagagaaatatagttttggagtggttttagaatatcatgtcactgcctcatacttctcatttatatatatagatatagatagttacttaaaaatataattctaatatatagtaaaattataaatatttgtctcattccatattattataaataattttatttataaaaaactaaatacacaattttattaattattatttgaaattatttgttaagaagtttaaaatttattatatatagtattttaaagtgctttgttaaaagaaaatatttttataaaataaataaatagggtggtgta

SEQ ID NO: 249403 - DNA, 1281 bp, Cannabis indica
cctgacatcaacaatttgtatcagatgttagttatgaaaaactaatactatatacaatcaaactcacaaaaaagttatacatattaatttattaccccatgattagccctagccagatcattcagaatctataatattatgtgtgaaattttaatgggtattaccctggaatgggtagcattaaaaaaatttgtgtttttatgcttgtttactgagatttttaggaatgaattaaataagagcttaagaaataaaagaagcaagaaataaaataaataatgatttttacgtggttcgggcattaatgatcccttgtccacaagtcagtatattggccttagaaggcttgtaaaatgtgttacactggtgtttacagtagaaaacctaattatgttctcttagtttctcttgaaaaagaagaaaacatagagagattttgacagagttttgactattactttttcccctttgtgtggaaataaagggtttttataggctaaagtatggtcatgggcatacccatgacatgtctagggtttttgtaaaaagacccactattaggataaaatgcattaaatatctgactattgtgctactaagatggtgctttctcgtgtgatgaactgtctgtatagtggggacaattgttggtgctgggcacgtgtcgagcaaaggcttgcacttggtaaacaaaatgctcatatgagtcattggatgaagttgagtattgagagggtggtgcacacactatcatggtctgacacaggggacaagatctaattttatgtcagacaagaataaccatcataaatccattgggcttttgccacgcatgtagcttctggttctccttgcacagtcggaatctgtcttagactcttttcatgactctccagcatctacctaatcttatagacaagttggtcttctccgaatctcagagaaatgataaggcttttggatcttagatagttatttgccttgtggtaaatctctaagtcttcaacggattacacccttttattttttgccatatgtcctttattcaaaaacatggataacatatacgcacaaggtttcgggactcttgagtggtggaagcttgcagtctccatgcgtatttctacggcatgctctaggatacatggtcgaactctgaggatgcaaaaacatatttttgacatatgcgagttgaaagtttttagatccttcatgaaatatttaccgatacacacgtgtcacgtattctaggaacccatgcgctatatgcacctgtggtga

SEQ ID NO: 249404 - DNA, 865 bp, Cannabis indica
aaagtcacctagagctcttctgtttggttagctcgtagaccgaggaggattagcaccattcagaggatttttctagtttctttcttgggtatgtcgattatcacgatgacgattgttgtgctgtccattatcagtctttgtcatcattcttactcgtgtacgattgtctactatgagacctcgtttggtcttgtcaagattgttgaccggtacactgagtctacctatagacttggacccatccattttggttgtacgccgccacatgtcctcaagaccgcccagttggtcggtgaggtacatcgtctcttcatccttcaggctgaggacaaaatttgggttgatcattcattccaagatagtgaccaagtaagacttggtcgtctattgggttgccatagtctgaccttggggcctagagttggaaggtctgtcatgctgaggtgattgcacataattagttgggcatgctttcgggtcgtattcttgtgtcccgctcgagatgtaaggtgcttttctccgattaggatctcttctatctgagcgtgagttttctagtacctgcactcttagtttgttgatggaatcgcttgatcaggtcagtagtttcccttgattgatgattgattttctcttgtcgagcgcgcatggactcaacctgtctatcattctattcttcaaattcatgactctattgttcaaacacataattcactacaacacgtggtttttcctgattatggcagagaacattggtatgattctgaacttaacctaccccttatggtctccatattataattttcctcgtaattaatttgatatattttaggaacgaacctaactatattagcaatgctattag

SEQ ID NO: 249405 - DNA, 835 bp, Cannabis indica
ctcctttagagtttgaaaagctttcaacactccttcccaaactcaaaaggaactccattcacaagtatattagataggggcttagagatctttgaaaaatctttaatgaatctctggtaaaacccagcatgtcccaagaaactacaaactcccttgactgatactgaaggggtacgttctcaattatcgacaccttgtcaacctcaatgccttcttttgagatcttatgacccaacacaatcccctccttcaccataaaatgacactgctcccaactcagcactaagttagacttttcacatctaatcaattttccaagttactcaaacagtgatcaaaaaacgaactaaacacagagaaataatccatgaacaccacgatgcaattctcaattaaatcagagaaaatagccatcatacaccgctgaaatgttactagagcattacataacccaaatgacattcttcagaaagcaaaagtgccatatggacatgtaaatgtcgtcttctcttagtcttctggtgcaatagctatttaatgataccctgaatagccatctaagaaacagtagtactcttggcccgccaatctatccaaaatctgatcaataaagggggagatgaaagtgctttttccttgtggctttgttgagcttctgatagtccatacaaattctccacccaattacagttctggttggaatcaactcattcttttcattcttcaccaccgtcatccctcatttcttaggcacaacttcgactggacttacccacttactatctcaaattggataagccaccccagcattcaaccacttcaacacttcctttct

SEQ ID NO: 249406 - DNA, 1008 bp, Cannabis indica
tttaccctaaaaaatgaagaaaaatgtgatcttttcgggtatatagttttaggtatgaaacatagaagatttagaaaaaaatgagctaaaatggtgaatttttcgtggtggttggcgtcggagagagtttggggtttctgggttggctgattgaataaggaaggcaaagggttgggtaggattataaaccccttttggcatcagttatttagaaataaccgacggtatagggggcacaccttatgccatcggttatctctaaataaccgatgccataagaggcataaagttcccttcagtagattaacaaccctatgtcgtcccttattaagttgaagaaattacattgtatactcattttattttatttattttaatttttaccttcattttttatattctttaagatgtacccacttttatggatgatgttcccattatactccttaggttaatgtaaaatatgtgctagacttaagtggagagtgaaggtatattagataattcactccaaaaaataggtatattttaatgaaatataatatgaaggtattttttattaatgaatacaaaaagaggtattcctcaatttatccatattaagtttctagtaaaaataggaaaacttacaaaaatactgacttttggtccaatctttacaaaataccgcacacggcagaaattactttatactgtcttggccaatttttttttcttttaaaaaaatgtagcctccatcttccacacccacggacagaaccaccacacgaattcttgtgagattgagaaaaaacagtgaaatcgacgtcaaataaataatcatggcaaaacaactgtaaaacaacactaaaacaaatcaaacaaaagaaaggaaaacatgattaaaaaaataaaaaatattatgcacagcctcgatacctaatggaatagcagttatatttgcaagccaaatcttaaaaaatcagaaaaaaaaaactactaaaacaacataaaaataaatgtaaaaca

SEQ ID NO: 249407 - DNA, 725 bp, Cannabis indica
cgccagtggaaaatgacacttggtccatccttgaaatccaaaataagggacactcagttacgtctcaaaactttgcaaaattgtccccaaccgactgaggcacagcttttgcttgggcggaaactggagaatgagcttgatcaactcttatacaaagaggaagaatattggaaacaacgatcccgagtgaattggctaaagcttggtgacaaaaagaccaagtactttcaccaatttgcttcctcaagaagagcaacaaataagatccattctctgctccatcctgatggttctatagctaaggataatgactcttttgctttcattattgaacaatacttctcccaactctttactagtcagaatcctagtgttgaactcatggatcgcattttaactggcctaactgagcatatttcaaagtcggaaactgaatcccttaatagtatttatacgaatgatgaaattcaaagggctgtttttcaattggccagtgataaagcaccgggttcagatggtttcactggcactttcttccaaaagaactggcacattcttggccaggatgtcctccgtgcggctaagggttttcttaatgggactgctaaccttggagcaataaataacactgtcattgtgcttatcccgaaacgttcccatcctcaacaaatcactgactataggcccattagtctttgctcgaccctttacaaaatcatttctag

SEQ ID NO: 249408 - DNA, 631 bp, Cannabis indica
aattacatagcataattatcagaaactaataattagcattattaagtaattaagtaaataaataccgtatttgttgactgtgagatcgagaaaagggataatccgaggaacgacgtcgtccgagagattaatgggtttggacttggcttctttcatcattttagagctttctttcaggtctccaaacagaactctgtaactgtaaggagtccctttaaagccttgttttttgagatacttttcaagccttttgggcctcaaccatacccaatttacaactctccaaatccatgtcacaactattattatccaaattaatttagcacatagtgaaaggattgataatgagattgagacctccatttctttatcttttattttatttttttctttggtatagtaggagttgaggtagaaaataatgggtatttataagagtaaaactaaaagggtataactacactattggttgctgtttattagtaagtggttggagaaacagtagagaaagagtgtaatgactaatgagagcctataattttctattcatctagaagaaccgaagccttgagtgtgtaatattgtatggggttttgatttattaacaaggtaattaggtttttttgtccct

SEQ ID NO: 249409 - DNA, 732 bp, Cannabis indica
aaagccgtatgaattttcttgtgcaaaaagggcggcatcaacattgaccttaatgttgtttgagttcggtttaatccaaaggtcagcgccatcgcccttgttctcagagaacaaggaagatagccaagtattgtaatatcctaagattatgaaatggattagcaatccctaactagttaattgtgtattattgtggatttatattattatacaatatattatatgcaaattattatgaaatatgacatgttaagatcatgttggttaaccaggggcattttagtaattttgacccaaaaagggtaaaacggtgaatttaatttaatacgtgcttatgaactatgttattatacagtatgcatgttttgtcctttttcaggtatattctgacaagtcggtgcggtataatcacaactgggtattccgggccgaactgagttacaattttgggattatttattggcattttaattaagtgtgtttaatctgaaatttaattgggaatatttatgttgaaaatgactatgtcatccttggaaatgcttttatgtgttatttggccctagggggcaatttgggaaaataaccctttggaataattgcaacaaagcgaaattattttgcattttagaaagaaaaattctgggctttttcctctgccctagccgaaccccctctccctcttttctccatatttccattttgctaagtgttggaaaattcatcttgaaa

SEQ ID NO: 249410 - DNA, 958 bp, Cannabis indica
agtaggaacatagtaagtttcgcttaagaccctaaacattaaatctcaaatgttcaatcacaaatactaatttagagctcttgtgcaaaaattactaattagactatttgttttgttaaatgataaatcaaatcatgtgtttttcaaaatagtacaaaataatacatcgagctcaattttcatcaaattaaaacttaataatactttgatgaagatgtcaatgactggactaattacatattctatatttgttcgtgctaactacaaattggttatgttaaaagaaaatttataaaaattaagctcgtggtactattttataccattttgaaaaatataaaattcaatttatcatttaatttaatagaaactctaattaataacttttgcaaaataaaaattttaaaataatatttatctccaaatatataactaattaatcattttgatacgcagtggttatatgtctccagaatatgcactaaatggacttttctcaatcaagtccgacgttttcagttttggtgttatgcttttagaaatcataagcggaaaaagaaacactaaattttaccaatcagaggaagcttggggccttctaggatatgtgagtattgatatacatatataaatataaatataaattttggttaaatatatatatgagatatagagttaatcttctcattgttaattagttttgagatagaacttcatatactaaaacttcgaaagattggtggacaagcttaggcgaatatagacatatgacattcttgcaacttccatctgtcataaatgccttaagctatctctatgtcaagttctgtggtcaagatgcacaagtaatcgagagacttcgagcaaaaattttcaagcttaattgttgttcaatggaaaaaaaaaagagatctttcaaaacactataagaagatgactcaacgattctaccaaatag

SEQ ID NO: 249411 - DNA, 639 bp, Cannabis indica
gtttgtgcaatgtcatatacaaactcatatcaaagatggtcgttatgagatttaaagaagcagttccttttgtaatttctgaaacacaaagtgctttcccctccaatacgcttatcacagacaacatcttggttgcttttgaactaattcatcacttccaacataagataagaggagcaaaaaaaatttttgcaatcaagttgcatataagtaaagcttttgatcgtgtggaatgggcgtatttatgggcagtaatgtaaataatgggtttcaagtttcaattgtaagtggattgccttgattcaaaacggtatgtcttctgcaagtttctctttctcgctcaatggtgaagtagtgggtcatgttaaacccactagagatgtaagacagggggatcctttatctccatatctctttttgatatgttctgaagggctttcaagactattacaatatgaagaagctattgggaacctccaaggacttcgattcattagaagagcaccttcaatttctcaccatctctttgccgatgatagcttgttgttttgtgaaaccaataaaacttttactttggcaattaaaataatgttgaatatatatcaccgtgcttcaagataaatactcaacaatcaaaaa

SEQ ID NO: 249412 - DNA, 773 bp, Cannabis indica
tgtgtcttgggtctgttatttctattaagacacttgtaatcattttaccaattatgttataactaattgtcttgtattgtttcaactcttttgagctatataaatatcaataaagttccttgtatgggataagctttgcttctcaatttttctctctgttctcctctgttctgtttgtttcatggtatcacggcctttgaccttcgtcgatggcttcatcaggcgacaactcgtctcctgcaagtatctctgatcctgttgcaccctctgctactgtttggaatcccttttctcattccctgatgtcctctctcacgatcaaacttgatcgaaacaacttcctggcatggaagtctcaagttttacccacggttattggtcacgagcttgatgaaatcttgctcactgacttgtctctactaagacacctggttaatggtgatccgaacccatcctttcaacaatggtgcaagaaagattagcttctcctttcttggatctgatattcaatgacggaaggtgttcttggaacagtggcaagctacactacttcgaatgcagtctggaaagcccttgaacaaaaattttcgagtcaatcaaaggctagattactacaactcaaaagtcaactctccaatgcacacaaaggtaatctatctctgatatattgataaactcaaagttgtctacgattctcttgctgttgctggccactctgtctcagatttagatctattcttcatctgttaaatggtcttggacctgagtttgat

SEQ ID NO: 249413 - DNA, 663 bp, Cannabis indica
tgtgcatgtacgagcatcaatctttctttcttcaagtgttcaaaaactggatcttgaagaaatcactcaaccacctagatctgggtgttgatagcaggtatatatagatctagggtttctgttttgcttctgaaagtgttagttaggtagttacagaaattagttaggtgtggatttaaccaaatccattctaactaatttctgttagggtttttagaggccgaaggccaacatagggtttttacttgtatttacagttctgtccttgtatgttgcttaagtatcagtgtaagtggaggtttatatcaacaaatctagatattattatttaatatataaattctaaattttatctataataactttttagtttcaattttttattaaaaaaataatgaatagcactaatgctacaacatagcaattatgtaaatttctagaatagcactaatgaaagcaacttccaacgacgagcctctaacgaggactttttagtgaggacttgtcctcgttatagagttttaccaaggacatttgaagttctaacgaggacatttgtcctcgttatagatcctgttttttgtagtgctcttctctacaatggtatagcatcttaatattttgccacataatacgtccgcttcaccaagcatcctctaaaat

SEQ ID NO: 249414 - DNA, 1078 bp, Cannabis indica
aaagttcatacatttctgtctcgcataagactgttgagccagccgaattataaatatactctacaaattgtgatttaatgagttactccatgccaagtgtacttacgattacgcgtttaagttcttcgatcttcccagctcgacacgtgtctttctctgatgtgctcaccgaattttgggtataataattgccccttaaaaagttcttttttatatataaaaagagctttttaatgattaaaaagggtatttttgtcatgttcctctttttgaaaagacgcatgtcctctgattttggcggttgtgcagtttcgaggtacatcagaattaaataaaccatcttttccacttccgctttgaatcatgtccgtaagatcaaatctttctctgatctaaagaagccactatcatgggtataaagtgagaaaaaaggaaccacctttgcattatttcctccattttaggaagtttgaaaaaactcttaagctgcttcgtcaaggatcaccgttgagtttgtccgaggacttgcatgccatctttgtccttgacctttttcttgcgagtttctttcgacttaatcctctcaaagcgatccttgcttcgttcgaagatttgtagacgaagtaaccagtcattgccccaagccctaacttcaaacagtaagttgctttcttctttctcatgtttgtttcattgtgtggattagttacttagtttgtttgtatcgttgtcatctcatctggttttggtagtttttagggttaaactgtatctaggtccatcctagggttcaggcaatatgtaggttgttttaagatctccaactcattacctttgggtttgataaaattctccttcagggattgggactgcgttttgcgtgcagtaatgtcccactctagttcaggaatttatcgtccaaaagttttagaatttgagttccctacagaatcagcaatcccgtacaaacccaacccttcaaaacccacctccaaattagagttgaacaatgctagggttaaggaacacgtagtgggaacccaacaggaagatactgctagtcgttataggcgtttct

SEQ ID NO: 249415 - DNA, 1399 bp, Cannabis indica
ttaattattaaatattaaaaataataaagaattattttttaaattcatttaaaattaaaaaaaaaaaaaaagtaagaacttgtcatttttgtgacagcctacgtcccaatcaatcttttttttatcatgaagaaggaaacttcaaccttttaattaaaagaaaatgtaataattattaaatattaaaaataataaagaatactttttaaatctatttaaataaaaaaaaataaataaagaacctatcacttttgtgacaacccacgtctcaatcaaccttttaattaaaagaaaaactttaaattttgatgtgggaaaatactgtaaagatatgtgtaagtcaaaaaaacaaacaaaaaaaactttgtacaaaaaaaaaatagtatactgccgtataaaatccaaaaatatacacatagtataaaataaatttcagtatatatataacacatgcatgatggtgcatatttttgtgaaactattgatcctgtaaatgtaagtaaccatgattcttgatctagagtgagtgcatattcttggtataagtatgggaaataagagaggaagacatcagaaatattaatagctactactatatgtgtgggaaattaattatctctatattataaatatttacaagaccaaaaaatgcgtttgaaagcaggttcacttctgaacccctgaattattaggtttaattattaaaagggcctgttttagggtacgtacgtggaaagttatacatatataaaactttgaatgtgaccactttggataaaggaaaagcagctggggtttcattttgagggtgcatgccttctatctcttgtggaagtggaaactcttattggaactaaaatctgtttggcttttaataagaacatagtcacatgcatataatattatttgatgaatatatgtgatatttagaacatatatatatatataatagaattgcatgctgatcaattcatgagcagagatctatatatagtttgagaatccaagaacgagagattccctttgtaattagttatatgtaattttgttatttaactatatatattattatttataatatagggtgagtcagtgattagtttagctatgtatgcatacgcggcaactgatagatgaataataatgtcttttttatcttaattttaacaaacatccaaaattagaatcaaacaattccaaaaataagttaatgcaataatgcaagtagtagtagtcgtatacgtactatatagtattctctattattattattattattattattattattattattattattattattattattatttcatacattacgcgtgggaagaataaataagtgttgtattttctttttaacaataaataagaattgtattgaatataaatg

SEQ ID NO: 249416 - DNA, 704 bp, Cannabis indica
aactagatttgatgaattgagaatgttaaaaactaaaactttgtctgatttttatgaaagattatctgatatttctaatgagtttttttaccaaaataacattttagtgaaattttgttataattatttaatatatcttacaaaattttaaaaaatatgaaaaaatttaacataccgtaaatagagtttaaataatatattacacatgtgattattttattttatacacaaacatatgaaatagactatttaagatactagtttctatgttataaattattctaaatttctcaaaatcatatataataatatataaccctcatttttttactttttaggatactacattttttttttcctaaaatacttctatgagcgcatgcccacaatagaaccaccaaaagaaaattaaacacctaatcacatgtcttcattagggtgtccactgaatcatgcctttaagggtttttaccatagaatagatatatatttcctacattatatatattattcacctatgtatgctttttatcaaagatattagatcgtattgtattgtatcaatttaattatatatcatatttttatataatactatgtgaaactttcatttatattaaaatattatatatttaggtgtccataaaattaatcaacacatagttttacataaaatattgcataaaatacaatttaatacaata

SEQ ID NO: 249417 - DNA, 653 bp, Cannabis indica
ataaaaatacaaaaaaaataacatataaacaacaataataataataaaaaataacatacacaataacaaaaaattaacaagactaatacaacataaaaatacattaaaaacccatattttctataaataaaatcataaaaaaaacacaaaaatatttaaaattccataatatttttgtaatttttttattatttgagagataacccttgcgaaaacactaacaacattacacaacacatacatacattacaccactctcttgtgttatgtcacactcataacacacacaaacaacatacactatttaagagtctccaacttctgagccgtattccaatcctgactttcccttacaaatcaaccgaacaataaataaggcgccgagccctacaacagcagccgcaccaaaaccggccacggctgccaccaacaccgcaactagggctaacgaaagagggccgaataggaacacaagtagtggtgaggtaacaagtaaaatgacaagtgatgccatgaaactcaaccctgccattgccaaaagaggccctccaatcactatgctcacaacacatgccaacatcattgttgtaacatgttgttgttgttgttgttgttgtttaccaatatttctactacttccatccccataaaag

SEQ ID NO: 249418 - DNA, 759 bp, Cannabis indica
tttcaacataaaaagaccgtattttatgtaaataaaatcaaaaaaaccgaaaaaatatttaaaattccgtgaaaccgtatttttgctgtttttattgttgtttttgtgcatttgtgaaattaacccaaacaaaaaactatttaaaaaatatatatattagtaaacacacccttatatttctatagtattaaatataataataacatgtatcctataaccatcttttttaaatgtaaatgtataaatatgctggtagattttttaatcacaaaaataaaagtaatattttattacttttgagaacaaaaatatattttataatcatttttgtttttcaattttaaaataaaaaaccaaagttcgctttgtaaaatttattttatattcatttgttgattttatttaagtcgggtacggattgggatttgggtccagggtcgggatccaggtttaaattctaaagtctaggttggagtcagaatctaaaatattgattaaaataaaaattatttataaaaaaaaattgacagtgactaattttgttctcaattaaaaaatttaaaagttaaaataattttatagaacatgattttgaaaaatattttttttttaaatgttaaaaataaaaaattaattaaaaaaaagtattactaaaacgcatcttatattaaaataaaaaattcttgttaggaatttgaacttttggttatctttattattaaaaatatatgttacgactaactaaatatatatatatat

SEQ ID NO: 249419 - DNA, 506 bp, Cannabis indica
gtctattcgacatttatgctttcggaggagtatcaatatgtttaggatttatttggtaggttgtataatgaaattaattaataaataacactatgaataaaaataatgtattatattaattattaagaataaatttatttaatacaatataaattgtattatttaatatataataaatggtatgtattaacttatattaaaaaagttttaaacgatatgtgcttttgttgttggaccatgttgatgttgtgtataattaacattaactacatatctaatcaaaaaaaaaattaactacatataataaaaaaaaatatatatatattttaattttttaaaataatatataaaattcttaaacaactaaatagagtttacacgtttttccatacaatcatatttcccataaacaaattattttgaataccttctacaaaaaaaaaaaaaaagaccctttactatatagcattagttaattaaacaaaacacaataatagaaggtaagt

SEQ ID NO: 249420 - DNA, 595 bp, Cannabis indica
tttttattttcttctttcttttcttttcctatatacatttattatttatcattatctatatttactcaaccaaaacttaaattatacatcatgatcataattgagacaccaattttaagattttgttattactattttgcttgaaaaaccttttttttttttgggtaaaacaatattgtttcttcaatcggtgtcccattaaaacctatgataaagtcattaaatgaaaaattatctcattataataatacaaaaaattcaaattaatcacttaaactctttaagatctagctaaatgtagttatagtcatgcaatatagtctaatatattgatgattatatattgtatgcagttatttttcttttaaatctagagtctctgtaccatccctcatgacatgttattatataattattaaagtgaattaagtatttaattctccttattttaatttaataattattatattttacttgtaaaaataaaaagattatttttaaaaaaaaaacaagcgtagttatgataaaattagacctcctaattagtatattggctgtattgttgataaatcaaccataccaattaaattttagg

SEQ ID NO: 249421 - DNA, 1597 bp, Cannabis indica
agaagggtacacatttgtctgtagacttaaacataaatctgcttagtgcagcaatgtgtcatgttaagctttgtacttcattgatagttgtgggcaactttatgtccaaaatggcttggatcttgtctggatttgcttttaagccgaggaactttttaaagcctactctaaaagaacatttgagggggttgagtttcatgttttagctgcagagaattttaaagcatccatctaaggacaccttaaagaagcaccttgaggaagcaaaaggcaactggcttaaattgctcccagaggtcctatggtcgcacatgactacctagaagacgaccactaggcaaactccattcactctagctttcttgagttttttaaaggtcatggctgcaacaaatcaccattgaaaattatcctttttcaatagctccgtcaaagaggcagcaatggtagtgtaatgttgcacaaaaaggcggtaataccctgtcaaactaagaaaaccatgtagttgtttcatagattgaggttgcggccattgaaccatggctgtaatcttcgaaggatcggcttgaaccccctgagcagataccaaatatcccaaatacttacttgcctttgcaaagaatttgtgttgtcgtagcaactgcagtacttgcctcaaatgttccacatgtgtatcctcattggagctatagacaagaatatcattaaaaatacaataacacatccccttaaaagtggcctaaaggcctgattcatggctgcttgcaaagttgagggcacatttgtcagaccaaatggcatgactaagaattcgtagtggccctcgtgagtgcgaaaagccattttgtgtatgtctctcgaatccattataatctgatgacatctggcccacaagtcaagcttggaaaatatcgctgttgtacccaactcatccaaaagctcatcaattgttggaatagggaaccgatccttgatggtgattccatttagcgctctatagtcaacacaaaaatgccatgtcccatcttttttttaccagtagcaccggagacgaatatgggctggtactcgattgaataataccacattctcccatctctttgaccatttgctcaataatgtccttctgaaaatagggttacctgtaggggtgaacattaacaggtgttgaacccagttgtaaatggatgtgatgatcaacttctctgtatggtggcagcccctttggttcgacaaacacatcataatattcagtcaacatgccctgggaaaattagcttccatttaaggtaatggaaccgattgagactcacaactatccatgacagtcattaaacaaaacaaacaacaaacctcaccctagcagcgtcacaaaatggctataagtcaactaatgtgtggaaacatccttagaggctgctaatttgactatactctcctaccaagagaactccgtggtcaattcttttatgatcatggatgcaagggcccaaggtctgcagccactgcattccaagtaccacatcaaaccctgaaataggaagcatattaaaatccaccacaaaattatgactctgtaaaattaattccacttctt

SEQ ID NO: 249422 - DNA, 897 bp, Cannabis indica
tctttttcttccttgttcggccaacaagaaccaacagcctagggcaggaatttcttcaattttagaggttattaggtagaaatttgagagcttaatctgatgtaaaaccctaagcttgcactatcatggatttatgatattattggaaagttttgttaggtttagggttgattttgatgagtttagttctgtgttggtgaatttcgtttatggttagtttctttaggtctcaattgatattttaagattgtttgcactgcttttgatgtttaattttgaggttgagcaagtttgaactcaaacttgactcaaccatggcatgttgaattttattgcgtttattttgctgttttggtgtatacaagtgttctggagagtttgcttgcatttagggaaaatttggccaagttatgcaatttttagggtttgctagtgcaaaccgatcggccgattttacagggtctgtaaaactggtgaactagattacaatcaggacccctgaaatcacaacttttccaaatttgtgctattttacgagcatagtttgatttcccttggtgtttggggttgtagtatattgtatgtgtcatcaagattaaccttagttgtgagctagggtttcagatcgggttattcgagtttctcgcccaatcgtataatgtgacttaggacctccattcagctcaaagattttccattcaagtcgaccgactcgcttgaatctggaacgaggtaagatagcataaagcatatatatgtgagtgtatgcatgttattaattatttacactactaacactaacaaaaatgtaattttaagggtgttagtatagtgtagggttttagggcagttacaatattaccaacacgagttatagggggtacgttgtgcatgtgg

SEQ ID NO: 249423 - DNA, 554 bp, Cannabis indica
gaagtctttggcattgttgagaattgccctggtactaatgttgtatttgctctaaaaagcattgtatttcctccaaaaaccgttgattgagaccctatagaatatgattctctttcaaaaaaattcttttttagagattcatactgggttttaagggctttcattttagtttcttttgccaagaataataaaatcggaatagaatttgattttatgatggacatgagtttgtcacgcatctgttgaatcttgtttgtcaacttttcaatgatcgtgttttgtgattgttgtttacgcattggcttagtgcatttaatttatttttctacctattttaagatatagttttgggcaatcatattttccatttgccaattcaatacttcttctactacggagaccttttgttgagttccatccgcattcctagttgtaagattttgtatttttggctggtgggaagtggtaccttactcttcattttttcgaacttcttgagaggagagaaaagtacaatgcaagtattgggggttatcatgtttgtgtttaggaag

SEQ ID NO: 249424 - DNA, 785 bp, Cannabis indica
taatatattgcttgccatattacttgctcttatttgatttagtggttaattgctttattttgtgttaaaagtttcaatttaccaaaattagttttcaccccctcttgaaaacatatcttgggctaacaattggtatcagagccaagttaacgggcttgactaacctttacaactggaaaattttcaccaaggtgttcccaaacctcttacaatagttttgcaccattgagaactattaacctttttctcagattgttgaagtatcaatctcactataattgggttgtttacaataccggtgcctacctcatctcaatcacagtatgaaaatgtgtttgaaattacaagtaaatcactctagaaatatgataatacaatggaaacctagagtgataaccaagcacacttaggatcaataaacataactttggctcaaagtgtgtgaaaagtgtttgttggattttaaacttggaagctcattaatctcacttagataggttaggtgtatgacataaatgatcaaccaacttgattatttgagtgaaaattgactttatatagtgttgggatgaaaaatagctgtgtataaccattggacacaaaaaatgagactcccattgggaaaaccagttcaaaatcggttagcctctttgaaactggttaacctaaatccaggcagttgaaattttttgcactaaaacggccataactctctactcgattatccgatttcaaaaatttcaattttgttctcttagttaaattgttgcacaagttagtgaatg

SEQ ID NO: 249425 - DNA, 2108 bp, Cannabis indica
tcatgagaagaaatcacatagggattgtccatagaagggagccacggctggttaagcatagagatcgaagaaccagaacccacacgccatctagcccccaatttaaccacatcttgagcttcaattatactcctccacacataattcggattagctcccaactcagcatcaagaaaagaaccttggggataatatctagcttaaaaaacacgagccacaagcgaagtcggattggttaacagacgccaaccttgcttgcccaacatagataaattaaagtccctcaagtttcgaaagcccaaaccacctttatgtttatgcagacacaacttattccaacttttccaatggattcctcaacctcgagaggccttagaatgccatcagaatcttcccattaggcgatcaatgtctttacaaatttcaaggggaatcaaaaaaacactcatggtgtaagaaggtaaagattggatcacagactttaataaaacctccttactagctctcgataaaagcttactatcccagttttgaatacgcttcctaaccttctcctttaagaagccaaaagccacattcttgtttctaccaaccacactcagcaaacccaaataaaaactattctcatcagcagcatgcatatgaagggttgacaaaataccgaagcgaacactatcaatcgtgttggagctaaaaagtacagaagacttatttagatttaccttctgacctgaagcctcctcaaacttcttcagcaattccagaacacgttgagccttctccatagtggccgagcaataaaggaagctatcatcagcaaaaagcatatgtgtgacataaggggctctacgagccacacgacagccatggatccatttcttttcttcataaagccgaataagagctgagagaccttccgcgcagataataaagagatatggagaaataggatctccctgacgaatccctctagttgggacaatcggcccaagaactttcccccatggacaatgttataagagattgttctcagacattccattatcatcataacccagtcaaccgagaaacccatgcaaagtaagattgcatgcaagaaagaccactccattctatcataagccttgctcatatccaacttaagggccatacaaccttgctttccttgttgtttacgtcgcaaatagtggaggatttcaaaagagacaagaacattatccgtaatgaggcgaccaggaataaacgcactctgaaactcaaaaataaccttggacaatagacctttgagccggttagccaaaactttagaaataactttgtaaagcacattacacagagcaataggtctcaaatctcccatgactacaagcattttcttctttggaataagcacaatattagtagcattaagatctctaggcattaccttattccgaaaaaattctgaacaagtcgaacgacatcttgaccaacaatatgccagcacttctgatagaacgcaggtgtcatcccatcaggacctagagacttatctggatgcatttgaaacaccagttaacgaacttctttttccaaaactggtcgaagcaaagtaacattatcatcatcacttatcgaaggttgaatcttatcctggataccattaccatgtgtccccaaggaatggaaaatatcagtaaaataattaaccattacctgaggtaaaccagtctcccatttgacccaatcgcctgcctcattcttcagctgatgaatgaaattattttttcgacgagaactagcagcagcgtgaaagtactttttgtttctattcaattcttttaaccaaaagtgcttagatcgttgacgtcagaaaatttctttttgatgataaatctcagcaagctattttttgcgtcatggtattcagaaaccgaggcactatcaggacaattcttgagagcaccaattcttcttttccagctttgaatcctctccttaaagttacacgtcaaatcatttccccaagatttaagaggttcctgaacagccacaatcttgtcaataatgttattagaaacgcagcctcctcattgttcctgaataatagaaaaacaagtctcttcacg

SEQ ID NO: 249426 - DNA, 1087 bp, Cannabis indica
attaaagttcaaggccgagtctataaagccactaaggctagcttagtggtgagggagaaatgggaaaaggaagaggtcatgagttcgaacccaagacctttaagctacaagctattaattgattgtaaaaatattattacgctacacccaaaaaaaaaaaaagtcaagtctatatatctgaggaaattttatttttataggttttaagatataagtttacaaaaatatgatttattattaaaaaagttattttatgaaaaaattaaaaaaataaaaataatataaggtaactggttacctctttagttacccttacttatttttctcatctttttattgattttttttttcataaaatattttttatttttattttttattttttatttttgcccaaatagtataaaatcctataaaatttataatttcttctatatttaattttagcattgtaagtatttaaaatatctcaaagataacttttataactacaacaaatcatatacctccataaaaaaatacaactccaagtaaagagttaaaatgtccctaaaatttcaatctaaaaactaaaactttagataaatagaagttatatggtagttttgtggtccaattacatttaaatttttggcatgtatcaaggctatctgtgcaagaaagtggatatttttctcttctttcctctagattttctctctctctcctattttctctcctacctcaaaatgccaccctaaaattttccaacacttttgtccctcatggcaatactatgaaacaatctttcccactctttctaattactaccttgccgccttaaaaacctttcgaaaataatatgaagacagaaacaaaactacaaactcgaacattgtaaacaaaaagtaagatgaagatctctcactcacaaccggagtaaaaaatagtgcggtttagtgatgctcgaacaaagttcaaaactcaaaaattccactaaacacttcggatgttattgatcataaattaggtgttagttgggcaaaaaagagctactaaccgaagctgatgccctcaacagatggcacttttccagtttcggttacaa

SEQ ID NO: 249427 - DNA, 627 bp, Cannabis indica
tggtgtacgaaacttccctcgttgtagtgcaacgatagttggtatcatgaaggtactagtaacttaagtattttatttctttggctatgtttgtatttgtttctttagaagattttttcttttttgtttcttttgttgggagaactagttaagtgaatttattgtattatatttttaatccaatttgctattggaatagaaaaggtcttcatttgctttgatttctctactttgaaatcatatatttattcaccctacccaactcataacgattttaactgtcttttgtaagataaagcttatagtccatattaagattggactccatgttataaacgaaaatttaaaaaataaagaagaaagatagagtaatgaagagcatttgaaaataattaataattagcagaaaaatatatttatatatataaagtcaaattctagatggctggattaattaatgaaaaatacgtgtatatatatatatatatgaaatccaatcaattcaattttgtgccttttttaagctgtgtattttaacacatcagttatgtataatttcctttcccacatttgatttttatgacttaacaagtttttttttaaaaaaaaaacttaactataatcata

SEQ ID NO: 249428 - DNA, 2162 bp, Cannabis indica
aaaagtacttttattaaaaaaaactttttaaggggaaattattatacctgaaattcggctacacttcagagggtaacacgtgtcaattaagtggaatatgaaccgcttaatatattaactattatatcatttaatgcaagaaggaataactcattaaatatagaattaatagagtatattcataactcgctgactgtatagtcttaagcgagacaatgatacccaaactattaattcttgtattgacgagacaccatccagcctcggaagacgcagattcaaggacaaggttaaaaagaataagtgaagtaatctgaaacaaccacatacaatatatagcgaggcatctacctcgctatacataagagaatactgacgagacgaatcatctgttaaatacttagcgtattttccacattataataactaactgtatcaacttggaaatacgtagaacatgattgtccagtctgcgaggccttatggtcaaagagcagttcttaagttttctcagtacactggtgctcatgccattgctggaaggcatatgactaaccaagtcatcattggtcatctttaggcaaagcgagataccattgtccaaatcaacgtcaaccgccttgaagataagaatgataaacagttatgcggttatcaattgttatccacacgtgtttaaatgaaacgtgatcaaatctcacgtttcatgaaacgatcatgtaattaaaatttgaatataaataactgctagcctatgttcctataaataggggcagattctacagaaaaaggggacgaaaaaaatcttggagagaaattattattaattgtatattatatattattattaactgcaaaaccacgtaaaatccctggtgttattattatatttattatactttattaatgttcataatttctgtgttaaatttattacgaaaaggcctatttttagttaacgaaaatctgtgttaacagacactaaagttggtgatctccaaatttttcttaaagattgattaatgaacatagcttagagaaaaaacaaataaagattatccaatgattgtaaaattttcaagaacaagtttcattgtaattttgattactccaagtgtgtgtgtgtgtgaaatgctttttctcaaattattgcatgtcatttagatcaatttatgcaaatataaattaagcacaaaatctctaaaatgacaaagtctcatatgtttatttttcactctctctctccactaatgtagacaaacacaaaaccaaagatgaaaatgactttttcaagcttgtaatgtaaggcttaggtgaaggtggttaagagaagtcatttttggctcaaatcaccctaaaaacaccttaattttcctaagaccaaaatgagacctcacacttacttcctcaaagaatatcccacagaaaatttgagtattaatattgccattattatcgccccaaaaattttccaaaataacgtgctcccaagaattatagcaatgctttagcataacattttttttttctgcatccctgctccagaatgctgaagaaatgctataacacctgaaacttcaaacttctaaaaaaaaatcctgcttttttttttttttgcaaggggtggcacaccccaaacttaattttaaacactctttttttttctcaaggggtgacacacccccaaacttaattttaaacactcttttttttaataactaacaatacaaatataataagggcaatatacacataaaatagtatcataccccaaacttaaaattcaacactatccccaatggtgagaataataaaatggcacaatgaaaacactcacacaattaccactcaaccaaaattacactcttcccatctccctcatgacacaataaacaaatatcctagaataataaggtgctcaaatggtgtatggtggaaagatttatatttggctaggcttacatgtagtaaagaaataaagggatcaatatgctcaaagatggtgactagggataaaataatatcacggttggctcaaaaggctcaaacggtccgaaaatggcctaaatcatgtctttggtttagtgtcgtctaggatttcgcctcaagagagaatcaaacaatttaaagctaagtgagatcacaaaatcacatatttacac

SEQ ID NO: 249429 - DNA, 1858 bp, Cannabis indica
gaattatgcctgagtctttcaaatagacattgtaaaatttcctatcttatcctcatagttctgataagttattaatatccatgtgaatggtcaaaataatttttctttgtttaattttaaagtttctatcttgaacatagcatagtaggttatcactagtgtcagccaaataatgatgggctagactttcaaaatcctcccactaagaaaaggtactgtgattctctgtccaaggacttatactggtatcaatttactattgcaagaaacactagaacatgtacaggatcaaagaataagttctactagtttgctagtttatatattatattatgtccatgtctaatcaaaatatgcgtgtcatagagattctatggtgtatttagtatagtcaagtgtttaaagaatttgaacgacatatatcaataacatcttccaccactaagtgctataaagattctgtagagttttgaatacagtctagagttcaatagatataaaagtctttgaacttcatatattaataacttcttccacccctatcagatcaaaagatctttttattaaacaaaatcttaataattgctttagaatgaacaattattcataaacattgaatttaaattctaagtgtttatgtggtgttatctctttgcagagattattataccatagattttgtatcaataataaaatacaaagcatataaaacatgataaacatataaatataatttggtattggcatacaagttaaagaatatgaagctcaattttataatagcaatttataatgaaatctttttaaagaaaaaaatattatattaatattctcaaaaatatcataatgaattgtgtacaataatatgaaattgagaataaaatttccatactaataattgaaactaaattgttcaataactaaaataattaattcaaaaattaaagaagaaaaacgagcttcatcttcaacttggacaatctccacccttctgtccaactatctgtctcaactcactaagataacaatccaagtttaagcagccggagctgaaataagaagaacataaacatggttaatcgatctagaactaataacccaaggggataatgattctctaaaatacatgaatttacaacacagttagaaatactttgtttctttggcaaaaacataggacactgggtttctagtggcccttttcgttgcaatagaaacattttcctttgcctttggattagcatccttcttacccttattagctatgttaacagctttaagaggcttctttctattcttcttttaattctttgtgggttttgaagtagaggtaatgtttgcctcgggctttgctgtactagtcgtagcattactagaacttggagctttgtttcctcctttctgcggtcctccaatcaaattttcaaatgtctgaaggccgttgatcaactcgtgaaagtcaaaagtcaacttgttcatgacataatttgatgtaaagggcagaaaagctggagttaaactagttaagatcaaacacacttgagtttcttgatctataatagctccatgattctcagcttcctgaaagtaactagtcatttggagtaggtgattacgcacgttcggatgaggtttcatccgttcatttataaagttcttggttgcctcaaaacgagcttgatctgacgccatcccaaacaatgtacatattgaccctaccagcctgcgtgctgagcttccaagagttgtttttggactgtatctaccatgtattttaatttagtattttgacttgttgtcatatttagcctttttgtaaaatttttacaacaggaatccccagaacacaattttagtg

SEQ ID NO: 249430 - DNA, 1287 bp, Cannabis indica
tgggtatcgtagacaataattcgaataaaatatttttaggcctagcaactgcggaacttgacggaaatgtcagaaatattacgacaataaaagatgaatagaattggaattatgccggactaggttgaaatgttgagaagtacgaacgttaagcttggaaagctgaaataatcatagtgccctcaagttgtgttctagtttgtttgtaggaaggggtaagatagtaatttcataagttagaatgttatttttgtcttatttagattattagggctgaagacttaggtatattattagtttattttcttaagttattaattaaataattttagaaaataaaaataaagaaagaaataagaagatgaagccctaactatgaaacctctcaagtcttctctctctctctctcctctgttcggcctagaaaaaaccaaaggaaaatcaaattctttcatcctaattcagttcaatgctagaaaatcaaccctagttgctatccaagttcttgaggtgagtttcctactatattgtatattgatttctcaagtttaatgttagttttggattaaggttttgagattttgggttagagatgttaaactgagattagataatgttctaagatttgatttaaagtttatatgagcttgttttagctagagttagggttggctcaattgtaatggtttaagtgaagttcattaagcttgaattcatttgaatatgtgcttttgatcaaatggatgaattgtggttaattgatgcctgggatatgttgtgaatatgatattattttgatttggagcggttagataggtttggtttggtttttgttcgagttgtggaagaaaaactcatgaagttttgtctgccagaaccggtcgaccggtttgttctggtgtaacgaaaccggtcgaccggttggttctaactggtgtaacagaactggtcgactggttgtactataggggaaaatttcatgatttctttcaaaattggttttggctcggggtggtacttagtatctatttaagaatatttaagtgttgaatggcctattatagagctaaaggaagttaggttttgtctggttacaggaattagggttagttccaagaatatcaaattaaagtattcattgggtttgtttttccacttaggctggcatgcatgcttaatctctagactaaggtaagaaaagtattaagcaccgtatattgttaatgttatgattgttacagtctcgattatcctcaagatcccggtaggtgtttattgtgacttaat

SEQ ID NO: 249431 - DNA, 853 bp, Cannabis indica
aaacaatcttctaattataattttagtcaaactaaattttgaaaatgctaaccttaattttatttatttttcatgaataaatagaacttttaccacttaaaatacttgttaaattttttctttaattctcatttttttttttgcaaaatttcctctcgaactatacaaatcattacaaatatctcctaccgttatattctctcatttttttaaaaaaaaaactcttaaatatataattaatgttacatttagttgagagaaataaaaatataacaataagaatggaatacactttaatatatattaaaagaattgataaaaaaaaatatattaaatcattctcatattctattggaatagttttttcattcatttcaaaatagaaaagtcactccattgaaatctccattgaaatgattctaatatattaaaatacaactaaataaaagaatggaacgaaacttaattcatttttatctatttcattacttctaaccaaatgtatcttaaatgtatagcaattatcatctcaccagtcacagatccaggatttaaagtgaggggcgttaatttttttttttttttgttaaagtagggggcaaaagtaaactaaatagaaaaatattattagtgggatttgaacctttaacctataacataatctaaactaaccattacaccaaacatactattaaatctacatataatcttttattataaatgtatattgtaactaactaatatacatatacattttttttctgatttttttttcaagatgcaactgctctcctcgctacaatgtgagtctgccctggatctcaccaacaaacagagaaacctctaaaacatg

SEQ ID NO: 249432 - DNA, 1011 bp, Cannabis indica
ataaatcatgtgaaccatgctacttaaaagcgattttttttatctttattaattagtaaatctgattatattgaaatggatttatttagggcgcaaaacccaacacaaactcgttccaatctaagaaatcctcatgtgattaaaagagaacaaaaacaataaagtaaagtgaacaccaaattttaaagaagttcagccccataagtgtggtaatagcctactccccttgtattgtattgacataagagaaggaacaaagtgttcttcctctagaaagctcttactatttatctctgagtgtgtttcactcttagatcactcttttctcactagaatatctctctgaggcaattcttttgatctctttcatagtgaggctaggtcacttttataagagcttaatatatgacggatggtttccctttctcttacaatggacaaaataggaaattacaataattctataattacaatatgtaaaataggaaactaggacagattgccattttcctctaactcaatcccacgattatagggattgtcttcccgtttgggcacaatgcgattattctctgaagtcgccatctcttgtacgtcgctcggcacaaacatgcttctacctggtcagatatcttttccacaaccctactcgaataaccgactattatagatgctaactagtcatgtgcagggtgttaggatattttcctctgtccagatactagaaatatgggacacgtgtcatttaatcctattgccacgtcaaggtaaaaaaaaattgaataacatttgccacccaaatctgcgcgggaccttcttggtcacatgtggacttcactcagcttgaagtcttgtccgaatgggtgatgtgtctcttaggcattgaatgacgaactgacgtgaccctgaccaggggtcttttcaattttggctcatttaatgctaattgacagtcctactgttgggttttatgccctaaataaaactccatttcaatgtaatctattttat

SEQ ID NO: 249433 - DNA, 1250 bp, Cannabis indica
agcatcatagtatagtgtacataaatacagggactaaaaaagctaattattctttttttttttttgacaaattactattaaattacagggcatagatcggtcacgcttatattaaagagagtaacatgttactctcataaccattcattattatataattatattacaataagctaaaaatatttataggaaaaatgattatttttaaaagaagaaaatgtgacatggatgacaattgagactaccaataagggtattgtatttcctacttttattacccaagaggtatttatattaggggaaaaataaagttagtttatataaatatagtaagaaattagacaaaaaaaaaaaaaaaaataaatatagtaagaaaatttaataagaaaaaatatggcatttaaaataaacatttaacatatatgggatatgctactttaaattatcataaaaaatattaaaattctttctatgttttattttttaaaaattaaacaaataaaactacagtgatcgccggagttgtcactgggccggaaagtcgctggagtttactgtcggtgccgaaaagttatcggagtagctgtcggtgtcagaaaattcaccggagtagctgccggtgtcggaaaattcactggagttactgttggtgccgaaaaatttattgggattggtattgtcgtcgaaaaaattactggaaaaatcactaagaaattggcattgacgccaacaaatcattgggaaaatcacaaaaccacccatttttcaccatcaatggcaccacctagaaacgagaaattccattgcacacttgaaatcaatcaaaccccctaccgacaacacccacactatttcatgtgcctccaattaatcgatcaaacccaatatacatagtaacttctatgaaattagttatcattttcttctaaactatcaatacacaacaattcgaagaaaaaaaaacgaaacaaaaaaagtactctactttttcaatctaatatatgtgaatcatcttcctatttcttcaaaattatcaccggttctatcatcacatagcattaagcacccattctaacaatcatagctaggaaatcaaatatgttcgcaacaaagaaaagggtgctctctcatttcggtagtactacttcttcttccaaacgaaccgtagaagggagctcggtaacgttccaatgttgcatgggatttctccgatgggttggttacagctcaggtcgagagttctgagattg

SEQ ID NO: 249434 - DNA, 1347 bp, Cannabis indica
ataggattatgatatagtgacgcgccaagtgtgtcggaatgcatttatccagtcacgcctggcgcgtcattataggccaatatttttaaattaataaagatttttaaaaattttttaatctttagtgacactccattttttagtgacacacattacaagaggctaacaccaaatgtttagagtctcatgatgcatgtcattaaaactcctaactatttagtgacatgcttttttatgcgtgtcactaaatagtgtctctaaaaggtcaaattgtagtagtgccggttatggtggattcggtgacaaaggagagagatagactgacttatcctagaatcttaattgaggttaggatggaccaacagtttccaggtttcattgattttgagaatgaacatgggtttaatgttcaggtgggagtaaaatatgaatggaaacctgtgagttgtaatcattgctcgggcttaggccatacaacagaggaatgtaggaagaataccaagggaaagcaggaatgggttgtgaaggaagacaaaaggcagaaacagaatattatagatgaagatggttttatggaggtgacaaaagggtacaaagctacagataaaactactaccacagaaactttaaaggttgatgatgcatttcagattctaaagcaagaagggcagcaagatagtgaatcgggaatgctagggaaccagccaaatgagagcaatacaagagcggggaggaccctctctttctaatggataagctactatgttagaatgtcctaggagccaacaatcaacaaaaagaaggactaattaagcaatttattagtctccaaaaagttgattttgttggcctccttgagacaagagtcaaggctcctaagcttgggaacttgtactctaatgtttttgatgggatggtgtttctcttccaacattgcttggtatgctggtgggaagattgttatagcgtggaatcctttgaggttcatagtggacattattagatgcacaagtcaacttatgcatctaagaattgtaactgctgatggtatatttgacagttatttgactgtgatatatgcatcaaatagccaaaatgagagaagagatctgtggagagatgtttgtgagttggctccaaatgggaagtggtgtctgatgggggattttaatgagatcctctccaaggaagagagaattggccatcgggttaaaagttatcctaatgatgattttcttaattgtgtgaaccaatgttacttggaggatgtgaagtttagtgggaatttctttacatggtcaaataaaaaacatggggatgatcaaatttactctaagattgacagga

SEQ ID NO: 249435 - DNA, 1194 bp, Cannabis indica
ttgttctttttctaaatcacttcattaaacctataatttctaaagcaactacgagtttgtttactgttactgtgggtaggactgactaaatatttttcatcgagttttattgctctattttacatttatttttctggatttttcttgacatcattacaattattttggcttaataggcagagacaaatttgggatctgcaattgaactttcgaaacatgcagcatcaacactgagtattcttaaattaggatcagcagaggagcaatctagttatgtatctaagtggtctaaaatagtcaatgtatgtgctcaagagctgagacatggtgcctccatttggaaacaggcattgcagaagaatgtccagagtcaaatgttatctaaaacacaaggtacggtattgacaaagatgtattgatcataaaagccttatttatgctacatttaaaacagtatccgtatgatataatttctctactgtgataatatacaggcaggcaatatatcatctgtcttgctgagatttacagagtagtccaggttcttggagtttctgctgaactttacaagccatggatattgtcagatattgaagaacctgttggcttgtttcgtcttctaaatgaatgctctacactctggtcaacttcagggcttgatgaagctcttcagattatttcacaacaatatgcttcagagttcggtgcaactttgaatgcactactggagtctatgaagtgtatcaatgatattgatgcacttttactccagaaccattctctctctcaagaacaacctatctgtcgactgtcaatgttatccgcaggaatcgtgccaggtatgaaggtctttttcttttttctccattgttattggtaatctgaaaaactcagggtacatcagttctgcaaaagattatatatcttttgaatcttggccatgaactttatattttatctggtttctaacccaatgcttttactgaaattttctatatttattggcatcaggaatgaaaatggtggtttgggatggaaatcactactcgctgaagcttgccaatttgtgggcaaatctaatcagttctgatcctccagctttggctgtcagctaattggcaagccacaacagaagttggaaaaacttttggactgggtgttggtctgaattgcaactatgtcctccaatttcct

SEQ ID NO: 249436 - DNA, 884 bp, Cannabis indica
aataattttcataaataatcatgattaactgctaatttccaaattaaactaagcggtctttacacgtccctactgtgcttgatccctttgataatgccatcagaaatagccttctctcgaatccgcgagagaatgttagcagctcaaatgaagagatacggagagaaagggtcaccctgccttaagccacactccgggacaagactactaaccttaccccattaaggtgaatgttgaaggacgtagtagtaatacattggctaacccatttccgaaagaggtcgggggccttgaagttgctgagcacgtgatcaataaaactccaactcaatttatcataagcttttaccagatcaattttgatggcaaaaagtccttccttaccctttttacgtttaaaagagtggataatctcctagactaagacattattgtcgttgatactttgtcaagggacaaaagccgcctgtgtagggaaaattaagtctaggaagcaccgatcgaattctatttgcaatgatcttagaaatgaccttgtaaaccacattacaaagagaaataggcctgggagactttcttcgggttagctactttcggaatgaggatcacattagtagcattaactcctctgtgcatggagcccgagatgaaaaatacttccactgcctcacagaaatcagtaccaaccgaattccaatagttcttatagaacagcattggcataccatcaggtcccggggccgtttagactacccatgggaaagagagtatgtcttatctcttcagagtttggaatggtaaccaaatccctttgctcctggagggagaagtggtccgaaatcaggtggttaagtcattccagcgtcccataaatcgtgcttttg

SEQ ID NO: 249437 - DNA, 621 bp, Cannabis indica
aaacaactagccatatatattggctgggatagatagatagccacaatagatctaatgtggtcaaggcagacaaatatcaaatatcaatgctctttctcttagaatgcacatcaaaagacacgcatttacatacatatatgcatggtgtctttatttaggccaaatatatataagacatatatttatttatttatttatttaactattagttgagattgatgatggtgtaggacaattatgagagtggtgtgcagctactctcatgcgtgaactgtgtgtcaggctagagtgttgtacttgtgcaactacactcctacttgatttacacaaatatcattacccgatatttcattgtgttacttgcaagtatacaacaaataaaatgatgaaaagtaactatgtacagtacaagttatctcaacgtcaaacacaaaaatagatgacaactacataaaactatttcctccattcggacaagttagctatatgtccaagcaatcagatattagctgcgtaacataaaggtatgtctgtctaacatcttgtcatgagtctatttctttccacttttgatagacatatgttatgtacgtctactttctcttattatttaattatatg

SEQ ID NO: 249438 - DNA, 566 bp, Cannabis indica
aagataaagttttagctagtaagactgaggactttattgtagatgaaagtggtatgttgtggtttatgaaccgtgtatgtgttcctatggatgctaatattaggaaggagattctggatgaagattagtggaaactcaagttaaatctctaaagcatcttgacggagactagccctaattttttaggggtgaactctgagacatttctagtgttttctctttcttttcttactttgtttttcttatatgtactttgattgtgtgtgtgtgcatgtctgtgtgtgaatctcggttagatctaagcaagttcttggcatgctaggatttcttttgtgatttgtgtgtgagtgagattgtgtttgtggtttgtgtaggcttctcgattgttctaagacaagagtctttactcttgaggatacacgacacactacttgtggtcgttttgtgtttaagctttattaacataaggtaaggtcatattgattttggaactaataataaagagttttgttggtgtaggcataaggctgtccaaattcctatagtctatatagatggtttttggt

SEQ ID NO: 249439 - DNA, 652 bp, Cannabis indica
atcctgagttgaatgtgtgtaagtggtatttgtgtgtttttttttatttgggctgtatatttgtttatttagccagttgaaagtatttttgtaatattgttactctttttggctaaaactgaaaaaagcccttcataaaatatgcttaaataatcataattaaaattttgaaatattacatgtatatatatatttatataggtactattggtgattcaacaatattatgagtagcggcgaaacgaaaaataaaatttaagtggacgattatctatttttatagtgtaatactaaagacatctatggaacctaacatcttctatgaagtgtcataaacaattgttgtaatttaatatgtaatcccatttattttacttttaataatgattataaaaaattaataactatttattcggcgtcacctcatggtggtaagaatcatggtgcttaatagcaatgtttactcttaaattatgtgaacctcaatatttaataaaaatcatacaattaaatataataaaatataaaataataaacaactatatgttaagtaaatttggaaaatcaccacatatacaattttttagctttttttttatttgtaccatttttttttttttttttacgtatttgggttgctccattagttgcg

SEQ ID NO: 249440 - DNA, 534 bp, Cannabis indica
tgattttttttttttaaaaaaaaataaacttttacacattagttgaattttcacattttctaatgtttgaaaagatgaatacatgtttgacttttgatttaaagtctcaaccactctagaacttgtttgataatcatttgaggcgaaatcgataaactacacatgattttaagatatgatataggcaatttttttgatcgattgagcctttcaagcctaccctatttgtgaatttcctaaatttactcaatttcagcctaaatgttgatatcttgtttttcttttgaccctatacaataacatttgagcctaaaaaaaatctcttgtttatccttttttacaccatagtatattaatttttatgtatttgtaagggtgtgagagttttatttgaggggaaaatgttgatggttttgtataaatgatgatgagaaaaaagttactattatcttataatgaatgtttgtaagttctaagtatttcataaaaaaatcaatgaaaatttaataaaaaaatgaatacttgcaacaattt

SEQ ID NO: 249441 - DNA, 744 bp, Cannabis indica
ttcaaaaataaggtaagaatagcgtagaacatgttatatatgcgattatgtgtatgtgtgatatatttgcatgcttattgtgattcgtacgctacgaacactagtacggtagcagtactgagttcattggtatagcatacgatatgtaaagagtacagtacggggttaccaaccctagtgtgggcatgtacgaagtgtatacggtataacactaagtgatacacaaggtatgagacaaatcctaccaacattcatatagtaacgatacgtagttcatgtgatatagttgtcattcttttgtaaagaacgttcgtactcattttataagcattgtggataggtgtatgggtacataaatacaagtcatcgatatattatcgtcaaatgcttttcttattgagtctcttgactcacagttgctaatttcatgtgtaggtaagggaaaaacaaaaggctaaacaagagtgatctctgagcttggatggggattgtacatgtcaggacaacgtgacctggagtgttcggtctcatgacatcatgggcaatattttttcatggctatgcgacatgtatgttaaagtattttggaaatgttttggcaaaagtttaaactcaggatcccaattatgtaaatatatatatatatatatgtgtgtttatgaagtttaataatttaatctaaagttttatttagtatgattttcaaagtaaaccttttattagctaaaggtggtatgtaattag

SEQ ID NO: 249442 - DNA, 513 bp, Cannabis indica
tctaggattttcacctggttttagtatttcaaggagcatttgttttcgatcataagtccatggattgccatcaatcaccctttgaatgtctatctcatggtaaaactgaaataagaatctattttgatcaagaatttttatggtaatccctttgctgggcttccataaatcaaccataatattttgaaaaatctgaaaatcttagactttccctgataatagccggcctattagacaccacctatcgtggtttcttcctcccctatgcattcatcatcaaacaatacctcatgatattcttcgtcttccaaacaaatatcaacccattgctttgtgagatgttcccattactagaagatgccattgaatcgtgattagaacaatacaagaaaagaacaagttgatacaaatatcaagcactctcaaagatgagagacaaaacactctgtacggtgagagatgaggtgtgactttaaaatatatactatatttttagattttaagatagacgag

SEQ ID NO: 249443 - DNA, 795 bp, Cannabis indica
ttttagattttaagatagacgaggtgtgacaaaattaagtgaaatgtgattctttctcattaattttgtctatcttaggagacccaattgtactttttttttgtctcttcttatagaacttgaggcttaattgtactaataataataatttgacacttaagaatatgttaggcaacactaatactttttagcatgtagttgtctattatcttaaaaaactttatatatatatttttttttataagtaaatattttattgaaagagaaagccaactaaggcagcatagtaaccataaagagagccacctgagccacctctttgacaaaatatatattctttgacaaaatgtatatgctaaaaggcactacatatttttgtggtgatattgatgtaattaagtattagattctacataatttaatttaataaatgttataaaatatcgctaacctctagtgtcttataataatttattttaatcaattttttgacaaaaagatgtcctaagcactccaagagcctttctaatttctcaatttaaatttattttaagcttttaaattacatcataaataaattctcaacatcatttaaaaaaatattaagaaagtgaacaaaaattataatattattaatattgaataaaccaaaatctttaaaagaatgaaggtgagaaaccaaaaacaccattaaattatttaaataattgaaaccaaaccacaccaaacatagtaaataaaagtgttcgttagattggcaagaatgaataagttgttatgtaattaatagagaga

SEQ ID NO: 249444 - DNA, 541 bp, Cannabis indica
aaaaccgtacacgagcttgaggtctacttgcatggcgttgccggaacccaaggcagtgggggagggttcaagttggaagtggatcgtgatatcaaactggtgaataagagattggatggtttaaaagatgaatatcttgtgacgagcatgtggtgggtggacaaaaacaaaggtatgattcaattggatgatgggtcttgggttctcatggatcgagaggtgtaaccatggatattattcaagccatagctattattctagttattatggtttacaaaaatgtacaataaataaataaatgttttattctcttgtgctaataaatgcatgcatgcatgcatgcttaaaaagtttgatgctttaaatatttctatccatctatatatttatctgtattatatgtctatgtttgaggcatattctgtattttctttaattcaacttatgtattttgtgagagcacttttatgttaataaatcacacatatttgtactaatattattattaatgcttttatttatgttttttaattattattat

SEQ ID NO: 249445 - DNA, 782 bp, Cannabis indica
cgaacctaaaattattgtagactttccaaataaagtatcctttaagaacaacttcttctggacatctggtctttctcccatcagcacaaccacgtttcgaaatctccgtaagtgatcgttctcttcttgctcatttacatcagtctttgtttttttaagcttttgaccaatgttttgtttgttttgacaactcacctctacccccgagatggttagcaggcacaggcgcctggtaactcttccctacggtcttcgatctttggtcgtgcaatttccttttgagcgaggttaacctacgatcggtggccttctcgctgacagaatatacttgtgattacaagtttcccaagtattcttcttgacagcaggttactgttccgagcgtggattaggcttgggatcgcctggctcaagcacaatatcttcaaaaccctgccacttgggaatccgatgaaggagcatcccgaggtaatcaatgtggttggtctcccactgtacttagggctgaacgtagtactttagtcacctttgaagactcccgccttcattttcatatttggaattcccttcttgtggactgcattgctcataagtttgacagctggtatcctagattccacgtccaggttaactgtcatgagtcatattatggtatagctgagcaatacagtactatggaagatagggcaggtcacataaatgcgatctgggatatagaacccatcgagccttttgaaatattcaagattacaggctgtagggattttagtggatattatggt

SEQ ID NO: 249446 - DNA, 788 bp, Cannabis indica
aagttgttgatctagggttgagactagagtttaggagtatatataggatgcttatgagatatatttcgggtttaaaaaaccgcataaataagttgaagggaggaggctgtgcgcagagagagggatcgatagagtttcatgtgaaacttagatagagaaagagagattttgattttgaaacacttagagagtttctaggtttgttttgtcactttaaatagcttctgcacgatctaaggaagctaatggtcgtgaccaaacacgctaagatagtaggtttcgaaattaccattattcacgttcaagtttgttgttcttgaacgatttcggatttgacaaggttttttcgtgttgtgagttcttggaaggtcatatttgagtttaggagaccctaaggagtagattggacgtagagaaacgggttgaagtagtccagaacacaaaattacagtttggacaccatttttgccaatgtaccgtgtttggagaagacaatccaaaaacggccatttcaagatgaaatatcagtggtatttgccttctttggggttctgggatccctgggaacattttcaaattgaaaagacgcatcgaaacgggccgtagaaggagtttgatactagccatcgccggagaagacgactacgccagcgtaacgccggcgaccgtgatctgggcaattctgaggatcttgttctcaacaaggaaattcattgaggtgcttggagtagcaagaaggtgttcttaacaactgaggtaagaagagtggacatctgtgcacagggtgt

SEQ ID NO: 249447 - DNA, 819 bp, Cannabis indica
tgttcatatatctagaaccctatttgattaaagttaaaattataagattaattaatttataattttttcctatacacataataataatctcacctaataactaataatattttttctttaatttttaattgtattactttaaaataacatagaaaaaaaactagaataaaatttagtatacgtgccttgcacgtagctttttactagtagtactatatattctcagagatagttttgattcatgttgctcgttgattttatagtagttcatggtttgacaaagcatgacttttggttagacgatgagctatctaaattcaaggaagtttttgcgttatttgtgaatgtttgcatcataaattcataagtaattctaatcattacgtcaaaaaaaaatagttatatatcatatttgatataatattatcttaaattttaatttatactaaaatattatatatttaaataattataaaaattaataccacatatagttttacatataaatattacgtataatacaattcaatataatataatacaatatattacgatgtaatatgacataccaaacgaactttagtattattcaatacaatattatatttggtattcctttcctcttgatgcttcggtggttctggggaaagattttgtcgaattgggggtgtgatatgggatacggcatgtgtggtttggttagcgtggtcatttggtgtgttagatcatttttttgtgaatgtgtcgacggagctacttgcctttcgtttagacatgactattgcacttcaatataatttcagtatctctgtgattaat

SEQ ID NO: 249448 - DNA, 504 bp, Cannabis indica
tattattctcttagagaattaaggttgggaatttttggaatatattgtagcatgtatgaatcttcataataaaagataagactttcttgttaaaatttttgatttttattttgaatggttgagacatagatttcaattcaaatgcttgttgggaataatggcatttatttgagtttgtgttgaaattttttgaaatagatgggcattttactgatttgattagctgaaaattttgaactgatatttggattaattttattgaaggtcggagtagggatttatatacttatgtttctccaaaaagtatatttaaaacaaaatgggattatcttcttcttttgatgtgtattaatggcaatttacttttctgtaactgctactaagtcccatgctcaatcaaaaaacataaatattaaaaatatcaaagctttttttccattgacgaggagttttttaaaagattctacaatcagtttacatttataattctattgaaatttgagt

SEQ ID NO: 249449 - DNA, 952 bp, Cannabis indica
ttttattaagggcccaaaaatttgattttatctaaggcctagaccctattcaatatgaaaagtcgctaactaataattataaagtgtttcgtcaattaatataatgttaaacgccttaaaatagcagataataaagatatatcatcataatgtgaatatatatgtgtacctctccatcgaagtaccaaggatgccattgagtcttaacagtgaggttcatgagtttgagtgagttaatggttgaagtaacaggcactcttccatctatgtcaccactaaaaatccaaactcgaagaccattagacatgaactcacgtagaagtggtaagacagtgtgtggactgtcagcccatccttggatcacatcactgcatggctcccaatcatatggaagctttgttacgtttgcatgcatggctatttgaacatctcttctgttcaagtatgcatgcacgtagtaatcgctacatggatcaaaattcatcacctagatataaacaaatatctatatatatgagaaaattaatgattaaaaagaataatatacacagaaatttcacaatgcattaccttaaaatgggaatatatatccattgttgtttatgagaaattatgtgtaaatttttgaaaaattcaaaataatttaacatatatacacacaataacggagctatctcctaaatagttttaatgtttttaaaattatatgtaaaaaataaaataaaataatttatatatataattttactttgtccctgcttaatttaaaattaaagtaaaaatgcgaaatagcataaattctactttttgaattttttttaggagtaccctagatcaacaccatttatatttataaagtttttacatgcatgaataaaataacaaaactatattaatataaagttagagttaattttccaatatatcatgtgatcagagttaatttataaat

SEQ ID NO: 249450 - DNA, 1644 bp, Cannabis indica
caacaaaacgtaatattacaggtgccatgattttcttgaaactatatggaacagagttgaagagccctctagaactctcatccatggtattcttcaatgtgctgtgggattccatcatctcttcaatcaggtaatttcaacaagtaataaccaagtggatgtttgattcctattttctgatactcatgtacttaaaaagaaaatgttcgatttgtaaattctcctgtaggttccagggtattctacattgaggcaaaatcttctacttctttctcctcggtatgattctgaaatcgactttcattctattttagcacttagatatataactctgggaaacatgactaaataaatatcactgtgggtccttccttttcctcttattagcttagccaacctgcctaaagaagtgaaaatggaacttgaagatcctcatggcaggtaagactgtagtggtttcaatatctcgcttgacattgactagcttactcatttgaaatatttcttaaaaaatttgtaacaagattcaactgaggacaaaaattctcaggaacgtactctgggtgagatggacggagattgaggggaatagtggtaataaggaattggcaaagagcccaatggagatggagaagatcaagtcggagttgttgaaggaagtggtggaattgagcagaatcactgccggggaagctcaatcgagcccaattggtgcatcttgagacttgccaatatttcaaggtgtagcttacttgcctctcctctcagagttttacagattgaaggattggtaatatttctcactcactgtgtttttttttaatcaaaatttttaacttatgattttgatatgtttatatatctgtctttggaatgtagtaagtgcacttagaattgtatggtgttcattactgatctgcaagtgcaaatgtttatggttgaatctaattcagtactatttttcaatttgtgtgctacagactttttaatttatttttgtattttgttgaacaggctatattaaagataatcaagcattgcaaggagtttaactcattcatatcatttttgtaagtcatttcactcttttaagcatgtttaatcttatgagccaagtgctttgggccttttttctgatttgagtgttatttttttgaaactcacaataatttaatttgggttctgtataacaatgtttaaaaagtatttcaaagttaacatacataagcaatcttgtaaatttgggtgctttgggtctttttcctgatttgagtgttattatttggtatgtcaatattactcttggtaaatctgtgttaattgaatcatttttcctattcatttacagagtatactaaatgcagctgaaaatcttgtgttcatgatctcaaagaaccagtacaaagtcggtttggagggttccattccagttttagttgattttgtaagaagctactcttttgaccctcccttatggattgaattaagaatgatgacttagatattaaatcttgtatttcagctcaattggttggagcctactgaagaaattgatgacttgtttttgggtgatgccgaggtctgttgacatcaagcatatcaaaatcccttctcttttatctctttattccttgaatgtggttt

SEQ ID NO: 249451 - DNA, 539 bp, Cannabis indica
aaaaaaaaattacaatttaggttgctcccgtagtttttatgcagattactgaatagattttagttgtaatttaagttactatgttggttgccatgtgagtttctatatagatttccataaaaattttataaaattatttcattatgaaacgaggcaaaatttagtgttgggttcatagggtaaaattgctactattaatgttaaaagaaacggatgcacggatgcttgttcttgaaatacattattttcaccttaatgcaatattatattatatttttacaacgtgcaaatataaatatttttcagaaaaaaaaactaaaaaatcaacataaaaaaaaaattcaaaaatatatataattttaaatactttgtaccaattttttattttccttttccagcaaaaatatattattaattgtaacatttggcatacgaatcttattgaaaaatgtgtacgattcatttttctagcaatctggctaaaaacaaaaagaaagaaacatcgtaggagatatcaccaaaagaagaaaaggataaaa

SEQ ID NO: 249452 - DNA, 2924 bp, Cannabis indica
tataagcttcaattctctttacacagtctatgtgttcctcactcagcagaaattaggattcaagtttgctacatggattaaaaaaaatacattgctaataagaacagtcataggcacttgataccatttacaacattttaatttgaaagctaagatgacattgagtatccttacccccaatacaaatgtggataatggagagcttttgaaagtaacagggccagcaagttgatcatcagaatagagatctgaccaaaatactaaatataatgacataactgtgataaagatggcatgaacagtggacatggccctgttgcaatagtgacaaaaattataaaccatcttttaaaaaaataaaataaagaagaagatacatacaaaggccgtaaccagtaaaacggtaatcaaaaatcacctgttattccactcagtacgttggagttttgaaaggcttgaataacacttaaagtgtgtagagctgacaaactgagtgaggtcatatacctgcagaaagaaagaaatttagatggaaaatgaagacgaaaacaagggtgaaagaagaacatttattcttacaaaatgtcctcagcatacattatacattaacatgagccatctattgtgtgttttatttaacaacgaacaagcgagagaaaagcttaaagcataccattttgcatgcaaaaatgccaccaattattggaatatatggcatagcaggttcagcaagtgcatactccttcagtagttgttcagcctggtcttggtaagattggattaccatggtcgcttgctcagaaacaagaattcaatggacacaccagaaggtttttcttctttgcagactagtgccaaactccttttttcaccatttccaataatacatacatacaatgaaaggataaattagacaacagtagcaattagctgaaaattgacagaaacttctacaaacacaagatagaattttaaattttggtaacacaaaattattgaatagcttaacttgtagactagatatgtgttaaatgtattcatagtacttagttgttacccttatttatgtctggtaacacttttagattatcaatttcccctaaccaaggcaaatggaatataagagtaatcgaatcacaaaaagctagaatcagccaaagtcgatgcattagtggcatgagtaaaatcaactagagcaagggaacgtctgttgtagcatagccggtggcagaggagtcacaggggtaacatcctgctcacccacagcccttctccttaagcactgtaaattaggccccttgaggttaggccaagattcaagtttgaggaaagagcaactaggccttgtatcaatcatctataggaactaactatcattttcacaggggggctttccaattccaagcagtattatcaagaaaaggacatatgaaaggggtattagatgagtgtcttttaaataaggaacacttccagtacaagtcaggaaatcagtaaagctaaatttgatgtacataactgtccacaatttatatgcaaaccaaaagtaatcaaagagtagattcatacatcccactgaatgattcttcatcatatcacataaaagaaaataaaggttaataatgcataagaacagcatgaaaaccattcaagttattatcttgtccaacagcagtttcataaaagtataataaacacatatacaacatgcattcactaatcctcaaagcttaagttgacaccaatcccataagtcttgcaaggcaatagatatgtaaaagcttaaaaatacaagattggtatcctaaatgatgtgatattgcttttcaataaatatgattggttgaaaaaaaaaaagagatcacgtcactatctataatgttttagtgcatattttgaataccaagttcaaacacagttactcaggttgtaagtccccaggattgaaccaatgaaggataaagaaaaatgctaatcaactgataaagtttctcattccattgaaagctccacattctcattaccctcctcacaagtttttagacccttagcaaaccgacatagaagcttcacaatcacagcttattaaacaaaaagctccaaaaactaatttcatgtgtgtaactcaaatatctttatataacaaaaccccttatgcaagcacaagaaaatgattttctgcacacaatcccctcactcagcacatacaacaagtaaatgattttcctaaactttaaacatacaacaacaacaacaacaattcatgacaccaaaacggccaagaaataaaaaacagtcaaaacaggaataatgtccataataattaaaagggaacaccaagtttaaagctttgtaaatgggttatctacaaaccttaattatgattgtgtccctggtcgggtctcccagaaaaatgacaaaaatcataaccataataataaataagtaaaaactcaatcacaaagacaaaaccatctaaaaaaaaaggcatcttgatgaagcaaaacagttttagaggagaaaaaggagctggctttgagttcaatacctgaaacagagggtgacctcaaatgaaatccaagaacgagggacgagggtagatgagagaattgataagctacccttttataataataataataataataatgacaataattaattaaataaataaagtgttgttataagtaaagggttactattttggacggaacagagcacaaactatatagtatactatgaaattgaaaacttaatcaacgaaacttccagacccaaagataagcatcatttcatgtgtttatttttgtttgattattattgggtttgggtcccaacccaacccaatccctcccaactccaactaccttaattttgttttgccttttagtttttcttgtcttttacacatccatatggaatat

SEQ ID NO: 249453 - DNA, 776 bp, Cannabis indica
aaaaaaaaaaaaagaatgaagaaaaagaagaagcaaagaacatcaatcggaatatatgttactgtgtgtaatagcaatactctatcataaaaatttgtctcaacccaatgaatgaaaaaataacttttttatagtatataatagaaaatagaattataaaaaagaaacatactatctttgtatcttaaataagtttaggtgttgttttaaaaaaaagtttgagtcaatataaatataaattttgaaatttattttattttattattcatatgacaacctaagtatagattttgttaaagttactttttcaaaatgattttttagctatgattttgttgagacagaaaactggtcaactcgcttatatatatagacgagatgaaagttagaaataattaaataaaatagagagcacacataagaattcatagtagtttactctctgtgtcgcaagagtaatgaagctacgtctacttcgagtttcatttctcgcgagaattataagaaaatttggctaagtcttaaagttttaatctctagagagagaaactatgaccttatgtgtacttttttgaatgtgaaaaatgagaaagaggtttataacaaaataaaccaattttaaaatagatgtagttaggtaattattattttaagaataaaataataaataaataataattatccaaattatatatcaaaatatctcaaattaagcattattcgaatttctacaaatatatctaagttatttaaatatttaaaatacaatttataaa

SEQ ID NO: 249454 - DNA, 882 bp, Cannabis indica
cactcaaggttcgaaaattttaggaagaaaagagaagggaagtgacggcttagaattttctctgaaggaatgagatgtgcaagtgtcgttattttctgacagtttaattatgtacaatgtctagtcatatctggagtttttgtctgttatatctgcactagcgatctgttaattcgattattgttaggtgttagttagtgtcaggtggactgttttgttgggtatatatagtcggtttcattctgtaaacagtttatccattaaatcgtaatagtttgttaattcagttgttatcgtgggagttagtgtcgtatcttgctattcttgttgttgtatctacaggtctgattgtatagcttgaagatggtcatcaatggcggaaagatcagagcctggagttgctgagttctaactgaagggagttcagtgtcaacttcgtcatcagatctgaagggatttcaggttgaagaaatgtcgaagaagaactcagttgctgcacaagggattgtgcactaacaatcaggattcttgattgttgttggtaattcattactaattgctgtaaagtttgtattagattcctttagagagaattggagattgtaatacgaaactcttgagaattagtagatgagattaccctggttcggggaacccaagcactagtcggctgagatgtgttctcagtgcagatgaagcttgtaaatctttgtgtgttttactgctttattatcgattcaagtctaaaattcatatcttgaaatcaatcaacctaaagataatcaacttggtaatttggatcattaaaatcaacaagttgtactttcaattggtatcagagcttgaaattttctaaaaatttgtgttagatcctactcttgt

SEQ ID NO: 249455 - DNA, 609 bp, Cannabis indica
aaaagataaaattatcttttaatttaaaatacgtcaaatatcgaaatatctcatcttataattaaatagtatctaaatattaaacaaatttacagatttttaaatctcaccataatttaaaatataaaatcatcaatttttaaatttaaagctcaaaatatcataaaagtaataataatctattaaaaaataaatattattatttaaaatgatatttaagtttaaatatattaaaaataatattttattttaaaattagggtttgaaaattgcaaaaattcgaaattgggaaaaaaacccatgaaaatcggatttttgtgaggtggctgcccaggaggctacacctgcagcccaggagggctgcaagcagccgagacacgcgtgcggatgaaggaattccaggctcctacgccgagaaatctcggcatttgcagggtgggacgcgcgcgggtgttgtctgaacaaggggctgaccgtgtatgaagacacgggttgtttgagttagcacgcgcgtgtacccgtgttgtccaagtccctggtgcacttcgatgcacccactcaacagccatggcacccaatttttaaaaattcataactttttcaattttt

SEQ ID NO: 249456 - DNA, 756 bp, Cannabis indica
ctccgctcaagaggaggaagaaatttttggccccacccaagcctgttgaacatgcaattcgcataagagagcccatcccacctgctcggtcgtcccctcccatgtagggaaaagggaaagctgttatgtctgaaataagagcgatgtcaggtgatgatggacttttgatccttacttgggcaatcagtttgcatgccacttcgtcttgtttttgtgcttcttgacttttatgccttatgttccttatgtctgttttctctaaccgtgttgtttttggttccgtatagatatgtctcggcagatgcttgacgctctgaaaaagagaatgggcggaagctctagcgcctctcctccgacgaagaagtctaaaggcggtgagggtcctcttctaaggaaaagagggatgttggggaggtcattgatctttctgaggagctaacggctgcaaacccctctaccccagaagatgctaagtccaaggtgtctcagggaggaagctcggacaggtctgaaccactgagaggtgggtctgagctggtcagaagtgaacatgaacaggtgtcggcccctactccacctttgccggtgcatccagaggccaagaagggtaaagagatgcttgcccgctatatgaatcagatggttcctgaggttactgagcaactggctggtgctgatagtgactcttctttggagctgttgataggcagagtcttgaaagaattcaccaggataagtctttcttgacactttcct

SEQ ID NO: 249457 - DNA, 981 bp, Cannabis indica
tatggagcacttgttcctttcctgtgatgtggctttccacctatggcgagcttctccttggggtatttatcctgtttgcaatacaggcatccgagtttgggattgggtcaagttcatctgggatctaaagcgtagaggggttcaagttgaggatgttttcttatgttgatctgcatgcttctttatttccttgccctgtttctcatcccaaggaagcctcggtcccctaccccccaggattggatcaagctgaattgtgatgtgaaagtgggatttgacaatatgtgtattgcagtggttgccaggaatcatcttggtagtgtgattagagtccagacagcaagggtagatttctctgacgctctttatggagaagttgaggcctgctatttaattggctgtgacggttgccttggagattgggtgcaagtttgtaattgtggagaatgactcgagggtggtgatcaatgctatcaatggagttgagtctcattaggctcttgataactacgtctcattttgtttgaagtcttcttcctcttttgtttgtaattttttctttataagtcagacttgtaattttgccgctcacaatgtggctagatggccatttgctcattaaatgtttggaattatcccggtctctaccttaccggagaaccttttatgtaacgaccacgaggtctaactttttatttcaatgaaattacgcttattttcaaaaaaataaataaataaataaaagagtctaagatgcaagatacattgatgtggcattactccaaaaatggcaaatatagttttagaagcgacaataggagtatcctaagtaattgtaatgtgacgttccaatttagtaatttacttatagagaagcaaatattattgctcatattttagccaagaatactctagagtgaagagttagcgctagttggaataaggatctttcctctactgtaagtgttgcgctttgtgcaa

SEQ ID NO: 249458 - DNA, 547 bp, Cannabis indica
acgccttaaaccaatcggcaaaggtagtttctgttgaaaaatgcaaccccacacccgacctatgccaacatgattgcgcaaaatggaaaccaaccaaaacatgaataatggtttcttcatcaaaattacaaaacacacagcgaggatcaacaggaacatgttttgtacgtaattgggtacgagttgggagacaccccgagatagctttccaagcaaagtgaagaaccttggggggaactttaacattccagagaaccctccacagttcagactccaactgaagaccccatactcctttcaactcttggagatagcagtaggaactctctaccgagtaaaaccccattcggctctttaccccaaaacccaagaatcaacagtaacactatcacttagaggaacctacattatcaaatcaatatctcttgcgtcaaacaaatcatgtaagacctcaagatcccattgcttacaatcgatgtgcatcaactgcgaaaccttgctatgagtcaacaccggatgatcataaatgacacaaggattcacatca

SEQ ID NO: 249459 - DNA, 862 bp, Cannabis indica
acaaccataatatacaacatgagcaccaccgcgcttaactctacgtacaaactattgtcttacctgatgtcacgcaaatgtggagattccaaatccccaggtgctcctgaccaagtgtcggtaattctagtcacaatttatgggattcacaagtatagggttaatccctaaatccactttcacataatataaaattggcattcaaaatatagataaccacatagagcttggaacgagctttccaacaatataaagaacgtccaaaacagagtcccgagtcaaaagttatggccaaaacaaaattcaacttttccctgatacagtccaaccggaattccggttggaacagccctaaacaaatcgaaattccggttatctgggcagaaacaacacgaaaaatctcaatttttaagcccccataacctactcgaatcttccccaatcaccaccaaacttttcagagcatcaacatataacataataaacatattttatagctcaaacacaatagttgcaccaagaatcaaaaattgccattaaagctccaagcttgagttccatgaactcaagcttgctctacacaacaccatccactaaaaactgagttaaaaactcacaaataaaactcatcaccaacctgttttcatcactaaaagcatactaaacaatcaagatgcaaacaacattcaaactaatatgaaattcttacatacatgcatgcttgaacaaaaatcacaatttaacatattttctttaataaaattcagcagcaactcaattaaaaggcagagaaaactacctcaaatccaagccttcaaagtgcaacaagaattacttcaaaaccaccaccaaatcctaggga

SEQ ID NO: 249460 - DNA, 1327 bp, Cannabis indica
tatattgaatattttaaactaatcattttcttaaatattataaatgagaatgagataagagagttttaattagtttagaattaagtttgtaaaatattggtagtgtgagatataatttattatatatgtatatgtaaattttttaaaaaaaagggaaaaaaaatagctcttttatttatttatttttaatttacttattgaatttaatttttatttatttttatttatgtgtttttatattttttactaactagtaactaattattattattttcattcatattcatatatttttattattaactagttactaatttactaactagttactcattagtaactagttacatatagatgatatacctagtaagtagataaaaaattaaaattttaattttcttgtattttattatagtgtaggttgtgagctaattttcaaagttccgaataacttaatgttgattggtttttaactacctacaggtatatacattcattaacttttgttattaattaattaccaatatttagtggagtttgaatatcataaatattcatccgtagtgaagtaggttctgtgatatattgaattgcggtcggatgggtagatgaatttgaatatcttaaatattcaaccgtagtgaagtaggttctgcgaatacatgtactgcagttgaataggtgaatagtttttgtattgttaatgttattttgtttaatttattttgtattgttttaattatttgttttgattcttatttctggcatgtttaaaatttttaagaacgtcttattacagccgttatgctaccgaaattttagtataattaaaataaattttactaaaaatacatacatattaaatgaaaaagtgttacgcataacacaaataattagttactagttgtaagaaactagttagttaattacaacttatataacttgcaactacttacaattagttactagttatcatcagtcaatatttaaaatgagtaatataataataacatgatataatttaaaataagaattaaaataatatataaatattaaatagttgtgagaaactagttaattacattatgtaacaagtaactaattataattaattattaaatatttgaaaatttttgttaggatttttgttatatggataaatcatggatgcgtaagaaaagaaatacactgtaattttaagtaggataaactagttaaatattcttaaacaaattaacttaaaaataatctacaaattatagataatttttttaataaattatctttcattgtttgagctttaaaaaatgaaaagaagaaaaaagaa

SEQ ID NO: 249461 - DNA, 1037 bp, Cannabis indica
tctataaaatagtcagtaataatttgtaatatcttatcttgaaccaggtgaatttttttattgggctatgtgccctattaaatccgagatagatattatttttagagttagaaagctttttcggaatgggggttttcgattggaatgttagaaatttagattgagagatttagctttgattagcctgattctccctttaatccaaaattagggtttttaaactaggttatactctataagggtttttatcttgttaataatgatgaatttgctgtggttgttgttgatgagtgaagtttcttctagcttcccatactcttttggcattatagtttactggttcttaggactagtatattcctgtatttttgttgtttcttgatatgtcatagtgatatggttttcaaccttgctgcattccagttctttggcatcatgtcttatgcttatcagtacaaaactcttaagaatatttctgtcattcttttccatagaccccgaaccttgttttaagttttaaatgcaaagaagagaaaagtgtatcaactaattgagtgaatagagaaattagaaagtgatagaataatgataatcttaagagtagacattatatatcaacacaaacaactacagtaatgaattctcacaggaatgctttctattaatcaccaaagaattactgaaaatagctcttggagaggctttctctcctattctaacctttcaagaaggctagatctctcccaagagatttctcaattttaaactctttcaacataactaaaactgagttctgattctgtatgtatacatgatagagaataaagctttcttcatagcaacttaattaaaagctactagccaatacaaaaagaacaattcagcttacaacaattagaacaaagattaaaagtgaataaactgctgtcataaagctttcttcaatagataggcaaaacactactactacataacccattatgcgcctctctctctctctctattaactcataaacattattatggccatcaaagtc

SEQ ID NO: 249462 - DNA, 925 bp, Cannabis indica
attagcaatgtgggactctctaacaaaattgacatctcaaactataattttttttttgaaaataagaggtttataggtagaaataaacgggttatttcaaataatgttttcatagaacataggtcaactagcccatataaatatttgagaaacgtctacttaactacattatgagtgaacttcaaaaaaatacaagttagaagtatgaaatgttaaaaagaaaaaattttctctctctagaatgttcaagagtctggcttgtgttcccctttctggtacccgaaatgggtttatggtccacccaccggagttgtgtggtggtttctggtgccccgatcccttaatctactaccatcatgactatgttcagtgcattaaatgtgtatttaatgtctttgattccctaaatccattttttcttgtgttttcttctccacctactgcattaattgctcaaatcatcatttagatcctttgcagcccccatttctttcttctttgctcttgcaaatcttgttgatccctagctatcaaatcactctgcttctcaaagagcctttttatctcatatttatggcggcgaggaagaaagacgacctttgtgaagttcaaagatcccatcccataatgagatctactcctagtgaagtggaggctgtgacctgcaattgtaggggtgattatttgtggactccctggttttttctatttaaagtgcattctaagcttctcatccaggtatcttcttctttattccttgtttttctttacttttttctgcaactttaccttgctatggctaatattcccaatccgtctcctattcctttgtccctcactcaagatgagagtgatgttttcactcttcctgacatttctgataattctcaccctaccattaatctcctcctgcgtttgtttacta

SEQ ID NO: 249463 - DNA, 564 bp, Cannabis indica
caattggagggaaggaggttcttttgaaggtggtgattcaatctatacccacatatgctatgagctgcttcagattaccacaaaagttttgtcaccaaattgaatcgatgatggctaatttttggtggggatcaaataaaaatggtaacaaaatacattgggaaagttggaatttgttgtgcaaataaaagtttaaaggtggtatggggtttcattctttcatacattttaatcatgcattattggctaaacaagcatggcgcatctttgaaatgccaaactctcttctcatcagtttaattcaatacagatacttttccaatacatcttttttggactcaatcattggccattccccttctcttacttggcaaggaatctattggggttgtgaattgttgctcaaaggccttcgatataaagttgggaatggaatgcatattaatgctgggacatcaccatggatacctggccatgttcaacacaaaccagtctcttattcaggatcctcaaacctgccagtttcatactacataacagagacaagagaatggaactcgacat

SEQ ID NO: 249464 - DNA, 783 bp, Cannabis indica
ttaataattttataataaaattacatccacacaacacttgtggacgagtgctatataaactagctaagaagttgaaagttataagcatagaaatatttgtgtgagtttttcttttgatcaatatatagtaattaataataatcatatcatcattatgggttctattaatgaaaatactattactactactcaagagttatcccaaggttatgtcaatttgtacaagcatatgttaagctatgcaagttctatggctctaaaatcagctgtggagttaggcataccggacataatattcaacaaaggcaaagaccaaaccatttctcttcatgagttggtctctgcccttcaaatccctcgatcgaggactaactttcttcgtcgtgtgatgcgtgtactggtacactctggcatcttcacgaacgagaaaggatacaacgacgacaaagaagaagaagaagtatatggcctcacgccttcttccaaattacttctgactggtggtaaaaataatggcgtcccaagcgtggggccctatgttcttgcagttcttgagccagttactgtaactgcattcgggtcaattggaaattggctaaagaaagaaagtccaaccacgccatttcatttagccaacgatgaggggttgagcttgtacgaatactgggggaagaatactgatggattcggtgatcgtttgaatgaaggaatggaaagtgattccggggttttgaaatttgttctcaaggattttaagtccgttttcgagggaataactacatt

SEQ ID NO: 249465 - DNA, 1272 bp, Cannabis indica
ttctttattttacaaaaaataaagttagaaaatcacatttattctcctctcttttctctctcgtgagccctagaaacgaacaagagccttgggttttcttcagaaatttttggtttagatagcatctttgttgaggtttcaagctttggtaagtgttgaccaaggttttcggcaactgatttaataatatataagaaagctgtaggaagtttaacgcatgagatttttacgtggttggggcattaatcagccttaatccacgagtcttctgtatttatgagagtatttattacagagaatgttctttgtagtttttctctctttggttcttatgaaacccagaattctcgacccccgtcttaatgtgtttggggggtatttatagtgtttttatggggtgatccctagaaccgaactacatgtctttctgtatattttcagtaggggcacacattcccagcagatataaaatgggaaatacatggcctataccctaggtatcttaggggttaggtggatataatcctttatcccttcttgactgatgtgatccctcataaagtagccgtcactaggcttattaatcatagcgtaatagctgcagaagaggggttacgccgtcagacttaatacttatggcagtttcaatacgccttctcccatgcggcattaaatgcgaggtgactgttcaaatggggtctggtgcctcccggaggtgctttgctatagctctgtcctccgggagtacgtggacccctcatatcttctccgggaggtattttcatgctgatatttttgatctaaaaagacttagtcaaattctctcagaaccatattcctcaaatccacgtgtcgcagtcgtattggtcaacgtattttggattaaatcaagggcaacatttaccccccaagccttgtttggtggaaagtaaacgaggcttgcttaggtgcctccggctctcttattgactacctggcacgtgctttgggcgcgtgggatgcatttatgacaatcatcattgcagtttttactttttctaggcaacgattcgtttcccatccattaatgatccgatgcatttaatgggtgtcagtcgaatactcaatcgtttccaaccgccttgatgaacgcttatcccaaccgttagatgtagaatgcgaattgatttctattctcaccgtacgatgatgcttgatcacagctgctccacacccgttctggcctattaaagccaaccttcttatttcatttggttactttcgctagtttgc

SEQ ID NO: 249466 - DNA, 782 bp, Cannabis indica
ttatgaaaataattgttaatttctctttcgattgcattttttttgtaaagatttttttttttcatataaaactgatccagttaatctatactgtaattcaagttttagtgaaagtaattacataaacactactacatataacaatataatttaggattgtgtatcaataaatttggaattgtgtatggtccagctgttagttaagagttgttattctgtttattgtacagctcactgtaacaactttcagttagttagttagttattctaatgctttctgtacatagactcaagctgtatttatactcctgagcatttgctctgtatataataacagaacattttcaatctttctctcttgttaacatggtatcagagtagcaatttttttttctctcttcgttcatggcgaattctacttcttcttcgttcactccggtggtgttttctcacaaagtttctgtcaaactcgatgataacaacttcttactatggcgtcctcaagttctttctgcaattcgaggtcatcgcctctttgattacatctcagatcctgttcaaccgccctccaagttccttacagaagcagatgaaagatctggtcgcgtcaatcctcgttttgttgagtgggaagtgcaagatcagctgctatactcttggcttctatcttctatgtctgatggaattctgaccaggatcgtaggtgctgaaacatctgctcaagtttggcaaactcttcaaacatactttgtcactcaaacctctgccaagatcgatctctt

SEQ ID NO: 249467 - DNA, 818 bp, Cannabis indica
tcctcaacggaaaggaaacgagctgaatttcgggacgcagcccaagcagcaatgccacgggcaaaagtgatattttatatacaactttataaatatagtgtaacggttgaccttccaatacaacttgtttttaaaatgtagagaaatattagttcaatttttttattgaataatttatgtggcaaaaatataatttaaactaaactactaattaaaacaaacgactcgaacatttcattgagcaaggttttatttttattcaattaaataagttacgtactaataatattttataaaataaatatttaaacaaatttcaagttcactatttgctttctttgattttcgggttttattccttgacattcttgttcaagttggaccttagtatttgaaaataatacaatgagagacgtgttcatttatatcatatgtagttgcgcacagggaggacccttataatatttttttctagagatttttacaaaaatattatattttgaatataaatttataattttactgttatacggaatttttttacaaaaatactatttttttataaaacaaccgtaaaaaaagtaaaacagaataattaaaacagcagcagaacaactaacaaacaaccgtgaaaacttaacacataacacaatgtaaaatgtatacaatatttttttaaaaacaaagtataatatttttgaaaaaaattccccatcataaaagtaaaataaataaaattttcaatatgtggggtaaacattctttgtttttaacataatcagaatattccgtgtaacaaattgtgtgacaaaatcttg

SEQ ID NO: 249468 - DNA, 1137 bp, Cannabis indica
ttaactaatataactctatgtaatctattctatagtaagttaggttaaaaattattttacaaagagataattacgtaaagtatttattttcaataaaaaatgttatttttacatttaaagattttttttatatgtatttttacggttttttatagaaaaaatacaaaaacaataagaaaattacataaaattattagaaaaatagcatcaaaacaacaataaaaaataacatacaaataataacaaattaataagagtacaacataaaagaccgtattttctgtaaataaactcataaaaatcgtaaaagtatttaaaattatgtacaattgtatttttataatttttttatttattatttttgtgtattcgtgaaataaatccgtttttccttaaaagatcatttcaaaaatagcatagccctacagtaactttgaaaattactattttatcgaggacccaattcagtattaacattttatttaccattggcacattattaccactcagttttttacagtgggtaaaatatgcctcaacactattttaccatcttgtcataaccgttgttggattatacatcacacattttaagtttacagatatacaaagacacttttaacagattgatctatactctctctatactctattcaaaaaaacagtcataatatcattattatgttgttatcattattaacaactaagatcaatagtgatgcagtttttaactctgagttgggtaaattcgggggctgaagcgatattctgtgatgatactgatttcgtcttagcttttggtatttagatttggaattgttgtttctctcttgacattgttgatgttttgagtatctattctgggattatgcttgcctgttaaggtcagctctgagattgagtgaactttagaaaaataaaaattattaggtcttttatttataaaatgtgtaataactttaaaaactaaagggaaaatatttttttggactcctaggttcagtgggccctagattcgagcctagttcgccttaactaccttattaatgttattttttgaagaaattacactctatacccttttttatattgtcctcttttatttttacattcttttttaaaatctatcatttttac

SEQ ID NO: 249469 - DNA, 657 bp, Cannabis indica
tccattggagcacttgggacaagttatgtaggccaaagaaggaagggggtttgggcttccatagcttgactgaatttaaccaagcgttattggccaaataaggttggcaccttatccacaacccacactcattgctggcccgagtgttgaagagtagttattatcctaactcttcgttcatgaatgccagctgccccacgggtgcttcttgtgtgtggaagggtattttgtggggtcataaaattattaaggaaggggcccgatggaaagtcaaaaatgggagggacattcgggtttggagagataaatgtctaccccgggccactagagccatgctccaccaaaattctgggttgggacctaatataaccatccatagcctcctgaccgttgatggggattggaacatggatttgctccaaaaatacttccacaaggatgatatcccttggattatgggcactcccacagaccctaatatggaagacactttggcctagccattcacagcgatggagtcaatatgtggtaaagagcggatatagagtggcccgagaaatcaatcttaatcccacgaggtgctccgagatggaaagtattcataactggtggaaaatgatttggcatatgcagatgcctcctcgggttaagcttttt

SEQ ID NO: 249470 - DNA, 577 bp, Cannabis indica
gaaatttgtggatagggtgatgatttgcgtgcgaaacacttcttacaccttactaatgaatggtcggatgcaaggtagcttcaatggggctaaaggtcttcgacagggagatccgatttcccctctcttgtttgtgttgatcatggaatacttgactcggttacttcaagttgcaactcaaaacacaaaattcaggtaccatcccatgtgcaaaaatctaaagcttgttaatttgtgctttgctgatgacttaattattctgagcaaagggactagacattctcttcatgtggttaaaacagttttagatgagttcagtaacacaacaggccttgccataaattcccagaagtcccacatctattttggtggagtgaaagatagagaaaaagatgatattacagctgatttgactcttattgaagggacgttcccccttaaatatttgggggtccctctgcgcccaacgaagtggaaaattgaagactgtggtatcgttatctctaaaatcaagcaaagcttacacacctgggctagtagacatctgtctcatgcaggtagagcccaacttattcat

SEQ ID NO: 249471 - DNA, 805 bp, Cannabis indica
aaaaagagaaaatgtaagagaaataatactataatatatcactccacacgaaaattcctatgaagcttcttctttttcaagaggaacgagaggaagaaagagttccagtccattgtatatgtattcgcactcatatttaccggccaaagagcctaataaaatggattcgtggactaagaatagctaacgcctgaaccacgtaaaaatctgacattttctatttattctattatttctttcttaagttctaaatacttgattttcaaaaatctcggcaaggaaggacacttttagccctgttgttaaaccagttacagtgagaattattctcaacatggcagttttaaaaaactggccagttacacaacttgatgtgagcaatgcatttcttaatgaaactttacaagaaactgtatacatgaagcaacctgaaggttttattgatccccacagactagatcatgtctgtctgcttcagaaagctttatatggattaaagtagggacccgcaacttggaatgaaaagctcaaagctacattatttcagtggggtttctaagcttccgagtttgacacttttttgttcattcatggtaaaggggactcattggtttatctcttggtgtatgttgatgaaatacttttaacaggacctagttctacacttattgctcagtttacacataacctgaacacaatattctccttggaaaacttaggtcctatccattattgtaacgccctgtccaatagggacgccacgtttgtgcaatttaataaaatactgatatttatataatatgta

SEQ ID NO: 249472 - DNA, 716 bp, Cannabis indica
tttttttttttttgagattatttcaaaacaaatacaaatcaataaacaacaaaaattttaaaaatatggctgtaggaaattttaaacatttttacgatttttaagattttatttaccggtcttttgttatatatttatgttgtatatttattattttgttgttgattttttattatttatatattttgttattttggtattgtttgaatgttatttttctattatttttatgtaattttcatattattttgatagtgtgttgttttaaagaacatcgtaaaaaagtaaaaaaaaaaaaaaaattcaaccggaaaagtataaattttttacaaaaaaaatgtactttatggtaattttttcttttttcaagatgacttatctaaaatattattgaagtgattatatttttttaaaagaaatctattttattctttaaaactatcttctccttacctccttacctcttcttaatttgttctgaaggactctcaaggttactaaaccaagaggaacaaagggataacctgctaggattaaagctcacaaggcatgctccgtcagtctctcatttactatttgctgatgacagtctcttattttgtcaagctaatagtagctcggccttggcaatcaaaaatgtccttgatatctatcatcgagcatcaggccagttccttaacactcacaaatcgataatgtcattctctccgaacact

SEQ ID NO: 249473 - DNA, 538 bp, Cannabis indica
aatcacgtaatacgcctatgctagttagggtgttacactcaagtttcgtgtttatagattatttatttttattttcttatatattgtaagtttttccactagtttaatatgttgtggcaagtactaagggatgtatatttaatttattcgtgcatcatattaaggatgctaagggatggaaataaatctttttccatgtttgagagaatagctattatttttggaaaagatagagcaacagaaaaaggagcataagcaccagctgacatggttgaaaatataaatgtagaaggtgaagaagagactgaaattctaggtcagtgaatcaaaacctttcttcacctagaggttgaagaaagagattcacatcaaatgatgatggtatgaaggagattgcttctgcgttcaaaataatatttgaacattcaatcgagcaaatgagattgatggtgtaaaaaactactaattataaggagttgggtagggatttaaaattgatgggactttcggttgataatcaacttaatgtgttgatgta

SEQ ID NO: 249474 - DNA, 1338 bp, Cannabis indica
attaccaaacaagactgcttttaaggaagatttcttctcgttaagtggcatttccccaatcaagacagccgcatttcgcataatacataagtaaagttttatctcaaacttggttttgaattactctatgtttataatggtagcctcgctgacttatcttatttattctgttgacagcggtctcaaaaagactaactccaactcctgagatggtcgagcggcttaaagttttgatgggccttctgtttggattgcgatcgaccgagtttcttctgaacaaagccaatttgagatctgttggccttctcgcttcaaactagtatacttgtgattacaagtttcccaagtatacatcgtgggataaggttccagttccaactgacaaggagagtcaagattatgttgctcgggcgcactatctccagaatgtaaccccttgggaagctgaagaagatgcatcccgaggtaataaatgtggatggtcccccactattcttagggcaagacgtatatcgttagtaactttcaacaatagtcggtataacttttacatttggaaccccttccttatagattggattacccataggttgatagttggtacccgccattccctgttcagcttagttgcactagttcatactatgggatttccgagcagcatgggactaacttggatagagtgaaccatctagattcatagtgggatttagatccaattaactcctatgacatattcatgatcacaagatctagggtgtttagtgaatactatagtcctccctcttcataatatgatgattatggtaacttcccttaagtggaagtttatttctcattttcctttttatgtatatatgactaagtattaatgtgtctctctgtctcacagatatggatgtagaaaatctcctccattctttgagcgaaaaagggaaaaaaggattgttgcctcggaaacttcttcagatgtgaatgtggaacccctcaagagatctaagaaaaccactgaaaataagaagcatgcctcgcagactatagacctcgagacttttgaagatcaagtctaggttcacactcctgccattacacatgtcgaggagccagttccaaaacctcactaggccaccacttcttcaagccaggcgcctaaaactttgcccatcgaggttgtgggcactagttcagagtattgtgcacagtttgcttcatcctgctagtgccatttatgatctttccagtctagcgactgggatttggtcaacaatggcagcccaacagagatgcttgagaggagtcttaccttcagtctttcggttagttttccttctttttttt

SEQ ID NO: 249475 - DNA, 1135 bp, Cannabis indica
cgacatcgatattatcgatcatttcgatcaaagattagggctcaagctagagaaaaagtagatataaaggttgggcaaaaagaatactattgacaatactaatactaacacttttattcacattaaaaatatagtaaaacagtcgattaagcccattactcaacaacccagaagaaatgatgaagtgagaaatggtaaaaattagtctcttttacatgttaactccctctttctctctttttttctattttttctttttcttcccattttttttctctcttcgaattaaaaaataaatatgatattaattaaagaaatatttacaaaaaatgactaaaaacttatgctttttacttttttatgatgacacatttttatttttttgttcttattttacatttatatatggttgttagtttattaagagacaactactgacgcgcatggactacacttgcatctagtgtcaggagaacgcgccaggtggcgcgttgtgaaggtttttttgtttagtttaagtcattctcattgtcagattataattaaaaaaaattaaaaaaaacgtatatcaatgttgaaagtaacatgggtgttaactaaaggctatttcttttaacaatattatattaaatttagatttgactaatttaatattatattttgaatgttgaccaaccaatagtattattctttttaatattttaccatttttttaaatgatttttttataattagctttatgtttcttttattttttttttaggattattgatgtgttgattttaatttattattattttttgtatgttgatgtttgaatttgcatattaaagaggagttgttatcctgttgtttgtttgttgttatagagtcatctattaaaactgtttgtgtgctgttcaattttattatttatttatgtattcaaaagataacattttaaattcatttgatttgtggcaatatatttaagaaatttatttttgttgttttatatttttattttgagttttacgctatattttgataggagttgttatccttttgtttgtttgttgttatttagttgttcaagcatgtattaatgttgtttgtgtgttgtgtttatgttgttagttaacaaaattgaaaaaaa

SEQ ID NO: 249476 - DNA, 1103 bp, Cannabis indica
ttactgagtttaaaatgcccatggaatagatatttttcactaccaagaaaaaagaaaagtgcataaaatggatgatctttgtttaattaagtgattctccacctaacttattacactcattataggtattttttttcataggagcattgtttttagaatttatattatgcactaataaaattcactagaatcacaagttgactctttacaatggttagtaatattttataaaaattattaatttaaaatatttaggactcaatatcttattataccaataatagtctaacaccttatttcaaaaaaaaaaaaaaccaatggttatattatttaatattagatatttaattaaatatgtagagactcaatatataatggcactaataatagtattgacacatcgtagtagtatttatgggtgacaattcagattgtcgtatcatattcatgttcctattatgcaaatcgacatgtttacttggttaattctaagtttctaactcaatccgtatatatgtaatgtcgagaaatctcaaccccaacccaatcaatatgtcgtgttcgcatgtcgatctatcatcttcaaatatctacttattttatactacatgttgatcaaaatcacatatttaatttataataatttatttgactaatttgaataatatactaaataaaaatataaaattaattaattatataaatattaataaattatcaataaatgaacaaaattaagtgtaaataaactatctactacaaaaaagggttttgctttggttttaaagtgatacctaaacaatttgtatcaattggagtaaccaatgcaataacgtagacacaaattgtcatatattttgtttcattttaaaattgaagcatgtttcttgtttcgattcataactgaagcaaatagtgatgtaacgacacaacatatttttcgctttgattatgaaccgaagcaaaaaaaattaaaaaaaaactctaaaccaatatggtaccaccaccacatccatactactacaacccataacaacaataataactaccgtcaccatcccattagccaaccatcaccacctgcaaaaaaaaaacttatagag

SEQ ID NO: 249477 - DNA, 952 bp, Cannabis indica
ctagattcattctcattatcaccaaacccttttcctctgcaatttcttttcattaaggtagggtttcccaaaaagccaagtaaacttaaaaaatacttggagtagaatgaaagtgaaaagcaagaagaaagaggcattacccatgtataacttgaaagaagcaggcacagacctcttctctttagcccaaaagataccagatttctttgagtggtacaaacctgaatcaataataataggtcttgccctttggttcctgtaatttaaacacacaacagaaataattatcaatccatctagagtcattaccatatctctctctttctctaataaaatatcataatgcttactctttccaaccaatattactactgtgttccaaaaagttcaagtcccttggcaagtatgagaaaacatgcaacagatctaaaaaaaaaaacaaaacaaaaacagaaaatttttaagaacaaaagaaagaactttcttccaaagattcattagaaaaaaaaaaaagaagtttgagattaccatcttgtgagtagagaggatagtcagaagcactgagattgatgaaccaatcccaatggtgggcagttctctggagcaaaatagcaacggcgtggagtgtagaagcaatcatggtgggacctttaggggttaccaaattgggattattcaccaccatgacattgctcacacccaccaatttgacatagttgatgagctcagctctctcgtcgtctgaagactccaaatcgagatgtacgacatagtaatttctggggtgaaacacggcttgaagaatcctcttgactcttgaaccatctcctttggttccagatatcaagtaagcgaatctgggcagcttgggaaagacctcaggaccaatataggagcggcggtcgtggttcgggtggtggtcggagtatgagtaggagggttgttcgggttg

SEQ ID NO: 249478 - DNA, 564 bp, Cannabis indica
aagttcatatttagggtgttcatcaatatagttgtgagtagatctaagatcctggtaaaataatttccaacagatcaccagccttggatgagcgccaccattgccggagaagaagacacggcttaggcaggaaagtggaagcgattaaggttagaagtgggaaagcatactctcccgctctgataccataacacgaaatagagagaaaaaggaaaacctttatttactgaatgaagagaaaatacaatctgcttgattataattgaagaagaacaccaatatatatacaggaagtaaccgacatttagacaaaaaccatatcagctaaaagatagctaatgtaacagaatagactaactgaaataacggtaaaaactataactaacaaactgtcagtaacaaactgtcagtagactaatcctgttataattctaatagtatacatataaaggagagacatgaggcggtaacgtggtactctaaaatctctctattcaatcttatttgttctctccttaattatctcattttttaatttttattaattttataaatctattatca

SEQ ID NO: 249479 - DNA, 1053 bp, Cannabis indica
acttcctgggaacaactgtccaaggatttccaaaaatagttccaagccacaagggataggcgacccgaggcgtcctcactaaccaacataaagcaacagcccgatgagacacttaaggcatacttaagttgttttagcacggctgttgcaagggttagaaatttggatgatagtacacagcttactaaaccttcaagcagggatcgatactgatatatccaccgctgggggcgaactgtgggacgacttacagggtcgtccagtgaagaacatcactgagttcaatgagagggctcaagtgttcgtccaaaaagaggaagctcggaaagagatgaacttgatgaaaataggctcgggaggcaaacacaataatgtttcaacaagcattgcctcactagtgttgataactcacgggcctttggctcaataagaaaatatgattctaaggagtcatccaaagacaaaaagaagcacgataagtacgtgccaatttatactatttatgccgagcttaatgaaactcgagaaaatatctacctggcgcatgagcacaagtttgccttcagcaagctcgagcccatgaggcatgcgaggcacaaaagagatcctaccaggtattgcaaataccataaggacattgggcatacaacagacgagtgttgtcagttgaaggatgagatagaaagcctcattgcttggggccacttcaagcagtatgtgaagagacagggcaatggacataatcagcccagtctgcccaaaaatccaaacaactaggggttacaacctcctcctgtagaagcggaggacatcctggttatttcgggagggccgcacattgcaggagagagcaatagcgcccaaaagagatacgtgaaagaaacaaaaaatgagcaatcgtacctaatgttgggtattgtgccctaaataaaatccattacaatctgattagttatcaatgtaagaaatttgaagtgatttttgtttggatgaattttacatgcttatggtttaatatgtttatacacaaaatctgttaagtccagatcatat

SEQ ID NO: 249480 - DNA, 967 bp, Cannabis indica
caagtagaattcataaatagaggtagatcactaatctaaactttaaagtgtaagataataaacaaaaatagtatgattagttttccaacaatgtatgattagtttcccaactaaaaatagtaatgaaaaatgtaaaggctttcgacaatatgataaaacaaaagcaattctttgtacaagtaggaactttatagatgtgacagattgttgggttctaaacagggtatcagtataagcttaataagcaatttcaaactaacttatactttatttagtgattgtcaaataaaccctattaagtgtaagaaaattaaataccatattgagcatacacaaagtatactgtccctcagcattcatacctcctttgaagagcctgcgcctttgaaatcggtacaacagtcaaagattccagtccttgctttggatcatacgatcgtgctttcaccaaacctggatctataacatacttaattccaggaatagttacggacgtcttagcaatattcgtagcaagtatcacctaagacaaatgaataggtataatgtcatctatcatcaaccctaacaattactcggaaaaataaggtatagatttattattttagaaatatagtaagccatatgtgattgggttgcacaaaagtgaatttcagcaaacatcagtagatttaagatgccaacataaaattttgcaaaaatcaaattgacatgaagattttccagtcactcttctatgtataaatttaaggatatcagagtttcagagtgaatacaaccacagtgaggttcatctttgtattaagtaccttgcgatattcggctggagttgttgcgaaaactcgcatctgctgttctgatggaagaattcgagaatattgtcattgcaagtgcatcaaacgacgatccaatcgctgcgagttggtaacaccactgaactcagtgtcaatgatagagctttgaatct

SEQ ID NO: 249481 - DNA, 1117 bp, Cannabis indica
tcttttgaacttgaaaaaggtctttcaatagcatgaactatgcttggaaatctaaatccgattcttgacttatgtctctaaaggaaggaaaggagatctcaaagggtttgcaaggaagttaagttgaatatttgagaatgtgaaagttgaggtgataatgaacccaatctcatgtgtatatatatacacattttgaagacccttgatatgatgggatatatgtagatgtggtctattgaaaggaatagtccttttcaaatcacatgctattgccatcttattcatcaatgcttatgctttatgttctcatagttgtgtggtcaaaagctttcatatccagcttgttgaaaagaaaacagaacaacaccaggcccaacagtccttttttgattctgccaaattaactaatattattgtttatttttaaaaaaagagtacagattgttacttgcaggatgtactagcttcacttgaatcacagaacatgaggagcttacatttttgttcactatttctacttctgtatttaatgcttagatctttcatctatctgtgaacacaaattgtgtaataaaatgtccaagacatgtcttctattgcaaggggccacatatattattggccttgtcaaagaagatttctaatattgtatcataatcttagactttatcttccttcaattccaggctataaagaaatcacattactgctttctttagttttgatatgaaaattgtgtccttgtggatatgggacatgcctaagacatgtaatctaatggaaattttgtgatctcacgagttggtttggtggggctgggaaagaagagctagaaaattgcagaggaagacaataccatgtggttgcacaagaactatatgtcaatgcaatccatatatctgtcctacatatcatatcaagggtattattgattataaatacacacaacaagagtcatgactgggatcaaaataccatcccaagttctcaaatattaaatatatctctgcttgcaagttttttcttagatatctcagctcacttttgcatctttctttcttagtttaaacacagcaatgggattccgcttcgcaagcttagttcatgccaagcaact

SEQ ID NO: 249482 - DNA, 657 bp, Cannabis indica
cctcctttgaagtctctaattgtcttactttccctcctttctaacaaacatagcctatggaatttttttgactaaactgtacaccttagaaaatatttgagtaaactgtactctaaaattaaagatgcgttagaaactaacacacgtggacaaagtttctttgacatcgacttggacaaaagaatttcaaaatttgtagaattaaataaatttctgaacaaatatcagtcattcattcatgtattattatggtcctgtttgtttaaaattttacttttacttataactaaaagtagaagataagtataagttttaatttatttttatcatttggataattattatatgaagatattttttaataaaaagtgttttataaaatattttgatatcattaaaaaaaatcttttgtggataaattagaaattatataaattattttaattttaaaaataaattcttaaaagctctttagaagaaactacaaattctaacttctttcaaaagacttcaattaaaaaaagagttttcattgtttatcaaaataactcaaaaagaactttttttaattctaaaaaccaagcttaaatttggtggcgtttggtaacacttttttaatcatttttttgtttttaaaattgaaaaagtgaaaatatt

SEQ ID NO: 249483 - DNA, 817 bp, Cannabis indica
attctaaccagtcgatcatggagatttgagagtagataactctcagtttgttactctgattgaagaaccaggaattggtgtttgtaaacaacttgttgatagtggaaatactccttggggagagctggaataggactcacattgagatccgaaccaggataaaatccttgtctcatctttctattttctctgtttttctgcattaattcttgtctggtttatgttcaattcttttctgattttgtatctggtttatgagcattattgtgcatgtgtgtgtgttgagtttgtgttgtaggaatttacaactgatccgaagctgggatcggattggtccagttttgggtggggccaggattcaggttctatggtttaagttagagttagagtccaaaatattgattaagaaaaaatttgttaaaaaatttttaaagtgacttttttttttgtttcaaaatttttaaatttgattctcaattaaaaaaattgaaaactcaaaaaagttttatatataaaacatgattttagaaaatattttactttttttttaattttaaaaacaaagaattgattaaaaaagtgttaatcaaacagatgcaatggttacaacttaatgcattacaccgctccaaaaagccacacaaaatctcagaaatattgaagaataattaatggcaatttatgaagataagaacactagattgtaatgaagatcaccttgaacaagatcaaaaatctcatacaattagacacatatcctaatgccattcacacactacaagaaatgtcacttttaccagcacaattcgctactgcg

SEQ ID NO: 249484 - DNA, 594 bp, Cannabis indica
atcagattgtaatgggttttatttagggcacaaaacccaacagtttgagaaatatttcaactctttgttcatgaagttctaaatatggtgttggattcggttaaacctagggtaactaatgagctcaatgatgtgttaatgggaccttttgctgaagctgatgtttgaattgcactgtttcaaatgcttcagctaagagcccaagtaagtatggtatgaatgctggtttctatcaaaacatttgggacattgttggaactgatgtgtgtaaggcttatttgggttttattgatgggtcggccttcgctttttctattaatgaaaccattattactttgattcctaatgtcaaatctcctaacctcactagtgaatttcggccaatcagcctctgtaaggtgctgtataaaattactgctaagaggattactaatcgattgcgggaggttcttaggggtgttatttcagaggagcaaagtgcgttcatatcggggcgcttgataactgataatgcaatgattggttttgagtgtctcaatgctattaaaaggcacaagaggggaaggaaagagtttctaacatacaaggttgata

SEQ ID NO: 249485 - DNA, 560 bp, Cannabis indica
ttaaaaaattgaaaagtggtacagttttatagaatatgtttttgaaaaatatttttactttttaattttaaaattaaaaaagtgttaccaaacatcagttaaattagtccaaagtaataagtttatatagtttaattataaatttaaaagacataatatgtgaaagagaatatctcaactttatatttattacactattagaggagatattataagttaatctaattagtttatttattcttcgtagggatcaatgtgctatcattaacacgagctagactgatgtttagtaaatttagttattaatttagttttagttacaataattattagaattatttgcggtataacctccttaagtggtcaagtatttccaactaacctccaattctaaaattttggtggtaaaaccttttaaacccaagttctattagcaattagccatttccatccatttttggctgttaactgccatggtggaatgtccacgtgtacacaatgtacacgtggcacaattttattagtccacgtactaaatattgaaaaaaataaaaaaaaaa

SEQ ID NO: 249486 - DNA, 812 bp, Cannabis indica
agaattcaatcagaggcaaatacttgctccatgaccctccaaaatccatgacacaagcttgtaacaagtcttcaagtatctgaataggtcgctcagattgcccatctgtttgaggatgaaaggccgtgctgaattttagactagttcccatggccttctgaaactcacctagaactttgaggtaaatttagggtctctatctgaaacgatagacttcggtacccatgaagacgaacaatctctttcacatacaagtcagcatattgatccactgtataggttaccttaacaggcaagaaatgtgtgctgactttgtaaagcgatctaccacgacccaaaatgagtcgtacattcctgtggtcctaggcaaaccaaccacaaaatccatcgcaatgtcttcccacttccattctggaagtgttagtggctgaagtaatcctgcaggtcgctgatgttccgctttaatttgttgacaagttaagcacttagtgacatagtctaccacatctcttttcatcccataccactagaaatagggtttcagatcttgatacatcttggtggttccaggatgcaatgaatagggggtggtgtgagcttcatccagaatttctttcttaagctcactgatatcaaggacacacactcgcgctttaaacaatagcattccactatcagagattgaaaagtccttagctttgcctgctaagacatcttctcgaatctttaatattttaggatcttccaactgtgccaccttaattctttctagtaagtctgactgaagcgtcagattatataatcccttaatt

SEQ ID NO: 249487 - DNA, 699 bp, Cannabis indica
aatgaattagaatatatctggtattgatatatgccacacttataaatcaggttggcttgtagtattttgtagatacaaatgacatttttgtgatggccccattccatatcataggtctttccttgaacaatcttaactttgctccttgatttgtatgatccaaatttcacgtatctcatagctatgttctggcaaggactaaatcctctgtaggtaacttctcccatgttttaacccttctcgttcttaatctcactgtggcctcttgttggtggccctgaaggtatcaagccaacatgcctgatcgatggacctattttgaaattctaataatcaggaggattaccctgtaagtctacaaggaaagtcaacttgcaaaaacaagtccataaaaattgaatctaacttagaaaaagagaagactcctgttgaaaatcaatccactgaattgagttcactctcttcttcgagttcaaagatcataacccgaggcaatctttcaaagaaggatgttgtatttgatgaggatgacagagacaatatttggaaaaaatagtaatgctccatctcaattgtaaatctttcaagatttcaagcaagtctggtagttgactcagctcaaccaaactccatgaacatgaggctgagaacgctcccagattggaggtacaaatgcgcttaaaacagttaaaacttaaa

SEQ ID NO: 249488 - DNA, 864 bp, Cannabis indica
atcgatcttgcactttatctctcttaatttgacaagggaaacttcaggcctgtcagtaactccattgagcacctttattacagtaccataaataagaaagaaaagaaatatactaaaagaggcttacaatatgcaaacaattacctgaaatgcttcactttccacacgtaaaattacacagaaagtcatattactgcacaagattaaacaaataaaatactttacaattaccattaggcaaaatgaatccttaatacaaaaagcaaaaacaaaaacagcttactccaataacacatgaagttcgtagtccccaattttggtaacacctgttgtgaagctgtccacaacatcatcaacaaacacacgaatctgaaaaaaagaaaaatagtcgattgggagaatccaaaacgttctttatgccttccatcatcgactccaaccaagggaataaaatcgaatgaccccactcccaatcaccccaaatattaatccataatcctttttccccaagacactcaaatcaacaaaaccctaaaattaaggataaattatcaaatatactaccctgattcaatccttgaacaagttacttcaactaaacagcaacaataaataaaacgagtatataaaactcatatggtagtttagttagcagtgtcaaatttttcgaaccaacaaaattccagcattttacagaacacgctttaattattgaaaatgtataccaggaataaacacaatacatagatatatatatatatatatctagtgagagagagagtacaagttttctgaggatgcgatcgtagtgagagaaggggtgagcgaaagagacgaaaatgacgacattcgaagagtgaggag

SEQ ID NO: 249489 - DNA, 1811 bp, Cannabis indica
tgttatacaaaatatctttatatctagagtgttttattgtaaatttataatgtgttgtcgatgatgacttatttaaatttgtactattgcaaattatttgcaaaaacaatccttaaacaacaaggaactaaggaaaaacagcaggaaaaacaaaggtttatgttgcctgaaattgaatattatcatcatagaaatttcatatttaattagtatgggtagaatgtagatgtatcatgaattagtatcatatatggagatataaaaagtacacaaactgcttgtttaattgtgatttgcaataatattaatatttatcatttttgccaataaacattggatcgaaaccgatgctcattgctcacctgactattcaaaactatttatacatttctgagatcaatgaaccatcattggctgtttaatgtgggagctaacaaagaaaccatgtgaaatcttaacaagcaaatatgggctatggaacggcacaacaatcacaaaaataataccatctttatagtaatttgctactgtacggttttttttaaagctgttacatctttgcaaggcttgtatggcatctatgatcatgcctattcattgagagttaaaatgaaatgatttcactcagtttcaagggccacaatttcatatctgacctcttccaaatgctcgtttatagcagtcacagcatcctgtactcctctaatggcttcctttagttccttatcatacttagcatctgcttctgcctcttcagtcccagcagcttctgtaatctcacgcacatgcacacactcatgctccattggtttctcaaatttgcaatctgcatggctcaccaaacgttctgacggcctacctgccttcttcagcacctgtaatgtgactgtctttaaaagtaaaagaacttaatgttagcaagcaacagagtaacttggaaaattcgagttactattctagaagtctggttgatgagtacagaatcatcttagagaattgaaagaaagaaatcacactgctacagctataagatgaacaattatcatctgtcaccatgatattttttttaatacaaacaaaagtttttctttgaattcatgaaataaaagtaacaatcctagcagaaaaggaagaatagtcattaaaataactcaagacttgacttttgagtttgactccatataatatcaagaaaaagtaaggaatccttttactgacttgaaataccagagattggctggaatcgaacaacccaaatcaaaggtaccactagtgcaaataagaaaagaccaccatgcttaacgatattggtcttttgatactttcattgttcctcaataaactattcaatgcagaagttttcttcaccaatgaaggactaggttggtttaattttaacaataacatcaaaaacaagttttctgaaatgctagagtttctccataatccgcttctcaagcacatagaatgatgagcagcttgcaatctctctatagtaaccaaaaaaaagaaaaaaacaagctttcatcttttagtataaattctttgtagagaatcctttcggtcacagcatacactgggaatgaacaataaggaaaagggacctatacaaaagcaaaaccaaaaatgtgatgctgatgcaaaaaagatatgcctctctgaacgaaatttcactacactcaaaataacagaatcagaaaaggggtggcttgtatcagagttctaaatttatacccacaaagaaaatagccctgaaacttataagaatgtattataacaataacagtggaaaaaaaaaaaaagacaaaagg

SEQ ID NO: 249490 - DNA, 760 bp, Cannabis indica
atttctgattattttcctagggcccttttgtatgagttttttcgtctccttttttgatcttgtttgccactatttataattacataatgagcagttaattacaaagttgactgtaatatgtttacaacgatcatcccctaaaatcacggggtttgattacatatcatgtagtgtaaatgcggttatgatttgaaaatcatatagctgtgattttctcgcttttactaggtcaaaatgatcattttttaaacatgtctttaattattatatctagagatgtctcgacagaagcttggttacagtggtctcaacagcgagctggggccatttttccttctgaggtcgacgatgcatgtcttgtgacgatcgcggttcctatttacaaagagtttttcgaagctcatttgaatgatagcttatggctcgcaagggttgtaagcctcgctgacgtgactggatgaagttataggaagtcttcccatagcgagacgggcacctcgcttacttggtctcgagctgatccgactgttacacttagttggtacattatacactaagggcttttgcaattgatatttgtcgctttcgtctttctatgtgtattgtccttgatgtctcgctattcacattcagtgatatatggtttgtctctaatatactaagcgccacattgtatattgattcctcgcctaagaccttacagtcatcaggacacaaatatactctgatacttacgaaattaatgagtttttccataaaa

SEQ ID NO: 249491 - DNA, 583 bp, Cannabis indica
gtttaccttggatacaaactcggatcgtccagcgacgattatgctttttttgacacagatcttgtctcctgtgtcaggacatggtaatgcgcgcacacttttttgacaaacagttattctaagcatttacttttcaaggtcaaactttttggcgacacacgcccattacgtacagtattcccctattctccaaccgcttcaaacacacgagcacaaatcctttcaaggggctcaaacaatcatctctttttgtatgtattttaccccattagtgggctttttgcagaaatctcaagaaggtcatgggcatttccatacccgccctttagcctataaatatccttctatttcaatacgaaggggggatcacaacctagatagtcgaagctctgctatttttattttaagctttcctcttcttcaagagaaacacagaatatagagttaggatttcttgcttaaatactgtaaaaacatcaaacatgacctttgaggctaataaactcactagtggaccaggttaaattaacacctgaaccgtgtaaaatctccatctcatttatttatgcattttattatttct

SEQ ID NO: 249492 - DNA, 653 bp, Cannabis indica
aaaaatcttgttttggtttttgacttaaaaagttgtaaacaaatttagaaacagaaaacatgaatgtcaatcttcacttttttattttttttggtttagaatttttgtgcttttttattttttatttttaaaaatagcttaaacatatgtatataaagaaacatgtatattttttgctttacaaatttctttgttaaaaaaactttagaatggtcttcatgtattttcttttatcagaacttatctttagagtataaaatacataaaattttcattttcactgacttgccatttccatcagctgcaccaccgcgacctgccacctcccctccaactgcaacttcttttcaaccttagtgacagttgatgtggctgcaagagaagttgaggcaccaccagccactcgtatcaatgaagaaccagaagaaaagaaagaagccaagaaaattggtatatacatataaaaaatctttttgcatctgtcatttatttattattgtgatttcatccttcatgtttgaacctaatatatcttgattgtatgctcacatcaagccttgactcacataccatttgatatattgtatatttgattattataaaatcgttaaatttgtgcattgatttttataggtatatattaatttaattta

SEQ ID NO: 249493 - DNA, 773 bp, Cannabis indica
tcgatgtactcttaccacgacttaattatgaccttgtcacaagagcttgatcagtatgagacataccacttggttgtttgatagtactatctatctccaaaatagcagttaacacctcatccacaattaaagtagtcttttcaagtaaaatgcagtcactagtgtctcatataattttggtaaagaagccaacaaaataataacttgatccacttcatcaatttcgacatctacacttaacaattgggttatgcacttattaaatctatttatatgacgcctaacattaccttcttcaatcatcttcaaatcatataattgtttcttcaaatataatctatttattaaggattttgaaatataaagctttctaacttttttcataactaagacggacatgtttcattcaatacactatactttaattcatgagctaaacttaaatgaataatagtgcttagcgctttcgcctgtaactccttccaatctacatcagtcatactctcaggtttctttccatgcagtgcctttatgagcccttattgtaccaacatatctttcactgtactctgccataaattgaaattattctttctatcaaaaagcttgatctcaaaatttatagatgataccatctttggcatattcggtgtagatctgaacattggctatgataccacttgttgagaaaaatgataaacttcaagcgcaacaaaataacaaagaaaacaaagcaaaataatttactcatggtaaaactactaaacccacaa

SEQ ID NO: 249494 - DNA, 758 bp, Cannabis indica
tagatatacatgaaatacattcaagtggtagttttttttttttgtaggtaaacattcaatcgggtgaaccgaccaatccaacatccaacagatgctggatcgattggatgaatgaaatgaattggatcggatcaaatggtaaaatttaatatctaatatgtaactggatcggatactgaataaacaaaaaaatattaaaggtggtacaatgatcacttattgtctattttaatgactgaagcaaattgatgaaaaaatatgggccatcaatatttggtaagtagggtaaactgattaagtgatagagatgtttcactaaaatgatcatgtgtgactttttctttaaatatagtacaaacaaaaaacaataattgaaacttgtatgttaaattacctccttaaccttaacaattaattaaggcactgagcatgcaatcatacatattttaacttaataaataaagcttagttatttaattataatgtttagtctacaatggctacatgatttgtaattatattgagttagatattttgatggtgattaataaggattgaataccgaaactcataagtgttttaccaccttgatcactaataacttttataaaatgaagatttaagataactagaaaagttaaaatataccataactatggtagaatattattaactatttttctaactaaatgatcgatgtaaatcgtaatatatagttacacttaccaatataagacttaattaagagagaataatta

SEQ ID NO: 249495 - DNA, 1163 bp, Cannabis indica
taataccgagctttatatatcttacttaccaaggagtcttcgttggtcagcaaccgccacccttgtttaccaagaaaagagagattatagtctcgaagatccctgaagcccattccaccatcaaccttatgcttactcaaccgtttccaacttatccaattcacacccttcgatcccgaccgcgattgagatttccaccagaattttgccatcatgccttcgagattagagcaaatctcctttgttaataagaatacactcatggcatagcaaggcaaggcttgagcaacagacttcaataaaacctccttccccgctcttgacaagaatcggctttcccaagtaaatatcttttttttcatcttctcttgaagaaacccgaggatagctttcttattgcgccccaaaatgcaaggtaaaccaaggtaaaaactattatctcccgcctccaccatccccatataatcacatagtctaaaccgagtatccacagaacagttcttactgaaaaaaactgaggacttggagtaatttacctgttggcccgatgcttgttcataaacatgtaggagctgtatcacatgtgtagcttcaccctcgttagctttgcaatacacgtagctatcatcagcaaatagcatgtgtgagacacgaggcgcgctcctagccactttacacccagtcaaccatctacgttgctcatacaaggataggagagaagaaagaccttcagcacagatcaagaataagtatggagatataggatccccttgacgtattccacaaccaggtacaattggtcccaacttttttcctccataagtaacatgataagacaccgtagacacacagaacataatcaaggccacaaatctcaaactaaaacccatccgaatgagcatagcttcaagaaacgcccaaccaactcgatcataggccttgctcatatctaacttgatcgccataaacccatctttaccactacgcttccgtttcatatagtgcataacctcataagaaaccataatattatcagagattaaccgtcccggcaaaaatgcactttgattggtagatataacattcggcaacacaactttgagtctatttgctatcaccttagacaccactttatacagaacattacagagcgatatgggccg

SEQ ID NO: 249496 - DNA, 1106 bp, Cannabis indica
acttatcgtctaaccaaataacacgctttgttaaactatgagctgcaaaattcttatcgcgagctacatgagacaaaactactctttagacaataaaactataacattctcaaacagtaccccaaatgagcccagttaaatcctaccaacagaataaacttactcattttgttgatagctattactagagaaagtaaatccgaataaacctctctaattagaatttcacacaaatgagctcaattaaattctaccaacagaataaacttacttattttggtggtgtagaaactaaaataatatcaatttaatggtgtatcaaaaagtataaaaaattgatgtggtgtgtaatgtacaaatgagaaaatagggattttagtaatgaatgaatgaatgagataatataaatgacctccaaaatacacatatcatgtttaaaatagcagttagaaaatttgaaaaattgatgctttaaaaattatttctttttccaaaaataaataaataaaaaaaagctatacatgttataagaaggtgtttaattttagcctttacattatgagaaatttcctccccatgcataggcggccaagctgtatgaacccaaaacccaatattctttctatatcatctatgttcatatacatgtatatataaattaatattatcgagttcatacaatagagttcttacattatgtcactcatgaagtcatcatcaactatatattcattactttatgaataaatgaaacctttatttgaaaataataattaaaaaaagattccttaaaaaaaaatatgtaataataatcataataataaaggtaaaacgtgcatctaattagaattatatttaatttagtcgtacactagtttttattagtttaaggtttagtgaatggtagtttggtaggaaagtagtattattagtttaaatttgaattgaataaattgtgcttagtttcttagttactaatcattcttaaatatttgttactaatcctttcttttataatttgtagatattattttggatgtgaagggaaaatagaagatgagtacatcattagctacaacttcaaaattttaatgcatgtttgacat

SEQ ID NO: 249497 - DNA, 1803 bp, Cannabis indica
aaaaatattataaatgtagacaaaaaataagtcttcttaacaatatgttacttttcttagtgatttttttggtcggcaaattaaatttgtaattcgatcacaagacttccattttaagagatccagatgaacgatttctaactttaaatattcaatttttctagatttcgagttggtatctaaggaagacattaaaaaatgaggatacgtaaaaaataacaattaaagaagtctaactaggtaagtattattaatgattctatcacatcgtagtttattgacaaaattaatggtttccaatttgtaaatagtaattgtcaaagtgtaagaacacgcgcctactgcgcgtgttttatacacatagtagctacgtacttctttcgtgcatgcatggattatctattaatgaacaatatacgtagttcttttttcaaataattataaatataaaaatttatgaggctttttttttcttatttgaatttcatcttacattaagttaatacatcaattgcataatacatgtatgtatctatgtacaaagaaatacttgttagttttgttataaaaaaaaatacttgttatgatataagtttgttttgatcaataatgcttatacatatcattgctagtatattacatgtagttttatccaaattaaagtaatattagacccacatttataatatatatacactcaaaatatagatataatatataattaagtatattgtggttttgtccatcccttaagtctattcggttcggctggcgtctccggggcgggttggacaactcttaattggggatatggatatcctttcccagttgaagaattttttgttctttgttaggaagatttggcatcatcgtaatacctatgtacaagataattaaaagctatttatctgatgatatggtgattagttgggctcttagctacctttggcgctaccatgaagctcttacttcccttgcaccgccatcacatgtgacttccttccttttttcctacttgtagtgaacatgtttggagctgcctcggggaattataatctgtttgttgatgtttgtacttgttttaagaggtggaagattggactgggtcggggttgttgttactataaaaaatttgctacttttaatgataaatttttaatcacaatataatttttttgtgactaaatgtgacttttagtcacaacaaaatgttacttgtgactaaaacatagtatttagttccaagtttgtcactaatttagttttagtcggtattgtgactaaaaatacatttagttacaataaattataatttttgtgacgaatacatttagccacaaaccttttagtcacaacataaaaacggtaatttattagtcacgatttttttacttttagtttcaaattttgttatgactaaaagtaaattttttttataatgtgtgtctcggccaaataaagatattatatgattagctgcttcttcttccaccgttgtgtgtgagcctcatgtggcggaggtattttttgggattgccttcgtttagtgaattctcttttcctcgaagatgaaggtttgcaatgaatattgtgtttttctttatgatattttacatgttagtctttttctctcatttatcattgtaaacgaactaataatgctcttgcattcgttagctaaattgtcatatctttagattccgctaaagtttggtggccggattttccttccgatttgccctagttaattattttgtgtattgatctttggatcatcttagctttgtgtctttcaatgaaaat

SEQ ID NO: 249498 - DNA, 1320 bp, Cannabis indica
atgaagtcgccaacaaaaactaaggaagtccaaagattaactggttgaatagccgcactcagtagatttgtttcctagtcaacaaacaagtgtgttcctttcttcaacatccttcgaggtaaccaaaaatttgaatggatggaggaatgcaagaaagcctttcaagaattaaaaagaaaacttgcaaagcctcccgtactttctaaacccctaaaaggggaagaattaggattatacacggttgttacagaatacactgtaagtgctgtgctgataagagaagagatcaacgtccaacatccagtctactatgttagcaaaagactcgttgaagatgtgggatggtatcctttgatagaaaagcttacttacttcctaatctatgcaacacagaagttaaggccttatttccaagctcaccctattcgggtatacaccgaccgaccattacgccaggtattgcaaaagctgacgcttctggacagttacataaatgggcggtagagttgggccattacgaaataatctttcaaccacgaacaacagtcaaaggataggccttagcggactttgtagttgagtgcacgggcaaagaagaaagtagcataagggataacccgaagccagtacaagagtccctgcagaacaacaacgaagatagacctacctggaaattgctcgtagataggtcggctacagatcaactgtctagtgggggaatttcccttgtcacacctgggtgcaacatctccacagggcagttaaatttggattgaaagcttccaataatgaagaagagtatgaagccctcattggtggcttaaaacttgctcgagagctgcacgctgaatacattgaggtttgtagtgattcacagtaaatcatgtttgaagagaggtacaaagcccgggggagagattgcttatctaagaaagatacaggatatgctcgcacaattcaaggctataccctcagcaaaattccagcagaagaaaacacaactgctaatgccttagccaagcttgcgagcagcacagtaattgataaggccaatctagtgttggaatatattttaccaggatctagatttactaacaagtatgcttttaacatcctaaagatgaacttctaaaatgatataaaataaacacataaaaggtatgcgaaaccttacattagttgcaatggaattaaatgactcatttcgcttagatctctaacccgtgtatcatttctatagcagagtatcaccaagatctgagctcaaaactccttttgttgtttggattcttcaagttcttacacactatggttgaggac

SEQ ID NO: 249499 - DNA, 533 bp, Cannabis indica
accaccgaacctcctttcctccaccaacgaactttcattacccaaaaacccagacgaaacctagaagcccaagactggtcgaacctccatagcactcaagcatcaaaaaaagcagaggccccgaacctctgtctctgtctccgtcttcatcttcatcttcgtgtttatttgtttttgtttcagaccttagatggttatggttatggttttttatggcgaaaacatggttatcgataggttgttgataatttatcgatgatttatgtttatgtaacacagttttgttaattttacatttatcaataggttatcgatagtaaatcaatggcatttattgataggttatcgataagtatatcgatgacacaaaaaaagcagtgcgcagacaaaatcatcgataaattatcaataaagtatcgataacccatcgataatttcattttggccgaaaaatcataccctccaccaccatctaatgtctcaaacaaatacaaattcaatgaacttttggttgggggagggttaggtgggcg

SEQ ID NO: 249500 - DNA, 2912 bp, Cannabis indica
atttacttgacacttaataattaagtacttacggaagttctaaaaatataattttaagtattattaccatcataaattaaatgtagatatttatatacaatcgagaataaattgttttatgcatatatatatacacatatattcaattactagatagaagttacgtgtcaagtcacgtatgttaattttattttaattttttaggttttttgaatatcataattttaaaattaataatatttaatgtagtgataatcgttgaaattttaaagcataatagtgatttaaataaaaacaaaaattactattatattttgtaatagtaaataaaaaaaattattattcgttctaaatttattttcggaattaatgaaaatgctcatctggttaaaatataacattcaaatttaatttaaaataatatttaaaatttaactaattgtaaatatcaaaatttgaaaaaagtcactcaataatttctcataaactaagaattctgttatataaccacattttatatagaatagatattttaatttagctcatatcctaagttattcactttataatcagtaaaaaatatcatgacaaatgttcatttaaccgtgtaatattttattggtaattaattaagaaatttatatattacatgtccaaaatcttatatattttttttaattatgtaaaaacaaattttcaataaatcataaaaattccatataaaaaaattgtgattttattgttttcaatgctggctactttataaaaaatgcactgtccaaatttgaagttgttagtccatgatactaaaacagattttgattaattaataaatctcaaataaagtaggaccaaaataaatgaatctcccacacaacatatatataattgtattggggggttatatacggctaactattgattaatatggaattaaatcttcattaatttcttaccttttttgtttttaattttaactgaacattaatcttttacattcaagtgtgaaataaatgccctattgttaattaaacaaatacataagttatctgtcttttttaaataatttctaagatgtcaaaattcatcacagctggaacttaaataataataataataataataataataataataataatataactagctaccatcttttatcataactcataagtatgaaattattaaacattaataatatgcatgttctcacgttacttgtatttttttggtaagtaatatgaattaagtagtagtgacttatataaatatacatatatatatatatggttggattaagtgtttagcaaaataacattgttattggaataagtggtgtcaaacactttttatacatggtgtttgatgattggtttttttttaaaaaaaaattcttaatacttaattacactaatagtgatatgacactatgaaaaatacttattaagtattaatagtgacttttagctattctcttaggaaaaagaaaacttaaaggtgataattatatatttattacacatagatttattacacatagatttatggaaagaagagataattagacataggattagcatgattaataatttataataaagatgtataggtagatgattaatttaggggtagtccaccaactagagaagaagaaatgagtattttaattagtagatttaaatctcaaggacaaagaagcaggccaaactgccaacgccctctctgcacatcataactcttttttggtacgaatacgagtagcgatgagacaactctttcaacccaaatttggtgctcacccgacccgccaatatttattcatttcaagtaccactagggtcaatatcaacaattcattttagaagaaacacacactttgttttatttgatttaatttttacttttattttcataattttaagatatatttatttttagaccacttaaattcatgtaaattatatactaaatttaagtagagaatgaaaatagattgggcaacccacccaaaaaatatatattttaataaaatataatataagagtattttttattaatagatacaaaaaagaggtatttctcaacttatcatttaattttaatacactattgttatttgataccttattattaaagtgcctaacactacagtatgatcaataaaatagaaagtaaaattttaattaagtatttcaacgaatagagtatggaagctgatgaaagtgcccatcttcaattagtatagaattctcacatcatatttctctatatcaaattatatacaaattggtgtactaaattatatattattaatagtactagattttgaatttttactaaattggtatatatatttatatatataacttattttttctcattcttatctttttctttttcttttttaatttgattttaaaaaatatttattaattagttgattggtggataaaatacatattatatatcatagtgaaatcttttaaataaactgtttttatttaatgtgatatttagtataatatttgatgtgaattacacagatatgatgggtttacgagttttttttagctatagatacattgaaatctttattcaaaatgacattcatttcataaaaaattgatcatttttgcaatatacctctcccacatttttaactaatgtatctctacaatttcaatattattacaattatcaaaagaataaagtcgttttgtgaagtaacataatgtgtttatattcccacaattatcctataaatatttatacacatagtatgctagataattaacgttgctgtattcatattaaatatataagttacaaaaaaaaattgtgaattcggattgcaaggcccacaataattaagcaaattataattgtcctaaaaatgttcatacgacctt

SEQ ID NO: 249501 - DNA, 1134 bp, Cannabis indica
ttttagtgtattttataattaaaaaagttagctttatttggatctcgatcttatataatgagatcgttagaggtatatcaaataatgtggaacaaactgtaatgtaatgaaattgaatggaaaagaaacaattttcattctatttctttgttttgttgcatttaaaaccattagaataccattttaaaatggaagaaaaaactattccaatgcaatatttgaaaatgttaataattttttttatcaatttcttatacattttaaatttaattccattacattcctatattctaattcctatcaccctttctattcttatatttttaatcattccaaccaaacatcatattataaattaataaaggaatgtgtagtagtgggaggataatcaatcattaattttttgatgtatcaggtatcgcacaaaacttttacaacctaaaagcacccaaattttcaggcctttgatatatatctatacattcggtatataaaacaaatataatcaagaataaaatcagcaattacaatattgaataccaaatattgtcttctccagatactttttttggccaaaataaatctatcttttgcttcactccagtcttcaattctttacagattctattgttgtcaggtgcttatttctcccaatagcatgtgttcctcgtcttccatatgtgatacaccaaattggtaagtgcagcagcatacaccagctttcgaaacttgctggtttttgcctttcccagccaacgaaccagcacagcaaaaaaattaccttgagctctccattgcagccagctcttgatgctttgtaaccaaagttgggtggttggacactcaaagaaaagatgagtgtgtttcaggttgtaagttacatagcaaacaaacctaatctgcagcaatccccattttagccaatcggtctcttgtcttgagcctttgttagatggctaaccagctcacaaaactgtgttttggggtaatgaatctcctccaaatttggttactccaatgcactttaattgggtctggacagaacaatttgtacccttgtgctactgtgcattttccttgtatcatgctgtcattcatagcagctttgaattgctctttgagcctcactatgca

SEQ ID NO: 249502 - DNA, 2732 bp, Cannabis indica
aatgcatacactatcacaacaataacagcaacagcaactgaatgagcatcaacttcaaggaatgattctttcgattacatgtagaatatcagtagtgatccaatgataagatcagctttgaaacttaactacaggggattatcttaagtgaacataacttacaatgagaccatgaaataaaatgtgagaaaagttaagattttgcaaagcaagcatgaggataccaagcttagtaaagatcatatttaacaaacagccattaaatatggaaaataaaaattacaaagtaacctgatcagcaacaacatcaaccaactccaattcatggtctcgccattgtctagcactatctgtagggagagtcaaaaccatgatcgcatagtttcttccagaaaggtcaggccaatcattaatttggaaattggaaagatgtagaagtggtacccgcacagccacaacctcagggggcacatatcttcccacaagaggccgaattctggcaagtgggcaggtatatggtatacgcattgctcgaacactgttgaaaacttcattgactattggagtgtttattgggacataggaaccaacttgtatgtgaaagtttagagtatgagaaagctgtagatcctgaccacttcttgatggcatccataatgcacattcctccagacctaaagtcctcccaagctcaacaagggtggttttcaatattgtatctctatttagtgtgcttctaatttcatgagtcaacattctaacatgccttccagtttcctcttgagtaagaataagacccatctccctatcaagttcttcagccttgtctttgagaaattgttcccgccttttaacgcttaacaaatctggtataatgtgaacaagcatcaaagcagttgcacaggaaacaatggcacatgaaatcttggcaatggtcatcaccacagcaactgctttagagtgcatagagaatgtccacaagtttatgaagtgggttgctccacaaagaacaataaaagcgccaaactgcatgagcacccatctgtatggaaagaatgctgatttttggacgaaatatataagctccaggggaatagagaaatatgcaagtgcaattagcacatctgatatatactgatatttcaccaaaagttcatcagggggccactgtgtgtcaatgcagtcacaagactccattatccaattgctctcttaataaatctgatccactagaaagaatataccaacaaataattaaacaaaaatacttctttaagtcaataaaaataattacataaaaaaaataataataacttcagtacgaacaatataactatccagctgaagaaccaacaacattttacatgttcatttcacaaggtaaaatatacacagttagttctcccatcaaaattagttttaaaaacaatcaaatttatatttaaatgagaaataaggtcaactataaatacttcacaatgcttataagcagcaaattcacttctaaaacaaaactcagctgttagaaatctgaaatagctaataataaacctcaagaattacaacttatgcaaaccataccaaggaaattaaagaaacccataatccaataaacaaataatatcaataataaaattagtattgaaatattaccaagtgaggaagaaaagagcgagcagttaaagatcaccagaagaagaagatcaaaagtgaagcctttttagaacctccccaaagaaaataaaaggtataccaaaaaaaaaaggcctttggaggaaaagagagaaatagagccaaaggcatcacggacacgaaggcgacccacgagttcaaacagggtctcgcacgagcgtggactcattaagataaagttttaagaaatcttggtcgtttttgtaagcggattaccctgattaagtggatcgaactgccataattataaaatcttagttttaaacaaaagaaaaaggtagatacattaatatatcatatgtatcgaatcgatacttatataaacctatatttatttatttgttttggaatgggtgcctatcatatataatttatcattatatgctaaagaaattacatatatggttgatggaaccgataacacattaaattagatgcttataaatgtaaatggattataattatgtattacaacacctactttacacctataaatgtatatggattattattatgtgatttaaatgtaacattataatatatttatataacatatgtataattaaattattacagcgggaaataattagttgcaaatcaaataaaaataacaaaataatcagatacaatctttctcagttataatatagagagatttggtaataatgaaaaccttgcccaacttttccaagactatacccacgaagtccatataactttgcccatcaaaacattaattaaagaacacagaactcaaagccatcaattttttccaactaccggttacgtgaaccacaaaattcaattatcaaagtctgagagacaaaacagaaatagaataaaatatcaagacaatccataccaactaaaacaaaaaatcaaaaacccttcctaagagtaaaaccattgcagaacaaaccatttcgaaacttatatcacaaaaatatatcattattgcatatacataaaacatgcatgtctgtgcacagtggcggacccagaatttaaagtgaggggggcgtaaataaattaaaaaaaaa

SEQ ID NO: 249503 - DNA, 567 bp, Cannabis indica
agacatgctagaaagagcagatgttaaagcaactaattcatcatcactactttcatagttgcattcttttacattcttgttttgctttgtttatgacttgctttttgactttgctactttctttttgtagatatgtcttccaggttgagaggtcttgctgggggaccttccgatgagccttcgggtcgactgagggccaaggtggcctagaccacccgtagtggagatgctactagattatctctaccttctcctccactaaggcctacaccagttggtcaactagtaattgatgatctttcgactaagagggaacgaccttcaggctaggaagctctatagcccagtcgaggagtaggctctgctacagggcagagagttatgcaagtggcttgtagacgcctagagagagtgtttccttctatggatgaggagcttcaagagcaaattgatggtgagccagacaaactctactccactggcctttgggatctatcattggtaagttgtacatttaactttgctcatctttctggcacttttgcatgctggtcggccaaggattag

SEQ ID NO: 249504 - DNA, 605 bp, Cannabis indica
catgttcccagtcgcgactggaacaggcagcgacacaaactttggtttttcttctcgattctttcaccacttttcctcaattcttgtacatactttctttaaacacccaaggacctgaaacaaaagaatcaagcgtaaaatagccctaaaactagaaacaagagtgaaaactaactgaaaatacgacccgaaacttagactaattttagcctaacacgtaaatggacttttagataaaattgccatccttaatttgtaggcacattaataaattatttcaaaaaataagcaaaatgaaaaggagagctttgtgattatttaaattaagtgtcctagttaaaaatcttatttattcttataactaaatattttatttattttccaaaacaaacgaatattttgccatatcaaaaatagtattcaaaattattttgaaaatgggcaaaattcaaattgaattataatttccatgatgcaacaaaaatgacacttacctaaaaaaatgctgtatataaatatatatatatttaaaaaaaatatatatttgaagtaaacacactagaaaagtacatgaaataacagtatcactatgaacagcccaatga

SEQ ID NO: 249505 - DNA, 528 bp, Cannabis indica
atttcacctttctatcttctatgacatctcttacaaagtgtagtgtaacattgatgtgttttgttttctcatgggatacttgattttcactcaagtgcagtgcactttggctgtcactaagcacggagattgactttgatttatgacaagttcttttgttaatcttttagccaaagtgcctctttaatggctttgtgcaagctggatattcaacttcagtgttggacaatgccactgttgattgaagctttgctttccagcttattgtgtagtcattaattctgagaccttgtatctaaatcacttgcatagttagagtcaacatatcctaacacttcaggtttcttggttttggaacaatagactagtccaaagtttgaggttccttttaggtacctcatcctctatttgacaacctcccagttagggctattcatccaatctaatccgcactattttgctcatagtccatcctatccgcactaagtgtagattttatattttggatccaatccaatctgtacaata

SEQ ID NO: 249506 - DNA, 1061 bp, Cannabis indica
tcaattgcactaccatgttcccaaaatgtacgtatcaccctgacccaaaagtaggcttaactaacaaatcaaagaacatgtgtaatactcctaagattgaacactctcactcaattatcatttcacttcaaatagacatagaagatatagatgtccatacatatgattaacactctcacttaatcttaggaactcgatagtacaattgagtgagagtgctaatcatagatatagacatttataacttctatgtttattagaagtgaaatgatagttttcttagagcttggcttaacgcgataaatgatagagtgctcatttcagtaattatattagttttccaaaatatcatttacaagtagctaagtgttttaaggactaaataagttgaatgttaaaatgataattttatccctacttaatgtaaatcgtctatagaggatcaatgattgttgtgattgaaataatagataatccatagcatatctatatttggtacatataatgttctattgatcaggagtgcaattctaaatctatagtggagttaggaggcattaataagttaggaaatttactcgaaaaattttagatctatttattagaagcttgattacataggctcatggtccccacattatttgagataatatcatattataggctcaattaattaattatataagtcaattagaattcaaaaatatactatgttttatttgagaattttcactaagttcaagtaattttgagaataaaagagaaatatgggcttatttgttaattagtgctctttgtgggtctaattaataaatatatttaagttttactttatttgataattattaaaataaaattggtattcaaattaattagatgagataagtggcaaaatatgaaaagacacattgtttcatttaaatgaaataaagtgacaaaaaaccaactctaaggccaattgtataattcgttcctatagttgatttaagccaaagtcttctattttagagcatctcattctaaacctaaccctaagtgaatgtctatataaagaaggagaa

SEQ ID NO: 249507 - DNA, 851 bp, Cannabis indica
ttgactccctgagatgagcttggaattcctgcagttctctgttgtgaccaagtccctcacgttaagaccatttctgtcataagtggagaaaaccttggcatgttggagaaacagttgggtaggagcagtgcgaaccaaaggagggatcctgacccactccgtcagaagctccgggcgatccgcggcttggaagccagaagagaagaagaagcggtggtgatactccttaacattcttttgaaaattaaaagggatcgggccctcgttagtaggatgggcccggaaagtgaaaaaaccgtccttaaacttgtccccctttttggggacaaacacaagttcataaatatacaaaatttcaaccgcactaggtgaagcccagcctctggctacataaaaaataaataagcctgagaggaggcagtaagcttgaggaataagttggtaaggcgcaaggccaacaaaaacaaggaaattgatgaagtaatcctaaagcggaagcatggctccggacattagatgggtatggctctaggctccaaaacccccgtagttgtgattgggcgtctcttcgtcccgaggtaagcgatgaaagagcccagacgcggacggcttaatgccagctacggtcaccatcttctctaactaatgagcacagatcaaggtggagtggagttcgtccgcttcccagccattagaacggcaagtgtagttctgctcggcaactgggccattcatgacctcctccaaggtggccaaagaagtcaccccttcttagaagacttggatcctgacgcaggagtagacattttttgttctgaaaaaagaaagaatccagcagttagaccccaaac

SEQ ID NO: 249508 - DNA, 549 bp, Cannabis indica
tctaaataaagtattgattttggttttaatgattatgaacaatgatgtttaatgtatggatagttcataatctatgtgaattatgtgaatgtttaacaattttttcacatctttgtgtttcactcatatctttagaaaagagggtttttattttgtagagaagagtgtgctcatctctttcactgtgcttatgtatatttttgtattgtcttgagtctgtaatcaagtctataaaagaagaagaacaatagtgttaccatcgggagaaggttctacaagctttcgggtaaggctgtacataaatttttataaaccgaccaatccgaataacctgcccaaattaaatcaagataactcaacgaaaaaatacaaaccgaaaaactcgacaaaaatataacccttccaatctaaaaatctttatattgggcgttaaaattattaccaatccgcctaatcaatcagaactgattcgaccaactagattaggagggttttttttatatagatttatatgtttttattatatatatttatatattatatatttta

SEQ ID NO: 249509 - DNA, 1100 bp, Cannabis indica
atgtacataattaataaaaaaaaagtagtgaatatttaaataagctacaatgatttacgctatttagagggctaatgttaacctaaattttttcaacctaatgtggcatatccacgtaagccaaagacagagtacaggtggaatacatccttcccagtagcaagacaggctctccatacaaggtatggcaaaattatcaagcagcaactgaaagaagtggaacgagccatcaaggggctgtaccaacatgactggccggccaagaggagcctataggccggccagggtgaacatataggccggccaagatctgggcacaagttggcctgccaaaaaggtgacttccgggccatgggaacttttgttcgaccaagggaacctggcctctacaagagaacagtgtacaaagttattctccacttgcaaaaggctggcctctacatccaaagactagtctcctcttggtaaattcatagtaacctgcaggatcgtggcaggcacatgacctaccaggtcatggctggaccatggctggccaggattgacttagcaggaccatggccgaccagacgtacctcccttgtaggtctatcaacccggcaggactctatgtacaacctaaaacgtaaacagcaagctacctgtgaattgggcccttaacagcccaacaaactaatggaaaatatctacttttgaggggtaatttagtcttttatatttaattaatttaatgtgtaaatatctaagggtttcattgtaaattagggttttaggcttcctatataaaggccttaactctaacttagaaaacccaagttactaaaccttaacctagcctccaaatcactctaagtccgaaaacttattctcctctctctctctcttgtacatgcccaatagggctctctctcttctcacttcatctctcacatgcctctaaggcttttcatctctctcattagagatctttctacttgatccatgttttgtatccttatagagagctatatcagatcccagctatagtgatcatcttaatagtatagtattatctctaagggggccaaacttctataaaaatccttgtctcatttgctact

SEQ ID NO: 249510 - DNA, 537 bp, Cannabis indica
ttttacaagacggaacttaattagaaatttgaacgatcttagaagaagaagtggacttagagctcaacatggaaatttcaaatctcgttcttagatttttaaaacatcttgaattgtctaattttgagcaatatcgagagagttatgaccaaaatactattagcagttgcagtaggaaatttctgaagaaaaaaaaatgataaaaagatagcttttcaaatagagttgcgattttttttttatgtttaaattttaaatatttttagtatcttttaagtaactttgttagcctatataaacacattatcattagtacttttaggaggtttttagagctaaaaaaatttagaaactcttaattagcagagaattctaaagctacaaattagagagaaaaactcatagagagagcaagaaagagacagagatcagattcgaagtgtttttctattctagttcttttcttcttccttctatgattttagttataatgtctagttctgagtagtttccttttagttaaggattatttcaaaa

SEQ ID NO: 249511 - DNA, 940 bp, Cannabis indica
aaaaaataattataaatatgtaaaaaaaattaaaaaatcagaaatcttttttaacttttttttctttttcttcttcttcttctttctttttttttttgtcagaaaccttcccaccctcgaattcgaatcagttcgctaaagaatcgagctccaatttcaagcaataaaattgggataacccaattttgacgaaaaattgcagtttgatattatctaatctgataaagcataagcacaaatgggtctttaacaagcccgttgatgccctagccgaggggctgcactattaccacgacataatcaaacgctcgatggatctggtaccgttaaatcgaacctcgccaagaacctctacacatcgccagtagattttgcatctgatgtgagggtaacgtttcacaacgccatgacttataatcccaaagggcacgacatttacaccatggctgaacagcttctggctaggtttaaggagttgtatcagcctttgaaagagcaattggaagaagggcctgcacccgaacgaccttacgaagatgaattacaggcgagttcttgggatcatgtggagctcgagaggcctaaacgtgaagagccttcgttcagagcagagaagaaataagaacccgaacgggttcccgctccggcgagctcgtcaaacccgactcctcctcctcctatcccgcctccttccgttcaatcaccagtccgtacaccttcccctatgaaggcacctccagtcaagcctttgaagcagccgaagtcgaaggcaaaggatcctaacaagagggagatgaacatgaaagagaacacagattgggagttgggttgcagagtttgccacaggagaagatggagcaagttgttcagatcattaagaagagaaatgggcatttgaaacaagatggtgatgagatagaagagagagagagagagagag

SEQ ID NO: 249512 - DNA, 1016 bp, Cannabis indica
agtaacttgtagtcaatttagtttgtatactaaattttaataagtgatcaaaatatgttttattttgccatcttgaaatacgatgattactatttttgagtccaatcaaagagcattgtggaaaaaaagagtggtttgtttttaacaccgacggctgaattttttgtatttataaatgttaaaagcgtttacaaatattttttattattaatgcaatttaaaattaaattatacctttttaatttaatattattacacagaggtgctagatactttaatatcacatagcaatatttatttttttctttttttttctttactttggtctctctttcttttttctctctcttctctctaaatttaaaaaataatttttggtcacgtcgttactccattgaatctaaaaaaaaaaatattgtaatgtacttttcaatatgaatatttcaagatgtattaagcatatgttttttttttttttctatttccaaaatttaaaaaacagtttggttacttatgataccaactagttagcattctataatttttttagggagtctgttggaaattatttgttctaaccaacacactttaagaagcaaaattaatattatatgcaaattggtatttttctaaaatttattattttatgtgttcataaaataatagtgtcaattttataaactaatacaattttgcaatctttgttgttatttctgatgttgttctctgttgttgtatctctctggctgtgactctttattttgctctgtatattattgcttgttgtatctgagaaaagcacctccttttatatactgttctatgatctgatctagggcagagccctagtgatatttttaactgtttttataactgcttcagttgtaactgtctttgtaactgtctttatgttctttagtcttgatatttgttgtatctgatgtaagggtatatttgtcaaaccctatgagtggtgttattcaacttaagggtaaataagtgaatctgtaacaaca

SEQ ID NO: 249513 - DNA, 708 bp, Cannabis indica
gaacctgaaaacaaagtgcagtctaacagatataaagggagaaaggaaagaaaaatacagaataaagatgaattacatggaaacatggcgcactaaagagcgagcacaaagccagctacatggaaacgctaaagaattgtacagtctcttgccaagattcctgtacatactacagaaaacaaatccaggtaaataaaatattttttttttcaaatatatttgctgaactaaaaacgttgtttttgcgttgctaaatggttgagtaacagttgctaataaagactgtttttggaccgccacgtcaccgcctcatacttctcctttatatatatatatagatatatagatatgtgcaatattttaaaaactattttattttgagcctattttatttcatattgtttggaattctcatttatatatttatttacatatgaattaatattttttaatttttatttgtttttttatcttttgcttcgagtagtatatatttgattaagattttttttatttgatatattgtacaaaacataacacttatcattgaagcaattttcatcaactaattctatttcaatttgtatttgtattttaaatgatgtattcatgtttttaatttttgagatttcaacaattgaagcatttaattttggggcttatcctatatactattttttaacttttttttttttttttcttttttat

SEQ ID NO: 249514 - DNA, 1101 bp, Cannabis indica
gggacctacaattattgctctatgttcctaggagtagctctgacctaagtttgggagaatgaatatttcctagtgagggaatttctctcttaattgtgatgcttctgtgatagctggaagagattttgctaatgtgattctgtgggaagtgttgactacgtgtttcaggggatgtttcataattaaagtagctaagctcttaatttcgagaaggatactccaatatgctaattttatgggatataatttagagagaattgattatgatgctttagtagtgatttcttggattttaaataaaatggccagtattgtttttagtaatgttatttctaatgttttatctttaataaatactgtcaatggtggcactagttatgatatctcgcgtaatgtactagcacatacactatttaactatattacaagtctgttaggagagagcactcccataagtttctctactctattttcttaaataatacaaaaatcttttaggctatttttagcctaagttttgggtcgatgtttagagtcatttttagtctttgttaatacttttaggacagaattatgcttttttctgtgtttttaagttcctgtggttttgaaatgtcaattgcatcaagtttcaaaaggaccgaggcgggacgaatgaaaaaaaaagtacatcaacataagaaatattgcatcttgttgcggagaccatgacttatggttgcggcaagaatgaggtagggagatgttatttcaagtgtatacaatggtcgcggcgaggaagcttagggccgcgacaaggtcttcatcactgcagcgaccatgccttatggccgcagggagaagactggcaaaaagaccctattttcactttgtgaagtcaccgcagtgaggccattagtggtcgtagcgacaaagtccatacggacataaggggcggttttgtatctttgatatttttagttgcaaagtagttctatttaaggggattttgaattttgaaagcaaggcatttagatatggaaccctagaagcaaaaaggaagacgattagaggaagtgtggcaacccagataaattctaccactagtttctttcttctcct

SEQ ID NO: 249515 - DNA, 625 bp, Cannabis indica
tatggcattaaattactgaaatagtattaatggcatttactatttgcaatttctttcttgtatgctttgggtgtgatgtgatgaaataagcatcatatgatctgatatccgtaacagtggtagagaaaaggacagttgatattggatctgaatgttttccccaatgttgcaattacatgtacatcaaaaaatgatatgctatcctttgtcctgaatttccaactggaagaaaaagtgtggaatagattgtctataccaaagcatcattttatcttatggcttgtggcattagataggttgagattcaagtcaagattgtttaaatacaatatatgtccaattgaggtgttgaatggaattaaacaatattgcaatggctttctaaagctaaaaccaataggtttaggcgccaagttttctcagcaacacttgtggcaacaatatattacatatggtggtgtaagaattaagttctttggaatatgaaaatttattaattgatgtaattgtaaaaataatcaaatatgatgtaaagagtagaattaaaaaataaaatattgtaccaaagaaagtggcaaaattggatttagtataatttgagcaattgtaaaagtagcagacctat

SEQ ID NO: 249516 - DNA, 505 bp, Cannabis indica
ccatgccctttacagatgataccaaagtggaaccccttcagcttgattatctcaaagtcaatatagatgccactattaattctttgggcaaatgtagtagcttgggtatatggtgattcgtaatcacctggaagttgtagcgtctgtaagctggtatgtggatggctgctttcctcctgaagttgctgaagctttggctatttgcaaggcactgggatccaattaatgcatctctcttggataaggaaacattattgctgagtctgattgcttgaatattgtgcttaaattaaaaaacaatgcttctattatcacctctttgggtcttgttttagatgatgttgttgaccttggcaataggctctatatggttaattttgtgtattgtaatggagttgtatatgctttggccaaacttgttctaactaatgtaaaaagcatagtttggtgactagggaactttacttgtattcaaaacttattattaatagcgaatgctattttt

SEQ ID NO: 249517 - DNA, 429 bp, Cannabis indica
ggcaccggaaatgcaaacttatgaaaatcactaaatgacataaaatgcatttcagaattcaacaataacagcataataattatttaaatagctataaataattttcataattaaacattattaactgctaatttccaaattaaactaagcggtctttacaatttcccactcgactgaagtccaaccgttcaactcagcttcaccatcaaccaagtcgaactcatccctgtaccacccgaagccactacgaaccaagcctccattcgaccaacacacagcctgattatccatccccttaatcgcacaccagatctcatttccgttcagttcacaattcgtaatcaccaaccgaagtcacccacgccaccaacattgcattccgtttgtgataagtgaagagcagaggaagttaaattgccacagagagca

SEQ ID NO: 249518 - DNA, 583 bp, Cannabis indica
aaatttaaaactgcaaattgcacaccgcaccgcacggtttgaaaaattgcaaactacaaccgcatcgcaaaaaaatttaaaatgtattttttatgcggtgtagtctagtacgggcgatttgtacagtataagcaatttgacgaacatccttagccaattgggtcctaaatccttgagtttatataatagcacaaatctcttctctttaggtcattttttaaagtatcattttaagtctcacagcttattagttcctagttacctttcatccaattttactctctcgacttgaatattaagtggtcatttggcaatagatacttgatttattaaataaggtgagaataatcctctcttaataagccgattttgatcaattgaattaggctcaataactttcttaatatgtcgtgcgttcggatcttcctcccttgataatgtaaaaaaaatatataattgacatatgaataaaaagaaatattatccaaaaaaaaaatatgaactagaaaaaattacaacttttagtctcctaagcaaaataataccaggactagaaatgagataaaataagagagagagagag

SEQ ID NO: 249519 - DNA, 757 bp, Cannabis indica
atggcgtccggggacagaaaacaagcgacgaaaatcttcctggtcggcttttccggtggggagcatggcagatcggacggtgataagatcatctgtgagagacgtacagagaggcggttgatcaaaaggctgagattgaagagtatacgaggaagaagagagaggtgggataacagagaaaggttgagaaaacgaaaagacagaaggatttgttgtggtgagagagacagccacagacatggtgtgcataagattggtgagcctgaaaacagtgctacacttctggccattcttgaagctgagctccacctctttcacatctggcttcactaacctatccatggttaaagggagactcgtcaacccaaatcaaatccttccctttctttctttttcagggaaaagattatgagagaaagattgatgtggtgatgggcgtggtgagttgatcttttccttcccttttagtacatcatttttttaatcctaccaacgatttaattatgtgtataaatctgatgagaagttgttgttttaggcacaagctagctagtgactatgactgtgacattcttctggggactttgacgatgaaagagtcgttagttgttggcttgttttttaataatctattctattattcttaattgttagttttttttcccttcaaaaaaagaaaagggtgatttatttttaccgccgaaggctttaaatggccaaaagatcaattcaactgaagcacctttgactcctctgg

SEQ ID NO: 249520 - DNA, 1059 bp, Cannabis indica
gctcttcctccggcgcctgaccatatggtgaccctggggaggtcttcttctagcgttcctttaggccaactcatcttgatcgacaaagacggggaggtcgaggaggaggaggaggaagagggtgagatcctggctcccttggatcgaaaatgcaagggcaaaatggtggaggcggagtcttccaaaaagcctaggaaggtgaatacttcggccgtcagctctgattcaaggattccacccgaagcggaggaatacactgtgcctcccagcatcgtccttagccccgttcccgcaaatgaagagagacagcagctccggatcgccaagcacaattatgctatggctgagtataccaaggggaacgccgaggtggagggtttgaagaaggtcttacgagaggcccagcaaaattccttgcgtgaggaggcctttaggaacgcttgggaactgaatatggaccccctgacggactgtttcccttcgcctctgagttgacgagccactttgtctccaacctgacctaactcccggccaaaagatatgctgttgtgcttccacgaactccatctatcagattcaggatatcagcgctgttatgactgcggtaagtctctgttaatgttcttgggctttactttgtggcacccaatctcccatacttactctttttttcttgtattgtcagattgctgcggagaccggtcgcctctcaaagactttaatcgaccatgggtacgtcatgtccgagtttgggggcatggacgaggccatgaggagtctaagagacttggtggctgagaggaaggcgttctcggaggaggcccaatagaaggagggtagagcggaggcatcaagaggcgctgaaggccaaggaagaggagttgaaggcctgggatgaggtcgtggcgaaggcgaggcgcgagcttagggattccaaggagacagtggaagacctgactgccaagctgaagtccttggaggagctgcaccaggctgacttgcagacgactgccgacctaaccattgaggtgaaggggcttcgtgacttcaaggctcagg

SEQ ID NO: 249521 - DNA, 629 bp, Cannabis indica
acactactataatattgggcattccattcccggccgactgtcaaaacgtccattaatttcaagaactgaaatggactgactactacaaatggattaatttcgaggactcgtaatataacgtcggtttaaaacaaacagtaggctttactagcttttggtataagggttcaaaataatttcattaaagaaaatattatgaaggagagaatatgattttcttaaatttgttactgtgtttggttatatatgattatttttatttagattatttgtttggtcgagcacaaaaattttatatacggttttaaaatagtaaaataaaataaaataattattattattatatatcttttaagttaattataaataaaataaaattattatttgtaaaaaaatatatttattagttaataaatttaattttattgtatttgtgattaactaaaatgaataactgttcacatctatatttttctatacaatattatattttatatttatttatgtaaaattattatagtgtgaataagcataaagaattgtcatataattttttttataaacgtcatattttcctttaaaattgaagaatcttaatattttgttttattttaaattttattatttaa

SEQ ID NO: 249522 - DNA, 1024 bp, Cannabis indica
gagagagagaggttgtgggtcgaacaaaccgagtggtcagaaagtgagatttcaggttttatgagtttgagagttttctgggctgctctagattatttctttgagttttatttcatccaagaaaagttttagatgtgattagaaggtttgtaatcgcacctttcgattgacaccattgtttacgttcaaaaataccgttcttgaaacagacccggatttgaatgtgtttaagttgtttcagagataaaaggaggttgtgtttaagtttatgggaccccaaagattatttttaacatgaagaatcagagctttacggtctgaaacaaaattcgccatttttgtttccattaacaacgatacatcggagttagagaagacaacttcgatctgatgctttggggttattatattgggtagttcttgatagttttgaggtccaaagcactgtagaaagctttcccaatcgaaaagacgggtcaagagaaatcggggacaaagttaaactttgtcggcgacgaaaccgacgtgaacgccggtgatcgcattttaggcagttttgaggtttttactcacgtatttttacagattcaattccttattttattctaaggtgtttaataaagtttgataattttctaaatttatttagaattattgtaaattatttagtttatttgttaaattaattagaaaaatacttagattactcagaaaaatctaactttattttatatgattagttatgagacataaaatgttacaatattactagatttgaatttcaatcaattttatatttttcatgaattatttgtcttatttcttaatttaattatgaaaaatacctaggttgctcagattcaaagtaaatcatttagggcttggtacagactataaaatgtattagaatgattagatttggttttcgatcattttttgtatttttcatgaatctacttagttaatacttaaaataattatgaaaaatagtttagtgatgctaaaatagaaaaatatatttttg

SEQ ID NO: 249523 - DNA, 682 bp, Cannabis indica
gatgagttgggtgcctcaaaacaaagacatgtggtagataaataagttatctttgaatatgtgtgtaaaaaaggtgcgtacacatatgtttgttttagtaatactactgtatatgtcgttttaagctccttttcttttataaatttgcttatataaaaacctataactaatggcagtatactgccaaataaatataaacacagtaaaaacgtaaatttgggcgtgtcacagtatttttgtaatacatggggaaaaattagtacatcatgtaaattttccttacactataactcaaatttttaatttttttacgacggaatttttttaaaaaatagagtataagtttcatattgtgtactttgttaagtttttaccgttgttttacggttgttttttagttattctaatattatttttaattgttcctttttattgttttacagtatgtagtactcactactatggtcccctaactctcacacaaaactcaaaccggaagaatttaaccttaaattaaataattgttattcattgaataagctcaatactaattgggcctaaataaactatatattttatcttttcaaaaattaaaaattcaaactaatttaaaatatctaggtttatttgaattatttttatcaaattaaattaaatatctaataagataaatgatttaaaa

SEQ ID NO: 249524 - DNA, 879 bp, Cannabis indica
tgaatgcacgaacacagtgctataggctgttgagagttctgcgtgagcgtttatgatatcaatagtagacaaatatgcagcaagatctaaacccttcctttgcacattttaattgaacgacgatgtcattgggggtgaccttttatttatttagatattactgtctgacctcaacctattgcagtttaaaggtatgccagggttcctatgatgctagtatgatcaaagcgtgggaagagtgggatgaaaataatggttcagaaaatgatcatccgaatgaatttcctgataaacaggtttgttttacttgctgttgaatttttgttatcttttgaatctattttgacatctctaccataccaagtgtgcatattgatatttttatgtatatttatataatgagaattgaatttcatcctctatttaaggattgctacaagtttatgaggtgaatatggtctttagttgttttatacaactggtgatgttgtatgcagcgctatgtcatgtttgtcctagaacatggtggtaaggatcttgagagctttgtacttctaaacttcaacgaggctttgtctttcctggttcaggtaagttgcagtcatgtataatatcaatccatatttcctgcgaccaaaaatctttaacttgttattatgtaattattttgttgtgctttccaggttacagcagcccttgcagtggcagaagctgcatatgaatttgaacaccgggatctgcactggtacaatttattgcaaaaatgtggttttgatcgattgattgtgggagggtattttgtggctttaacgaaatttgtctgtttgcaggggaaatgtccttttgagtggaatgagtctgcaactgtgcagttcattc

SEQ ID NO: 249525 - DNA, 1745 bp, Cannabis indica
atctcttccgcaactcttcctctaacgacgacgacgacccttcagttactctcttcgacagctggtactctctttcattctttgcaaagttggagagaaaagggtattggccgagagaactattgagactttgaagaaccatagtgaggcagagagaagacgcagggcaaaaaaggttcgcgtttttcctatggtttctggtttgattttctatgcagcttatttgtgacattgtttttgtagtttttttttttaaaaaaaaaattcaatgcatcaaaactggctccctcgttttttttaacggaaactagatgctattaatttagaatttttatgtatatgtcattaaattttttgggttttcattttggggttttgtttgtttgaagtattttactataaagattctaagattgttataagggtattgggaggaagcctgatgatgctgccaatgtcatggcctctgtcgatattcaccaatatcattctcctcccaacataagaatatgtattatctttattattgttgttgttgtatcacttttatacatttttattcaattgtactagggatagatcacatgctttgtatatacttcaaatgtttgacattgaaaaatagaattgggagtttgatttaaaaataattatttttcaaaaaacaatcttattgtttattttttttttggtggaaataattatagagaataaatacattaatattttatttgaataagaggttaagagagtgagagaatgtggaaatgagaagtttgaaataagagaaaattcttaagataaagtggttaaggaaggatgcttttctttattgtggacattgttataaggatatatatacttttatttttgtgaaatgatatattttgtatgttttaaatttataaaattttatcctaaattttgatccttgatctgtctctttttgggtgcacatgcatactcatcactttaaaccaaaagccatatgcaaaaaccatatgcaagagtaagaaagaagacaattaatcaaaagcggaagctacaacaaatatgttttcaaataagaaaagaaaaaaaaagttattacatgtgaatatatagaaaccaaaccatccctcctacaccaaaaacccaaatcaaacttatttaaaaaaacaaaaaaaacaaagatgtaaatgtagttatagctctcactcacttaagtgtattagacatttagtttttgcttattaattttttaaactgaaatgatcacttcatcaattaatggcttctttctctttatcacttttttctgtttattccaaagcagaggatacatcaataggaagcataggcactctgctgtgttgctcagtggtatcatcatcatttttagtcccaaatgttgtcgtttgatctacatgtaaaatacaaaaaactaatgttctgcaaccaccattaccactacactgctactacagccaaccttacaaacaattgctactgccactaaagttttgtattgtaccctatattttatttctagccaaaaatcatacaaacaaagttctcatgattttgaaaattaagctctttaatctttaggcttgaggcgtgctctttatctatgcatatttaattgtattatatacataggttgttggttttagacagagtggagtcaaagttattattggaattctgttttattaaatgcaatagttatgctaatattcgcagtggctctctcaaagtctcac

SEQ ID NO: 249526 - DNA, 1912 bp, Cannabis indica
acccgtttttatttcgtgttaagtcgtgttgactcatttttgactctgtctaattttgctgacactaacctgtaaaaatcgtgtgcgtgttgcgtcgaaacccgttttgccactcctaagtattagagaccttaggtgccaaattctagagggtgtgttcaaagatgtgtcccaagtgcgccaaagtgtaaagtgttccaaaaaaaagagggttgtgtgaaaatatttaagagaattagtaaaatatgagtgggagcttgaagtgttcggcggtcaagtaattttctttttaaggttttttacatgtgttgtgatgttcaacattttggtccattaattcaggcattagccctttggatttggttattaatgtagtcaacacttttaaaaaaagtcatattggcctagctagaaagttttgttaattcaaaccataaattggattgagttttgaagtagtaataaaatcaattagtagttcaacaaaggtgacattaaaggttgttagaatccataaacactagtgatttgaagtgaacatattttatctcatattagtgttgattattgtagtttaattaatgtgccaaactcaggacctcaagagcacattaaaaaagttaccaatgatcaattttcaaagagttcaataaaattgaaaggctgcaataagtttccaaatgagatattacaagatcaatcaccatccaaggctcatcatgatctccatgaaaagggtattccaaaaaaccgatctttactctacaaggagacggtggcgacacaaacaatgtacgaaaataatcttcgatcgccctcgatttcagctggtaactctctctttagcactattccatgtttttttcaccattataatccaacattatcatcaataacatattgttatttgttatagataaaacaactcataaccaaaagcaaaaaggtgcaactttaaatggtaatttttgagcaattaaatttattgaaaatttggtcactatatattattatgctctttacaagtatatgaagttgttaatttttatttgttatggcacagaaaagggcaagcttggctcaaggataaggaaggaaattcagtaattaggtattaattaaatgttttttttttggtgttaatattgtaaaaaatctaaggccaatatctttttttgaatttccttgtgtttgatgggcctcaaatctttacttgttgataaggtttgattttacaaactaaaatcatataatatgtaatgtataatgaaaattattaattgtacttgtctgaatctctgcaagaattatgtcaatattattaaccagttctcccaaaagtaatggctaaaatttgacacaatatatagggtcagttttcttcttataataattattgtacatgttatatattcttatcttacaataataatcaagtagtctcatcactcttttcattatatatgattcttatcatgaataatctgatgcagtagtacatatagcacatgaagttttttttggactgatcgatttgaaactcagtctaaaattatctcaaaaataagtttaatatttgacaagaaaaaaagtgcccttaaaaaaagtagaaataaattgatcaacaataccaaaaatagataaattgaaactaccacttattttatgaaattattttcaatttttttaaaaaagttaacaattttaaaaaggctaattaagtttttttaaccttgaattttgatatattaaagtttaataataatagtttttctggataaaaaaaacataatttttatttgctttagcttggaatttagaccttgtattattgaaaataataaaaataaggtaatttttgataattttttttaatataactaaaatgaagataatcattagcacgaagtat

SEQ ID NO: 249527 - DNA, 509 bp, Cannabis indica
aacataaaatgttatttctgatctttattaataagtaaatctgattataaaaatgagttttatttagggcataaaacctagctaacaagcactccttgtgcatcaaagacttgtggatgcgaacatggtgactagtcctaaggaagaagaagatgtcaagacagtttctcaagagactgaggtgaaagcacatagtgttattctttcgagtctatgagatgaattccttaaagaagtttttgatgaagaatctgccctaggattatggaacaagcttggatcaatttacatgaagaaatcattggccaataagttctacttgaagaaaaaactttacacaatgaagatggatgaaaaaaaagatcttcaaaagcatctagatgatttttgtaagttaattatggacctgaatatatgggtcagaattgaagagatcaagaagattcacacctagaattcaactgatatgttcacgaagagtgtagtaagagaaaagtttaggcattgcc

SEQ ID NO: 249528 - DNA, 1274 bp, Cannabis indica
gtaggtataaatattttttttatcataaataagctcccacacagtaaaaattctgggcccgtcactgattattggtacaatagtattgagtctcaatcctgattaagacgtcatctcatattggtaataagcaccaatagtaccaaaataacaatgttctatttgtaacattatataagtgttccatgttgtacgattaaaaaaactaaaatataattgttattgagcattatgtgtttactacaatatatacaaaatacacctcatagtattaaactatttagatcccatatttgcattagtaatgtcctttagcatattcgaaaagcttaactcttagatttataataaaatatacataaacagcagatttagaagttgatcacctcgaaacacaattgttaattttatttatttaattaattttcttttatataaaaaaatagtagtcattttatattttatagtttgcatgagtttttattattaattcaagttctctattcactatacgtaccgtagcgagtgggagaagacaaaaaatcgatctcatcaacacagcgaaaaacaaatcattcttccgttggggattcggtataatgtctccatcccaaatatattaaataaaaataaaactcacaaaaatttatttattcatttatttattgaaactaataaaaaattagtcgaaaaggcaagaagaaaggtggtgtgtggggctggggtttgagggagagagagagagagagagaagctcattaccggagagagaattttgatttgagaatatgaaaaaacaaagctccttaaatccacttgacctctcccaacttccaccttccccttcctctccctttgctccgaaactcttcatgtacttgtttaagctcttgaagacacctcgtttcggtgtggatgggcggcgccgccggccaagtcaactctcccccaccaccagacgacgccgctctggcggaggataataataataataataatatcattaatataactactaataataatgctcataatgacgttaataattcaactgcttcatcttcttcttcttccaactcattgttactagtgccactcgcgcacgcgccgattcttcttctagtttacttccacaaggcttttcgttctgaggttgccgatctccaacgcgtggtgtcgggcgcgttggagcaaggtgtgatccacagggggcggtgtgggttggtggcggagctgttgaggcggttcgagttccttaagttggcgtgtaagta

SEQ ID NO: 249529 - DNA, 664 bp, Cannabis indica
gagatcgattctctataatgcgacctacggaatcaatgtaccactatactcctgtgaatcaatgtacaaacagatttacaatgaatacaatcctcgtgtaattaactgaaaacttgctttgtatataaaggagtgatctaccacgaaatgagacctacggaactcttgcaacagtggactaagcagaccgtgatctgactgaaccactataatcctttgtcttcttgttatttctagttttttgctaagtacttacattcccatctcgagtactcgccgttttaggttgaatactcgcatttgttcttcatataatttcttcttattattaatattattatttattttggtgtcgcgaattttgctcgacaacatttggcgtcgtctctgggaattcgagaagtacgttcttactaaatacaagaagggaatcatcagggctggaaactaagcaaacgaaggtgttaacaacgaatccatcaacatcggaatgatgaacgttccattgtctggggttagaacaccacctgtagatgtcatcaatggcagagtaggtcgaggtaatgtcagaccccttaacctattccctgaaactgctggcccacaagtcggagagacatccacgccagcagcaacaatggggcactttccacccatcactccg

SEQ ID NO: 249530 - DNA, 1112 bp, Cannabis indica
tactttatcaaagacacctataatgcatggtgactgattttatttttatgggtcttttaaaaaatttcttaatattttaataagaacaattcattgtgtgatactataagttatttacaaatttttaaaagttcatataatattccaataataataatatacactatcatataataaaagaaaaaattatacttactatgggattttaagataatgatttacttaaatataacacttttaaatttgactaatttatatgatatttttctgttttagatatttttatggtatttgatatgccatatatatgtaaattaggttttcaaagctcgtatttaatatttttatttatttagacagttttatttgtcattggtgccggaaaagttaccgaagtttactgtcagcgtcgaaaaaattgtcggagtagttgcaggtgtcggaaaagttaccggagttgctgccggcgctaaaaaagtcgtcggaattggcattgtcgccgaaaaaatcaccggaaaaattctaaaaaaaaaaaatcaccgaacgatttttccagtgcttgccgcagctccgacaatgcaaattctagcaacaatgccaattctaacaatttttccagtgctggcagcaactccgacaatttttctgacaccgacagctacttcgacgatgaaaaaaaagaatgctaatctaaaacctatacaatctattaatcaataaaataaaaagaaaaatagagattctcattccaactactgatatttttattgtaaattcttgagtgatccaatcactttgtcataataataataataataataataatacatgcaaaattgataaaaaaaaatagacttgatcaaaaaaatctctaaaattcattaatgaataaaagaaaaggaaattcccctcacccccaaaaaaaaataatataaaaggaaaaaagaaaagagaacacactagtatacatatatatatatatatattaatttacttcactcaatttattaaagcccaattcacaaaagccctcgctcaatatcttaatcatgattaatgagcctacacttattctaatcaagcccattttaaaagtagcccaatacaaataa

SEQ ID NO: 249531 - DNA, 1176 bp, Cannabis indica
ggttctagttcagtgtgtacaaaattttctaatcatcctcttatcttgcaagatattcttcatgtgcctagtgtcaccaaaaacctacttagcatttcccaattcactaaacataatcatgtcactcttgaatttgatgaattttcttgtgtcataaaggacaagaccaccaagaaacctcttctgcagggccatctcagtaatggattgtacaagcttgaagttcaagccttagatccaccccagccacaagcactcaatcataccaccacttccaacccagtctttgacaagtctcaacttgccaatatttggcactctagacttggacatccatctcaacctatactcaataaagttttacaaaaaaattgttcctcatgtaaagtgcaagacacctgatttttgtaatgcctgtcaaattggtaaattgcaccaattcagctttaaaagcactcctaataaaactgttcagcctttcgaattaattcttactgatgtttggggcccttctttctatacttcagctgatggtttcaaatattacataagttttcttgatgattttactaaattcacttggctttttccaatgaaatccaaatctgaagctagtaccctattctgtcaatttaattcctttgttgaaaggcaatttcaaactaaaataaaggctgtccaatgtgatcttggaaaagaatttgaacccttgtacaaactctttaaaaacctaggcattgttcaaaggaattcttgtcctcacactcatcaacaacaaggtcgagtagagagaaaacatcgacatgttgttgatataggcttaacattgctgtcccaagccacaatgcccttatccttttggtgggaagcatttgtttctgcagcctatctcataaataggctcccaacaccaatcttgaattttcaaacaccctatgaaaaattatttcatcactcacccgattataatttgcttaaggtttttggttgttcatgtttccctctccttacaccctatgcatctcataaagttgcttttcgatcttctaaatgcatattcataggatacagccccaattttagaggatatagatgtttacatccttcaggaagaatctatgtggctaggagtgtgacctttaatgaacaagaatttccctacaatgagttatttcc

SEQ ID NO: 249532 - DNA, 1332 bp, Cannabis indica
agcgacaagtagtataatgtgtatgtaatataataaagtaaataaagacacgagaattttatagaggttcagccccgagcagttcggtaatagccgaatcctcttggtttgtattgacttaagaacaaggaaaataatcccttttcttagagctcttacaatagtatctctgaatatgaattcttagataagtttttccaccttttgcccagtgagtatgaatcactatttatagggctataagcttgggaaggaagaatttcccttctgattacaattgatataagtggaaagattgcatattagatacagagtacactaatcaagggattcggacagcttgccttgtctctgtgatcgaatcccaaaattatagggatttctttggggactcatgatgcaagaattgaatttgctaagtgttggcgtgctgttcggactgcttactacccggttaagaaggcttcgtccgagcggatatatgtggtgccttgttcggcatatctcttgcgagcatatacacaaaattgattccacatgtcacgatcgtgtgatgccacgtcagagtgcaaaaattgggataatatttgccccccaagtctgtacgggacttccgaagttgcgtgtagacttcatccgagctacccttgcatttgaatgggtgacacgtgttacgcgcgtctgttcgcaatttgatgtgaggctgaccagtgtctcttcagtttttggcttattaatgttctaactaaattaatgcctcgaaacccagttttctcttaccacgtttgatggttgcacttgattgtctttgattcccaatatttgctttgggggggaaccgatgcgtctaaggcatttgaaatgattaccctgtttttttttttcatttttttgcctataaatagggctgtgcacccttcacaaattcacttttaccaatttctccattaagcaaagtcagagcaaaaaagaggttttcacttcaagtctgtcgtgaggtttcttccaaaagcatccgagcagcttcatttggactgaactcagatgtcaaacagtgagtaagttttcaatctcgttctcttttactttgcatgtttaatttgtgagttccatacatgcgtttttgactttgctgtagaagataggtagaaaatctaggtttaaaactttgcgattttctttgtaataatctataacactttgcggttcatgacgttggcctttcgatcgcaattgtttgtctttcaccttgcttattcaaagcttcatgaaatttcgccctaaacccaaaaattttaaacttctgggttttgacttatttttgaatatttt

SEQ ID NO: 249533 - DNA, 683 bp, Cannabis indica
ttcaagttgcagagattacgattttagcacattgacaatatttccaaagtaaacaaattagacaaacttagggtaaaattacaaatcagggctatatataaatatatgtatacataataaatttagacgaatctaaccacaaaatcaagggtatcagggctatatataaatatatgtatacataataaattgactatatatgtatatatctggtgtgcatacataataaaataaatcagcgaaaaagaatcaattgaagttgatgcagagagagtagagtagtaataaatactaataatgtattcttaccaatttggtgttgggaggagtttgttcaataataatattgaaaatatggtgagcaggaaactctctctcaaccagggcaacatgactataagaatcagaagaagtcattgttgaacaattatttcgtttaattttgctgtgaaacaaatgattcaaacacaattaacgtaaacaaaaaagagggaaatatataaggaaaagtttcttgtgtatcaagtttgggaaactttcctttttaaagatatgtaaatcttataattccaagatttttaaccgtaaactttcgttttttttttttttggaaagttgtttttatagtttttaaaggtatagaaaaaaaagtataggtttacaaaaataagattttttttttt

SEQ ID NO: 249534 - DNA, 724 bp, Cannabis indica
tttttcaaccatctaataaggatgggtatgagaaggaaccaacttttcacatgcatgatcttgtacatgatttggcaatatttgtttctggtgagttttgttatatgatgaataatttcagtaaatgttctcacaaggttcgtcatttttcgtacgtacaagaatgtgcaaaagccaatgaccctaatgaaattgaggagttatttaaagttaagtgcttgcgcaccatattgtggcaacaagattcaagggttgatgcttgtctaaagctgttaaaaatggaggacttgcataagtcatttcgaggcttgagagtactatccatatatgatgatcagattacaaagcttcctgattcaataggaaaattgaaatatttaagatatttgaagttagattgtcaaaagattgaggagatacctaatacaatttgtaacttgtataatttggagacactattgttggagaaatgtaggaaaattactcaactaccaactgatgtaggaaatttaatcaagttgagacatcttagtgttcctatgtattcattagaagagatgccgctgcaattggggaagctacaaaatctgcaaacccttaataattttgttgttgggtacagaagagattctggtggcattaagttgttgaaagagtttcaagatctacacgggagtcttactattaaaggactagaaaatgttcgtatccttgaggaagtttc

SEQ ID NO: 249535 - DNA, 590 bp, Cannabis indica
ggcgtcgagccgggattggaggtctttaatagttgcaatagtacgatcgtcccaaataggggtggaccgggccgattccagctctttctcaagcttacagatttgctgtttgaagttgaagtcttttttgtgattccaattgttgagcttttcagcgcacaaggattgggtagcgatgaggttagggatggcttccatggaggtcgtggggtttgtccaagactggttaaaattctatcccaatttgggtcctgtagccacacgttctcgaaaagaaaccgcttactatggtccctcgaccgatatcccggagtggtggatgtgactaatttcaaggctctgtggtcagatccgaagaaacccaagtgggtaagagtggcatccgggaagatatccaaccaagaactgttgatgatcccccagtccaaccgctcttgaatatttttagggtgagccacatcgttgttccaggtgaggaagggccccactgggtcaagcggggaaagattaacagagtccaacaactgtctaaaatcagaagaagggcccttgtcagggttacccccatgtttgtcatgggaaaagagaaa

SEQ ID NO: 249536 - DNA, 1619 bp, Cannabis indica
agttctagcaatctcaataccaaaaaagtatctcaatttaccaaggtctttcaacttgaatctcttatttaggttctattttaagctcttgacagctgctacatcattactagccaatataacatcatcaacataaacaagaagtatgatgatgattgaaccttttctttgaatgaacaaagaatgatcagatgctgaatacttgaacccttcttcaactaaagctgtggaaaacctctcaaaccattgtctagaagcttgtttgagaccatatatagatttctttaacttgcaaacagcattaggtggcaactcccccttaggacgataccctggaggtagagtcataaaaacctcttcatgcaagtctccatggagaaacgcattgttgacatcaagttgatgtagacaccaaccatgaatggcagcgagagcaagaatgagcttgacagaaacaagcttagtaacaggagcaaaagtctcattatagtcaatcccttcttgttgactataacctttggcaacaagtcttgccttgaacctttcaatagaaccatcaacattgtactttattttgtaaacccatttgcaacctatagcatgttggcgagcaggtaaactaaccacaatccaagtcccattgccttcaagagcagcaatctcatgatctatagccctatcccaaaccggaatgcctttaccttggtaaaaatattatggctcaaaatgacttgaaatggcaagcacagtagcacgaaaccgaggagacaacctgctatagtcaatgattttggagagaggatgagatgtggaagcctttgacacctgagattgcacattgttagtggaaagaaaacaatgataatcttgaagataagagggcttctgaacctgcctagtggaccgagttgtaataacaggttcatttatagaaacaacatcaggttcaatgaaaggggattaagatgcgactggtgagttcataacatcagtggaaataggatcaacagtaggaaatgaagaaccgggaatcacagtttgttgatcattgcaatctgtagcagaatcggctacaggtgtagcatttttagctactggtgtagcaattttagctactggtgcaccagaaaaatcatgatgttgctgcttagatgcatcagtaggaaaaaaattgcaagaaatcagaggaaacacaaccatgttgcacaaaagggaaaatgtgttcatgaaaaataacatccctataatagaacattttatttgtgttaaggtctaatagtttgtaagctttcattcccatggcatatcccataaaaacacaaggaatggctctagaagcaaattttgtcctagcagcccctaaagtagaagcgtaagcaagacaaccaaaagctcgtaaatgttcatatctaggaggcttacctctaagaacttcaaaaggagatttatgtttgagattaggcgtaggagttctatttatgaggtaagcggctgtgctaatgcaatctccccaatatggtataggaatacaagattggaataacaaggctctagcaacatttaacaaatgctgatgtttcattccacaaccgaattttgttgtggtctttgcacacaag

SEQ ID NO: 249537 - DNA, 988 bp, Cannabis indica
tcaataatatcattaatattcattgaaaatacactaattaactttatttatatttatttaataccttataaatataatttttttttcatcaatgaatgacaaaaagtaattaaaaaatatagtacttattgagctaaaatttggctcatcttatttttgtgtaaaatttgacataatttttagcttgggtcaagttcgacacacattttatataattattggagttaaattttagcaaaatattctaaaaaaatagcaatacactatatttataactctatattggaaatactcttagttatttatttataaaaaagttaaacttaggtatttatgcgcaatttctctaatattaattacaaattaattaattgtaaaattattgatgattaaaaatgaaatcatataatgactatattccaccaattcaattgaacaattggaatataaaattaattcaagttgcatacttaactctataacatatttgacagttcaataattcaattattagcacacatttatttatttttcaaaaaatagaagaaattacatgtaatgtaacaccacaaaatgatagcaaagaagaacaagcaatacaaacaagtaatcaaagcacaaaaatgtaaaaacacaccaagatataatagaaattaaatttgttagaacattaataatgaggtatctttcaaaatttattatcatctaaaactaaaaagtttggttgtctaaacgtctaattaattaatttctaatgtgtttgtgttcatctcacatgctacataaacaagggacattatattattaatagtttgatcattagaatattactaaacataaaatttccacttttaatagtatatatataggattaaagccacaaattttgagttgtaagctatatacgattaaattaattaattaatacttcaattgtttttgtccgagtatgtaaatactgttagtagttaataagtgtacaagtggc

SEQ ID NO: 249538 - DNA, 683 bp, Cannabis indica
gtaattttttttggattatactcgagttggattgtttgggaactacagttcaatgttttgagatccgcctttcacagatctaaaaattgaagttaagagattagctttatgcaaattaaagtggatttttggttgaattttagttttatagtagttttctaaacttttttttatgaatttgaaacaatctctattttgattgattttggtcgtcttctcaggtgaagtagccggctttaatggtggttctctttctggttgaattttcgtttcgattgcgttgggttgctacgtggttgcgcaatggttgcgtgatagttacccacgaagcattgatcctaggttgaaggtttgtgtaagtggtatttgtgtattttttttttattttggctctatatttatttatttggccaactggaagtatttcggtaatattgtcactgtttttggttaaaactgaaaaagcccaatacaaaatatctctactacaagaaaacatggtatacagaattataaaaatgtaacgtccttgcttcaagcctccatttggtccttacacccacggaatcatggctcttatacacgagtacgccactctggctgcttcatggaataacgactgaccctacagaccaacacgagtgtttccagcgtccttgtcctcactcgcacgctcctgggaa

SEQ ID NO: 249539 - DNA, 1054 bp, Cannabis indica
gtggcaattgatgatagcctaagtcacactagccttcactaaaactttgagccttctatctctctcaaatttcgaatccttctctctctcttcaataatacgaacaacaaaaaggaaaaaagacatgcccacgcatagcaagttggtactcaatcataatgtgtaagactgtgaagaatccaatcaactgaaggagaatcgggctcagatcttggtgatactctgctacagaaaggatacaagggttagtgatctgagtagaaggagtcatttaattccgctacaactaatgtaaggtttcttgaactttatatgtgtttaaattccattattttaaaaattcatatttaggatgttgaataacatacatggtagtaaatctagatcctcgtaaaataatctccaacaatatcatggtcctatggccctgccgttaacgccagagagaactgcgagtgccactggagagagatagtgagaattggaagagagatcaagagtgaccgaaactagatttgtaaatgtttattctttttttaattattttattttttttatttatttatttatttaaagtctccatttataaaagtttaaaatatattatttatttagtaaaatactatatgaggtggactaattatatgttgacatgtgttaacattaatgagtccagtcaacacttaagaaaatgatagtgttatctcaaaaattactagggtgacgtggcatgagacaaaatgatacatggcataaaaatggaaagctggtcgatatatatcatatacaaaaggatggaagccggatggagtgattggaagatagggaagtgcaatgtactatgttagaattgttgaatcatctaggacaactctgttggtttatggtactaaatcaggtacgcagcggtgtaaaagttttatgattatcatcgtactatattcttagtataaccatatgtatatttaatgagaattagaaattcgagacgttgatagagaaaggaagcctagaatttttttaaagttaaaaataaatgaaagatttacctctt

SEQ ID NO: 249540 - DNA, 1147 bp, Cannabis indica
acttttctacttttaaaaatagaaaattgattcaaaaagtgttaccaaacgccacttaagttgtttggaattttgaagagatttgcgctaccaactcacgatcatcatactttgatgatttgaaaacataaacaagatcactcgactaaggtttttattttttataagctaccactcattttaataatcttatgaaccctttattttataatattgaaatattgtttcttgtcaggttcgatttattcttaaattgcttatgaatttgaaaaacttaaatttcttgtattcgttgcagtttattgattattggttgctcaatcaactttgaatttgtgttttgcttaatgaatgaatgaagtgagctagtgttttgtaaaaatagatgagtttttttattagctaaaaatagttagatattacacaagaaaatatacttaatatttaaaatgaaaagttttaagtaattacacccaattattatggaggcatgcaaattaggtccaattacgcaattacagtgtaattatgtggtcagacatattcgtaattgtgtaattatcttcaattcaaccaattctaatttcttcttggctttccaaatgcgttctaaaagttttatttgcaaaataaccatgtttggttacaaaagcaataaaaaattacactatggaaccataaaacaactattcaaatagtgtaaaataatgttgttagtttgctaattgaatattttgatgtaattgtgttggatgattgatttctttatttccacacaagaatttgacaagttaggtgaatgatttcttaatgtggttgattattcgaaacttaaatttcttgtcaatcaactttaaatttgtgtttgcttaatgaatggagtgagcaagtgtttaagtggtgaggtgagttaagtatttggtgatcatttttgttctgaatgattattgatttcttagtttccacacaagaatttgacaagttacaatgattgatgatcaataattgcttgtacatgcactaagtttctattctattaattgatgttgaactattatttatgtccataagttagaattatgttttgtttcttatgcttatgtgatacattattgttcccatttagctctcaaaaagaattagaaaa

SEQ ID NO: 249541 - DNA, 1132 bp, Cannabis indica
taagaaaatactaccaataagtgcacaaggttcgatgaccccacaagatgcacgatgctcgaacacttactcttaagtgggtggccttctgagtggacctcactcaaaggtttggaaaacaattggtactcaggtcagatgaccacttttaaagtacattatgttcacaaatcattactcttgaacaatgtcttttcgacagaatgtattgttcaattgctttatgttttaatagctaaaagatttgttagataatctaatagctttataattcaataaatttacgttactacagtaacaacatatatcaaccaataaatgaataaagattttaatcattcaaattgtgtctatctttgtacatttttgcaaaatatggcaagttatgtaattaccaaaaaatgcgtacaaagggtttgcctaaacctaatagccagacagacaaaattaaacttgtgaaatgcaagtgaccatgtgtcaaaattctactcggtaactttggggtaaactatacacctatacaggcattggtaaacaacaagctcgaagaaaaaaataacgaaaaacattttaacttaagagaaaatactaattttaagataacaaagtaggataagtccaggattaaaagctacccattcaacaaattttctaaacaaaatgaaatttttttccaagttcaaaagccgcttggtcgaccatattgtacttaacaataggcccgtaagtcgaactggtgagaaaagttagaaaaatttataatgcaggagttccaggctctttgtaagggtcgggcacatcttcaacaactagagcctcatcctcttggatggtggaagtgttgttgttagccatctcagtttcttccttggatttttttacctcataaaaactaagataatcatctttgttctccttgggataatcaaagtttgcctctagatatgccttccaaaactcatagaagatatccaaagcagctaattcaaagctctccaccaccttttgaagtgcctcccgtttaacattagaagttgtctgcttagagtcaagagtctcttgtaagatctttttctcctcagtgaaatcattaaatttggtttctaaatttgaagagaattcacttctttag

SEQ ID NO: 249542 - DNA, 3359 bp, Cannabis indica
aaattttaaatacacataacaaaaataaaaaataaaaatataaataagtatatgtgtattgcacgtaacaataacttaatatagatatatgtaaaatatctgttagatgccattattatttacatgtacaactaaattaatggcagcatcctaatacaaaaataatacttaattaccctcatagaaaatgtgaacgttcaacatttctagttcaacatgtgtcttggtcgaaaaagtgtccctgaacaatatgttgaattgaaagtgtcaagcactaggggaaatttcaaaacagcaaataaagcgattggaacaatggcaagcatagaaattaataaagggacccatttaatcccatgatcataagctaatacaaaggcaaaactaaaggctaccatcatggctatcattgagaaaaagagtgatgttagtccaataatcagcttcaagggtaaccgtttgagaaagtcatattctgtgtaacgagatatgaggattgacaagaacattaccattgcaactattgagttcaataatgcaattccatctgacaagacaaagattagaaatgaggtctttgcaagatcatttggagaccctttgtcattgttacctcctggtaaactgaatgctgctgcaaaaactacagtagcaattaaagttgccacaagcatgcatgattgagctgtatgtttcatccatgtctctccttctctcaacaatctcttatgctccaaacaaataactcttcggggtttttaacctttcttatttttggcctttcgtaagaaggttgcacaatcttcttcacctcctattttataaaataatataagacaatatatcatatgaataagttaatcaaaaaatatatgtacatcaattaaatatgtttattattttcctaacgcagtacagatatttctcacattatttttacatctaatgaattaggaaatgttataaataatgataaatttcccaagaaattttaaacgatttatggagaaaaaaaggaaatgtggtgtatgtggtaatcatgtgtgacatgtccaaagcatatgatcgcttggaatgactattcattgaaaaacatttgggctttgggattcagtatgggtttcataaggcttattatgttttgtatcaactttgttataagcttgcaaatccttttgaaaggagggcctactaaatcctttaggcttcggagaagaatccagcaaggatatcccctctcattatatattttcattctttgttcagaagttctttctcgactcatttattacaaggagagtataagagaaattataggggtcaaagcagatatgagaaatatcatggagtgtttggacaagtattgtcaatgtagccaaaaaatcaatatacacaagtaaaatgtgtttttctccagtaattttgattagagaactaaggacgaaatcttggattttctttagttttgtaggtcatatttttgtatagaaaattatgctgattgatattgtgttagttgcatgttctggactgtttctttcctagctatttaagttgatcatctaattcttttttagaggcatctttttagtctggcttcatttatcttttgtcatgccagcttttagttttttgtatttttattttttggttcagctcattgcaagctggattgagctgatgctttggttagttaagttggtgttactggagtgttattaaataagctgatctagctttttctaactaactctccaactttgatagaatcttctagtgattgttgctctgctaaggcaaaatacttttctgtattcttctttgttgtaggtgttgcagattgtaattcattggatcttcaaggattgaagaaggactgttgatctgcaatgtttgaagcgagtacaaatttatttgttggagggagttcagcttgatggaagcaaggagatcttgtcttcttagatctaaagggatatagatcttggtacatgcttgtaatcaagtgtatcagtaactcttgtataaaatcattttagtttatgttgttgatttgtaaattggaactagtgaatgtattttgaatgattttgtagtgaatggtactttatctggttcttggggacccaagcactactcggttggaatgtgttttcaatgttggaagaagcttgtaaattctttgattagtgatttatcattttagacttaattcgccagattcaaacctaaaatcaattactaagctttcaaattaactaggactttcaattggtatcaaagctaactttttcatgtaaagatattgtgatcctgtagataattgatatctgattagctttcaaatcaatgctgctttaattctattgtatttcatctttgtcaactttctcatttttttagaaaactaatccactctgagattcatcttgtagtgcaacatagtttctttttttgttgtgctcataataacaagaaatggaaatgttcaaagaaagaggatttacatctcatcctccaatattagaaggatccaattacccatactggaagactaaaataagagattctggaaagctatggatgaaagtgtgtggatggttgttaccaaaggttggtctccaccttcagtcattgatgaagatggggaaaagattaagaaatcctgttaatgatctacagaggagatggaattaacaaactttaattttagagctctacatgctctctgttgggatgaaactcacttaatctttcaaagacagtatgtccatgtattcactcatcagaacaatctcaagaaagctaatgttagttatgactgtaggctttaataccaacttaaagcgggtcccaccaacaactataaataggagtgtctctactcttttaagggaattatgatctctaatctctaaagctcatactttagatttctgattcaagtttagagagagagtccaggatcatggtgagtgtgtgtggaaggatgtaatgggagtatcactcttgaagtgatttctctcattataagatatttctttgtaatagttcattgtgttgagttgtatgcttaaacttatctcattttgtactacaggctattcaatcaataaagatctgtgattcactcattctcaagctaattttatccttgtctaaattaaattaagttctacttttgattttgtgattagtttttagctttgtttgtacattgttgaatattgttctgctataaaaataagttttaagggtgatcattcaccataaatggtatcagagctcagagtttagagttcaggaatcacattcaactaatcgagattcatcttcaacatttatggcatgtttactaa

SEQ ID NO: 249543 - DNA, 1749 bp, Cannabis indica
acacacttcatccgtgtaggacctccatggttgggaggttgcaaacaatgacctaagttctcatcttctgagcaatcatgtgtcggcacatcatctgccatatatgcatacaatggtagttacacatttcaatcacataaaatattatccaaattctattgaaatttcggtagcataacaactataaatcgaatgttcctgaaaaaaattaaccataaaatcaaaacatataacaatccacaacaataaaaattaaattccacccatgcgaccgcaatatatgtattcgcatgcagaacttacttcactacgaatgaatatttaagatattcaaactcctctaccatgattattaataattaattaaaaggtagaaatattatacctctatctcaacacttggaaaaaatcgtattctcccttcaatttagatccttgatgtttaaccacaaaacctacaaagaaatacaattaaacaaaatgttaaataataacattggccatgaatagataacatgattgcattttaagcacaaagcaactaactgtatataatgggaccatttagatgaaaaataaaagagatatataattcactttgtgaaccatggtacaataatcaattatagaaattttgcatgatttgaaaaatgaattttcatcatgtgagtgtaaataacaataaaagtagaatatagtaaagcacagccataaataaacattcaccagttaatatgattgaatagaacatagtctagaatcaacgaacaaaatagacatttcttttctttttttccattagtttttgagtttaatagtggaaccctgacatatggaagtgtaatacactaaggagcttaggaacaacacaacatgtgtacaagtactacataaattctataacatataaaagaaaaatgaatatgaaggctcttaggcctagactaatctagatatcaagatatgctaatgttatggtgttgattcactagaaagtaatttcattttcaactttgatttattgcaatgtacaaagtgagggtccccttatacggctggaaacacaatggtctatttttgggccaatggaatatgccattattcatcaatttttgcaacaaaattctaatggggtaaataaatgtgcagagtggggaaataattatctagttatgaatatcagaatttacatacgtgatagctaaaaaaaaattatcattttataatcaattcaatctatatattatacatggtcatccacttaggaaagagattatttatatcgatcatgtatattcatgaaccttaagcaaaatttccaatacacacaaaatatacattgactaaatcagaagctgaatactactcttaaacatttaaaattttatcactcccaataccattttaatttagaaaacaaaaaaacttacattggtttgaatacacagtcaatcttttcgaagattttccactgacagacatatataatacttcttcaattctttttttcagtaaaagacacaaacacaaacaaaaataaaatcagtagccgccgagataaataaacaatcaagtaataatgtcataagaaaacgaaaagaagattctcttttctgaaagcttcaaaccaaaaaaataaaaacaaaacctttaatacttaaaaataactaatagtcaacacttaaaaaatactaaaagaaatactctgtttacagttataattcaaagggtgtggaatttttttcaaga

SEQ ID NO: 249544 - DNA, 5796 bp, Cannabis indica
tcaatcaaagtgggggatatatgtaatatttgattgattaaataatgttacaataatgtgttacaagttttaatctagtgggggaatgttatattatatttgttataatatgagatagattaaaatcttaaaatgtgacatattatatattaatatgagatgaatgtatataatgtgattgagagttacatacatgtaatattcacataaattgtaacataagaagtagagttacttactttttgtaacctccacaattatcatcaatattaagtgtgtaaaaaagtgttacacatcttaatttaaaattcttaattctatatgagttatggtgtgtgcatgagttacatttgagtccataacatccatgggagttatgagtttgaatttcaaaatgtgtaatcttaaacactataaatagaggtctttagttcacttgtgaaaacacattttttgtgagtttctatcaaagagaagactttgctagaaactagaagcttgataaatccagaaagctatttctattattttcttttccctaagtgtttgtggtaggggaaaataagcttttggacaaaggtgtaagaccttgttcaagtttggtgattcccctattatacacttatagtgtatgtggtgttgagattgctctcacatctcttatatatatatactatttatatattgtgtttcacgtgtagcttattgctttgagttgtaattcttctctttgtctttatattctctattttatgtgtatattttatttcatgttgtagcattatttaatccataattttgttctttgtattatttgtcatagaattgtaatcttgttggtttgatatttctattggaacacaataatttataacagcgttacggtagtgaagatctatattttcgatcgattatatattttgatataatcaaaaacatagatccaaaatttttttctttatcttttttccttacttttatctttgtattttatattttgtaccataaaacaccgaagatatacaccatatttcttgcagtgattgtggaatacagagggtcaagttttaattctaaaaaatggaatcatccattaattattttgtatattcttaatttggatacataaatttgttgtgtatagatatatgtcaaataattattattaccattttttattatatacctctatgagtgtttgttttcttgatttttcgtaaactttctctcccacatctctacttcttttattgaatttgattttctcttgagaagagaatataaagatgaaggatcataagcaggaggaatgctacatggccaactcttcgctggagctttcaccatggattccatcatgaatttttttgtcaatcctattgctgagcaagccattgcctcggaacataattcagtagctttttcaggtatagtaggctgatattgcaagagctttgcatattcatttaaaatgtgtaacatgtagtcatacacatactccatctttagctcattttgaatgaattcacttgctgtctttcctattttttgagcctgatataaaccaaatacacaaaataaaacaaagttatagaattaaaatttctatcaattaataacattgaaagactcaaagagcatatataaatttattatttatttggaaaaaatattttatagattaataactttatatgtattaattagttaataaacaattaacagatttagtggttctgttagttaggtttgtttatgtattgttacttgtcagtagggcagttatatcggttaagttagttaatcattttctgtaatgtttatgggtcttttagttcagatggttgtactctgctttggcctatataaggcttgttctttattgtttttaattcattccaaataataaaaacatttctcttattacttctgcaatatggtaacagagcagggaagtcatgcttccctctgatcctaatcccttcttcctttccttgtcgtgttcttcttcttctccggtgacgttcgtgtttacagtgaagaattcctctcttcatcgacacttcccctctactctttatctataacgtttttctatcttgcttcgtttcgatcatggcgacaaatgatcaagaagttggtcctggcaatgaagttcctactcatgtcaataatggagatgatcaaagcgaaacaaccaaaatagagtgaacacacagttgatgagatcaagaaatcctatcgaggatccttccgatacttattatctacatcatggtgataaccctagaaatgttcatgtgtcccaattattgacaagacaagacaattacatttcttggaatcgagcaataaaattggctatttctcttaagaacaaattgggattcttgaatggttccattcccaacaaacctattactgatcacgttctttataatgcttggattcgtaacaataacattgtgatttcttggatcattaactctatttctaaggaaatttcttctagcattttatatgatgagtcagctgctgccatttggaaagatctcagagttcgattctagcaaaggaatggtacacccatctacaatctcaaaaaatatccgatgaatctgaagcaagataaccagacagtgagcatgtacttcaccaagctcaagactgtttgggagcaattatctaacttcaggccaagtttcacctacaatggctgctcatgtggtggagtcaagaagctgcaaaaacattacaacatggaatatattatgtcatttctcattgggttacctgatatctatgcctaagtgtgaggtaacattcttgtgatggatccgttacataaaactaacagggtttttcattttgtaacataggaagaaaaccagaggagaagtcaaaatctctctgtagattctaattccaacatggcctatgccttccaaggagagaagacagcaggcaaacctgaatctcaagggccacctaaaactcatccaccaaaaagaggcagacctttctgcactgtaatatgcatggacataccatttaaaagtgctacaagatccatgggtatcctccagagtacaacaaaaatgggaaaactaaggaggctacaccaaactattttcaaacattgaatattgactgccccacttcaaatgaaagtaacacgatgctaccacaattgaccccaaatcaataccaacaacttcttaatcttcttactgcacaaaccataggccttaacccgactaatcctagttcatctgcaggtaattcaggtattgctctgtcaaattattctactcttccccaaaataaatattggattgtcgattcaggagttactaggcacatttgctctaacctaaacttgtttctaaatgttcatcccataaagccaactaaattgattttacccaacaataattacattatggtccacaaaagtggtaatgtacaggtcaccagccaacttgttctcaaagatgtgcgttatgtccctaattttcaatattacatcatttttgtcagctgcttaacttatgggaacaatcttgcattgaatttttttgctgacaattttatatacaggaaatcaacaccaagaagatgattggcaaaggtgaatcagctaatggtctatccatctgggacatcacatccatttttgccaaaacctttacaatacagctgaaacttggcacaaaagattaagccatttatctgataaatgtttagatttacttcaaaattccttgcactgtaaaattagaaatttacataatgttgaaccatgttacattttcccccttgctaaacaaaagaaattgtgtttttctaataatgctagtttgctaaacaatgttttgatcttatacattgtgatatttggggatcctatcatgttgcttctcattcagaccatacatattttctcactttagttgatcattcaagattcacttggatatacctccttaaaacaaaaatctgatgttcttactatcatactggactttcttgcttatgtacaaaccatttaattgtgtttttaagtgttttaggtctgataatgcacttacaactttatatttaaatatttattctcaaggcatggcattttgcacgatgttacatgcatagaaacaccaaaaaaaaatgttgtggcagagagaaaacatcagcaccttctcaatgtggtaagagctctatattttcaatccaaagtcccaattcagttctggacagagtgcttaatgactgctgctttcttgatcaaccaaactcctactcctaatttgagtaacaaaattccttatgaacttttgcttgacaaaattcctgattacaccaatctaagatgttttgggtgcttggcttttgccactactttaacatctcatagaaccaagtttcagccacgtgctagaacttgcatcatcctgggttaccctagaggtgtaaaaggttacaaattgtatgacattaactctaaacaaatttttatatctcgcaatgttatcttccatgaacatattttcccttttcacacactaaacactgaaagatccactatcgatcctttctcatttctggttttgcctcatcctcacatcacaggcacacacgttcatgattatccaatacacaatactagtgctactatccctaaccccacttgtaggatgacactactaatgaaacaagaactaaagatccaatacctcccaacaatgaaaaacatctagtccactcttcatcatctctagtgcaatcaagaagaacaagccgtgtcacatgaccacccagttatcttcaagactttcaatgctacaatttgttataggacaaaacttctactcctcatccaatagctaaatttatctcttactcaaaacttttagacttacaaagccctcattcttgcagttactgttgaattcgagccacaaaattacaaacaagcaattcagttttgatagtggctgcaggctatggacaatgaattgttagctcttctcaccaacaacacttggacaatggtgcccctaccactagggaaacatgccataagatgcatatgggtatataggataaagtacaacagtggtgagagtgtagaacgtcttaaaacacatttggttgcacaaggttatacacagcaggaaggcttagacttttttgacactttctcaccggttgcgaaaatggtaacattcaaactcctccttgccattgtggctatcaaacagtggcacacattgcaaatcgacatcaacaacgccttccttaatggagatttggatgaggaagtttacttgcaattaccccaaggacttaagcttccatccaacattcaaggcacaaaccttgtctacaaactccacaagtccatctacggccttaaacagtcttcacgacagtggtataagaaactcattgaagctcttcttgaagaaggattcgcccaatcaaaagctaattatacactcttcaccagaggttcccaagacacattcgaggcactccttgtctatgtggacgacatcatccttgcatgccccaatatgaacatactacatcttctttaagataacctcaaaaccaaattcaagctcaaaacattaggaccactaaagtattttttagagtttgaaatagctcgtgccacctctcgtcttttcctcacacaacgcaagtacacactgcaatttcttgctgacacagggtataccaacaataaacctaacgaaagcaccaatggatcttagacaacaacttgatgac

SEQ ID NO: 249545 - DNA, 803 bp, Cannabis indica
atttcgttgatgagtcataatgcgaaagttgaattggttaagtgttgattcctctgcgcgaatcgctgatccgtttgcttcaagtatgccagcgaggcatcctgctcgggctacactctccgagcagatacttgaggttgattccacgtgtcaccatcgtgtgatgccacgtcagagtgcaaaaattgggataacaatacgtatatatataacaatacttacgtatacatataaacaaaattaaaatatgaatatatatacatagattgaattaaaatgtatatatatgatcgaaattatatgaatataaatatatatataaaatatatataaattaagaaccgatcgtatatgtatatatatatgaaactcaaataaaatcaaggtagagatttatagattgctttgataccaattgttaaacaattatttgtataaactgaaacatatatgattatgtataaagtacagaattaataaaacatatatgcactataactacggatcgaaatacctccagccattaaatctttgagcttcaaactcaacaagctttgatctacaaaggatattgactaccgtgggtaatcgggcttgctctctctctcaactctctttagatggaattttactattatgaacagaatgagtgaggagctcgaggaccgaaaccctatatttataagtgagatactccatcagtatctgcaccacattaattgtcaaaatattttgacaattaattcaggttatcaaatcaggtaatgaatatttaaatctgaccatatatagaatattacgta

SEQ ID NO: 249546 - DNA, 1559 bp, Cannabis indica
agtttctcgattactggatacctgccttctgctccagagaaggtcttgccggtgtagtatatcagtaactatgcttttccttgctcttggaccaatacggagctagccgcgtgccgggacaaggagaggtaaagaagaagagtctcccctgattctggttttgacaagattgggggagtagtcagatatcttttcagagtttccagggcaagttggcacttatcgtcccaattgaacttgcaatttcccctaagcaagtcataaaatggtaggcttttatcagaaagctttgagatgaagtggctcagtgcagctatttttctaattagtttctgtatatccttcacggtccgaggttgtcttgttgcctgaaaaggctctatttgatctggattcacttaaactccccaacgggttaccaagtggccaaagaacttccatgagctgacagcgaaagcgtatttggccgggttaagcctcattgaacggacaaggaggatttggaagcattcccagaggtgatcaacgtgctctaatctatctttagactttcccagcatgtcgtcgatataagcctccatggttaaacccaattgctgagaggacattttattcaccatccactgataagttgccctgcgttcttgagcccaaagtgaattaccttataacattacgctcctctctcagtgatgaaagatgtcttctccctattgagaggatgcatcattattcgattgtccccagagaaggcatccatgaaactcatcaattcatgcccaaccgtagcgtcgattatcatatcaatatgcggtagagggaaattgtcctttgggtaggctttgtttaagttggtaaagtctatgcacactttccatttcacattcttttttagcactactaccaggttggcgagccacgtggggtattgtacttcctcaatggtatcattttccagcattttctcgacttcatcattcacaacattgtttcgatctgctcccatctttcttctttttttcttgactgggatataatttggattcacatttaatttgtgggtaatcacagctaggtctattccgagcatatatgagtgttcccatgagaaaacctgaatatattctttttaaaaatttacgatctggtccttccagttccccgtaagtcccatgccgatgtaggtagtcttggttgggtctgtcaggtggatgggtacctcttgtaactcctcgattgtggggtgttgcttttggggtggggtcgaggagttaattaattattataacttgtttttacttctcagggacgaggtgtaacactcgcggccccccaactgatctcttcgtatttatgttacatcgcctttgcatgggaacttgatcacctgatggtaagatgatgcgactgccttcattgcgttgatccatggtcggccgaggatggcattatatgctgagggacaatccacaatcaagaatctaatcgacttgtttactccattagcatagacaggcagttggacaaactttgagcgacggtgcgttctcctaaaaatc

SEQ ID NO: 249547 - DNA, 759 bp, Cannabis indica
cataatccttctcttcctcgtcaacagagataggaacctactgccacttagaatactttgggaacatgaagtcgcaggtagcttgtttgctgccaaggagattgcaggtcttcaagttgatctcgtttaatgaaaaattagctaatcgtaatccaaatggaagaattaagaggattctatgtcgtttttccatctcgggagtcggaataggcatcttcgaaactgttatcaatacaataagaaaaataagtaagtgcctacaatcaataatttgaaaactcaaaatcaagtttttgagatgaggtagtacttacgtatgatatgaaatgtagttgtattgattggggtgaggctaggcgtctagaagaagtcatctttgatttcagtcttgttgggcagcctctggatgatcctttgatcatttgtgttggtcccgaggtaataaaaccacttgctcctcgcttccttgctgaacatgcttttatagagtaaaaatataaaacttctagtggggttgggcattcccaccccaaaatttggtataaaactttcaggcaggccaaaattctgtatgaagttggaatcagctgaaagatggtaatttcgaggtaattgcagaactctttatgatagtccttgagggagtactgcttcagctctgtaacgccccgatattttgccttattttacaaaatactattttcatgcataatttgaaaagataaaaaaataatttaaatacaacagtggattttaaaa

SEQ ID NO: 249548 - DNA, 664 bp, Cannabis indica
ttgttggaatggataatgatattgtaacaaatcaaactcttcaatggctctccaaacaccctaaaactgtgaaagctctactctcctttctagacacatgaatgatatagcttttcgaaaggtacatacaacaatttatatttctttattgtaaaaatattttgatgagctcaaagaagtatttagtaaaagtagggtcattatactactggttacccgagatgaacttttcttggcggtcaatgatcccgagatttaaaaaaagtacactgaaattgctcaacttatcgcgacgatcttttttgagtctcgtcaagataagtcaaatactcttttttgtcttatttcaacaacttttgaccgtcgagattgtgtctaatctcaatagccacaaacaagctcgccaagaaaggttccccaacccttttttagttgttgtccaaaatggtatttattagataacttatttttttataagagaattttcagttttgtgaaaattatagtttttttctcataaaaagtttttttatgtaaaaaaatcaaaagaaaaaaaaaagagattaaaaattaggaaaattacattattctttacttaacagttaaattacctagataagtaatcaattaccttcttaggcttatactttcaaaactttttttt

SEQ ID NO: 249549 - DNA, 1012 bp, Cannabis indica
atcttctacatctggatgtttgggtgcatgactcgaatgatttgaatttgggatttggggcttggcggggcttagttggatttaggacttcaatgggtttggagctttgtctatcgtggcttgtgttgggattattttaccaggatctaaatttactaacaagtatgttgaattaacatcctaaatatgagtatctctaaaataatgaaattaaacacataagagtttagaaaaccttacaatggttgcagcagaataatatgactccttctgcccagatctctaacctttgttcctttctgtcgctgagtattatcaagatctaagcctggatctctttcacttcttcgggttggttaccaccgtcttccgcactatcaatcagtatttgacttgctatgtgtgggcatgacactctatcactaagggcgaattggttgaagaacaatgaaggaggtttagaaattctataaaaagtgtctctcatctactagttgttaaagaatgaaaactaggtttaatttggttgaatgaatagtcacatgaggtcttcattaagtatttgatctaatccaatccgcacgatctaatccaatccgcaaaatgcggatatccgcactagtacggattggattggattgaaaaatctaaaatccgcatttgtgcggattggatgttgtttgacctcaaaaagtaaccgatccaatccaatccgaacttaattatatatatttttaaaaaattataatatacaatatatattaattttctagtaatattaaaaaaagacacaaatttctaatttcttaatcttttttaataatatattgagttagtgtattttatttgttttataataaaaaataccagaaaaattatttttattcatatagacacatacacataaatttaaaaatatattgtaaagaccgcttaagattaataaattggattattaattaactatggtttatatacgagatttaataaatattataaaatgcatgttgtg

SEQ ID NO: 249550 - DNA, 661 bp, Cannabis indica
caagtgaagagcactctgattatcacaatagacagtgatatcagcagcattgattttcatttcctgggcaaatcccttcaaccatactgcttcctttattgcttctgtggctgccatgtacacgacttcagttgtagataatgcaaccaccttttgtaagttggatttccaacacacacatccacctaagactgtaaaacaataaccagtgagactccttatggtatctatgcttcttgcatagtttgaatcgacatagccagtaacttcacaaggagagatgttatccttgtgaaattttaatccaatgtccaaaggttcccttgatataccttagagtccatttgactgctgcccaatgttcagtgccaggattggcaatgaacctacttacaacactcatagcataggccaaatcttgccttgtgcataccatagaatacatgaggctgccaacacatgatgcataaggtatgctgtccatgtatctcttgtctacttcattttgtggtgattgagattgtgtgagtttgaaatgaggggcaatgggagatgttacctgtttagctttgtccatgctgaacttatccaatatcttttgaagataacccttctgagatagcataatgtattctggcctctttctgatgatgtcaatccc

SEQ ID NO: 249551 - DNA, 616 bp, Cannabis indica
agctgcacagtacgtttaaaactcacgtaatacgcctaaggtagttagggtgttacatatatgttcaattacctaatcagagatatgccatagataaaattttacggtaagtgataacttattatgtcactatctaggtatgccactactacaaaaatcccctttagaggcggtttttaagtcctgtcagcgtcgattttcgcaaaattcgctaccgactctaatcagggcgacgctaaagggttttgagtaatcgatgccatatgtacccctatggcgtcggttattggctaggaaccgacgccataggggtacatatggcgtcggttcctagccaataaccgacgacatatgtggcgtagcaaccgacgccaaaagtgagggaatatgtagtgtgttttattcatgcatgtcaaatatgtgtcctcaatttagaaactttagaataaagaatgttaaagaagggtccattaatgacatgcatgttagatattatcattgtccttaatagtaatacattaaatggactttttcatttttacacttcaaaacagtttttttttttttttttatttttattttttacgaaattgtatatagaaacctctattgcaac

SEQ ID NO: 249552 - DNA, 604 bp, Cannabis indica
cgcctatggtagttagggtgttacacccatcctggtgaagaaaggatccagctccgcatttccaaacacaattacgatgtggatgaattgtccaagggagacgctaaagtggaggccctgaagaagtggctgagggaggctaaagatgggccttttcgaggcaagtataccggggacgtttgggatttgaatttagatcccatgacggactggtttaaacactttgtgggacctaacgtggctccatttgcctcagaaatgatgagtcattttgttatagatttaacccagcttcccaccaagaggtatgcaacttgtgcttcttccaaccccgtttatcagatccagcacatgagtgttgccttgactacggtaagtgtcaattttccacgcctctttttatgctttattttcaaagttctaacctttttcttctttttttgttgctagatcactgcggaggtcgatcggctctctaagactttgatcaatcaagggttcaccgtgtcagagttcggtcacatggaccgaatggaagccctttgcaatgaggcccgagaggagaaggccctaattgagcaaaatcatcaggcggcactgaaag

SEQ ID NO: 249553 - DNA, 695 bp, Cannabis indica
tttccattgatttccattctagacagagagagaagatatggcagtagggaagcttttctatctgcatttctacaagttttgtttgataagttagcttctcgtgagtttataggtttcatatatggaaagaaatatgatgagttgcttgaaaaagttaaagattacacttttgagtgtcactgcattgcttaatgatgctgaggagaaacaatttcatagccctgcagtggagaaatggctacacatggctaaagatgctgtatatgatgctgaggacatattggatgagctagctactgaggtgtagagtctagactaagaaagattattgaatggttagaattgattgccataaaagggatggataaagtaaagagtattggcattgagctttatgaggatggatttcaatctgtcctaccatttccatctttagaatccttgaaattttgagaatatgttaaattattgaaagcagcaaagagtttcatctcttacaaaaaattgaaatacaaaactgtcctaagctaaaacaattgccacattgctttgttgccttgaaaaacttgagtattatgggatgtgaagaactaatagctcttccaaggttgtcaacaagtcatggaaactttcaagaagcccaagaacatccttgcctcctagagctatctatatgggcatgtccaaacttgagg

SEQ ID NO: 249554 - DNA, 1061 bp, Cannabis indica
accgaccgatgtacacccctagtggcaaccacgtagccgggcaaatcctatcgaagaaatactaagtcaaggatatttttggccgaccatgatggaagattcaaaggcctatgtaaagaaatattataaatgctaaagattttcaaagataccccgtgcaccgcctaatgagctaactcatatgcaaaatccttggcagtttgctatttgggtaattgacctaatcagataattgcctaaaggtaagggtggagtacaatatgtagtggtcgcagttgattattttacaaagtggacagaaaagccgagccattagcaacaataacatctaagaaagtattggacttagtggtgaaaagtataatatgtcggttcagactcctgcacaaaatcgtctcaaaaaatggcaaacagtttgacagccaattgttcacagatttctccacgaaccatggaataataaaaagtttctctgtagtggcacaccctcaatcaaatggtcaggtcaaaacagtcaataaaacactcaaagaaactttgaaaaaatgacttgaagaagctaaagggaactggctggaggaactaccagaagtattatggtcatatcgcacaactaaaaaaatagcaactggacagactccatttgctatggcctatggctatgaagctatattgcccgtagaactagaacctccgtcccacagaagattgacctatgatcaagaagctaatcacgccctcctagcagaatcacttgacggaattaaagaaaacgagcctcaacaaaactaaagttaatagcccatcaacaaaaggtggctcgatacttcaacaagcaagtgaaggcaaaatttttttatgggagatatggtccttagaagagtatttctgaacacaaaagacagcacatctggtgtgctcagaccaaattgggaaggaccatgtcaggtggtcgaagttgtagaatcatgagcatacaaacttgggcggtaagatgaaaacatggaactcgttttagtgccaaggtattggaatgaagaacatttaagaaagtattatca

SEQ ID NO: 249555 - DNA, 805 bp, Cannabis indica
ctccaagttcatcccaaaaatttgttatggagtgttcacttgatcaaattcacactatttttttaatagtgtatttaattcacattaagtataaattttatatttttaatttaattcagttcgcacaagagctcaaatccaatctaattcacaaatataacatacaagtaataagctgtttttcttttcattcaaaataatgaattatttacatttttttttaactataatattaaagatttgctacaacgataatataattttgaccacatgttgtgtagtatagtgtagtggtagagatatttttattagtattttttattatttgggtcaaaagtttaaatttcatcacaacttttcaagagagagatcatacttggccctttaggaggttaccttgtaatagtgccattcttaatgagataagaatcttcaaagtttacactaatgaatgacgtatataagacttttatagctaacacgtagtccgcaaaattatctaaactatcaaaatgagaaagaaatatatatgtactctatgatccctattttgagagagaaaaaaaaaagcaaagtgtaaaattgaaatcgccaaaactcaacatgataaaatattaataattggataaaacctatattttgtgtgattactctatattatataaaagtattatacaaaggctaacctaaaaaacaatggacccacattatttatttatatattttcctaaagagattagttttctacttatttaaactagtacataatgatgtgtgatgtacaaatggttgatctaaaaagctt

SEQ ID NO: 249556 - DNA, 737 bp, Cannabis indica
gtgtttaattggtatgtaattttaatttttttggatgaggttttcattttactgtgggctacattacctttaaaacaagggaatatcaacatcctcaaaacgttgagtttcatttgccgctgctactgtttctctgctacgttgagtttctttctctgctactgtttctatctctctttctttctctactactgtttctttctttctataaaaaatatatatatatatcgaaataaaaaagatttgatagtggatagaaacgtccaattgaagagctgacaatgataaaaaaggacatttttgaaatatgaatataataaaacattgaccattgtcttgcactcataatagtttttttttttttttttttttttttgaaaaagtcattcataatagttttaatagtgactaatgagtgagtgcttttagtagtgaaaaagcattcaggaataggtctttggcccatgacaattgggctgatccggcccggcccgataatagttgtgtcggtcattattagacaattattatttttttcgggtaaaggagatatatgtagcctttaatattttttttaaaaaaatatatgcacaacattaggacaatatcgatttcagagaaatgtctcgatgtattatgaaaaataaaatttatagagatatttaagattaaaaattctaccattcaaaaaaaaaaagaagaaggggtcgggcctgactcgccaggctgaaagaaat

SEQ ID NO: 249557 - DNA, 1357 bp, Cannabis indica
agctgccaaagtgagcgccagaacccagaattgtccgcaccagcttgctggtttttcggtttctgcagcagaaagtaagcacttttaactgagaaagtgccattactttccccaatccaagaccagcagtcctctccagcataggcacttagaggcagcccaaaaatgagagatgcatccctcaaattaaaaatatcagtaataacctcacggtcccaggaagagttatcaatttcaaggagggaattgaccattctatgatgcaagctcgggtgagaggttgtgacatatgggttagagttatcgggtaaccaagggtgagagagaatactggtggtagtccctgaaccgatagtgcgtctggcaccaagtttaacaatgtcttttgcttgccatatacttctccagacaaagctggggttgttaccaagttcagcatcaagaaaatcagagcggggaaagtaccgtgccttataaacttggctaacaagagaatttggtgaaacaagaagccgccagcctttctttgctaacatcgcaagattaaaatcatgtaggcgacgaaaaccaagtcctccaaagtctttgtgaaccgccattcgatcccatgacatccaaatgataccattacccttactagatgttgtcttccaccagaagttagccatcaatgtttcaatctcattacaaatcttaaagggaatgagaaagacactcattgcatacgttgggagggattgaattaccgtcttgagaagtatctccttaccagcacgagatagaaatcgaccactccagctgtttatgcggttcaccactttatttttcaaaaagccaaggattgtagtcttcttcctacccatggtattaggtaggccaaggtacatgctatggtcatcagcttcagtcatctccaatgttgaacatatttgattctttagcatttgatcaatcttgggactaaagaaaatagaagacttattaacattcaccttttggccagacgccacttcaaaagtatgaaacagagtacgaacattcagggctgcagcattggtagcttgacaaaacagataactatcgtccgcaaacagcatatgtgaaatcgcaggggccccattagcaacacgacaaccttgaataagttgattggcttcaaattttttgatgattgaagagaacccctcagcacagataatgaagagatatgtcgaaagcggatcaccttgacggatacctcgagttggaatgataggtcccatggtgtgattgttgtgaacaatagtatatgtgaccatagtaacacattccataacaagtttcacccatctctcagcaaatcccatacgaagcatga

SEQ ID NO: 249558 - DNA, 1105 bp, Cannabis indica
cgatgtgatactcaataattaattagcaattttctaaatcatttattaaattaaaatttgtggcaactgatataaaaatacacaaataacggtatgctacctttttgtggtactttacatcttaatgtgccccttaatgtacatttctttattaacttcgattaaaattttaaattttttccttgaggtgctcaataccatatcggtatggtacccaataattgattaacaattttctaaatcatttattaaattaaaatttatgggagctgatttgaaatgcactaataatggtatgctactttttgtcgtgcttgatattttaatgtgccccttaatattttcgttattaatatgtacatatctttattaacttcaattagatttttttcttaattatacataagtttgcaagaacatctccaatgtaatatgtaaaaattgtactatatttggcaaaaaaaaactttgttatatatttgcatcaatttttttgtactatatttgtgttgtttcatggttgcattggagtttttccatcattattctcactagttcatcaaaagtgcatttgctgaaaattaatgatctccacttgattcaattcaacatagtttttgttatcatcccaatgcccattgctctgtaccaaaatttgtaatggttccatgtcctgaaataatgtaaattaaatatttgtttcagtttcagaagttgcaaacaactatttcaatctaacaaaaaaactaataaacaattcttttcagtggcaacatttgcaaataacatttcaatctgaacgactattttttatctgtcaaatcaactattaaacaactattttgaagcatacagtagttaataagaataaattcaacatttcttgtttgcagatcccaaacaacaagtattttactggaaaacaacttataaacaactgtttacagattaaaaccctgtagctctaattatatgcattaatatttttttgatgcaatctgttgttgattttttgttcagatttaccaaatttccttatcatttcaattttttcctgttttccttgatttttaacatattcccaattatgtagaataaaagatag

SEQ ID NO: 249559 - DNA, 568 bp, Cannabis indica
ttacaaaaataaaggagtatatctctctctcttagtgtctttccacttccgtcattcaggaacaaacgaatcaaaaaccaaaaaggagatatggcgaaattggtagacgcattaattggattgatctataacaattattgtaatttgatcgtacaatactatcaattaattagtcttcatccttataagcaattttatttatttgattatcaaaatgtatacaattctaatcagacaatatgtatttatatagttagggaggagacttaactatataaccctaattggactgagcctactcatcaaatacttccgttaattaaggtgccgtttggtaagacttttgtttcttaattttttaatcaacaaaatgaaagtaaaatttttagtttttaaaaattttgtttttgaaaacaaaaatgcgttctgtaactacttttgttttccaattttaaaaacagaaacaaaagtgtgtttgtaaagtttattttattttcctttttttttatttaagtcgggtctaggtccggggtcaaattcggatccgggtcagaggtcgggttcagca

SEQ ID NO: 249560 - DNA, 852 bp, Cannabis indica
agcttgcaaacaacttgatacattttactacctgaaagttccaagcaccaactgtcttttaagaaagagtcatacatttttcttatgttattaagaataaaaaatgaaggtttaatagaatagctacttatacagttaaaaattatatacaaaaaatattaaaatttaaaattaaaatacaaaatttaatataattttataatttaattattattaaataaaatataatcccgcgaagctcggttggtttctaaattttaagtaatgcataaatttttttatacgttattccaatgtttgtgaaaatagaaaaataggaaaattttgtggagaatatcttgtctaaattagaaaaaaaaaagaataaaatttatttagtcatcgtaccatcttatcaataaatacaaaatataattaatggtcataggcgaatgaataaagtaaaatgttcagtggcatattatataggtttagaagtagattgtctttctattattcgtgttaaacctattttaatttgacttgtataccaataaatagtaatatttatttattaggcaaaaatattattgttaccttactgttactattttattttacacctagtttattgaaagaaagtttcttctgaaaaaaaaaacactggtgtttttaatttgaaaaatgctaatgctaaatggcatatgttctatgttacactaaaaatgttattggtagttattagtaagaggagtgctaccgtcaacctcctgttacaatctcttagttaatttccacgctccaaaatatatgtaggaatatattttttttatttttcttttattcacgaaggtgttcgttatgcttacaaca

SEQ ID NO: 249561 - DNA, 521 bp, Cannabis indica
tcattcacaatatttttttgatttaattttttttgttaagatgcagtgcctagctaccatatatgagagtaatattaatatatatatattttattattatataagttttattataattcataatattaatataatatttattaatgaagaaaatgatttgcagataatataataaaacttgttgcaagattgaattatatttcgcaagagtacgagtagtacctcgagaaaatcaagaacataatacgtcaaaaattatatgccctggacatgctattgacgaggatgggaaagtcgagtttgttgcaagattgaatatcttcagattttttttttttgatagtgaaatagctacttcattgaattataaatatttagagtacaaaagagattcacaatcagaccatacattatactcaaaaatactacgaccagatagaaaacgagagtaccgtgcaacaacatgggcaactcgatttgctgatcgtctaataaacgtaaactcacggaaggcaaagagg

SEQ ID NO: 249562 - DNA, 1064 bp, Cannabis indica
tgacgctttcaatccaagaggaatagtaagaaaataatttagtttctaatgaaagtatgaggctaaaattgacaagtgtttcatttgatcatttttttatatatataaatcaaatattgatacatattatatgtatatgtaggctcctaaacaacctaatgacattgtgtgcagtttttacatcatgcaactaatgagagatttaactatggcaaaagatctaaaggaatatctttcaaaacacgtaagtagtaattaacatattattttaaatttgatagaaactaacatatgatttactcttatgttgcactgtgatagtaagaccgagtatacaatggatgatattaacactgtgcgtgaaaaatgggtagactactatactgagtattttccagcatagttttacttttgtctttttactagtaagtataatctgagctaaatttatagttagaacatgtagttgttatacttgtaaccatttacaaaacttatgtaaattgatatattatgaattttatttaataatattgtagtgcaacgtatctttgtatatatcgtgaataacagtgaagggaaaaaaaattaaaaaaaatatttttttacctcctaagatcaattacagcggttgtcaaaaaatcatcgttattaacctatcatgtgggttattaaccgcagagataggatagcaatcttgggaattctttttaaattaccaagattcttaccctatctcggcagtttcagatgtcgagattgcacatatatgagagcatgtggcacccctatctcagtggtttcgtcgagatagggtaccctatcttagtggttcccaactgccgatagttagatcctcgacgattgataaccaccgagattggtctatcttatgggtttaactgccgaggtagggtaattttcttgtagtgaagtcgaagttctccagttctgaagggcttctaaaactcttttactgtttaaataaccaaagaagaggtgttggatggtcgacttttcatggctaccacaaatcacacataaactttcaaatgtaattctaa

SEQ ID NO: 249563 - DNA, 1432 bp, Cannabis indica
aacataaaatgttatttctgatctttattaataagtaaatctgattataattaaatgggttttatttagggcacaaaacccaacagtggaaagcaatcctttggacatgcctttttcaaatctaaaaactcgatacaagttctccaagttccatttagttttgggatgagaacagggttggatatccatgagggataaaacgcctcacgtataaagtagtgaaccaacaacttatccacttcctgcttgagtgccccttgtctctcagcatccaagggtcgtctcttctgtctcttggctgggtagtatgggtcgacatttaagtggtgacaaataatcttagggtcaatccctatcatatctgagtggctccaggtgaactgatcctggtttgccctcaaaaaacttattagttgctattttagtttttcatcgaggttcttcccaatgaatgcacactttgtgggatttgctggacctaaaataacttcttctaattcttcaattagtttcaataaattccgctcatcttgaatccgaggatcaagatcctcatcctgcttcttgccttctcagtcatgactgccattagctggtgaccaacctttctattctacaactctatgcggtcgcatttgcgagccagaagttggtcacctcgcaccactcccacacctatcgatgtttgaaacttcagggatagatgcttaattgaactaattgcccctagtctaattaacactagtcgacccaacagtatgttgtaggctgatggtaggttgacaactaaaaagtcttgcattatagttgttaataaaggtgctttgcccacagttaatgagagctcgattattcctttactggcgacactgtggcttgtaaatctgcatagctctaccatgcaaggttttaatttggctttttccagccccattttcgccagtgtatccttataaaggatattcactgaacttctgttgtccaccagcaccctttttatccttttgttggtgagctggatggtagtcactagtgggtcaacatgagggtatctcacatgcttcttatcctcctccgagaacacaattggaggttcctcagtcttagcctttttagaagattctggagcaaaaactgactgctctttcttaacttcctttacatatctcttttgggcattattactttctccagcgagatgtgatcctcccgagataaccaaaatgtcctctccttcaagaggaggaggttgtagtccctggttgcctgggttattgggcgaatttggctggttatgtccatcaccttgtcgtttcacatattactggaagtgacctcacgagataaggctttcgatctcgtctttcaattgacgacattcctctgctatatgcccaatgtccttgtgatatttacaaaattttgttgcatc

SEQ ID NO: 249564 - DNA, 800 bp, Cannabis indica
agaacccaccaggaagataatgccaattcttataggagtttcttgcaagaaatctctgaaggtaaacaccgattcttgcaagatgcggcctggccagaacctcgtagcatgtcctttattcctttagaaaagcctttgtttttacccaatgtcacgaatacttttgaaaaagatgatttggattttgaaataatgcctcccaagccacgtacatcaaagtctccctaggaccccaaagtcacctttgaaactaagttgatagaatcgaaggtgcgatctatctcaggctacacaggcgatatactgaaagcatgtgggattgaacttaggaaatcatgctttgttagatcagtacgagagggtgagttcagttgtttccctcctgcgcatttttcaaacagtaccccaaagtggtgagactagtactagtggctcgactggtatgggcgcctggagccttgagcatatcaatgcatgggccatacttcctcttcgagactacttcaaggattacataaaccaccttggagttgccccattccagctaaatccaatttcttacaggattctcgctagtttgaaggtcttgtataaaattctgaactgggaatgccccacaccagtagagattgagtatctgtactcggttaaggctgttccatcgaggaagaatgttttagggggcttctactacctcggtactcattgtagcgagccaaaaatcattgtggacttgccaaacaaagtgtctttttaaaacaacttgttctggacatctggtctttcccccatcggcacaa

SEQ ID NO: 249565 - DNA, 675 bp, Cannabis indica
ggttagtcattggctttgtaaatatcacatatgaaagcaacaaagttactgcttttctagcagtcgttatctgcaaaatcaagcatggaatggcatatcaatcaacaaatttgtgagagcaaaccataaaagtctgaccgtttgagttacccctcttcttcagtatgttaccacaatgaatttcgaaagatgatgttagcattctcagtctatatccttagttccttactaatctaacacataaaccagtaaaaataacaaaaccaactaaatgttcaacataggtaggagattcaagtcttggaaaattaccatagcagtcgtggctgcaccgaaaagagcaatgagggatagcacagaaacttgcccgacgtaagttgccatggcttcaaacactagcaccccataaacatatggatgctgcaaaaaatttccggtgacatgatgagcaagattgtgattttgatattagaacttgaaagaggtgtggaaagtgcaaaagttgaataaaattttagctttattagccaacttacttcataacatgagttccaagccttgaccaactctcctgtgagaatcataggaggaagtaaaaaaggtaacccaacaacagttgagcagaacaacattttccatctgcatatatatatatatatatatatatatatatat

SEQ ID NO: 249566 - DNA, 614 bp, Cannabis indica
cgatgttggagattcaagcctttaatttttttttaatagcattgaatggctccatatgtattataaaaaatagttgcattgaccccatatgttgtaaattatcctgaagtcaagaaaggaaccaagccataaggtctacatgtgacaaattacaattggaaatatttgaactagaaattacaaaggtgagttcaagtctataaagcattactagaaattataaattaaatgtaccaaacgaaagcctcttttatggtaaataggaccatatgaaaatccaattattgtatgatgtatagtaacttccctgttacttcacttggggcaagttgctgtactatgtattgtctacagagcaatatatgccaataaagttctattcacatttcacagtacaaaagttcacagcagtaccaaactaactacaatctaagtaaaatcatgtcatcattctctatggttaaaaacacactattattattaactagggaatataaccgccgggtctcataataataataattgaaatgtattataaacaatagttgcattaaccccaatagacatgtcttcccacccatttatgttcaagttgaaatgaaattgaacaattc

SEQ ID NO: 249567 - DNA, 713 bp, Cannabis indica
cgttgttgtcggtgccggcgccgatgccattttcttcattggtgttatttgttaccactaagcctaagtctgaaaaatacaataatttatataataataataacaataaagaaaacaaaaatattatgtatttatatacttaaatttaatttttaaggataatatatttaaatataatataagtcaatcattttagtttaattaaatttttatttttatttaaaaatatattaataagaaagtgatacttgacacttaaaggggattaccttaaggggacaagtatgtattactattgtcaaaaattaaatttaaatatttatttataatggagagttaaatttaagtattcaccgcacaaattacctcataatttaaatagtttacagtataaatatttacgtttaatttttaatcgttataatatttaagttatatttaagtgaatcaataatcacgtattaatctctgattggtcaaaattattaaatttttatttttatttaaaaattaatttaaatataccattaaaaaataacgcatgaataatgacttaatatttaacagccaagtatatacgtagttaaaggctcggccctgggcataggcgggctaggcctgtgcctagggcacacctagtcgagggaccaaaaaaaattccctttaaaaattatataatttttttttagattttgaaaaatacaacatttttt

SEQ ID NO: 249568 - DNA, 698 bp, Cannabis indica
aattaattgtgaaaaatagatgacttcttaaatttaataatagttcaataatttagaagttttaccgttaaaatttcaagtgcaagtgaaataatagttaaaagagtttaactgcgaaaaagtattttgtaggggtgttttgataaaaaaaaaacttaatttttgaaacctttcttatttatttcagattaatttgttaaaatacattgaaaattttaaattaacaagaaataaaaatagattccgttgccgggacttgaacccgggtctctcgggtgagagccgagtatcctgaccaactagactacaacggattttgttttattttcttataagtttatattagaatacaatacttagttcttttgccattgaatttcgaaattcttaaccaataaaatgttacaggtaatatataataacacaagtttttaattaattactaatatgggagtacgaattccattacataaattttggcaaaagtttaaatttttaatatatgtagggctcgtttggaatgccgtattaggtcgtattgtattgtattgtattatattgaattggattatacattatatttttatataatactatgtcaaactttaagttatactaaaatattatatatttaggtgtccattaaagttaataccacgtatagttttacataaaaatattgcataaaatacaattca

SEQ ID NO: 249569 - DNA, 802 bp, Cannabis indica
aactagagataaaggtggtgtttcaaatttgatgggatactgaccaatgcaatgaaatttaagagggtaagatcggtgtacaatttgtatgactgtatattttgacctagtcttggggggcatgtatcataatgtgaggattagctataagcaatttaagtccgcagttttagaatgtgcaatagtatcagagtttgcttcacaaattttgtatcaactctcctataagaagtcttatcttcctcatattttggtatcttgttggcattttgttttgataaggtgaaaggtttattgtcataatgtactaagaacaactccaaggatttgaaggtgccttatcagctaatttttgttaatacctttttatttacttcattacagttatcttttttttatttgtttagcttattaatattaaaaaattatattatttgtattatgtgaaataataactattaattatgtgaatctaatagtataaatcacatatgattagtaatatcaactcatataataatcatacactatgacaagattaaaatatagtaatttacacacctcttgacttgtgaattctctccggtttccagcccactttgtagatgggatatctgcaaactaggtccaccttcttttattggggtcacattttcatcatccaaattagacccagcatctttacccacatcacccaactcaaccactgtaggaaaagtggcttgactttcataagctacattttcatttaattgtggatgactaaaaaaacactcaatctcatgatcataatccttcaaag

SEQ ID NO: 249570 - DNA, 772 bp, Cannabis indica
gtaatgggttatatttagggcacaaaacccaacagatcatccttgggttgaatgttgtttagaatattttgttatgagactgatttttggatgattttttttttcaatttgttataaagttcaattgttatttagtaataggattttactttcatgcttgttcacttatgttaatggtttttgacgaaattagtttttatatattttttaaggttagtagagttgaagaagaaaataaatctaagtctggaagcaacatagatattggtggtattgataattctaaaactgagatacattaaaattattaaaaactcgtttctaaggcttgtcattttgttgaaatatattttgtttggtgttttattaacttggataaatgttctctttattatcttgttgtcatttttgtattctatatatgtatagtttgttaacatataagtatttactttgttaattttcaggtttaatgtgttattaaacttgctttcattttcggtttgtacattttaataattggttgttatattttttaaggttgataatgctggaagtaaagttgatcaaataattattgagaataataagcttgctaggaagaagaagagtaagaaggtatcaaaaaatgatttctggtaaatataggctagttaagatttttacctcctaaactttgacatgtaccaaatcatgcccctcaacttttctggctattaaaaattctccctgaactattgagattgatatatttaaggacttttgtccaatt

SEQ ID NO: 249571 - DNA, 1174 bp, Cannabis indica
aaactttacatgtgatgtattgggggattttatttaattgtctcatatctctaattctatcatgttcaataataataattgatattttttgagttagtactatgtacaacaaatcaattatacttgtgaggcactatttctctctttctcccaactaagaaaaatattaaaaatcacattttaaaaaatattagaagaagatgagttggtaaatacaacaaatgtaaacttggattaaccaatgggtagaaaagcatcaaaggctctatttaaaaaagactaggaaaaaataaagtgatgcctacaactttgctatatagggaaattaatgtttgaagaaaaaaaaaagacagtgcaaaaatattgagctttatgaaagaatatttgctcaagatcaagaaagattgattcttgattaaaaaataaaatttcagctagaagaataaaaagaagaagaaaaaaataataaagagaattgctattaggtactagtggtgtctagcaccttctcgacatgtcgcgttgcgattcgctagcgatactccataaaagctattatattaaattatatgggactcgatacttagttggaccaatagcgatattgacacgtagaagggtgtcactggtgccctttagcatttctaaaaaataatggcaattgatactgcatttaaagcacatcattttttgaaagtttccaaatgaagatagttaaaaaaaggttagcataagtctcatcttcaataatcatattatgcattattatgcataatttcatattatcattgagtgtttcttgatcccaaaaccgatcgagttggaccatgcacgattgtagaacgtgattgaagcactccaaatattctctccacatcttttcttgtaaactcttcacatgcagcaaaatatttttacttatatctttgaggagctgctataattttgacaaatattgaccaattaagatggatgtatctcattaccaagatagtatcacattgtataattttgaccattaattgaatgattaagagcaactccaaggagcccttaaatttgaagatgcagtgatttatcttctccaaggtagcactattttgagatgatttatgcagtttttgctacagtgtactgcatatatgcagtaacactgtagcaactgcatcttttt

SEQ ID NO: 249572 - DNA, 574 bp, Cannabis indica
atgtcaattattgactgcaactcatggagatgtccattttctatcattcgatcagcttcatccagcacgaaaaaagacaatgaatgtactgcaaagcaaatatgaggtttcaaactgataacaaatttaaaactgaaaagcatttgcaaagaaattaaacgataaatatggaagaaagaaaatctatggacacaaatacttagaaccaatttagctagagtcaacattggagaaagaacttgtgtgccaaggatattttcttatttcgattttattgtcagaagaaatgatttaatatagcaccagcctccacaagatgcttgtcaccccagacatgagttcccataatctaccaagagttccaacaacaatctcaggcctccattttagaagccttgtctgtttctcgaatgacattcctccaacaattggaacaactctcatgttggtatcgttgccaataatacatagttaaattgagtcggtgaataataagatataaaagctcccaacacactaaaagctattatctcgcctttattttattgttaacacatataatattggtaattga

SEQ ID NO: 249573 - DNA, 1629 bp, Cannabis indica
acattacctctcttcattatatttttgcataaaattataaactacgcaagtgtacgtatcgagcagtactcacgtaggttaggtcaaacaacaggaaattaaaattgactactacttaactagatttatgtttatatttggttaatcgaaataagattggaaagaaataaaaatagtaagcaaaaaaataaaagaaacaagttttaatgttgcttgaatatggatgaaagattaaatatatgaatcttattgtttcagttacgttaatgcaatgtatgagctttctttctttaagtgatgacagattatagaaataaccgcaactcttcttagaccattaaaatcctaaatcatatattatatatttgtatctttgaaataaattaacataatatacagtaagtacgtaacctaaatgtcacacatgctatgtaaatactctcgttttacatcaaaatctatgtttgttctattagagcatttttaatatttacttctcgattttatataaagatcataaatcatattcaagatggccaatataaaacatagttaaaataaataagaaaaaatcacactgatccagagaaaaaaaactaacaaatcacattaactaaatgaggaaaacatcattcaacattcatcatatccttaaattggaaaattagttcataatctctaagtgcaaatccataataaaacttgaaacagaaattgacataagaaaaataaaagagaaaagaaagaactagttggtgatcttaatccgggtcgccacactcgcttcttttgcctccttatttgtttctagggttctatttctgaattatttgcttcaaaacacgaaacctttttttagaaaatcgtttttgcaactcagaatggctaaattacaaaactacccaaaaatctcattcgtaacctatggtcgcgaccacataaagcctagtcatgatcatagtacaacctcataaatcaatggttctgcctacttcatagttgtgaccatagtcgcaaccagtaaattagtcgcgactacggtgtagcttggtcgtgactaccttatgattttcagcatcaattttcttcaactttcagctcgtcccgtcctttcgtcacttgatagaatttgtactttaataccttgggaacctgaatcaaggaaggaaagcataaaaccattccaaaaagtgatattaaagaataaaaaaactctaaaatcgacccaaaacttaggctaaaaatagcctaataaattctcccaaactaaatccttactcgccttcgagtaagactaaaaattaaaactcaaaattctgactaagagacaattaactaagtcttcaaacaaccaaactactactaccacctacgaaacttcaaacaattaattaagccagaatttcaatctcaaaactctaacaattaattcggatgcttacttttaaaaacaatgtatagatgtagattatttcaatattaaacaacatcataattattttactctatccaatctctccacagcccaatgatcaatatacttgcatgactacctctctccgctaatgttaccaatccttgtttggaatcaaaaaaacttcctgggttataatgtcatggcttaggtaa

SEQ ID NO: 249574 - DNA, 1025 bp, Cannabis indica
cgtcaaggcaactgtcagattacctattgaccccgagattgaaaagacttgcagacagaaaagaaggagaaaaagattagaaagagatgtaataggggttgaacaagaaggagctatggatgacaacaccaacgtcgaaaacaatgataataatagaggtgttgtagaagaccaagctaatggtcactatcaaaatgatcgtagcctgagggactacttgttgcctaacttgacagggaccagatcctgtataaggccacctaccgttgatgctaacaattttgagatcaagccgcatactgtagatggtccaatccacaatccagttttgggggctgccaacagaagaccgaaacatgtatctcgctaactttaaagagctttctcagacatttaaggtgaatggagttagtgatgacgccatcagactgaggttgttcccattctcattaagggatcaagccaagagttggttggtatctttgccacccaattctatcaacactttggaggaattggcactgaaattcctttccaagttctttcctcctactaagattgccaagctgagcagtgaaataaataacttcatccaacaagataatgaatctctttatgaagcttgggatggttcaaggacttaatcataaagttccctaatcatggaattgaaatgtggatgcaagttcacaacttccacaatgaattagttggccttacccgaacaaccatatatgtcacagctggtggggctttgatgagaaaaactgtgaatgaggcttattaactacttgcagatatgaccatcaacaaccaaaaatggtcaacagaaagaagccaatcaaaaaaagttgtaggtatgcattaagttgatgccataatgaagttgacagcccaggtggaggccttaactaagttggtgactgcttaggtaaaggaagctcaagttacttgtgagttatgtgggggacctcacacttatgacactttcccggtggatgtgaacagtttgccaatggagaaaa

SEQ ID NO: 249575 - DNA, 565 bp, Cannabis indica
tataataccattgtaccacttaatcaggtgagcctgtgttataatacactattatatataataccactacaccacctaaccagatgagcccgtaccacgacatgacatcaaatataacgcataacttaattagacgagcccgtacctacgctcggtactcacatgtcactgacacccatacttacgcccaaacatgatgctaggaagaaacccaacaacgatttcgatctatgccataaccatgcattttcatgtcactgatgctcatacctacgcccgatacatcgctaggaagaacccaatagcgattttgacctatgccatacccatgcatgttcatgtcactgacacccgtacctacgcccgatacatcgccaagaagaaatccaacattgatttcactctatgccataagcaggcattttcatatcactgatgcccatacctacatctgatacgtcgttaggaagaaatccaacagcggtatcgatctatgctataactaggcattttcatgtcactaacgcccataccaaggcctgtacgtcgcaaggaatattgcatc

SEQ ID NO: 249576 - DNA, 701 bp, Cannabis indica
gacccctaaggcactttgcctctgtgggggaccgtcgtggtaaactcctcggtgacatagtcttctccctcgaccaaaacgtcaccctacttggatatcggcttcctagcttcattatatcccccaaagtgtggaggcccgaccactctttcctcctcagctttagaagggctatcaggacggacatcgttctgctcctctatctcttggacctcaatgtccccctcataatccttctcctccacagtgggcatatctttctcggcacttggcagagtggcatgctgggccacgtgagggttagatgcattaactttctgtatcatctgctttgtgcgggccatcatccttctcttggacgaatattggttcgtatgccgtgcaacagtaacggtagggacaactattggaataccaaagttaccagaacttggatggcctacgggaagggtatcagcaacacctggtcggacaatatacgtccagttggacggaagataacgtctgcaacccttctttatttcccaaataaagtgaccataaccttctcgtatgatctgcttggtatagaagtggtgttgcagttcgggttctggagtagaggaacgatcactactcacttcccgatccttgaagcttgaattagaaagttcgccactcgaagaggacagactagcgcgaagatgaggttgatcctcgta

SEQ ID NO: 249577 - DNA, 626 bp, Cannabis indica
agggcacaaaacccaacacctaagactcttgctgtctgaatattttctcctttttatatatgtctgttcggcccataggcctttttttagacaaagtgaccagccaaacagtttttaaacttggaatatgtttttcatttttaagacagttggctgatcgggcagcctttaatcccagttttactgtgcattgttatcttttttcaatgaatacaattccttattatgataattgtttgtgcaactttgtctgttttgtttttctttgagctttttatttacttttaccaacgctttacatgggtatagttgcccccaagtcatcgagcagacttttgactcttggtcacttgcatttcacaagtatggtttttctctattcggttccatggatttgagcagatcttttgtaatatcccgataagccgaatggttaataattagagtttatatttatactatgggttattaaaataattagtgggattatgatcttactaatctatttcagtataaaatttaaattttgctataagtgagtaaatgaatgtaatttgttaattatggagatttatatagcatgtgtggacgtaatatgagctataagtggaagaaaaatattttca

SEQ ID NO: 249578 - DNA, 642 bp, Cannabis indica
ttttaaaatttatatacattaatatttataattttgatattatattttaataaaaaaaataattaaattataattatttaaaataaaatgaataataaatatttatttcttaataaaaaattatgggcttttgttttttaataataaaaccttttaatatttatatttatataaatttcacaaaattatttattttttgtttttataaacattaattaaaatgttgagtttctttattttataaaactgtttattattattttgatttattttacgaaattatttattttaagtgttaataaatatattttatgattaataatttttaaaatactaatataataaataaaatattacaaaataatattacaaatattaattatatttttatcgtaattagtttaattattaatgatttatattatttaataattaaaatttactgtttcatgtaatatgttttcaaagtgtataggtttttaaaataatttttttttgcacatttttttttgtaataagttgtttttgttgtacatttatgaaaaaagtcctaaaaaatattaaaattctctttatatatatattttaaaaaatatataaaacaaatgaaactactgtaatcgccggagttgtcaccggtac

SEQ ID NO: 249579 - DNA, 668 bp, Cannabis indica
tcaaactactaaattaatagcaatttaagtgtcattcggttaactgtcgctatgagttgcttatgtatattcttgtacacatgactcgtttatattgcaacacctaatattattatttaaaaattattttaaaaatttattttaaaattaaataaaataataaaaaataaaaataaaatattgttcatatattacaaatacaattactaattttatgtaacattttaataattaaataaatggtgattgaagtatataaaataataatattagtaataataaatatgatatatacttgaattgtcttatttttattggttgaggacattcaaatatgtgaaaataagacatatggatgctatctcctctccttttacaacatttgtaaaataaaataacaaatttacattatattatatttaacattcgtaagagacaacaagtagtggtgaaaacctatcaatgccacaaagtctaaacaaactttatttcacaaaattaattaagatgcttatgcaaatattaatgtatcttacttttttttttttttagaacaaaagtatttatagattaaaactaaatagagttagccttcacgcataattatatgagatgatgtctagtaatgaaaaaaaaaaaagaacttaactatcaagtaacattttact

SEQ ID NO: 249580 - DNA, 600 bp, Cannabis indica
agacttagttgatagtattgcactatcaaagtggagtaactgctgtggaatttttaacatattttgcttgtatctatctatgcttttctagtgtaatcattttgatgtgtatcttttacggaagtgaaataggatgttttgttgcaattgcagagtctttaaacttaaaaggagagcccaaaatctatgaatttggacattgattgggtcattccaacactattttgtgcctatcttttcagttctagaattaacactgaaaaagaactaacaatcagtccattaagaaagtcaagattctataattgtagatcggtcaattttatgtaagttattataagataatagttgcttgcatgtgtttttgtggtaatgagaaagaaatagagatgataacattgattctttgtaatttttagtttcttgtcatatcttaagctgctaattggaagatccaatggccttttcaaggctttctagctaagcaaagaaattgaaaatgtgaggtaaacccaaattttcctatgcatcatattatgagttttggtacaatattttttgtgcaatgtatatctcttatctccaaatggtattttttgt

SEQ ID NO: 249581 - DNA, 923 bp, Cannabis indica
aaactttcttaaaaaaaaatcttgatttgcagcatcagaatcggatttcgtagtaggagatcaggactagaaaagaaactatctaaattgaaccaagattacgaattaggacttcaaacctgccaaataaagataatttgatttgttctaataaaggcaaaaccaaaatcatccattagaaaaagagaaagtcaagtttcccaaaattagacaactttccataaaagaatttcttctcttataagaagtttccaaacaaagaaaaatccagctaaaaaatgattattttctaagatagaatagagcaataaaatgcacaaaatcaatgtaataaaaacaatttaaatgctcaataaaaatgcacattaattaaaaaatattttgacaactaaattgccaaagaaagacttaacaatctctccctttggcactttagataatcaaaatatttttaataaacatacacctacaaaataaagttagcgaaacaaacatatataaaaacttcccctgagaagcacaacattaaaccaaaataaaaagctaactttgactaaagacgaatacaaacacaaacttcaaatccccctggacagttgagtataaaattaaaatcccaaatacttcccctttttgttaatctataagggccaaagacaaatagaaaccaagattttccaaaaattaagatttgaaaagcaatcatgatcaacaattaaacaaaatataaagaataagagatcaaattttaagaggaatctcatcaaaaatttactaaataaagcacatgttgatacttaccaaaagaaagacaaatgaccaatttttcttagcccaaaagtcaagtcacatgactaccttttttttttaaaatattatttttttttcgaaaaaaataatagactaaaatattttatacaaaa

SEQ ID NO: 249582 - DNA, 1420 bp, Cannabis indica
aaaatatagcattagtgaaagaaaaaataaattattgaataaaatggcaaaatcgtaagtagtggggcccattgtatggtcggccacttaaggagtattttagccaatttttatctttttttaattccatataatttaaatctaaccctaggagaaattctatataaggaataagatggctctcattctcatccaatctaagagttttcattctttgtcagacaattaaaaacttgagaccctccttctatagatttcgaattctcctctttttctcttcataaattttgagccctttagtgatagagtacatgtccattcataccaagttaagtacccaatcatagtgtggaagactgtgaagaatccaacacgtgaaggagaactagactcagatcttgttaatactctgcgacagaaaggaacaagggttagagatctgagtggaaggagacatattattttgctaccaccaatgtaaggttttcttaactttatatgcgtttctttttattattttagagaattcatatttagggtatttatcaacatacatgttagtaaatctagatcctggtaaaataattttcaacaattttcctgaaacaaaagagaataagcgtaaaaccgaaacaaattgacaaaaaatactctaaaatatgttctaaactaccctaataagaaagtataaatctcgtttatcaaactcccccaaacttcacactaactcgccctcacgtaatcatactaaacactaaaccagacacaaaactaaaactgacaaaacacataaaagtcaaatcaatcacataaagtaaaatttgagcctcaacctttccaataagccaggcaacaaaattatcaaaaatctcaactatttatcaaatctaacttctcagctcaatcacatcataatccactccaatcctttttcgaaatgctcacgaaaccataactatcaaataacaaacatttgaaacaatttatacatgtcaaatcatactaacaatccatcaaacctcttattccatatgtttgcactacttactattctccactaatataaataatgcatgttcaaaaaatcaaaaggtcttttaggcttaagacgtggcttaggtaagggtagatgagattgtcatttaggctaaaagtataccataagcacaaaccaaaaactttttcagtgttcttattcataaaattaaatacaattacattactgtgagataacttagaagaagaagaagatgaagtagtagttgtagttgtagatttcattttcatccaagtttagctaaagtgatccccactacactaatgccatgttcaacttatagtataggggtcatgcctgttgggttttatgccctaaataaaactcaatttcaatgtaatccattttattcaatatcaataa

SEQ ID NO: 249583 - DNA, 830 bp, Cannabis indica
gatgacaatagatgatatacaatgattaaaataattcttaatgatcggaatataggaaaaagtgttatatgaaccatgtcgggtttccattataaaaaaaaatagtaattacatgtcaagctcatctatttgtacatctaacttctcatattattcaaagaaaaattatataaaaattagtaatattaaactattttaaacatccgccgcgcagcgcacaggttgttaactagttcatatcataagaatttattaattttaaattcaacccattcaagattataagaataattttttaattataatccttttgtttaaagaaaacactctttgattataattacgaagatattaaataattaaggtaaattttgagaaaaattaagaggaatttagaattgcaactggactcagtaatttggctaacttagctgcctacatactttccatatgaaagttcaagccatgtgtagtttggaatgaggtattttaaaattttaatataagaatttcggtagatgaccacttttagaatttttttgctatttgaatatttagagaaaatcctaggtgaataatcttttatagaattttgagagttgtcttttatcttcttttaaggtattggcaactccacttagtctgagcaactaagtttcctacatatctttttataagaatcaagtcaaactagttccaaagtgttcaaagattttgtatttttgggaactttgtggagaattaactcactttgatatattgaggtaaatgacctcatttagaatttttttttatatagaggtgaatatctcatttgggattggatgagg

SEQ ID NO: 249584 - DNA, 747 bp, Cannabis indica
aaaaatatatatttaaaacggattgggtcagatccgatccgtaaaaaaattaagcggggcgggtgggtcttatccaagatccaataactatctgaatgtttcggatcagtaatgatccgtcggatcggatcactgacccaattcgaatgaatggatctttttgccatgtctagttttcaccttatccattcgcacattgagagcattagcattcaaaagtttatctatctccttttgagtttccattacttgcttcgatgacaatccaaatctttgcttattcaaagttcataggcaattttcacaatgttcaagagattcgcaaagtcccaaagagtcggctacatctagcgttcatcttttccaagcctcgaacacaatggatcagcattcatcttcttaagccaatgaggttcaaaatggaattgtcgtttaacttgctcatgacttagtagaaaaacattctcaagtttaatgactgtagggtgatggtgagaataagaaagtcaccatggcacacttgaactgaaggacacagctcagaccaagcttgattgcacacaaaacgatctaactattcttgatgtgaaataccttgccttttattcatccaagtgaaacttggccattggtaccccaagtcatctagcatacaggcatcaagaacttaatgaaactcagtcattcccataacatcgctgtctgtcccactcttttgtacatgcatagataaaatctcattgaaat

SEQ ID NO: 249585 - DNA, 3560 bp, Cannabis indica
ggaaacccacaaacaagttggctgcgtcctacaacaaactactcatattgtgctgttgggaagaaattacaaaagttaactattcccaactgtatctgtaatatttgactttgttaaccgtaaaccaactttcttttcttataaacgtatttttgttgttgagttaaacagataactttctatttgtaagtacgatgtaacaaaactactatatttgacaacaactacataaataaaactgagaacaaaggtaaattttgaggtgagacagatgtgtgtagttgtacaccacacgtgcttgacacaaaacaacacaataataaagccacttggagttttccgaaggaaacactaacctaccagccatggcgtgaaagatttggctcttcttctatattaaattaagccttaaaaacattactttgtaaattcctcaaaaccccaattcaagtttcccttaatattatattttcttttcccaacatatacccaaataaaagcttagcctctcctttgtgtggtaggtaaccataaaaaaaagtacagcatgtgaaagaagaagaagaagaattgagaaagagagagttttgtgtagagatggagagcttgttatgcgacgagcttcttgaagaaatttttcagaaactcccacctagttcatcatcttcggtctcttggtttcaaaacgttggctcaatctttaccgtacttctaagaccacgctctctgtccaactaacccttcaaaattcaacaattccagctctatctactcttctctctcactacccttttatctcttctctctctctcctccttccccttgagtccaccatcaccggcgacagcgatgaccctttgttgaaaaccactttctccgatgaactccttctcttggcctcttcctcttgtcctcgccttcaaggcctcaggttcttggctggtcctgtctctcgctcctctctaatctctctctcttcaacatgtacacaactcacttctctctgtatcaacctctttagccctctgttcctcacgtggcttctgaactttccgtctttgaaagaattgtcaatcatggtgtgccatggggaaggctttgaccacgaaattgagaacaatttgggatacgggcatgatgattttgatgcagaattgggcatagagagcttgtgcttatccgggattcgtacggacgattgggggatgggttggctatggaggagctgtaataaggtgaagaaattgcagctaaggagctgtgagagcattggagatggagggtcattttcgtcatttgtgaggtgcctgcagggaattcaagaagtggagctcagaacttgtaggagtatagttgatggggttcttctaaaacttgctgagtattctcattctcttatatctcttttggtttatgatggtggtagtagagaaggtctacttagatttttcagccacagcagttgtaatttacaaaaaattgatcttcgtttgcctcttgaccttaacaatgaccatcttttggctgcttcagtaaatttcaggaccctttcaagtcttaggctccaaagttgttgccttgttagtggtgaaggcctaaaagctcttggggttgctatgaattctgggcttgaagagttggccttaattaactgtgatgtagttgaaagagagcctggtttattgaccacattaggacaaaacttaaagcaattaaggaaactggacttgtcttacaatgaaatgttgtttgataaagagcttatctctatgctagtttcatgtcattacttggttgatttgaatcttagaggctgcaaaaggcttactaattcagctatggtcactatgtcaaagagctgcaagtgtttggagaatgttgacataatgagttgttgtgggattgaatctggggctgttgagttacttcttctcaattctccaaagctgagaaaggtgctagttgaggaaaccaagctctctgatgctgcaaagacttgggcatctcttaaatttatccaacttgtttaatttatttgggaagaattttttttacattttaataaatgtttcaaatgaaacatgtccatacatatatatcacaccacttgttatgtaatcattgtaaatgtttcttttctatgttctgaccacaaaaaggagcaacttttatgctcgaaatgattgtgcattaaaacatttgatatttttttttctcccataaattatggttaagaatcctttgtattatcttatggctgtgccaactgccaatgaaaaaaacaacataaactatgatgtttaaacttaaatggtagtgaaaatggacaaaacatgctttgtgttcatcctcaactgcaattaacattcatgaattcaatggtatttgattgtgttcagcctggaaaccaaacatagctataagttttgtaatatattggtcgaaattcatgggtatcactaatcattcttaacgctaaccaattattggtgtcacatatataaaaaagatagtatttgacccatgatttaaaaattcatttggattttgacattaaagttgtttgcagtcatgggctatcattttaatatcttcaggtcatctgggttcggttagaaaaatactgcactcaatatataaatatactagggttatgaatgactacataggatagatatgtaatatactagtgtactaaagtataatgattatatacatatacatgcatatattcttctatatatgtgtaagtttgatgaagaatgaagagcaaagtgaagagcagaaaagaatacaagtattattactcatatctgtctaaatttataacacgttatcagcacgatcactctatcgcatcatactcatatagttgctaccatgtcaaatcttgtgaagaatgaatttgctgcacttgatatcatgggaaaaaattatatgtcttggattattgatgttgaaatgcatctagaatcaatgggccttactgataccattaaggagataaataatgcaacatctcaagaaaaggcaaagacaatgatttttctccgtcgacatcttgatgaaagtttaaaacatgaatatcttactataaaagctccaagtgcattatggaaagatcttaaagaaagatacgaccatcaaaaggatgttgttcttccagccacacgtgatgaatggaatggtctacgttttcaagactttagaaaagtcaatgattataattcatcaatgttcagaatcgtttctcaactaaaattctgtgggcagaaaatcacagaagaggaaatgttggaaaaaaaaacgtattctacattccatgcatcaactttaacattgcaacaacaatataggatgcgttatttaaagaaatattctaaacttattacatgtttccttgtagcagaaaaaaataatgaactattaatgaagaatcatcaatcacgacctactagttcaatgacacttctagaagtaaatgccaaactataataattattgacgaggtcgtggttgtggccaaagccaaggaagaggtcgtggtcgtggtcaaggac

SEQ ID NO: 249586 - DNA, 728 bp, Cannabis indica
gtttgcttcccatcaccataaacagtcaatggttcctttcttaatgcctgcaaaacgtgtaaaaatttacgcttgttaaaatttaactaaccatgaacgttatcatatatatattatgaatatatatatacataatatttatatttatatatatgaaaacaaagcatagaacaaatagagattaaatatgtaataacctgagctacaaaattgctgacaacacgaccatcgtcgatgcacatgcgtggcccataagtgttgaaaattctagcaattctcacctgtggcgttatttaataacacaaacacacagtcaagttaattaatcaattgatcacttcaaacttcaaaggcacgcatatgttgttgcacatatacattgattatatatatgtgtgtgttttttattaccatatatcacagtaaaaagaaaagtgtgtttttactacctcaatgccaaggcccctatgatagtccatgctcaaggtttctgccgttcgttttccctcatcgtaacagctcctcacacctaaggcagccacacccacacacatatatatcaacatactaacaaaatacatatcaaccaatattgaaatgcgtgttagttttgattaatgctaaagggcaccactggtgcctagcaccctcttacgtgtcaatatcgctattggtgcaattaagtattgggtcccatatagtttaatataataatttttatagagtat

SEQ ID NO: 249587 - DNA, 609 bp, Cannabis indica
tcagaaaagaattccaacccgggcagcaagccctactttttaattctaggttgaaattattacctggcaagctaaaatcgagatggtcgggaccattcacggtggtcaaagcattcccatatggagctgtggaactaaaaggtgaaagccccgagacttttaaggtcaatgggcagcgtttgaagctctacttgggaggtcaattagaccaagccaagtccgccattattctagcgcctctctaagcagaacaactcagcgtctggctagatgacgataaaggcagcgctcttgggaggcaacccaagtgttttcatttattttttcagaatttttgctattgtttttagtttatgttttagtgtttttagcattttaaatttcttgtaaagtatcaaacattatatttttccagttaaatcgtgaaaatcgtgaaaaacataaaaaaaataatttttcgagactcaaaacccagtggtcgcaaccaccaggttcctaggtcgcaaccctggtcgtgacctggacaattatagagccaatgaaatttttttggttccagtggtcgcgaccaggcataatgatggtcgcgaccctttttcctagtcgcga

SEQ ID NO: 249588 - DNA, 796 bp, Cannabis indica
aatttcttcaaaagagattatatttttggacaacgtctcataaagagaagagaaaaaaacacataaaaaaagttgtacataaatttttgtaaacgcccaacccgaacaacccgctcgaactaaaccgagataacccgccgaaaatataacccgtccaatctttatactgggcaagttgaaaataatataaacccgcctaatcaacccgaactaacccgaccaattctataaagaaaggcttttttatatagccacattttatataaaatagatatgattatgtaaattgaatgttttgatcgttcatctccctgtacataataaaattaaatttaactcactgaatgattaactttaatataaaaatttaaaaagaaatatatacataaaaaaaaaaatttaagagagcatatattaattatagcacaaaatttgaacggttataactcatttgaatgacttttagttttactactcataatataatataaaatattagaattggaattaataagaaaaaagataaatcacattaggaaagttctaagtagggttgtacaaaaaaaatttataaaccgcctaaaccgaataacccgcctaaaccgaaccaaaaaaattgataaaaagtacaaaccgaaataacccaaaaaaattacaaaccgcccaatctgttaattgggcgggttgaaaataggtccaacccgcccaattaaaccgaccaacccgaccaacccgattttgcacctttatatttttttaaaatttttagtttttattatatataatataaatgatt

SEQ ID NO: 249589 - DNA, 877 bp, Cannabis indica
agcttgatctttccatatgcaatagtgtctctgataaagtgatacctcacatctatatgtttggttcgttcataaaacacttgattcttgctgagatgcaatgcactctgactgtcatagtatacttacactatatcatgttaaattccaagttcccttgtgatgcctttcatccatagagcctcctcaactgcctctgtacaagcaatatatttagcttctgtttttgaaagagcaactatggactgaagatctgccttctaactaactggtttttgttaaatttaatgacatatccagtttgtgattttctggcgtctatgtctccaacatagtctgagctaaaaattccacaagttaacccctaaattctcagtgtttggtccatagattagtcccacatttgaggtgccctttaggtatctcataatctatttgttagctttccaatgttcaactcctagttttcccataaacttgctcactatgcttactacaggacagagatctagccttgtgcacaccattaagtacatgatgcttcccactacacttgtgtgtgggactttcaccatgtagctttcttcttcttcttctgtgaagggagtgtaacaccctaactagcataggcgtgttgacgtgatttaaacgtactctgcagctcgttgctaatcaacgaggttaatgaaaatcgtgattaattaaaattttgttatttaattaaaacttataatattacatacaaaatatttcaggatcctgtttacaaaatactttacaaaagttgctattcaataaaaaatatttgccgcctagcgactaactacaaaagccctgatgtcccgaggattgtacgctccaggcctaaccgcctcga

SEQ ID NO: 249590 - DNA, 700 bp, Cannabis indica
aagtgataaataactatttgttactgtgtattttttcaaaataaaaatttagtaccttatgtttctaataatgatcacttagtacgagggtcgaccctaggcataagtgggctagacccgcgcctagggccactcattttaaggggtccaaataaaaaaaataccttttataaaatatacatattttttttaataatttttaagaataccatttatctttatagtaagggtccaaaaattttttttgcctatagtccatttcaattcagggtcggctctccttagtaccctttatttacagattctacacatttggtactatctctttgaatttaatagacctaaatttttagaatgactagattacccttcgtttaaatattttatatgattttaaatattttttaaatattatatgattttataaataaataactaaataaatttttattcgattcaacttccacttttattcatctaaaaaaaactttcatttttatcttgttgttctcttccttgttcctcccagtttagatatacaatacaaaggctaatatattttatataaataaatacaagccttgaaattaaacaaagagaacattaaatatatattattgaaattatcacaagtcacctccttatatataaatatattagctccaaacgagaagactactatgtactagctgttgtgttg

SEQ ID NO: 249591 - DNA, 908 bp, Cannabis indica
tatacttgcgtactaaaaaatctataacacttggcttggaggcctttagaaggtgaagagaaaacaccctctcatggatctccgtaccaaaagggatttccattaaatgatcatcatcctcaatcccaatttttttagagtataaatcatcaaaatctaaggtaatctacggctggcatatgttttttatcttctcatttaaaaccttaccatctttcaaaacccaaatttggttccttaatatgtagatggatggaaaaaactcgagctcttgtcacccaaatgcagccagagctaattcttcttctttcaccgcgaacgatgcttctgcatcccattctttattgcttgtcttttctgtatttgatgtagctgcattacattttgtagttttttttttttgaatcgaaaacttttatccatgtgaccatacttcccacaattgtaacattctctattaaatttattattattctttgactaacctcctttttttgtctttcttttgagctccatctgtttggtagcttccatgatgactatttttgtcatcatgttttttaaaaattttactagcaatttggtcgggtttgacctttcttatcattgtttaagagtgtttcttcatcactctttttgagactctagatgtttgcttagctaatgcttcttggttagctagcaagttttccaattcaacaagagaaggttagcttggcaagccttgtattgcagcaataaaagttttaaatttttggcttcaatccatgaataataattcttctaattttagcatctgacatgccagaaacagaatagatttcatgacaaaaagatcttaccttggtgaagtacgtattggttgattttcgtccctctgcctgattgagagaagcttaatctcctat

SEQ ID NO: 249592 - DNA, 1191 bp, Cannabis indica
tatgtaataaatgtatttttataatttttattagctaatttattatatttgactattttattaattttttttaaaaatgaaatatttactaacttaaattgaagatcatcttgcatcacagttctttttaatgctacatttttcttaaaaaaaaagtaaaaattccatattttaaatttttctatgttctacgatttcggagcttgaatcttcgaggcccaatggcccgggtatgtagaaacaaccttagatatttgagtgatagagattttaggatttggctggaaatcttttagaatcttccatcttaatttgtttctgcaatagtagttgaattataattttacataagaaaaaccttagatatttgagtgatggagattttagctataaacagtgagtaagaaaattttcaacactttagaatcacttaaaagatgctatcttcagaacatatgctttattgaaactctttattattaatattgttttttctgtggaacatttactcttggtaatgagattttcatttattaatgcaacacaattgaatcatattttgttaattatgtttgcctttgtaacaaacagcttttcttttgttttcacaaatcctaaaattggcgtaatatgtgagaataatgtatgattttgggtaaaggaaacatttatattgatattgtttgtaatttacgaatggggatttggtccctttcaatttgctatgcctgttttgttggaatgaattatgaatagaaatggattttttttttttttttcaaaatttaaattagtttttagagagatgaaagaagtggaaatatggttttcaccaattatatacatttatttgcaatatgcttataagttgggccagtgtatctcatcaggactatgattggttgtagaactgctacctataacttgtaatcccggttggcagtttttttttttttttgaatttaagtgtttatatattacattgtataatttgggactcgaacccaggacctccaacacacacgcaccctcttatcgccccttgagctagcctcaagtggttaatccctattggctgtaatatgattgtagaaataatagggagactaatcatatgatattctgtcaatgtatttttggataaaaatggattttttgaaagttggtgatttaattaaaattgtatgtatt

SEQ ID NO: 249593 - DNA, 528 bp, Cannabis indica
catttccataagttgtttgagggtaaaacgatttcataacgatttcgactttttatttttcatcatgcatacatttgttggattaagttgaccacaaggaccatgcatcatatgtttaatgacaatggagaaaagatattgatttatatttttatcgggtaattcagcacagacaaatctgtcgaatgattctggcgctataatttttgattgtggttttaagataattagaaaatgtgcatgtggtaagccccttttttgaaattctatgacataaatataggcagctacaagtccaaaaatttgtcgtttaaatagatctatttttaattcttctaattttgctctaaagatccttgcaactaaatctggtctattttgtacttcttcatttggaagtaattcttctttaatttctggccagtttgaattacatgttattgttaaaaaaatatctggtttcccaaatctttgaactaatgacattgcatcgacatatcgttttctcatatctctaggtccacctat

SEQ ID NO: 249594 - DNA, 646 bp, Cannabis indica
tgtccttcttgaaatacctaatcctgactccaccctcgttcctgaagctattcgtaaaatccctttttgggtccagctccataacattcctttttttccgatgatctatctctttcactagacttgtgggccaaattgttggagtcttgctagagatacaccaaccatccctactcaaaacttaggattcatacttatggattcgttttattttttatgtcactaaacctctcctgaggtgcatatctattctcttccctaggatggccattgctacatggctgaaattgaagtatgaagacctcccagaccattgctactactatggattccttggtcacacttacacatggtgcattgactacatgagggccactgatgaatccccacaccccctccacttccttacaagaatgtgctgagaggaaccaccagaacaaagtaccaaggaccttttgtaatactcccctattacaattagccacggctactaggaactccccaaccaaaccagctcatgaaaatgccaagccaacaagttgctaacattgccacacatagtgcttcccaagggccacgtacccaacaagagttctttttccagcttcaggaaggagatcaaacagactcagctggcctattcatc

SEQ ID NO: 249595 - DNA, 512 bp, Cannabis indica
aggaaaaataaaaggctcatcttgaggagttataagctgccaaatccactctcactcaaaagcttgacgaagttgtgaaggccaagacagaccttgaaaactaggcagttattaggaatcttaaacaccaaaacgaaaatgaatacatcaaagggttggaggccaaggtcaacacggtcgaggcactgataaagctcatagaggatcaggtcatagctctaaaagtttgcattgaggagaaggacaagaaaattaaggcacagtccaaaacaataaattggttgcaggagactaaactcctttcttagtgaggccggggaaatgctttgaaagagttcacctctttgcgcatagatcttgatacagagagggaagagtatcaagaagagcaataatctcaccaatgagccctaaccaatttcgtgaacctagccaacactcttttgctggctcaccttgaggaaagtatccccgacatctataaccatctgtgtaaggatgctgaggagttt

SEQ ID NO: 249596 - DNA, 501 bp, Cannabis indica
gctcattgacctctctatcacaagtcccttagacggtggctgccctatccaagtgaagcgaaagaaccagaaggcagccgctaagaaggcttatgataaagatgcagatgaggaagatgaagaatgaagtacttcccattgagttttttagtctagtccattcctatattccacaaattttttttcggttccaactctaattttatttttttggcaactctatatccttctatacacatttcacatctccgtatgaatttttttggtttacaagtatgatacaatcacattgtaattttggtataggtttggttaatttgaatttctctcttttagtcatacattgggcctatgtaattattattatacaaaattattttaaaatttaaaaatacaggtagggaaaagtgcataaaaattcgcaattttatcttacctatatttatgcttcattttataaccgacgcaataggtataaaaaaaattatttcagcaacttat

SEQ ID NO: 249597 - DNA, 523 bp, Cannabis indica
aaaaacctactcccatgaaggacgtaagtaagagagacacgtccaagttcagtcattttcatatagactatggccacgacacgaatgagtgtgacaacctgaagtgggaaattgaattcttaattagaaagaataaccagcatttgcaaaaatacgtcaaggccaatcaaaattaaaggaccacccaaacagacaataataaagatctacaaatgcctccactagtggacgggcatttgcaagttattattggaggcccatagagacttgggcaaagctcgagaaacgtatgcccgagccttacagcacgagcaaaaagaaacagttttggctgtagaggagagaaagccaaacataccacgggtaggggaacccactataactttaactgaagcagatgttttctgcgtctacttcccgcacaacgatcccttggtcgtggaggtacatatagcaaatcaaacagtagcccgaaccatgatagataatggagtctcttcaaacatgttatttaagacaacat

SEQ ID NO: 249598 - DNA, 1191 bp, Cannabis indica
acaaatatcatagattcccaccaccacatcataccatcaaagatcaaatcaatattacttgtttttctctttcctttttttttctttggattttaatttcctaatttatattctgtatctaatagaacgaaatgtagttcacatttcacactacccgtaccaaaacaaacaagttaaactgaaaaagtaaattttaaagaatctttttcattgctcttttttgctttatttcacttgattggaatttattgcttattattacttatcaagtcttgcatcaattactcaaagttggaaagccccatacaggttgccatagagtcccacaagccactgaactgaacaacacttggaaagctcataacttattagtcattcaattaatccttcatagaaaaatgcaaggcatgtggggaagttacacctcaaaaccagaattccattgacacaaaataatattccatagaagattgtgagcaataaatcactgccataaattttctcagtactaattttaacaacagttgcaattggcttttaatgtatgcatgtgcactcactactctattgtaggaaacctttttgcctaatttaacaactactcttgagcctaactaatttttcattttttttttgccaaatgtcataataatactcgattatggagcctaaggcataaactaaatgtatagatgtggtaactctacactatgcccacgtgagattaagttattattataataatttgactgataaagacaatatgggaagtatataatcaatcaaaattgatgtgtgacaatataattttatcattgcaaaaaatggctttgacgattaagacaaatgaagagattaagtagtagacagaattttgtttattataagtacatctgtatgtcatttataagtataaatgtgtttgagaacttggcttttaatgtggcttgtgttataacttttacagcaaagagggagctgtatagccatcttttaagtacataggttcccaagagttgagtaaattgtggggtctatattagctctttctcataatttaattgtacttttcttttaccattttttatctatccatttatccaatacaatagcccttttgcccttatgtcacaagtcatgaggtttatatttctgtttctggttggaattcaaagaagatctatgccttga

SEQ ID NO: 249599 - DNA, 528 bp, Cannabis indica
ttttaatatataagtataagattgaccacttaaagatgttgcaggatccaaattatcaagccactaaatgagctagacacatgttcttttgaagaaatcatgagtgaaattccattgtggatgaaaaccccggataatgattgagttagtatttgcattttctttgcaaataacgtactattttcttgtttgtgtgtgtgtaatgatttgcatgattatgtttgttccatggcttctaaatttaggtagactggttaaacaagttcatcttggaaatgtgaccttacctcaataaggtgagatactaaaggttatatttggaagaaaaatgttaaaatgtacttgagcttagattgagtttggcttaatctgcagggaatttgtggcactataacaagaatagcagaacctatattcaaacagtacattggaaagtttcacattgaagcaatcgagttcgagagtttaagtcttggtacccttccacccaaactttatggttagtttattacttcttggatcatcttt

SEQ ID NO: 249600 - DNA, 1154 bp, Cannabis indica
acctaaattagtaaatctaaaagcactgacctagccacccacccacgcactccttcaccaccacgacatgagagatcaggattgcatttcacaccttctttcttcttaaacccagtttccaagcgaacaccttccaatcgcccatcactatcacaccacacgaaagaccttgggagagccatcaatggaggaggacgattactgcggtatgggttcttactttttccttaacatggtttctttttctattttatttttgtctttgttttcttgtgggttgtcttggagaaatgagctgattaaatttggaggatttttattgtgtaactgtagtgcttttcttctcaaaatctgtgttaaatatatatatatatatttgtgttgagtgatggtatcgttagacatttattttgttttattatgatggggtaatttttgtgggaaacaaaattgggtattgttgttttgtttgactatacaattagaatctttgcattttttatttggcaggtctttattggactatttgactttttacaaaagttctttttactttatgctagaatatgacttttctgttttaggttcacacataattgtagatagaatccatgtgcttatgtaatagcatatattactattttatcataaccaataaatgtacatatggtcctatcacagagaagtattataaagaaatagagtttaccaatatcactttatttttctactttctgtcaaaaacttttggaagataaaatagttcttaaaaatttatgatcattattgtgtaatgttcaattataatatgatacagtgataaaatttattgagctatacaacaacaaccaaaatatatggcactagtaataactaacacgatgaactaacatgctttattatagcttccttgcctttctttctcgtatttattgagctaaaaaccacatcttattatcagagtgttgcttgctacccttcactgtatatgctatatatatttatacattattgacatgtttttaattgtttcaattaatattttttgttttttttctttttcagattgtgaggcccaagaaaagactatttttgaaggttcaattggatctaaaactcaaacaagtgagcatgttgctcaaggccaaaccgaa

SEQ ID NO: 249601 - DNA, 872 bp, Cannabis indica
tacaaagttatgagaaaatgagttattctcgttttgatgaatatgcacatagggtattgttgtggggcttgataatttggatggtgtaattcctataataataagagaatcttcaagcaatgcagttgcaacatctggtctaaaaaatggtaagctttccatgctcttacatttcatataaataagttgggtaaattaatttaagagaattattgatggctttcccttaatttcccttaattttgtcatcaagagtttgataatataggttgatatagtagtgactttatgttgatatagtagtgacttagccaactcatttaacacatcaactgcttgatcatcatcctgctgagacacaatgagttttggaaggacaacaggaaccattctcgtgacaagtttttcagtttcaacacctagaactgcttcaaatctcttagtcattgtttgcaaggactttatacttaaatgtaattctttgcagaggaaaaagttaatcaatgaaagtgaatccttaaaggagcaaatttcaaaattagaggaacttttgtgaagcaagtagaatatgttagaggtatatatttactattcaagcaataaataaattttgccgcactaattagttttgtttcttaactttgcaggcatatcatgaagtattatctttaagtattatttggtgatagcgttaagtgtagttcacttttaaggtatataagaactttttcatctgctaaaccagacatatacatcaaaatagaagcatcaaagtagggggcatatatgcttttttattttagaaccctctgttctgtattaatttactgatttttcaggtgagattttatagtactgttatattatgttta

SEQ ID NO: 249602 - DNA, 661 bp, Cannabis indica
gaggcattctaccctcattggttttccaatcaagtattggttcctaagcccaacaagaagtggatagtctgcatcgattgcaccaacttgaacaaagcatgtccaaaggactacttctcgctatccaaaattgatcagctggtggacgccacaactggccatgaagtcctgagttttatggatgtatattcatgttacaatcagataaagatttatccaccttatcaagagttatcaagagcacaccagcttcatgatggacctaggcctgtactactacaaagtcatgccctttgtgctgaagaacacaggggggccactaacaaaagactggtgaacattatgttcacagatctcattagatgaaacattgaggtgtatgtggatgacatgcttgtatagtccaaaaaggctggggccaggtggaggactgatgtcgcccaattagttacactacggtcgcgatagtaaacgggctatatgtcgtatccacaaggaggaaaaatacactcaaaaggacagttagtaattttacgagaataaaatatgaactttgaatgtgatgagaatattgagaaaatgatttttaaaaattaaacaagtaattaaaatgagaagtgatcagaaaatgattatggaagacacaagctttgtacatgca

SEQ ID NO: 249603 - DNA, 3064 bp, Cannabis indica
tatgggttagaaatttgatttggcttcagtatacttctttgttatgacatcctattacgatgacgatggcaaatactgtaaagtcatttgctttgattaaattaaacagctttatataatttttcccttaagagggttattcggttgggttgaattgatattcttaggtctgctgctgttcaaattatattattggtcttttagtgttaactgagttaattcgtaatataacaattgcagggtctcaaaactgccatcgtagagggagatgttgtgggcggaacttgtgtaaacaggggatgtgtgccatctaaagctcttttggctgtgagtggtcggatgcgtgaactccagaatgagcatcatttgaaggccttgggtttgcaggtaactacaatgcattatcattgtccaaaaatagaagtttagcttgaccatgagtgatttttttactgtaatttgttaacttataggcactttatgcttctccattttttattttttattttttaatttttaactgaatataggttgcggcagctagttatgacagacagggagtggcagaccatgcaaataaccttgcaaccaaaattcgtagtaatttgactaattcaatgaaggctcttggtgtggacatactaacaggttttggtacaattctggtaagccatactttttgtcatataaatttcatggcacacaaactaaagttttggcgtttagttataaatttgaaatcagttcagttgcatgataatctcactagttgcttatgatgctgcattcatgtttgctactatgaaacctttcagggcccacacaaagtcaaggttggatctaacacagtaaccgcgaaagacataatcattgcaactggttcagttccttttgttcctaagggtattgaagttgatggtaagtcattcagaaaaatagtaagaatggaagtatgggtttatgatgcataaaagagctgaatgagtactttcattaggttgcttattgttcttggtttgatgcaagttattaacattcttatccctaagaattataatttcattttgatgcaaaccacagtaaaaattgaaagctatttcctttttacattaagtgttgaattagagcattaatgtcctaaggtatttaagttatttaagttcatgcaagttatgaagaatacacagatagccattgtggtttccttgtattttcatggagtggtttatatgttcagtgttcttcatactattagagatattttctgtcttacttacgcaaaaaaattaatttgtatgtggatacatatctaagctcttaaaatttcctgcagggaaaactgtaattaccagtgatcacgcactcaaattggaatctgtccctgactggattgccattgtgggcagtggttacattggtcttgagttcagtgatgtatatactgctcttggaagtgaggtagtgttccttttaatcttgtgctatttagaaatatttgtatttgaaagaaatgagcaacctttttttcaatgcagataatgtgtgtatttctgagttcaattggaaaatttaagactggaaatcacattaatccaagcatatcatttcgttttttctttctccctattctaagttaccttgttatcaaaatacttttcaggttacttttgttgaagctttagatcagcttatgcctggatttgatcctgagattgggaagttggcccaaagagttctcataaatccacgaaaaattgactatcacactggagtgtttgcatccaaggtaacttatttacatcttactaagtcaattttttattttttttgaaaaattaaacccctggctcataagtttatttttgcttttgttgtttgtttctagattactccagcaaaggatggaaagccagtcaccattgaacttattgatgcaaagaccaaggagccaaaagacactttggaagtaaggagtgttgactaataattgctagttgacttagccatgattcaaaatacatgacgtttcctgtgaattaagtttttatcacggcctctcaatttgcattcttacaggtagatgcagcactgattgcaacaggacgagctccattcacaaaaggccttggcttggagaatgtatgtcatcggtatactttgatagtgggcctatgttaatcattcacgaaaaaagactagctttttactccgtattgttttttgcaggtcaacgtaacaacacaacgtggttttattcctgttgatgaacgcatgcgagttattgatgcaaatggcaagttggtatgtagtttatttttatttatagcacatttctttgtgcgatcaagtcaagctgtaccgaactactgacgatttggaaaatcaggttcctcacatatattgcattggtgatgcaaatggaaagatgatgcttgctcatgcagctagtgcccaaggcatatcaggttggtggttactgattgcttcacacagggctctctccttttcttgatactggatcatcatgttaaacaaacaatcttattacttttactttttttttttggctttaactggttaattgtgtattcagtggttgaacaagtaactggaagagaccatgtgctcaatcatttgagcatccctgcagcttgtttcacccatcctgaaatcagtatggttggattaacagaggttctacaaacttctttctctttgtgatatgttagtaatgaaataccatttacctttgatcctgtaaggtttggctaatatttctaaaactttacagcctcaagcaagagagaaagctgaaaaagagggatttgagataggtattgccaaaacaagtttcaaggctaacacaaaggccctggcagaaaatgaaggcgagggacttgccaaggttagtcattattacatttccttattgttctaattccatatgaaagatgcagaccaaattactgatctttttttatctgtaaattctcatcttttagatgttttgtctcaaacatccaccgaaaatagtgttctcttttatctttcccaaagtaagcta

SEQ ID NO: 249604 - DNA, 1174 bp, Cannabis indica
taggatgttaatgaaacatacatggtagtaaatctagatcctggtaaaatatttccaacaacggagccccattgagaagtatagaataggagaccgaagtaacacaattcataataagggtacaggcatgttcattgaagccacttgccttcagaacccgaagcaaaaagctctactccaaacggtgtatgctttactcatatccgtcttaatcgccataactccttgcttccccttcttactcttgaaacaatgcaacacttcttgagccaaaatagagccttccacgatccatcgaccaagaatgaaagcggactgaaaaggagataccagtctatctataatatattacgatgaagcaaccacctaccaaatcaacggtcagatctcttgcagtaaggttggctgtgaaggcatgttgatcaagaaatctcctataaatacccctaaacttcatgtacaaggggagaacaatttctttatctacagaacatctgctaaaattcctacgagcttcttcttcttcaagaggaacgagaggaagagagggtttgtgttcatactgtaaacacttgtaacgttcaatacttgcctacaaggctaatacaacggactcgtgaactaaaaattattaacgcccaaattacgtaaaaattatgtgtgtattacttattattttatatttttcttaagctctaattaatcggttttcgaaagtctcggtaaacacataccaatataaaattgagaccacattaataaacatagaaaatttctcatatttagttaatattatcaatataatataaatataatctatatgtatacagtaagagagaaaatctaagtattatataatgctacagcactctttagttaatattatcaatataattttatcactatttccaacaacatccacaattgaacattgtctttatgaacatttaaaaaagagaaaaaaaaatctcaagtgttacataatcaagactttgactacaagctttcatattttgttcttacataatgtggacaaccatgttttgtaaattagcattttttttttgtaaggaacgaaagttcattaactaaacaggaaaagtgggaaccacaggggggtttccctccccttgaaaatactggcatctgggctagaaattctagctctctagcc

SEQ ID NO: 249605 - DNA, 895 bp, Cannabis indica
gcttggttcgaggaaggtctggatcgatggattatggccgagcgattggaggcatccatgttgtgttggtcgatttggacacacagaaatgaactggtttggaacgctaaaaagccggaggtgagtgatgttgtaacattagcaaaactaaactttattgattgttataatgcccaaaaaaataaccagccttctcatgagattaatgggtcggttgatacaaatttggagcattggacccctcctcaatttcctacaataaaagttaatgttgatggtgcaattttcacaaacgaaaggtgttaaggtattggattggtggcgagaacggctgctggaatagtgttacaagctaagaagatgagcaaagtgggtattttgaaaccacatgtggttgaagctattggcataaaggaagcattgagttggattaaagcaaatgcttggacaaatgtggtagttgagtcggattgcttaagagtcattagagataattcaaaagtttaaacatgtggccttgccttatggtcatattatttttgaatgtatgactttgtgttcgggtattgtcagtgtttctttcaattttcttaaacgatctgctaataaggttgcgcatgttcttgcacgatcttctctttctgaggctggttgtactttgtttggggatgctttacctatggtaattgcatctttgattttgaatgatttgatttaataaaattcatcattattacaaaaaaaaaaaaataagatatagatagataagatcatgggtcttatatttgataagaccatggtggaaattttataagatatatatagctcaaaaaatagtttaatgttatatttgattcaaattttataattctgcttcaatgctcaatatgcaaat

SEQ ID NO: 249606 - DNA, 705 bp, Cannabis indica
aacaccttgatatccagatcaatgtagtatgtagtatactttccgtaataggacctgacaagttgtgttcaatacaaatgtttctcgactattacataacattaatcacaaaatctttgatattgtgaaattcctctctctatatgtctacttctctagggatactagattctttactatttggcaactacttatgtgttagtcaggaagtaacactagtagttaataaattgttggaactatgccaaaatatgtatagaattttccatagagtgaataagtatctttcctgcaactttaacattcagtctcactggtagagttagagactctgaatcggtttttacacttttccaaaatcactgctccaccctcagagtaatcaccatctcatcagtagactttctagcatcagtgcaagtctagaaaactaatttggtgtagtctaagagtattaaaataccacccttatcgactaacatataactcatcttttatgatcttaagattcacttgattgtcttctaatgttcctctttatcaaactttacaatgaaactgattttgtatttaagcttgaatggatggtttgtgtgacttaaattagctatgtactagttagaaataaagaatggtggatgctagatattattttagtatttgattgacttattaaatttatctattcggtgactacataactgt

SEQ ID NO: 249607 - DNA, 775 bp, Cannabis indica
gtagaactagaacctccatcccacagaagattgacctatgatcaagaggctaatcatgccctcctagcagaatcacttgacgaaattgaagaaaaacgagcctcggcaaacctaaagttagtagcccatcaataaaaggtagctcggtacttcaataagtaagtaagggcacagaaatttttttgggagatatggtcctcagaagagtatttttgaacacaaaagatagcacggctggtgtcgtcgaaccaaactggaaaggaccatatcaggtggtcaaagttctagaattaggagcgtgcaaacttgggcagtattacaaaaacatggaactcgttctagtcacaaggtattggaatggggaacatctaagaaagtactatcagtaaaaataccaggtcagatgaccactttaagtgcaaaatcaaagaacatttactttaagtaaatggccttttgggcggatccgcccaagggttcggatgaaatgactaagtacttaggtcggatgaccaccttggaaagtacaatttcttttaagtgcaatttgttttgtttaaatttagctaaagatcggatatataatagcttttatgtaagttacgacggtaacaaaaatattctgaccaatgaatgaataaagatatctatttaaattctgattgcatcaattctattagaaagttataaatttaccattaaatacgtaccaaggtctgctcgaatccaaagaactgaataaaaaaaaatcatacttgtgaaatacaagtgacca

SEQ ID NO: 249608 - DNA, 885 bp, Cannabis indica
atgtcaaatatatttaagaacatttttaatattggcattttttaagagtgttaaaaattttcacatcacttaaaaatatattattttattttatcttttttacaaatcatttttgatattttttgttctaaaataatccaataataagcatctctaaaaattatgaagataatattatactattatttaatatatagtaaataaataaagtttcttattttatgataaaataataataaaaaaataaaatattatgctatggtatgccattttttttttcattttaatggtaggctcaattaaaaaatatcaaaaatatatccatatcatcaagcatctttaatagtatctctagtggagatgttttaaagggttaaacaacatacatgcagtattctaagtgcaatatatgcacatttaatctcgcaacataaaagctttcggtcgattcaacctttgtcacatgattatgagccactaaatcagtagcatgaatcaattgttacgaaaagaacaccatactattaaagatagatgataaacactccacgtaaagtggtaatccactaattaaacctataataatgagagtcttattgaaaatacaaaaaaaaaagaaacaataaaataaaatataaaaaaaacagcagagccatgacccaaatctcaaaccatggccacccccctccaatcttgaaacactagtattgatggaccacttctttgtgaaactcccataacgtagccccaacccaagaagatatatccaagagcccacttcggatccaaacagagctacatcatcaccgaccttgcatgaatccacaccaccaccctgattggaaggacataacctcttataactgtcgattaatcttcgataga

SEQ ID NO: 249609 - DNA, 586 bp, Cannabis indica
tctcaaaaggtcttgtaaacctagggcataactcgcctcttttaccgaaacatttgatccccttcattggagacacccgcaggaacacataatctcctacctaaaactccacatttttgtgctttggatctgcatcactcttttgcctactctgagtggcaagcattttggccttaatcttcactatggcttcattagtctgttgtactgattccagacctaggtgtttcctttctcccgtttcatcacagtgaatgggaaacctacatttcttgccatataacaactcgtaagaagccatccctattgtactctggtagctattattatacgagaattctatcaatggcgagtacttgctccaggagccctcgaaatccattacataggctcgtaacatgtcttccagtatctgaattgtcctttccgactatttatcagtctaaggatggaaagatgtacggaattttagtttggtacccataacccgctgaagactctgatataatggactttgggacaccatgtaatctcactatctctttcatgtacaattctccatacagatccactgtaaaggtttttt

SEQ ID NO: 249610 - DNA, 652 bp, Cannabis indica
gacttaaatagaatttatacattgtatatataatcatgaaataaatcatgtgaaccatgcaacataaaatgttaattctgatctttattaataagtaaatctgattatattttgaaatgagttttatttagggcacaaaacccaacaaaataacatacaaaatagtaacacaataacaaaagtacgacatatagataacatgaaaatagcataagtctatattttctttaattaaaatttataaactataaaaatatttaaaatttcgtacacgtttatacatatatttatttttattttttgataaacttcaaatatattgaagcaaaacaaagagctcaaactagagccaaacaaaccagttccaaaataaaataaaacaaaacaagtatagatggccacaagaaaggccaactcctcaagggaaataaaatcagaaaatgaatgtttaaaagcccacttagaaagattatgagcaagcacattacgtgaataaggaacccacaaaacatccacctccgagagaagatccacagactctaacagcttctaaaaaagactcatctaggccccaatccaaagctttcgatcacgaatacaatctccaagaattggaatttcaaggcaatcaccacctgggactagccaccag

SEQ ID NO: 249611 - DNA, 802 bp, Cannabis indica
caaccggaattccattcctacacgcccctctgaaccggattttcggttcagtgcaggaatgaccaaaacttccatttctcaaccaaatcaaccccaattcaaaccaaactttccagacctcctatatagaccataaagaacaaaacccaagcaacaaaactactgcagaacctcaaaatcaaatttcaccattatagaccaaagtttgagttctatctcaaatcttgtccaaactccaacccaaacaatcaaaacatgctaaaaccaacatatgaaacctatctcaactaaagaaaacataatccacagctcagaattctaatattcaatccatgcaataaataattacttaaagcttaagaaaactatggaaaatacatgctaaagagaattaccttcaaaggaaacaccaaaggctaactaattaacacaaaaccagctgaggaactctactaaactgctggttcacctagggctcgagagaaagaagtagtggagagagaagagagcttgattcttgatttttcttttgatttttatgaaaaataaatgataaatgtaataactttggtattaactactaaattatctaaattctaagctgaaataaactcaaaataaatcttggtagaagaaaaaagaaactcatggcaaaagactattttgcccttccctcaccaaccaatataaaatggcacttaggggtattttgggaaattttaaatttccgactaatctcgacatccccaatgtctaactatatcaccccgctatactaaaatactaagatgtgattcaacta

SEQ ID NO: 249612 - DNA, 1047 bp, Cannabis indica
tttgtggccaaatgcttcatgcaacaagttaaagcagagcatcaaagaccagcgggattattacaaccactgaagctccctgaatggaagtgggaagagatttccatggattttgtgactgggttacctaagactacaaagcagcatgacgccatttgggtagtcgtcgataggtatacaaaatctgcccattttctaccagtacgcatgacttactccatggaccattttgctgaactttatgtgaatgagattgtgagattacatggggcaccgtattctattgtttgtgatcgagatgctcggttcacttcatctttttgggaaagcttacagagagcaatgggaactcgattgaagttcagtactgcatatcatccagagacagatggtcagactgagagaacaaatcagatcttggaagatatgttgagggcatgtgtgatagatttccaaggatcatggagcaaatacctgcctttgattgaattttcttacaacaacagctatcagtctactatcggggtagcaccctatgagatgttgtatggaagaaaatgcaggtctccactgcattgggatgagttgggagagaacaaactcctagggccagatgcagttcagcacaccaacgaagctattcagaagatcagggctagaatgatcacagctcagagcagacagaaatcttatgcagacctgaagcggagggacattgagttcgaagtgggtgatcatgtgtttcttcgagtgacaccacgaaaaggactctcagtgaagagatttggcaagagagggaaactaagtcccagatatgttggtccatttcagatattggatagagtgggcagtgtagcttatagaatagctttaccgccatcattatctggggtgcacaaatgtatttcatgtatctcaactccagaaatatgtgtcaaactcatcgcatgtttttgagctatgtaaacacgggttttgcaggaagacttgtttaacaatgaacgtccggtaaagattcttgatcaaaaaaatagaattttgagaaat

SEQ ID NO: 249613 - DNA, 457 bp, Cannabis indica
gattacccatggtagtcaatttcctttgcagatcaaagcttatgtgggtttgaagctcaagattcaatggttggaggtatttcgatccttattcatagtgtatatatgtttgattaattccgcacttaatacttaaacatatacatttcagtttatatatataaataacagaagcaactctttccttatgcttttctcgacaaataacttgttaggactttaaaaaatgctttaatgaataactcaccaaacatcattatttcactgtataaaattataacataatgttgcattttactgttttgggtcatttaagttgtttgttttagattgtataaatattttttttccttttagtaactatttctacattacatagtttgtactcaattttaagatacatgatcctcttatatgtttagttaagtgacgtattaataaatagtaagtttaaata

SEQ ID NO: 249614 - DNA, 724 bp, Cannabis indica
aactctatagtgtattatttatgccataaaaaaataaattataccctcaattctcatatttatatgaaaattctccaaataataataataattaaagtgaagtaggtaatcaaaacatttagtttgattagcgcaaggaacacataaatggcgaaaagcgttgcaaatggaaaaagccatgtgacccatcatcatatatatccctactgtaaatatatagtagctaattagggtaggaatgttggtataattcaatctgtattattttattatagtgtatttcatttacaccaagtacaaatttatattttgaatctaaactaatctgtagaataatttaaatctaatctaatcaaatctgtaaaagtgcaaattgaatcggttactttttaatattaagtaatttaatatcattattcttttttacataactaacaataaaacaaaacaaattattattcttttatgtccccgataacaagttaaaataaataaaataacaaattcaaaaagaagaaaaaaaaatataatgtaaaaaaatatgtaaatgtattttaaattatataattcctatatataatagtaaaatataaatttaatctattaagtataattttttaagaaatttttacaccaaaaatataaaatggaacttttataacatatatacttatacagggttacctaaacatttttacttttcctctttattttattacatata

SEQ ID NO: 249615 - DNA, 750 bp, Cannabis indica
tactacatcttcaccttcccattaaaccaagtactcggttctcttgttcttcttgctggctccaagagtgcgatgatcaaggattctcaacaacttcttttcaaattgtttcctcatagtaggcggtgcccttaccccctgttgtcttccttcctctttgtcctcatggtacttcttcaagaaactaacatggaaagtcggatgtagcttgaaacgttctggcagcttcaatttgtatgctacatcccccactttctggacaacttcgaaaggaccatcgtaattctggaccaagcctttatgataccttttatcggttatctttttccaaatctgtggagtgagtttcagcaacattcgatctccaacagaaaattccaaatccctcctatgcttgtcagcatatttcttcatcctccgtgaagcttttcccaggctttccctggccaattccagcaactcagttctatccctcgcgaaccgataggctgcaggacaaaccccttgagatttctattttgccacttcgtgtggcgtcagaggttgtcttcccaagataatctccgctggactcattcccgttgaagaagatagttgaatgttgtagcaaaattgggccacatcaagcaactaaacccaatttctctgactagcagtcacatagtgcctcaagtactcttccagcaactgattcattctctatgtttgaccatcagtttgggaatgattcgctgttgaaaacttaaggtc

SEQ ID NO: 249616 - DNA, 1506 bp, Cannabis indica
ttagtttgaaacccttttatcccagttttaactaaataaccgtgataaaaagtcatccctaaaatcccaaacgtcaacctcgacatattagcatggtcgaaaacccccaagtcccaaaccagaaacaaactcgcccaaacccataaaccctcgcacaaaccctcacgcaaaccctctcacgcaaacccagaaattaaccctcgcccaaacccaaaaattaaccctcgccaaaaccgacatgggcggcgccgtagaagataacgccagctaaagtcccgtttggtctttatttcccaaggttgcccctttctttttatttctttctattttcttactttattttatctgttgttgttgctgctatttcttttcatatatactcgttaattacatcttttattgatgagtgagaacacaaaacacactcacacatctgctgtgttagatctagctagatagaaatcgatcatggctctcactcaactctatatgtgttgttgtagttggacgccatccagattattttactgggaaaataccagccacatacacgaatttaacaaatcttcgctggctgtaagtacctctattattttcaagatttgacaaatataaattagtttgttcttgacaaaaaaatgatcaatgcagtgaagtttctgggaatgagttatcaggtccgttgcctaacgtaaagaactggtcaaagatcgaatctatgtaagtttattgaatataaattacccatgaaatatgatgtaataaaacagagcacttcagagtatcatatagttgttgtaatattgggaaagtattatttttactaattcataacttaaaagctaaatcttattttgatggatttaatgtattataaaatgatctaattcattactaaatacactgcaattttaaagaacagtgttgagcaccccttatcacaacaatttaattacattttaaataatattcgtactatatctctaataattatttagtttgcaatatatatttctaatggcatttagtattgattgtgtgagtttgggcccgaaattggtgttcttaatcctaatttgggttgaaaagctcttatcaaaagaataagtattggtgttagtagttgtttttaatgtttgtagatgagcattggcttaataaaatgacccgtggagacttaacaagtaatgagtacacaaattagaaaaacagccacatatgtatatatgatgatcactatatgtatatatacttatggatatatgtgtatgtatgtgtttttaatttgctttgtggtgagatcacttatggggagaggttatttatagtatttggtttgttgtttaggatggaaatttggtcaaatattggatttaattattaatattaattagttttggaaacgtgtgtgtatatatatatcattatagtttaacttaatttttgtatctgtttttaacttttctcaacttgtgtgagttttaattttatatttcttacaaaatt

SEQ ID NO: 249617 - DNA, 729 bp, Cannabis indica
ttgaaaacttaaaatttaattttttatgtataataatatacaatgtatttataatatgtattcagtaaattttagaaaattttaaataattaactattatgatatttttaacacgcaagtatacgtgtcgttaacaagtaatagactcacaaagagtgaggtcgatcccaaaaggattgtagttaaatactttaaaattaaaattttacttctatttggctatatcgaaattaagagaaaattaaaattgtaaaacaataaagaaacagtaaaaataggaagcaagtaattaatatgtaaattaacgatgattaaaagttagggttttcgattttaattgtatctatcgattatagtttaacatgattcaattcctattaccaaattctatgcaatagcaggtttactcaagtaatttatagtcttctcagatatataaatttcaattacatgcaaattttctactctcatgataaattaaatatataaaaggcattaaacataaaaaccatataagttatccaaactatttaggtactctcattctatatcgaaaattgtttctatttcaatatagcataattgacactcacttctcaaattttgcataaaaatcactgtcaaacaatatctatctaaaccctgtttagctactcatgttcatcgtagtaattttacacatattaattcaaaatagaagaaaaaaatagaaaaaaaaagaatgttgaa

SEQ ID NO: 249618 - DNA, 638 bp, Cannabis indica
tttacattttagcatgcatgtttatgaatgtctaatagataacctatcattaaaggcggtattagtgcacatagagttgtactgaataacgatggatatatgtttggcagagtacaaattgatgctatcacattggtatgattagagtaccaagtataggctgatattatagtcaatcgtactattgtacgaacgtttcaaactcattatgcgtgggacgcgggataagattgtaattaggtgtatgggaacctaattataatcttgtttatatttatgttatggttatacttttcttactgagtttatcgacttacagatattgcttatatttgtaggtaaaggcaaggaaaaggttgaacaatagtgagttcaagctaatgaatattgtacatattagggtggttagacttagagtgttcgatctttgggacatcaagcttattttgatagtcattgagtgataacttttgtaattataatatttggtaaaacatatgtcactttataacgagatctcctattatgtaaattataatatatatatatgattaaagtttaattataaatttttttattatttacgtttttcaatagatccctcatgtgatcattactttttattgattttaccagca

SEQ ID NO: 249619 - DNA, 1416 bp, Cannabis indica
gtcttgggtttcgaaatctaagggattataatttagcttttttggggaaacaagagtggaggctacttacaaatgagaagtcacttgtttctaagctttacaaagctagatattttccaaatggagacttccttagtgcagaattgggatctaacccaagttttatatggcgtagtatatgggaggctaaaagtttggtcaagatgggtgcaagaagggctattggagatggtaagttgactgcgattattggtgttccttggcttcctgggaatgaaaatcaatgtatcacgactgtccatccaagtctagttgggaggaacgtggattgccttatgaagatggaagggaggggctgggatgaggagttagttaatgacatattcaatgctcatgacagaaacttgattttttcaattcaattaagtgaaactccttgtgatgattgctggtactggtctaaagaagcttcaggtgggtactctgttcaaagtgcatataagctgatgcagcagcaaaatggctcttggtcgactgctggtgcagacaaaaaatggcagcagctgtggcttttggacatacctgctaaagttaagcatatgctatggcgagtgttgtcgggttgtcttccaaccaaggttcagctcactacaaaacatgtaatgtcgatttaacatgccctttatgccatgttgatattgaaacaatttcccatgtccttatgcaatgtgactttgctaaatcttgttggaatatttcagcaattgactttaaagggggaggggggacaccagattttgctaactggtttggggaagctttactgaaggatacaacaactgtaatggaggaaagggctatgatagcatggcaaatttggttggctcgcaatgacatcttgtggagcaacaaaacaactacagtttacgaagtggtgcgatcggcaagaactaatcttgacagctggaagaatgctcaagttcaaaggacagctccattacttaatgttaatcatagtaatggtagggagcattggatgaaacctatgaatcacaagctcaagataaatgttgatggtgccatttttgaagctgaaaattgttttggtattggctgtgtaatccgagatcagacagcaaggcttgtggaggctatttctataagcaaacatggtggggttactcctgaaatagctgaagcaattggggtgaaggaggccttgagttggataaaaaagaaagcattatcggatgtggaaattgagacagattcattagtagttgtccaagctattaatggaggtgtcacaatgacctctcaattcggaatgttggtgcatgattgtcgtatgatggtatctgttaattccatttttggcatatttaattgacaaaaatattttattatttaatgtat

SEQ ID NO: 249620 - DNA, 1233 bp, Cannabis indica
gtttttctcattcccacatcaacgtcttcttctgtggggttcaagagtcgtcttctgtttgattatttttattttcatttattaatttactattattagtttaattccaattaatatttttaagaggttagagttataaggagtttccttaattaattttaatgttgtgatcatgtttatgagttgaaactaatttagtttttccattagtcttgtctattgacatggttctttagtcttgccttttgacattgttttttagtcgtttccttttagttttttctggttcgagtcttgtcttttggcatgggttgtgtagttcagaatcatcatggtgctatagtagaagcattcaagaagggaaagattggatgtgttcaacccaaaattgctgagataataggtattaaagaagcattgagttggattacaactcattcgtgggatagagtcatgttggaaacagatagcttggtgtgtgtccaagcgattcagagcggtaatttatgccttcacaatttgtgttttgtaaaacgatcggcaaataagttggctcattgcttggcaagagactcttgtttctctacaggtcgtgtgtttcagttggaggactgttcttatgaagtgcgttctattgttttgaacgaatttattaattaaaagattttatgatttttatttaaaaaaaaaaagataattagatgttaaaaaacaaaaaggaaaacaaaagagtaaaaggaaaaaaaaaagaggtcagcaaaagtaacgtgacaatgaattaataatgcaataaaataatactaagtgcattatttctatttcggtattactaacgttatttgtaataattaaaattacttttgttattttgataaataattatctaaatcatgcgtaaatatgaaaaatccccaatactttattggcccaaatttttgatctactcctgttctcgagtcgaactgtcgagatttcagagaccttgtaagcttccgccatggagttcgaatcaacatacgaaatttcccgtacggtcgacttcatacgcagtggaaacttcactaaggtggctttgcaggtgattactctctctctctctctattttggtgtttaacgagcaatactgttttattttgttcgagagctgccgaagaaagggtttttcgagggtttaatctggttcatgaagagaataatgaattaatacactctaaatattgattattctcagt

SEQ ID NO: 249621 - DNA, 5351 bp, Cannabis indica
ttgattcttgaatattctgaccaactctcacttatttgattctttgatagagatttttctttgctagggtagaaatctttttcttcttcttctttgtttcttccaggttcttccgttgttgaaaaattcaagcttttgtgatgaagtgataatggaggttgtttcatctaaagggaaattcaaagtcatagctaaagggatttcagctcaatcgaaacaaggggagcttgtcttcgaatctaagaggacttagatttgaaacttggttggtcaatcaagatcttaggataaattgttgtaagaatctttattgtattgttttacatacatttaatttacaaactagagtttgtatcttgacattgattcttatcggaggttatttaccttagttcggggaatcccaaacactaactacctagaatgtgtttctaggacaggtgaagcttgtaaatctatagtgttcatcttgatttactttctgcattttagcttttaataatccttgaaaatttgtagtaaaactactaaattttatattgtgtgattgaatgtcattatttcaattagtagcatccgattagatcggtttttcaaacattataaactagattgaagctataaagagcagtattaatactgaattttagctataaatgtcattttgtgctataaagaatcttttaataattgttgtaactaaacatgataggcattttcaaaagaagtagaaaattcagaactagttatgcaggtaccgtgtatgtctttcttgctctttctcgcaataaggcgaattctttgtcttctgaagaaagaacatctaaacttaaattaagaacactggaagagggaaaccatttttgagtattccaccagtatgcaagccatggggcatggtgagaaacactgtatgtcagccggtcattccacaattctcggttgaatgctgcattagatagatttgcaggtaaaccaggccaccagtagtttacaacaggagctatcagtgctgcccctgctattctgtaagtatttacatattttctcagcataacagaagctgttttattacaccacaataccacattgcatttcaaagacataagtaaatcatacctgtgagggatgtatttcaggacactccaaagcacctgtccacccatggagaaaccaattacataaaatttggaaccaagtcctaattgatcagcgagctcttcaatatctaaagccatgcttttcaccgtgcgttttggattaggatcactctctccataaccaggtctgtcgaaagacacaatgtaaatgccaagatcttcaacaagttcctacaaaaataaaaacatagattaagctttagagaagaacaaaactcatagggcagagaatgaatacaaacagatagacaagtacccgagacaagaatccagcaaaagtgtcatgtctgcaagaatcaatagcatgaacaaagacaatcttatgcttggcactatcttttgacataccctgctctttataggccaaatgccttccatcactgagttttattcttggtgctgtgacgggggggccttccacagtgccacaaatcttaggtggaggaggttgaattgcttgatatgcccatgccagaattcccacaaacaacaaagctagtgttttcttaagcattattgaaagttgatctttagctaaaataacaacagggatcaaagactgagtaaggtcaagcaaggttatgatgaaaaaagtaatcaactttgtcaagtaagacacataaaaatttctagaccgcacatgtataaacgagctcaatgtaaaagtctcaatccatacaaagtctacaggcacatatgtagtgaagtatatttattgatactcttaaaccaaggagaaccactcaaataataacattttcaacaattgtacagtctgtatttggtaaaccaaaaacttgaaaacagtgacaaaagaattgaaggaagctgagaaaaactgttttgcttgactcttctggtgtgagcctttgcagttgctgctgatattttcctatttactcctccagccaattataccaaacatacagacctgttcccactctttaatactatttaatgggttttagagggaggtcgaatggtgaaacgtacacttctgcctcaagttgaactttctatacttttttagttttaccttatcaatcattgaaaacatgattgagcacaatcgacatgagttgttctgtcaactatatcttgttgctttgagttatcccaccactagtgtaacgacactttttcaaaaataattccaacgtgacacaatgttgacttggacaaaaatccaagcttttttttgtttctctccaatttttttcagacaaaaatagatcaattattacttttccaataaatagattgtcaggatgcagaagtatatggattttatctcaaaactaattgacaatgagaaaaatagtctatgtattttatctatagtatttagtttcaacacattatcaatgtgaaactttctaacattccctcaagatagtggctatttttttttctcaccaatcttgaacaattcgatcacaaatgaccctttgtggctcacaatgacttttttttttagctttgataccatgttagaatgcggaagtgtatggttgaagaagtaagaataggtgagtgtatggtaaagtgcataaagttccatctcaaaaacaattagcaatgaagagaataactcatgtattttatgtatggtatttagttttaacacattattaatgttgaactcactagataaggcatttatagttctactgtaagactaagagctcacactagaaattacacaaactatatgaaaatacataatgaagaaacatgtctttcttagttctatttgtgtaacaaataggtttgaatattacacaaaaattgatgagaatggctcaaaggaggctcacttcttcctcaccaaaagttccttaatgattttatcacacatcccttcagcttctggaaataagtggccagcaccggttagctcatgaaagtgaatccatgggagttgttgggcgatgtagcgttgcggtgaaataggcacaatcttgtcttcatcaccatgccacaagtgaacagaaccttcattgttcggaaatggatttttaagttccaaaggactgaattcccacttcccaaaagtcacaattatgtcccggtggatggattcgaattctccttgctgtcttacctgtgcctgagaaaccacattgagtgttaattaaatgccagctgaagaaaaaaggtgaagatcatccccaccgagtatatgtagcacattagcactggtaaaaaaaaaagctttcaaccagccatccccactgaaacagcataacgagctggaatctctccattaatgcagtgcaagctacaatttactaatacacatctaccactgtcatcctagtgatcgaccattcaaatttgatcagggtgaaaagaaagtacctttcataataattttatcaaactaaattaaatgtctatttacaattgacatgattggaattggaatattcattcaccttctaaaacaatgttatgtttaacaaaaagtactaaaatcgtgttacactcagcacaaactaaaatggaaaataaaaatattggcaagaattcttaaaacaaagtaaaaaaaaatttttaaaaaaaaaggtgctttaataaagtggtttgcatgtaccatgtatgtttttcttgcttgccttagaggcaacataactatttctctgtcctgggaagaaagaatatcaggactatgagccacagcactcatgtaaggaaaccaattttgagtattccaccagtatgtaagccatgggatgtagtgagcaacacgaagtgcccaccggtcactacaaggtgtttgttgttcgaagacctctttagatagatttgcaggaaaaccagtccaccagtggttaaaaacaggagctatgagtgctgcacctgctaccctgttacaattttatagactcctcattcaggacataaaaaacaccccaacaaaagtattctctaggagacaacaatgccaacatatttcaaacattgcatttcaaaaaaggtaaatcataccggtgagggatgtatttcaggacactccaaatcacctgcccgcctaatgaaaaaccaactacatagaattttgatcctagttttaattgatcagcaagctcttcaatatctgaagccatgctcttcactgtgcggtttggattaggatcactttctccatagcctggtctgtcaaatgacactatgtatagacctagttcttcaataagatcctaaaagatcaattgtcaaacataagttaaactttaaataagaccgaacaacataggtatggagtgaatagagagatgtagacaagtaccggagacaggtatttggctaaagtgtcatgcctgcaacagtcaaatccatgaacaaacacaagtttatgcttggcactatcttttgacacaccattctctatgtaggccaaatgccttccatcactaagctttattcttggtgatgtaatagcagggccttcaggagagccacatatcttgggaggaggaggttggattgcttgatatgcccaagcaagaatacccacaaacaataaacctagtactttcttaagcatccctgaaagtttgtggctttaattaaagttataacaaagctatataaacaaaccacagaactatgaaaaatccagtttactgagcaaagttatattaaacaaatgtaccaactctgtcaagttcatcatctatatttagaaatggaccagaattgtgaagttcatgaattacttactaaaaagagcacaagaagggtttaaattcaaagatgtaacaataacagaacttcagaaactctaactccacataaagaaagtatctttattttgcctaaaaatccaaatctcttttacaactctaactccacatgtacaatgatgctgttggagccaagacccttatataaagtttgtcaatttaagaatgaagaaggcccaaataaaaaagtaaacttagatatacatcattaatgtaaaacttagactattctcgtacaccaaatgagaaataccattaaaaaaacagagaattgaaaatctcaaacaaagaaatatgatagttttcagtaccaaaacagttgaaaagaataaagactaatatggcaacgttaaatttcaacttccttaaattgataaataaaaggggacgagagagaagaagaagaaaaacccacctgtaggaaagtgaaaagaagtgttgt

SEQ ID NO: 249622 - DNA, 643 bp, Cannabis indica
gacataatttgataaatgtcaaattttgatagcataatttactacataaataattactaaattagtaaaattaaataaaatttaagatgtgtttagaaagccacaatataattcaaaaatttcaatagtttaggaaaaaaaattaaggggcatttaatgaacaaaaattctaataaatttttttatagtcatttttttacattatattagacaaaaacactatatagaatgctaaaaatatagagtatagttatattttagcatatttaacaaaaactactatttcaatgatgatctaaaatgagtgttaaatttgatatatactaaaagttatatcaaatttaatataaaatataccattgtgtcaaatttaactcacaataaatattattttttaatttattataatatccttaattattacgattcattaacttttactaaattttactttagtttttaccatattattattatttaaacaataaaaaaaaaataaaataaaattttatatactcactaaaatttcaaataactatcaatataattaattatttttcacttattttacaaaacaaaacaaaccaaaccaaatgtttgatattatagcatcttatcaaaatgaaatggttaactttggaat

SEQ ID NO: 249623 - DNA, 1013 bp, Cannabis indica
tgaaggtccccataaatcagagacaatgagttggagaggttcagtgtaaacagtaacagatgccttgggaaatggaattttgtgaattttaccaaaacagcaagcttcacacacaaaattatctcttttattgatatcagaaatgttacaagcactcataacagttctaacaactctctcattgggatgacctaacctattgtgccacaactcaaagtttgacaaaacaggcttattacagtgagtacaagtactatgatctggggtagaattgctagtagctgaggcaacaagacaggcttgattcaggtcagggttgtgcagtgtttgataaggttgtgttggcttggacaagacttggaattggcctggatcaaaagtatataggccattgaggagggtcccagtcaggattgtggctttggtcctcaggtccttaacataacaaacaaaaggatggaattcaaagaaaacatcattatcaagagcaaacttagagacacttaataaattcttggtaatctcaggtatatgcagcaagtttgtgagaattaaaggtttatctgagtgttgagatttaaagtaagcactaccagtgtgatgtatagccaaacctgatccattgccaacatatagcttctcttggccatgataatccatgctttgcatcaggttgttcacatcagaagtgcagtgatttgttgcacctgagtctgggtaccatttattgtctgttccctgggaggtttgagcaccatgagcttgtattggttttgaactgtctggagttgggagaaggccagtgaaactcttgtcaaacctatagaaacactcaagagccaagtgtccagtcttgtggcagatttgacactgaggcttgttatttgttggaaatcttcctccaaaatgagtaggaaagctggctctaccaacattaacattgttggatccacctcgagagtgaaaactgggattagttcctctagtatagtagtagctagaaaaattatttg

SEQ ID NO: 249624 - DNA, 527 bp, Cannabis indica
gccaacccaaatagagaaatgtccgatgatcccagccctaagtcacaataatagtaaaatggtaatcacttgacctatcccgttttaaggtcttaaattgtttatttaaaataattgaaatagaataaatataaattaaaccaatatacttacaaatatttattatgtattcataattcatagaaaataaaagacaaatttgcctacaaagttaaaaaaaaaaaaaaaaaagacataatccagtagaaaataaaaaaaaaaataatgtctcaaagtttaaaaaaaaaataataacccaagtatagtatcataatctcatacctctcaagtctctaaacaaattaaaatgtaaacaaagatgaaactaagaatcgagaagaaaatactttagcacttgtaatctacaataatcactaattcactattggcattgaatcttcataatttaagcatacaatatataattttgtattatggatgataatcaaaataattttgattatcaataatatatatatactacatat

SEQ ID NO: 249625 - DNA, 1065 bp, Cannabis indica
aaagtttttagtctattttttttatgattaaatacgttatagctatttaagactatttataaatttttagaacattctgaatagttcacagtatcgaacataaggtttgaacagttactaaccacacgtataagaaaaatatttgcgcatgcaacaaaatatgtaaatcttattttcagtatgtaaactactcagaattttatgaaaatttatatgtgatcttaaataactataatgtatatgatcatgaaaaaaattagattgaaaaactttttttgataccgaaagagataggaggtctattgaaacacccctttaggggtgcactataaacttacccaaaaaatatgaattgcttttacaatgcaccccccataaaagggatgcactgatgcatcctttacccatttcgacatccaaaagaatttttagtcaatttctttttatattcgtgtacgttaaaattatttaagatatcttacaaaattttaagaaattcggaataatttacaatatagaaaattgtgtttaaattaaccgtctatttcacatgcgtataaaatagtcacgcatgtaactcacagtttgaatctatttttcggcgtgttaattttttctgattttttaaaattttgtaggatgttttaaataagtataacgtacatgaatatgaaaaaaattcgactagaaaactattttaaataccaaaacaaataaaaagtatagatatatccctttgaatggtttgtaaaacttttcaaaaaatgtatatttaggcaagtaaagcacacttacaaataaaaataaataaatgaagagtccaaattaataatatagaaagaataagatcaatttgagtgttttcatgtctccgaataaattagttggtgttacgaaaaagcatagcatagtactattggttgctaccaaattattaatattactattatttagtttttttttttttttaaaaaaagataatctatttttgttggaaatttgaggataatattcattactgggattttcttccctaaaatatatatgacagctttcaagatacat

SEQ ID NO: 249626 - DNA, 628 bp, Cannabis indica
aacgaaaagaatgaaaagaaacagttgggaacacacctttaaagaccagatgaatggggcaatgatcggacgtagagaactcaaagttgtaaagaaccgactgagaatacagagtcaaccactcgttggtcaccaaggctttgtcgagcctttcttctatccagtccccactatttcttcctttctcccaagtatacgggtatccaacaagaggcaagtcaatcaaattacaatcgctcaaagccccaatgaacccctcaataagatggtccgggtaagtcctaccacctttcttctcaagctgagaacccaagttgttcaagtcccccataatgcaccatggaaggttgctatcatttttaagagagcgaagaagatcccaggacttgaaccacaactctcgttttggctcgccataaacccccgtgaaacaccaaggaggagagttctgaagatggacagcagcatcgatatgattaaaagaaaatccctgtatcaccacttcactcgcaaccttccacatcaacgccaaacctccactgtcgtccccaattgtcagccacaaagcaactatcaaaatccaattggctctagttctctccaaactacccttactacataaagtttc

SEQ ID NO: 249627 - DNA, 2167 bp, Cannabis indica
tagaagtcaaaaagaaaggaatttactcagttaaccctgaaggagcatatgagtgttactgaatacacaactcaatttgatcgattggctaggttggcctcgggaattgtgccagccgatttcagctaagaaagaaaagtacttggatggcttgaatccgaaaataaaacatgatctcatgattgctactgacgacgacaccgcctatgctaatatggtggagaaggcactgcgagctgagggcacagttgcatgcactcaggagtcccgagggactcaggttgctggtggggctcctactcctcctacccctagttatggaaggggtggtagtggcacgaccactgatctaaaataaaaggcaccaactgcacccggtggctcgggttagaacaagaggttctgagggaactagggtcgaggaaaccgtcagggtggttctgaaacttgatacacttacttgaagtgtccccattgtaaaaagcatcatctgggtgagtgtagagggcaagggtgtttccagtgtgggttgccaagaaattttaaaagagactgcccacagcttaagaaagaagaatagaagacagttgcaaaacccgctccagcaagggtgtttgctctaactcaggttgatgtagaagctagcccctgagttgtaataggtcagctcttggtcaacaactcatacttcttagtattgtttgattctggggccactcactcttatgtggcagccagaattttcggtaaattagatagaccgcatgataattatgataaagggtttggaaccctactgcctggcgaagaattagtcatctccaaaaggtggattcggtctatgtcgatcagaattaaggatagggagttgagtgctaacctaatagaaatgggtttagcggatttcgatattatactgtgaatggatttcttatccaagtactcagctagtattgaccgtaaatgaaagatggtgatcttccaacccgagagcgaggaaccatttatttttgtgggatcggttcatggatctcaaatttcagtgattttagtattaacaactagagaattactacaagacagatgtttagggtttctagccgtggtattggataccacacgacctgagatagttcagtcaaaggatatcagggtggttcgagaatttttagatatttttcctgatgaactcccaggtttaccaccgcaaagagaaattgattttgttatcgatctcacacccggagcaaaaccagtttctaaggcaccttacaaaatggctctgatagaacttaaagaattaaaaatccagcttcaagggttgcttgacctagggttttcatgacctagtgtatgtttgggagaaaaatcagcaagtccaaattattataaaaaggcccaaaagttataaaaggcccattctaaaaagaaacactatataagatgtattctagataaaataagcatataggtgggagagttagatactagatagatgacatatctcaagtgggatgagatagcttagaaaaaatgacttatcttagatgagatacgtatctcggtcggcaggcctatctccgtcgactggcgtatctcggtcggccggcgtatctcggtcggccggcgtttcgtcggtcggcaggcgtatctcggtcggacgacctatctcagtcggccagatgacttaaatctcagtcgttcagatgaggtgatatactttatatgggatgacataccatggacaagatgacataaacataaataaaattgttacttacgtccaagatagaaggtatatccaaaatagatgacttacataatggatagagaacacatacaagattaatcacttaaatatcttagttaagaaagttacacattatagataggagagatagaatatgaacacttaagataaaataagggacacttgtcaaaatatgtaaagatacctcataggaagtaatgactgtgaagattattaagaacaaagaaaacagagaaagaagaaagtaaagaaagaagaagaagaaaggaaagaagcttttcattaattaaataaaagaacagtacaatgtttatatagcaccaggtgcaaagacagaaaacagttacaaccaaataacatatttcctaacaatattctaactgttctaactgttat

SEQ ID NO: 249628 - DNA, 1620 bp, Cannabis indica
tcttagaaatgggtgttctttcatatcaattcatacctctgtaggggtcattgccccaggaatgtataaaactttaccattctggaaaccatccatatcgataacatcctgaagcaacgatgaaaacattaaataaacacaaatagcaatgcaactggtgcttcctttaacttctaacatggaaagtgttgacagatgggaaataaaatcacattagttagatttgattttgtaaatactctatataagatgagcttcaggttgtacaaaaaacacagagaagaaatataatcaaaatattatttctcttcattctttgtggtatcagagcgggtttccttttcctctattaagtccagccaactttatccattcaggcagcccactctagccacctctgtccagcacccatctctgtccaacacagctccagccacctctgtccaattcagccaccctcaatctcaatcttttctctcttctgattgtattttttcctttctcagtttttttgctttgaactctgtccattcagttttttttttctctagtttccctctctccaaaaaaaaggaaaaaaacagacaactagtcaaagctcagatctatctctgccctccttttctctagaaatgtcaaccagtgaggaaattaattctcagaccaccacagaaactacaactcagtccataaactatgacagcaactctcttcatatcacagcccataaacttgatggaaaaaattatctgcaatgggcacaatcagtcaaacttgtcatttgtggacgtgggaaacttgggtacatcactggtgatctccctgcaccatctccaacagacaccacacacaaggtatggcaagctgaaaattctattgttcttgcatggctaattaattcgatggaaccaaaaattagccgcaaatatctattctttaagactgccaaggaggtttgggatgctgcccgaaaaatgtactctgatcttggtaatgcttctcagattttcgaaattcgcaccaagcttaaagagattaagcaaggtaatcaaactgttactcaatatttttcggacttacaagatctgtggcaggagctggatttgtatctggatactacaccactgtgtgcgaaatgtaccaccattcagcgacaacaattggaaaaagagcgggtctttgagtttcttactgggttaaacaacaatcttgatgaagtaagaggtcgtttggttggtcgttctccatttcccgacactgaagaagcattctctgaggttagacgtgaagaagcacgtcgtcgtgttatgctcacaactcctgatgtgtcacccattgaaagttctgctcttgtctcaaagtctggaccactaccatctggcaaatcgaaccctgatccgcggcctaatcgtaagggtgatcgaccttggtgtgatcattgccagcgtcacggacatactcgatccacttgttgggaaattcatggtaaaccaccaaactggactcctcgtcgccaacatgacaacctttcaaattttacaatttctggtgtaatcatagtgagtttattaaacatgtggttttactagattagaacagaccaactcaaggtaatgagct

SEQ ID NO: 249629 - DNA, 542 bp, Cannabis indica
gaaaatttttgggattcatagtcaacgcgaggggtattgaagaaaaccctgaaaaaaaaaaatcaaggctttgttagtatgttgtcaccaacaaagcccaaagaagtacatgccttactaggaaggatggctgcacttaacagattcattttgaagtcaactgataagtgtttgtcattcttcaatatatagcgaggcaacaagaaatttgaatggacaaaagagtgcgaagaggcctttcagaacattaaaaggcatttagcgacgcctccaatttgggcgaaaccaataattggagaaacattactcctctatctgaccatctcgaaagacacgattagtgtggctatagtgcgagaagagggaaagctccagcaacctgtttactatgtcagtaaaaggttactgggagcagagttgaggtacccccccccctcttgaaaaacttgccttgagcgtaatccatgcatctcgtaaattacggccttacttctaggcacaccccataaaagtgttaactgatcaaccattgagacaagttt

SEQ ID NO: 249630 - DNA, 685 bp, Cannabis indica
gggcagtttgacataacatatcaccctcgaacatccatcaaaggccaagcattgtcagacttcttaatagaaggaataactttagaagaaaattttcttgctcaccgagacgcaaacacttgaaagttatatgtggatggagcatccaacgagcagggctcgggtgcaggggtaatattaatttcaccaaaaggctttaagttttattatgctttgagatttcaatttgacgcatcaaacaacgaggctgagtatgaagccttgatgctggcttgaagatagccgaggcgttaaatgtcaagaatctcatctgccatagtgactcacaactgattgtaaatcaggttctcagagaataccaggctaagggcctgaaaaatggctaagtatctagagaaggttcaaaagaacctagaaagattcaattactttaaaatcgagcaaatcccaagagagcaaaactctaaagctgatgccttagaaaaactgccctcgtagaatgacctggatgaattgaacttggttccagtggagatgctaagcgagccaagtatatgtgaaaaggaagacataaagatgatatagacagctcacctacatggatgactcctataatcaactatctactcaattggcaacttccaactgacaaaaatgacgcatgaaaactcttgtattcagtgcc

SEQ ID NO: 249631 - DNA, 602 bp, Cannabis indica
ttaaatagaaaaaaaaaaaaaaaaaagagaaaacgtaatttagcgtaaatatttttaggcggcaatggcagctgtaaaaactaaaaaggggggtgatggtttcgctaaagtataaaagcaaaaacggaaagaggtcttaaaaccctaaaccctactcagcaaagtctgggttctgttctaatatcagaagcccaaccaaactcattacttctctcactaactcataagcggtaccctagaaagatcatcaacctcctacgctgactgatcgactgaccggagaggaggatttccgttggcttgtcggactcgtgttcattaaaacaattacttcactcataggtacgccggaaaaaaacaatcacttcattcacaggtacgccggaaaaacaattacttcaggtacgttggaaaaacaattacttcattcgcaggtacgcgctaatgaggattgtttccggaacaaataacgttatatagctttatatatgtaaaattaataggtaagatattgttacagttagttaacaatatattttgagttttagaatggctatggataagagtttcagtctagaatctgcgttggaaaggtttcttgc

SEQ ID NO: 249632 - DNA, 696 bp, Cannabis indica
aaagggttttatttagggcacaaaacccaacacttgtccagcgagatacagaaacttggaaattatacgtggatggagcatcaaatgaaaatggctcgggtgcaggagtgataatgattttcaccagaaaatttcaaatttcgatacgccttaagatcccaatttgacacttcaaacaacgaggcttgatacgaggctttgttggctgtgctatagtgacttgcaattgattgtgaaccaagttctacgcgaatactaggcaaagggtttaaaaatggtaaaatatttggagaaggtccataagaacttggagaagtttgattactttaaaattgaacaaattctaagagaacataactcaaatgccgatgccttagcaaaactgggctcgcaaaacgagcttgataaactaaatttggtaccgatcgaagttctaaacgaaccaagtatatgtgaaacggaagaagttgaaatgatagatgcctcgcctacatggatgacactcataattaactatctacttaatagacgacttcctacagataagaacgaagcacacaaactcttgtattcagtgcctcgccatacaatagtagaaggaaaattatatagaaggggttattcaatgcctctcctacagtgtgtactccccacagaagcaagtgagataataaaagaaattcacgaaggcttttg

SEQ ID NO: 249633 - DNA, 729 bp, Cannabis indica
gccaactgtctaattaattattgtttcataattgtgtctttaattttgtcaacaatgtgcatataaacatgaattgtatacaaatattacatcatattgcttaaagtaataaattaaagctacattattattatacttcattaattccttttataaatttttctaaactaataacataaatatgacttttagttacaacaataagttatttatgactaaaatatcgtatttatatacaagttatcactaatttaatttttatcacaataagtatattgcgactaataaaaacacatttagtcacaacaaattgtaatttttgtgactaatatatttatctgcggactttttagtcacaacatagaaatgatttataattagacttcttaattataacttgcatgtgttcttacttgtaaccaatgttttaaaattaattattgtttcatataaaattaataaataaagttagaacatgataacttccatgtattgtgtgctgcatgctttaattaattgattgtttgacaaaagaaatttgaaagtcatcctcttaatatatgacatagaaaaagaccattataagaagacttctaaagttagaatatgctaatttccatttttatgcgtaagtagtttaattaaacattaaaataaaactttattaattaaaacatcaaagccacgttacgtacattctttatatttaacaaatttttttttaaaaaa

SEQ ID NO: 249634 - DNA, 807 bp, Cannabis indica
tattttgccacataatatgtccagtcactaagcatcctctaaaattttaccggtggagatgctcttaaacacgtcatggtacgatgctatacattagtataaaagacgggacacgtaaacacaaatagactaattcgaaaaacacaatatacgacaatcccgaaaaaaaatacaacacgatatattaatttgttttttataatttattaataataataaagtatgaatataatactgaatattataattatataattaaaattataaaaataaaaataaaaattatatattaatttattttattgagtgtgatataaaattttaagtatttataagtaaatatttaaattctaatgatgttaataattcttttatataattatctgtaaaatattgcttaaaaattacataaatataactaaagctttgtacatataatttaataattgtaaaataaaattatgaaaaactaaagcacgaatagtaattgtaaaataagattatgaaaaagtaaagcacgaatttaagcccagatataaaaatggattgagctatttaaaaaatacgaaccgacacgagcgaagcacgacacgaatccaagtacgatacgaaaaataccgggcctaccctttaaaaatattggcgcgacctatatttttctgtggcacggtacatcacgactcattttttgaaaagcacgaataaatatgagtcgggccagcacgacacacacgaatttacaacattatatatatatatataatagattaaaattacgtgcaaatgcacatatatttagtttttatt

SEQ ID NO: 249635 - DNA, 850 bp, Cannabis indica
ttgtattttattgattcttcatccatctaacattacaaaattttatatttttaatcacaacaaaatttgtgattaaaaataaaaaagttttgtaattataaatcattatttctatgttgtgactaaaaggtaactaaatgtatcagttacaaaaatcacaatttgttgtaactaaatatatttttattcacaataagtattgtgactaaagctaaattagtgataaatactatatttcaatcacaaataattttttgttgtaactaaaaatcgcatgtaatcacaaaaaatttatgttgtgactaaaaaattatcactaaaaataatttttttaaggtaataaaatttattataaacgactaaattgatagtagtcatgttattattattattttttttttgtaaatgaaatatcaacttcattaaaattagcattcagaatacaagatagtttgaagatcagccaaaacattatcctcaagaatgttatgatcagagtaaagtcgagagcgtctagcgtctaaattgatagtagtttaattagtttaaatgaaggatacaaattgaagaaaaaagcacatcaaattattattattttcttttatatatatatatataaaagaaattaagagtctctttcataaactttcctccacctacaatcttgcataataattcacctcaatccccaaagctcagaaaagtagaaaaagaaaatagatttaacccaaaaaaaaaaaaaaaactagaattaagagaagatcacaattatatcattttgtggcccactatgaaagacaatatcaaggttcaaatgtttctctttatattatttcagttttaatgtaga

SEQ ID NO: 249636 - DNA, 921 bp, Cannabis indica
cagctaagtaataatgaagataaagcaacttggaaactacatgtacatgggtcagcaacagatcagctatctggtgtagaaattgcccttgtcacgcctagggggcaacacctgcacagtgcaatctagttcagattcaaagcatctaacaacgaagccgagtacgaggctctaattggtgggctaaagctagtccaggaaatgaaggccggacacattgacatctgcagtgatacacaactagtggtaaatcatgtatctggagaatacgaggctcaaggagaaaagatgagagcatatctgagcaaaatacatgatctgctcgcacaattcaaaagctacagtctcagacacattccaagagaagaaaatacaatggcgaacgcgttaactcgattggcaagcagcaatgtaagtaacaaggtgcacttggttcctatctagttcctcgaagagcctaacatcactggcacgaaagaaattgcattattggtacatccccaaactggatgacaccaatagcagcctacctcgactctaggaaacacccatataattggaaagaagctcgaaaaatgagaaggaaagttgcacagtatatcatagtagagggaattatgtacagaagaggattctcaatgccattgctcagatgtgttactcaataagaagctgcacgacccctatctgaggtgcacgacagattctgtggaaatcatgctgccgggcaaagcttatctaagaaaattctaaggcaaggatacttcttaccaacgatgattgtaagattcaaaagtctatgttaagaagtgtgacaaatgccagatatttttaaagatacctcgagctccacctaatgagttaactcagctgtagagtccaatggccctttgccatttggggaattgacttgatcggaca

SEQ ID NO: 249637 - DNA, 584 bp, Cannabis indica
cataagtggtatgatcatcggttctgatcatcaatcatgtttaattttagggtttcagtccacccagatactttctttctttattattgaagtcagttgacacaacctagccaatctatcaaactgggatgtatactctgtaacagtcatattctctttctgaattcgctgagtgaattcttctctctttgcacttctcactacctcgttgtaatacttcacattaaataactcctaaaactcttcccaggtgatggtagtgacatcccgagtaagagccaccatatcccaccagactagagcatcttcttggaactggaatgtggcacaagccactccatcattgctggtgacacccataaagtttaggatccctgtaataacagtcagccattgttcgactttcatcacatctggacctcccaaaaagactggaggtgcctgcgtgcgaaaccttttgtacaatggtttcatccggttcatagcaaaaagtggccctgcccacacaacaggtacaatggccgcctgcattttaggggcaggcagtgcaagagcaccctgtagcctcagacgcctgatctctt

SEQ ID NO: 249638 - DNA, 587 bp, Cannabis indica
acagaggggacatggtgaattactaaaggagacttactagagcctgaagtactggcatctggagcaccagtgttaggaccgagaccaaaggcttgggcctggaaggcctccgatccgtgccagctcccaggcgaaggcctcccggcagcagcctgggccttgatgtaagccaactcttgttccctcctgaagaggtacttctgatatcgctcctctgccgaaatgattatgtccacccggagcgcccttttcgcggccggagtcctgacattcgggcagatgaccttggaaagattaaagtcatccaccgactgattcctggatatcaacttgaccttccgacaattctccgtcgtgaccaagtccccgatgttgagggcctccttgtcgtaagtagagaaagtcttggcccactggaggaacagttgagtaggcgcggtcctcaggtagggagggatcctaacccactcagtgagaagctccgggtggtccatgacctggaagccggaggaaaagaagaagcggtggcggtactccttcacgtgcttttgaaaattataaggtattgggccctcattcaaaggatg

SEQ ID NO: 249639 - DNA, 577 bp, Cannabis indica
aagatacaaaagatagacaattttaaacagctaaatcaataggcaagtctagccaccacacccgagcctcatctaaatttaacgctcgttttgtttggtatatttttgaagtgagaatgtagtgagtttcacaaatatttaatgcataaagtgaataactttgtacacttcccacatgtgatttcctcacctatattctcatgtaaccaaaaattaacacaaaacacctctaatagggttatgtttttaagtgggtctcaattttcaaattaaaatggtaataatattaattccctccaacatttaatttcatattctcttaaagtctaatttctttaattcaaactcacataacaaattaatcacttgaggctagcttaagtggccataagaaaatgcgtgtgtgttggaggtcgtaggttcgagtcttaaattatacagtgtaatatataaacgcttacataaaaaagaaaactcacataataaacacataaataatgatgtttggttagaaagaataaaaatatagctaaaatatgaataatcttacaatcctttaaaataaaaccaaataaaa

SEQ ID NO: 249640 - DNA, 1283 bp, Cannabis indica
tgtttggtttaatggttgttgagtgtcaaactcttttactttctcttgtcaatgttaaaatttgttttcgttaagcgatctgctaacagagttgcacattgtattgcccgcaactcttgtttttggtcaggttgtaattttgtagaagggacagcgcctgctgctcttcaaactcttattcttgccgattcggcagtttaatggattgaagacttttacaaaaaaaaaaaaaaaaaaagcgaggtcaataaaatagtttggagctattttttcataataagaattattacctgaattaattctacatgtatcttattatttattttaaattaatttgaaatgttatagagaaaaaatgataatttttattaataggtaaattagaaaatagaccattatttctttcataaaaaaaaaagaaaatagtccattattatttagaaaatcactccatatattattgggttgttttgttggttgtgattttttttttttgatgtggtgaacagagtcacacatgattaacaatgcatcaaattacaatcggcggtggaacctcttcgaaccaagatagctcattgtttaaccgaaagatatgttttgccaaactatgagctgtaaaaatctaatcgcgagctacatgagacaaaactgccctggaaatttagacaataaaactataacatctttaaacagagcctcatcacattgaaaaaacaccttaccattaataataagttgtcgccaaaatctaaaaaaatattgtaacaccaaactaaaaaataaaattatattagaatgacaatttttaaaataaaaaaattagattacgatttgaattgttatattgattatggtttaaattaggttgccatttatgttattggtgatttgtagagtatattttaaaaaaatgtaataaataaaaaaaccgataattatttaatttattttttttcaaaaaattaaagaaagggaaaaaatggtaagtgtagctacttttgggtttgggattataaaaaaggtctgtaaacccaacccagtgaagccccagagattttgcagatcaattcgtctctgagtaacgccggagatggatcggcaagcacacgattacgccgccgcctctgccatggcttatgcccagcagcagcgtggggtaaatccacagcagcaacagcaagggtttggataccctcctcctcctcagcagcagcagcaacaacaacagcagcagttccctcctttcattcccccgcacccgtcgatgcagcaattccctt

SEQ ID NO: 249641 - DNA, 521 bp, Cannabis indica
ttggtatggctttcggtcggtctctggacttgaaactgaggactggtatgttttatgcaattcatcacactcactttctatgaagcccaattctttctgttctttctttccccactgtaatgttgagttataatatacctaagaattttatgttcttagtgctgtattaacactaagttatcaggtcttactagctagtggagttgatcacacaaggcactgcaatttcttgatttttactgtaattcatgtgtgtgtacaaaggatttattcttgatttttagttgcatttactctatgtatagtcagtctcataacattgatcatgtcccttcaatatttcactttcaattgttttgctggtacagtaattattaaactacactcaaatttggattggattaattgcactgaaaaatataggaggaagaaacataggagagtgaatgagttaatcaacaatagttggatttaaattgtaattttttttccttttactactgaaatacatgaagttggga

SEQ ID NO: 249642 - DNA, 596 bp, Cannabis indica
gaaattccctcaggaacaaccactggttttatgattccctctggttcagtagagtcgtcgacctcctgaaccgtggttggcgcctgagatgaggaatccagcaatgctgcagtcgacaaaccgcggcgctcaaacatggcgtcagtacgcaactctacagatctaatcatggatcttacgaattcacgaagctcgtcgtcagtcatggtgacaatctctcactgaaatctctctatgagattctctcaatgaaagcaccaatgttacaattaccgattatatcgaattacactcttcgagtcagtgccaaactccaataggaataatcctaattttctctcatttcattcattgattcccctttgtgtaatagtattacatatttatactaattagacaatactaacaattttactaattagtccctatacccttttatgtaacagtttggatatagagagggtttagaatttggagaagatgatgagtttagagagagaggtttaatattttggagtagagatgaaataacgaaatgatagattatgaaattccgtattttaatattcccagtttgattatttaattaaatgatt

SEQ ID NO: 249643 - DNA, 796 bp, Cannabis indica
aaaatgaatcaaattgtggctgtgtatttctctctcttggccgaccctctccctctctcaaaccctctcaattttgtaacttgaatttggtgtaattcttgcttgagttgaagagtgttgattgggaagaattgtgttgaagttttggatatagcttgtgcaaggaattaaggtagtttcttgctgaattatttggattttaaatgttgaatccttgcttaaattcttagggtaaaagcatgttctttaagtttgaatgttctttgttgcatgacaagtgaattgatgttaatcttgtggaaattgagcttcttattgttgcatgcttctttgataagtttaggctgagattttaaggtatttttagcttggagttatgtgtttctaagatgtttgattgctggaaaattgcttgagttgttaaaaaggaaactcttgttcttgagcttgactttgcttagttgaagcatgaactttgtgattttcttatgcaatctgaattggggatttaatgttggatattgatgcatgctattgtgttttaatccctagtgattgttagtagctttgatttgtgatttggagggttttgttgtgaatttgaatgagtttggttgagttgaattgctgaaaattcgaagaggagctgctggttttctgggttccgcatccagatgacgcggcatgctctggagcatgccacagcccgctcctctgagtggacctgggaaatggtcccaggtgtcgcgacatggtctgggcatgccacggcccgccctcgtgtttttgggcagtt

SEQ ID NO: 249644 - DNA, 1312 bp, Cannabis indica
aaagaatcaagcgtaaaatagccctaaaaatagaaacaaagaagtgaaaactaaccgaaaatatgacccgaaacttagactaattttagcctaacagtacttagtcttttgaatcatataatcacaatcacattccactgtgttgacatcactgtaattgtgaatgactatatgttctagacttaacagattttgtacatatattaaactataaacatgaaaacaacatgtaaacataaatcgcttctaatctcttattgataacaaatcagagtagattgtaatggattttatttagggcataaaattccaacaacgtgtacactatgtccagtccaacatggcacttaacacctgaaatggacggaaatgttaaattgctaacagaatacgagtattaggagtattactacccaaattttggttttggggttaagtgaaacaaaaataaaagttttgggggttttgctgccatttaccctacataattttgtaagtttaattgtttttagttattttttatttttgtcttatttatattgtcgataattaattatatttattagtaaccttttttttataaatttatttagtttgtttttgttttatgatatatatgtataggatatattattctttagtattaaatgttgaataaaatatattattctgttgaaatgaattaagcaatttaattagttagagaattacatgttagatttttttttttcaaaattataagtaattttatatagtaaaatttatataagattctgtatgataatacttgagtataataatatttttttttataaatattttatgtttatatttttatttaatgtaaatttttttatgtatatatgtatattacttttctgcatatttatatattatttgaaaatattttaaaaactgaagaagaaatataattttttttaaataagtattgtgcataaaaatattttattatttaaattatgataactctaaatttatatttatttttttacagtccttgttcttttttatattttcaaaaacttaataagattatcttagttaattttttttttaccatatttggagttatgtgttttgtttttaattttaccaattattaatatttatcctttttctgtttctttttttaatctgtcaactttttattttctttttcttaaaaaaaatctcttatttttcactccatttgctttttttaaataccatttttcaaaatctacatttttactatttttttctcttatttttttttaaatgaattttacttgcttatttttttcaagttttt

SEQ ID NO: 249645 - DNA, 558 bp, Cannabis indica
ttaaacgtaagaatgtttaatttttttttttttacaaaaaataatgtcttatgtatttatctctattcatttccttctcctcttcttgtgaatcggttactccgtattttcttaggccttattatttactttattgactaaatgttattaggctttacctctaatgggtctctcttttttttttttgatattaaagtctattgggtttggaatttcaatgatgggccaagtttgcataaattgatttgttgcacaatttatttgagaaagttacaaaaatactgacttttagctaaatctttacaaaaatattgctacacggtaaaaattacttttatactgtcttgactaattttctttttatactgtaaacaccaaaaaaaaaaattaggcgtccatcttccacgcccacagacagaaccaccataagaacactagaacaatcggaaaacaaccgataattccggtgagattgagaaaaaatatagtgaaattgacgtcaaagaaataatcatggcaaaacagctgtaaaaacaatactaaaacaaatcaaacaaa

SEQ ID NO: 249646 - DNA, 745 bp, Cannabis indica
tgtgatctttatatatgagatacctcacaggttgtgtctctaatttttttttcgacctatatatttaaatatttgaataatttttgcaacaataaaaaaatataatttttcctatatatatttaattgtactaatagcaatataacacattgaatgactccaaacacaccactacagcatatttcataatgaaataaaaattgtaatttattgatcacagagttgtgcctaggaaaggtatcaaataaaggttggtataaacatcacgtgtatagtggataagatgaatatatataatatttaatattgagaaatgttaaagggtaccagtggtgtctagcaccctcctacgtgtcaacatcgctattggtccaactaaatatcgcgtcccatataatttaatataataacttttaggtagtatctctaatcaatcgcaacacgacatatcgagaaggtactaggcaccactggtgtctaacagaaatgctcttaaatattagagtgcatttggtaataattttttaattatttttttttatttttaattaaaaaactaaaaatattttccaaaaacatgttctataaaatagttttcacttttaaaatttttaattgagaatcaaaattttaaaagttttaaaaacaaaaataaatcttgttcaaaaaaaaaataaataaatcacttttaaaaattttttaaacagtttttttaataatcaatattttagactctgactccaac

SEQ ID NO: 249647 - DNA, 649 bp, Cannabis indica
aaaaaaatggtcataaattgatgaatcaagcctagccgcataatgaaccaaaaaaaaaaaaattaaatgccgataaacagaaaaccaactacatcaatcaagatcatcatatatagatatacacagcatatattaaattgatcctcataatatatatacagtgatcataaatgaggaaccatagatcaaaaattaagatatatcatatatcaaaccatataatatatgaaccttaatttttaaaatctcaaaatttcataaatcaaatcatcaaatcttcaatcaattcaggtggctctgataccacttaataagatttataaaacactcaagaaatataaatatcacatatctaaatatattcctaaaattgttttaatatagaaaaccctaaatcatgaatctatatagactttgctaaattaaagaagaagaagatgataaaatatgagcagaagcactaacctgaagccattgttggagattgcagagaaggtcttgatcttccatgaatacactattttcttatgtattttctctgataggaaaggagagaatacagaaacccttttcttagggaccactacctatttatagactcatcttaaaatgagttttaggtatttataatttggcccctcaacaaatt

SEQ ID NO: 249648 - DNA, 709 bp, Cannabis indica
tttaacctcatcggtagaaaaaacagcatccagaaactaattatgctgatcacaaatcttcttgtctacaactgagagaataaagttaacaacctctaaattaagattagaaaagtaattacaaacttcatttcataaatcagagaaagaagacaccttcctaccatcatctaaattaaaaaaacctgatatgattattttttttttccctggaagaagctttattatgaaagtatttagtatttttttctctagtatttaaccaatgaattttaaatctttatttccaaaatacttcatgcttataaagaagactattaagttgagattgaagatcttgagcttctttaagagcctcattcgagataggaatgctaaattaaatagcgttaatatcctcttcaattttattaatcctagctttgagacaagtaaaagaactacaacttttaataacattaacacaattatgctacttaagaaggaaattattaagatagttaatactattattatgagtatcattattccaagaattttgaacattatcaaaaaatgaaggtacaataagccaatagttctcgaacataaacttttttttattgtaactaaccatgaagtcatcattcaaaacaagtttaaaactctatggtctgagccatagaagttaagatggtgaagagttgcattaggataattattaaaccaa

SEQ ID NO: 249649 - DNA, 755 bp, Cannabis indica
attgtacatatcaagacagatagacatggagtgttcagggtcttcaagaacgttttaggctcacttttaataatcacaagacaataacttttgaagaacaaatattatgtaaacttatgaaacttttaaaatgggatcctagattatgtaaattattatgtttatttattaaagtggagttatttaagaaaattttaactatccacatttttcaataaaccttttgattagcaaaggcatgcacggtaattagaaaacacgataacgtgcctagtctagtcagacgatataaataagttgtataactttataatatattttcaataaactcaaccccaacatcgactacgcatcaggtctaggtccagtccagcgtctatgtttgagtcctgtgttttgggtttgggtccaggtttgggtctcggtcttggtctaggtcccaagtttgggtctgggtcgcgagtctcgggtctgggtctaggtcccaggtccaaggtctgggtcttgggtctaggtcccgggtcctacaacccagtccaggtccgagtctcaagtggtccaggtctagcttgggtcctggttccgggtcagggtctttggttaggtttggggtctgagttcgagtccgggtccttaatcttggttcgggtttgagttttggtccagggtgctaggtccgagtttgggtttgggtcttcagttatggtctgtgtttcgggtttcgggtcgcaagtctgagtttgggtacgagtttg

SEQ ID NO: 249650 - DNA, 1237 bp, Cannabis indica
acgtcatcattgccctcaacatagcattagggtttgggccatcacagaaaccatcaataaagggcatttgtgctacaatgtcaatactcggcataatagtgtttaattcaggtaacacattggcaatcaacacctctaaatttgtttctagaacaaaactcccaacttcgctagtgtcctcaacagtacttggtgtgggactaggatcaatacaaacattcttctttaacaaagtcacaaacaaaggagaaaatttatttgacttcttcgcaagcctagacaaaaatgatcttacatgcttatcatttccaataactttagggcgatacattaagccttttatagactaataactcaaccttattattcaaatgacatttaaccatctatttctgtccattattagtcaaaaagaaacacataatttaagactaaattcacttgtgacataacacatcaataagcaatagaaataatagaaaaaatctattcttccataatagatctatttttcatggaagaaaatatatatatacatttagagaaaaaaaatagataaaaaaaagttgagagaaaataattattttattttaaaagccatactatatcatggtttaaattatattgtttcatgattaaatggggaaggaagatcaactcaattaggtttaggactaacaatgtggtttaggatataaataaattagatatatgatttgtttagttatgaataattaagttatatatatataaatatatatatatttatatatttaaaaaagagagattgtagagggtttagaaatttaaatacatcataaattaatttattgtagatagatcacctacactacacgttaataaccattaccaacaaaaaaaaaactattattaatatttatattataaattaataaagaaaataattaagggaagaatagaggtagatatgttgggtatttatgccataaataaaatttatttcaatataattagatttactaattaataaaagatcaaaaatactttttatgttacatggttcacatgattttttttttatgattatatgtttaatatataaattctattaaatcatgaacatatagttattcatgattatagtgttgtctaaacagtaaaaaataatcatgattatatgcttcaaagtatttagtctcatgatttattaatgaattagatttatactatcgggataatcagcgataaagtttac

SEQ ID NO: 249651 - DNA, 639 bp, Cannabis indica
catcatcatcattcatcaacccctttaaatgtatagttcaataaaaattaaaaataaaaagcactaaagtttaccttaacacctattcaaaaaaaaaaaaagtttaccttaacacatgaggattctgatcgggccattgattatgccacgtggtaactctctgatcatcagcatctaccgacgccggaacaatggttggatcctccaccacaaaatcaaagacctccttccaatccctaacgttctttgtatgttcggtatcgtagtatcccaaaaccctgacctcgtccctcttaactctcatcttctcttcctgtggccacgcaaagaactccctcgccgctgactcaatcttccgtcgactctcaggcgaaactccatggttgatcacttgaaagaacccccactttctgcaggcgtcgccgatctccttggcgaggtcatcgatgggcccggtcgaaaggtcgatcaatggtattccttgggcttcgaggattgtgggcttgggcctgtgctctggtgcttgaatgaatgccgggtcgaactccgttcccattgctgctgtagattaacgtggaggttggttggtaagacctttctggtaccaattcttgagaactgagaagtgagatgattgct

SEQ ID NO: 249652 - DNA, 644 bp, Cannabis indica
gtccttggatctgcttgatgaaagacgaactgagaggcaaatcaccaatgcagcgcatcaacactaagttacaagatacttcaacaaaagagtcaagaaaagactattcaatgttggagacttggtgctaaggaaagtatacgagagatgcatctgcaggagtgttcaacccgaactaggagggtccatatgtcatcgaagcagtagttggaattggagttacaaattagctcaactcaatggctcgctaataaagaactactagaacgttgaacatttgcgaccctactacaaataaagaaatgatgtaactcgcattacagatgtaaaattttaacttcagttatgaataaagagaatcatttatactatttaagtaactacaaagtttgactctttaaaattacttaaggggcatttatgtatgattaaccagaattcatctagaaatacatggtataatgcaaacccaccatttcaattttttttaaaatttaaaggatctcgactaaacctctttaacgaaagaggagttgaactgttacaacttcctgaccaaacctttttggcgagagaggggtcgaattgttatagcattctaatcaaacctttttgatgaaggagggatcaaacaactataattt

SEQ ID NO: 249653 - DNA, 584 bp, Cannabis indica
taccaaaaaaattaggagacaaagggaaaggtctaaatgtgaatatctcatgatttttttcattctgttacataaatcaaattctatgaaaatagggatattaattgcccactattatgaaactggttaaggaaagtatttctgaagatccttagcaaattctttttatcgactctccatgttgcgtggctcacatcattcagcaagcagtgaagcctgaagcccattcaaagatttcgatatcaactagcctagtcagtatactggtgttatactcctctaaggggcaatcttcctgtcatgtgtcatctaccagatgccacgtcaccagtacaaattttgggattacatttacgccacaagtttgcgcgaaaacttctggtcatacgggtactttctaggtcttacaagttgcacgactaggtgacacacctttatgcccatgtgtttgcatgaatatgctatcactcctgctcgatgcatgtgaatttttctctgtctcttcaaatgttcttattaatttccttgccttagaaattacatattggggatcgtgcactaacggttacacaacccttgtaatg

SEQ ID NO: 249654 - DNA, 668 bp, Cannabis indica
aatttatacattttaagtgtcgatacctgaaacaaaaaattaagcgtaattctattcttaaaataataataaagaagaaaaataactatgaaagtaacttaaaacttagactaataaaaatagtctgacaaattcctcaaaattaaatcgttactcgccttcgagtaagactcaaaactaagataaaaatacaaactaacacacaattaactaagctttcagacaatcaaaccgctactgccacctgtgaaacttcaatcaataattcaaactagaatttaaatcccaaaactctaacaatggatttaaatacgtactttaaaaaataatgtaaagatgcaaatttgcttcaatgttcaaaaaacatcatattaatttattctactctatccaatctttccacagtccaatgatcaatatgcttgcatgacttatttcactccactaatgttaacaaactttgtttgtaatcacaagaactttcaagattgtaatgaaacgaattagataataggtagataaaaagtcatttatgttatattataccataagcacactataaaccaatcaagcactcgtatataaatatactatcccggaattcaccaaggaaactttttttaaagattgagaatttctaacttcgaatccaacaacactttttcact

SEQ ID NO: 249655 - DNA, 959 bp, Cannabis indica
agaatgccgagagtttgaggtttatgggttatgacaatgttacccttactatttattggttactttaagttttattagggataaagttatattttttcatatttttgtccattgtgctattggaatagtagtaatccttttaatttaagtatatgttgaataatatgagactttttccttagttatttagaaaattagaaaatttggtgaactctttttctctctctcttcgagtcggccaccaagaatcaaggggaaaatccaaccgttttctcctccaattcagaccatttctagatgaattttgtagttgtagctgtagctttagtaatttgtgaggggctgtaaatcgtcgagcaacagttttcactcaggattactgacaacttacattcgaaatcaaggtaaaggctagaactgaaccagtgatagtctaaagctaaggatgaagatattgttatcaagatgtttagacttggagtgttcagagtcttcgcgacagttttggctcaccttgctaatcgctagacaataacttttgaagtttaaatattttgtaacttttaaaatgagatcctaaattatgtaaactattatgtttaattattaaagcgaagttatttaataaaattttatttatttacgttttttaataaaccctttgattagtaaagatgtgcacgtacagtatttaaaaaacactgtaatctagtagggtattacaattttactctatcagaattatttcatgtaaagaatatggcctaatggatatttctgttttctctaaaaaaaagtgagaaacaataatcatcatatatatccatgcatgaccagcagtttaggtatatatgctttttaattagcttcttcttcatttttaacatattaagattatgctctatggattataatttataacaagaacattataactttcatttaatgaatatatatat

SEQ ID NO: 249656 - DNA, 1538 bp, Cannabis indica
caatgaaaagaagtctttaccttttaatttacaattttgttctagctgtcaacttggtaaatctcatcacaaatcttatcctgctactttaaaagagtgaaaacaggcccttgaattggtgcattcggacatatgaggtcctgcacccactatgtctaggcatggctatcgttattacatccattttttgagaaacatatggggtcctgcaccaaagatgaggtcttatctaccttcaaagccttttgaatgtaggttgagaaacaactaaataccaccataaaaactgttcaaaccgattggggaggagagtatagaaaatttgagccatatctctaatccatagatgtgaaatttggacatccttgccctcacactcatcaacaaaatggaaaagctgaacgaaaacaccgtcacatagttgagaccggtcttactctccttgctcattcaagtatgcctcaaagattttggtgggaggctttccaaacagcaaccttccttatcaattaccttgccacacgtgttttaaattataaatgtccaattcaaaaactgtttggtcttgtcccaaattataaattcctaaaggttttcggttgtgcatgttacccatatgttcggccttacaacacaaacaaattacaatttcgttcagccaaatgtgttttcataggctatagtccgagacacaaaggatatatgtgtcttcacacctcaggtagagtctacattgctagtagtgtaacctttaatgaatctgattttccatttgctaatggcttcacatatcccactgcacacacagattcctcactctcacctagtcaatatccccaatggttaccatatctgtccactgtaactttagaacatgctcgtgctgtagttgttgttggtgatactcattagcaagcttctcaacaagatgaacactcctcgagttcacctgtttctcatctgcacaatcccattactccatcatcaactccatcacaacaaaccagcccaacctctatcaaatcatacccgactatccctcttcacattaacctgccactctcacctatttctcacaccagacagccacttaagcattccccaattcagcaacaaactaatccaatttcttgccctccaccacgtccaccccagcccacccaccctatgatcactagagccaaggtaggcattcacaaaccccatgtctttaatgccttttcgcccttacctttggctttaatgactgaattggaacctgagaatgtgcaccacgctttaaaaaatcctaagtggaagtcggccatggatacataattttatgctcttttgaaaaataagacttggatccttgtgcctcgatgcctaggtatgagtgtcattgataatagatgggtgtatcctgtcaagctcaataaagatgggacggttcaacttctcaaagctcgacttgtcgctaaaggttttcagcaacaacctggagttgatttttatgagacttttagtccggttgtcaagagttccaccattcgagttat

SEQ ID NO: 249657 - DNA, 609 bp, Cannabis indica
acacaagagaaatatttttatatattatgatatttatctgataggccacaaaaacataaaataacatagttgaatgagtcattcagccgaaggattttgagactgagtaggtctgagttgggtccatattgtccaatgagtaggacgagtcatgagacgatgagcagagagaagagttaaggtgaaataggcaagaaaagccaagtaagaaagcatcacagccaccatcattctattgcaaaatttgggtacttgctcacatacagcttgccacgtcatgtgtacttccccgtgccgccccacgtaccctatggcggtcgccgccgcacatcccgccaccaccaacaccatcattacctgcaacaatatttacgttccatctcaaaattaattgttaattagtaacaaaaaaatttaagaatttatatatttgtaattaattatttttagtattataaaatgttaaatgtaaatttttaatattatctaaactaattggtagtgagtggagtaatcgaaacataaatttacttacggtgtcatgcacaaaaagcaagaacaacttggtttggagtgagtttggctgagaacgcttcaagagaccaaaaa

SEQ ID NO: 249658 - DNA, 555 bp, Cannabis indica
caaagtcaaacttaattttaatttactaaactacaaaatatatatgacgcaacttttcgaacgaagccccctctttagtgaggctctccttagcaagattttaaacaacctcattaatagttcttggacaatacttgaaaagcacctgagagagatcactcttagtacaacctgatataaggattccatcataagaattatcttaagtttgtgagtttaacgacataatagcattgatacaattagaaaaagtgataaccttttgaattcctatctcgtgcaaatgagaagaccttgcctcaaggcttcaatttctaccataaaatgatcaaaacccgcctgaatcaggaatattgcaactaatgccttaagcgaaccatgaagaccaaagatagcaaccccactctaattttcaaatcagtagttatagctgcatccactttcactgtaataccgttaacgttagttaaagtagagatatcaatacttagcactgggatgagctacgtggtcgacacttgagaagtcttttgaacttgaaaactttggagaagg

SEQ ID NO: 249659 - DNA, 559 bp, Cannabis indica
ctatattcaatctggtgcttttaatattgactatctcattttttttattttttatttacagttaatgtttgaatttatttctctatgtgcctacctaatctcataatagaacactctaaaaatgttgttctagtaattctttcatctattttggtaagaaaaattatttttttttattattttttatgatcatgtacgttatagctatttaaaattatctgtaaatttttaaaaaattctaaataagattcaaatattttattacacacgtcactgcttcttttatacatatagtttaaaacatgtaattttggcattgtaaaactattcagttagaatttaaattgtaaagtccttagtggtcatatttagtgaatatgacaaaattaattatgtgcagtatttttaaaataaagttgagatcttgttttgtgtgaaaaggtttaaaatcaaaatattatacttgttctaataaattttatttttgaaagaaacgttcatttaaatagatttcagacctctcgatcgttacaaattaagttcataggaatagtcgaga

SEQ ID NO: 249660 - DNA, 1073 bp, Cannabis indica
gaaaaacatacctttgaaaggcttagcaaagccagcagaaacactaccattgtgatcccgaattaacgcaccaaaaccagaatgtttccttccttatcacaagctgcgtccacattcagcttatgagaaccatggatcggtggtgaccaggattgctgcatggtcactgcaaactggtggtgagatgcacttccagcagtatgagcaggcggatcgggagcatttgtagctgcagattgtactgatgcagtgacagatcgatattgatccaaataagaaacagcaaaggaacagataatagctgctgattttggtcgagtaccatgtatttctttattgcgtttagaccaaatgcaccacatgagacatgtgattaattcaagatcagcatcagtatgtgcagcagctaagtgggagaaaatatcaaatccttttaagttgtatatatgcggcatatagacttgaaattgatatttcttccaaacttctttcgcacgggcacagcgaaaaatggcatgtccaacagactcccatccgtccttacaaagtgagcaagcagcagtagttgtgatttttcggtgggctaggttcacagaggttggcagggcatcattaatcaaacaccaagcaaaaattttgactttcttaggtaacctgagagaccataaccgattccaccattgtctattagaggaagaaggagaatgatcattagaggaatccagagcaacagctaaatgataccccgtcttcaccgtatagataccggattcagagtgatgccaaattagcatatcctcttttggaaagggactaagaggaatcgagagtatacggtcaatgtcaatagtaccaaaatgatgctgaagaagctgaaaatcccattgtcgacttgctgaaatataatgctccaccgtgaaagaaggatcaccactgtaagtctatggtgtgaaggtagtattcccaggtaaccaaggatcagaagcacaacggacattacgaccattacaaattttccactgaagacctttcaacaaaaaatccttacaatcacatatactctgccaggtgag

SEQ ID NO: 249661 - DNA, 707 bp, Cannabis indica
gtgtctaacaccctcttatgtgtcaatatcgctattagtccaactaagtatcgagtctcatataatttaatataatagcttttagagagtatctaatcgcaacgcgacatgtcgaaggtggtagatactactggtacctaatagcaatgctcttttataatagtaagattcttcatagttgtgtcaaaatttgcacaataataaacacaatttttttattacaaattttttatgaatcatcaatgataagctttaatacacaatatttttatcacaatattatcatatttaatttattattattttatttttaataaaatcacactacacataacatattaaggtatttaatttattaacaactaatattttactcttattatttctttttataaataattttcatccaaagttttaatgtaaatgttgttgcaaataatatttatttatttattatgctcaagttagcaatatctcaaattttagtattatttataatcttatttaacaatttcttttatattgttaaggctatatatcaataatttttcttaattatgattttaataatcacttttgagcaacttctctcacataaagatttgaacttaaataaatttaatttttttttgctatgaatcttaaaatatattatttggtttttattttcatttctttttaaagaaagatcctatattaataatact

SEQ ID NO: 249662 - DNA, 1066 bp, Cannabis indica
ggttacacaatattaattagggagaaacctggtttgaaaattatacttagtaaagatgttatctttaaagaagatatatttcctgtgttattaactccacctctagtgcaggccttagttctaaaactaactattaaacccaaaaattagcaccgctaactctcgatattagccaactgctgatcgaaagattagcagaaacatgtccagaaagttactttgaaggcttagttgtatttgctcctccaaataccccgaagtgatttagaatgctcatagtggaaatccactcggcatacacatggtgaaagctcactcggcatgcatgcaatggtggagagagtcaccctgtatgcttggaaacatgtcactcgacacgcttgggaacatgtcactcggcttgcatgcaatagagagagtcactcggcatgcttgaaaacatgtcacttggcatgctgaggaacatgtcattcagcatgcatgcaacagagaaggtcactcgacatgcttggaaacatgccactcggcatgcttgagaacatgtcactcgacatgcatgcaaaagagagagtcactcgacatgctgaggaacatgtcactcagcatgcatgtaatagagaaggtcactcggcatggtgaagagcatgtcactcggcatgcatgcaacacaaaaggtcactcgcatacttggaaacatatcactcgccatgcttgagaacatgtcactcgccatgcatgtaatagagaaagccacttggcatgcacaaagtgaagtcactcggcatgctcatcatgaagtcactcggccatgctcatcatgaagtcacttggaatgctaatcatgaattcactcggccaccatgctcaccatgaagtgactcagtaattcatgtgcatgcacacttgactagcatgttcgagagataccctatatgcacactcaacatgccttcccacaacagcatagttgtacttagtgaaattttcctaagtgttgaagaagaaggaaataagggtacgatcgcaaggattgttgggttttatgccctaaataaaactctgtttc

SEQ ID NO: 249663 - DNA, 1332 bp, Cannabis indica
tttcgcttattgcaacacaattttcagttcccatcaaagcagtgcgttgtgacgatgctaaacaactgaatatgacaaccttttacaatagcaaaggcaccggaagtacaactcttgcattggtcgccctcaataaaattctgttgttgagcgcaaacatcaacacatattaaatgttggtagagctttactgtttcagtctcatttatccttaccttattggagttatgtcataaatattgttgtttatctcataaatcgaactccatctatattacttaacaaaaagacttcatttgaagttctctttaagaaagctcctgtctatcaacaatttaaagtttttgggtgtcttgcttttgcctccaccttggaaaccaaacgacataaacttgatgcaagatctcgtccttatgtctttattggttatccgcctggtatgaaagcttacactctcttaaacattaacactcaagagatcattcactctagagatgtttattttcatgaagatatttttccactatctgacactaactctccaaattcaatagatcaattattctcacattctttaccgccctctacaggatcatctcaacacccttctgaggagcataaatctgttcccaaccatgatgccacttcatctcataaaatagacattcctccaagtgtgaaagacatcaacacacatgtcccacctcctgaggaagtaccatccacacccagggactcaataattcattcccctgtcacttcaaaaataggaagaactttatccaaacctaaatgtctttcagattacatttgcaataccactgctactttgtccactgcttacactattaacaaatatttttcttataataggttaacacaacactttcatatagcaatcctcgctgccccctccattgctaaacccaccagctacaaaatggcagctaaagacccaaaatggaaaaaagccatggacaacaaaactgatgctctcaaagccaactacacttggattgttgtcactcttcctgacagacatcatgacattggttgcaaatgggtatacagaatcaaatacaatgttgatggcactgttgaaagactcaaagctcgcttagtagctaaaggctacaaccaaaaagaaggtattgattactttcacacctttgcccccgttgtaaagtttaatacattaaaattactgcttgttattgcagccattaacaatttgtaccaacttgatatcaataacgcctttcttcatggcgatttacatgaaactgtctacatgacactccctaagggttataaacctaaaggagatattcc

SEQ ID NO: 249664 - DNA, 841 bp, Cannabis indica
tttgaaaaagaaattgaaacccaatagaatagctgataaatacaaggctcatttagtagtcaagggttttagacattagagagagaataatgtagatttctttgacaccttttcaccagtcacaagaataacatctattagagttttaatatcatctagttttcatacacaacttagttgtgcaccaaatggatgttaagacttaagactgcgttcatcaatggtgaattagaaaagggaaatctacatggatcaacccaaagggttcatgatcccttgccaggaatataaggtatgcaagttagatatatctctgtatggtctaaagtaggcacctaagcagtggcatgaaaaattcaacactttagtcttttcaaatggctttaatgtgtgaatgaaagtgacaagtgtatctattaaaaatctgaaaatggcacatgcacaatcatatgtctattatgttgatgacttgcatttttggctctaacattcatgtagtaaacactgtgaaatcaataatctgttccaactttaatatgaaagacctcggagaagcgagtgtaatccttgggataaagattactaggtctgataagggaatttctctagatcaatctcactacattgagaagattctaaagaaatataattactttgactgcaaacttgcttgtaccctatatgaccccaagtgtaaaattatttaagaacactggagatggagtaagacagtcagattatgctagcattatcggtagccttcgatatgttactaactgttagggtgtacatcgaccggtttagtcaggttatagtgcatttttaccaatccaatataaat

SEQ ID NO: 249665 - DNA, 619 bp, Cannabis indica
aaacaaagatcattgggattttcgaaagttgattttttttgtgtaactttccaaagatgattctttttctggaattctacaaagatgattctttttgaaacgttatgaaatttaacataaagttccacaatacaatactagcatttgttattgtgaattgatcgaaattgaaaatagaataggataatgtgcacctttatttatatatcagtaaaaatctatacaaatgaaaaaattgaagaaaaagaaaatatatttactcagtgtttcagttcttttcttgcgcatggcatttccccatggcatttccccattgagagcaagattttgcttcttgctcagaatgtatggtcaaagacactacgtctctaaatctttatgagagacgtaggtgcctttatgagagtatctctcatgatcaacaagagccccaatttcaacaaaattatattataaattttttgcttcaatttttttagtattaattttttgaatggagcttgattgtttttataagaaagtataagtaaaaggatttagtttgtcctcaatgtgggacacaattatttaaaactcattttttaatttttttttttttatgtttatgtacataaaaaaa

SEQ ID NO: 249666 - DNA, 1273 bp, Cannabis indica
tattgaaacaaatttttattttatttttatgtatttgaacaataattcatttcatttcatagcctaccattatatatgtcaataaacctactagtttctgtttgttggaataagattttatttttttcaatacaaattaaattatagccaatcataatgatatacgccaataaacctattagtctatttttcatatattggaacaacaatttattttgagtttcaaacataatgtgtgcctataaaataataaactaattagtctatttttcttccaggttgagacatcaaatttggttgtatacaaagtacatgactgtaacatgtcttacagacttacatactaaacctggataataatatatgcacttgtcaaagatttaaatataatgagatgtcttgctctcataaaatgtcttgttcataaaattatttggcatatatggctatactatgcctatactcatacatacaaaagtttattttggcatattgaactaaattttcattcattgtttacacagtatcctttttgtataggctatactattgtatatactaataaatctattagtttattttggtatattgaaacaaattttcatttttcttttcgtatatactaataaatctattagtttatattttccagtatagagtaaactataatcaaacataatgatatacaccaatatatctattagtatatttttcatatattgaaacaacaaattatttttcaaacacaatctattatcatgtatgtctataaaataatattttttttagattcaatcgagtaacgacatagttagaaattctttttaaagttaaaaataaaaaagaaaaagagaaaatagaaaatgataaaaagagaaaaaataggtaaataatgtatccttaaaaaataaacttaaagtaaataaataaatattaataagagtaatttacggtataaatacctaagtttatcttttagttgcagattaatacctaagttaaaattttggcagtaaaaataccttctgtcatacttttggaacttccgtaagtatttggccgttaagtgccaggtcagccccagatgtcagtcactcagtggtccaaatcatttatttttttaaaaagtaaaaatcattttaaatatttaaaaaataaaaaaataaaactgaattaaataaaaaatatcaaaatcaaaacaaacctaaatctaatttcttcgtctactgagttcaaaagaaaaaaaaattgcttcgtctacctcggcaccgac

SEQ ID NO: 249667 - DNA, 540 bp, Cannabis indica
caatgtctctgtcacatctgcaccgggaaaaggaaaacaattaaacaagtcaaagaaaagagaacatggtctcactgagggaaaaaaatggttttacaagatcactgcaataatatagatagataacattattacacaaactggggtaagaaattcacaatgaaaaaattagggaataaacacaccatgacggataagctcaaatcttggatgaccaatccatttcttcagattgtcctttgagccagtgaaataattatccgcaacaatcacctgagatgcagaaaacaggaatccatttcaactgagaattctagaagatagtttacttcttaaagttctcttctcactagagacagtggaagatatcctttgaaccctcttaggttatgccagattctctaaaacacagaaatatgaatgatgaatacttcaaatgaactactttcttgtcttgtgttttattatttatattggtttatcagtacaggcacttatgtcatatgcacaccatgccaccattaaataaatctaatataa

SEQ ID NO: 249668 - DNA, 681 bp, Cannabis indica
tgataaatgtttatttaataaaaaatagtaagtatgagttagggttaaggcattaagtgcgtaagagtggtttttggtgtctgactcaccggggttgttgattttagggctatttgagagaaaatggaccctaatcaatcacctataccataaggtgagtttgtaaagccttgtaatgaccaaaccaatccactggcaccgcccgtgcctccacaaaatctgggggataacacgggggttaataatgctaatccacatgctgactagcagtaaatgttcctcgaaatgcaaatcgttatacttcgttaggaagatgagttgcatcggtttaggcaaccggcccaggcagctccagttgaataagtgttaccaccagctcctgttctagtgttgggtaaccctagatttatattgccacattgagactcagtttttgagcattttgtcaagctgcaaccttcgacatatttgggaggtactaatatccttaaggcagagcaatggatgaacactgttacctgcatcctggataacatgggagtactgaacgagttaattgtgttgcattcatgcttcaagagcttgcccgtgtctggtgggatattgtgggacagactcaagatgttagtatcatgtcttgggattaattcaagagttagtttgaggaaaaattttataata

SEQ ID NO: 249669 - DNA, 894 bp, Cannabis indica
ataaaattagacttcatctttatatttttcacaataatactgggagacttttaattctacttcttcataagtataataatctacttgaaataaatagaaaaaggtaaataagacacgttttttaataccttctaattctacttcttatacaaggttgaatgttctcctcccctcacttctatttatactcctttttggtacttaggtgtcaacttctcaaggtattcttgaatatttgtctattattatttatgaggtgtcattgagttataagtctaaggtgtgtggatcatcctctccgatatattgagtcattccgtgtgagatatataagtcatcttgtttgggatatgcgagtcatcccatgatgtgtgagccatcccgtccgagataagagagttatcccgtccgagataagtaagtttgaactgaccgaggtaggccatatctcggaacgatcgtgcaagggcggccctgagttgaaatgggctataggcaaaaaaaaattatttaagtccttattataaagataaataatatttttaaaaattataaaaaaaatatatatatattttaaaagataattttttgatttgggcctctaaaatgagtgtgccctaggcgtgagcctagcccgcctatgactagggccgcccttgcgaccgtgataggtcatatctcagaccagtccgagataaaacatttttgaaactgattcatgataagaggagtccaagactgaactgagatagacaccttccgattcgagataatatgtttcttcagcacgatctgagatgggaattatgtaagatcgattcaacttagatattacttcgattcgtccaatggaattaaccctcttaagtacattctcgtatctcagatcctaat

SEQ ID NO: 249670 - DNA, 666 bp, Cannabis indica
  modified_base (639)..(639): a, c, t, g, unknown or other
agcatgatctctatctctagaaaatattgagaatcaactgtttctagggaccaaacaaaactttcaaagcggcaaaagagggacccaatgcccaagttgacacctgagactggaccctgcgcctaggttaacattttgtcaacttcggctgtttttcaatttagttcagcaaaatgtgctccaggaatcttcaccgtcatcataaataatgaagattcaagtaaacgttggggggggggggggggagaagccacaaactcgagttcctagagacagggcgtagtgctcaagttgacaattaacctgggacgctaccttcaattgctcaaatgccaaatttgatgtgcccattgaacccaacatagtcaaaaattgggggggcgaccccatcctcaagttcataagcattaacagtattaaaaatagaatcctaaaagctcggtttaaaggccccagggcccaagtcaacaaatggccatgttcgctaggttctacttattcaaatttgatgtcgttttgatcgtctatatagtttttcatgagtgcaatgatccatgaagttagatcattcaaattcacaacttcaattttgactcattcggaagcaagaagtttcgagtcttctatttctgcaaaacngcaacatctccgagaatgtgtgaccag

SEQ ID NO: 249671 - DNA, 677 bp, Cannabis indica
acttttaccttgacttttgactttaagcatatgaagtcctcttttagataaggtcttgaattcttgatctcttaatgaaacttttactcttatgaagtatgaagtagttgatgtagttgttgaatctacttctttaattttgtatgactttaccgagcaaatattgataatttgtgaatttgcttgcaaaatgatcaagaaaagattagtaaccaataataatcaaatatttatttatcattaaaataagtgagggattgacttttggtcaacatctttctcttagtcatgtgctcgtttgttcttgtaatgctacgaggtactcgattttctatagaattcatacattcataagtataagttgtaatttccactacataagaagataaagcccaaggaaagaggcgaaaccgaaaacctcctcaacaagtctcaatatgagcttcaagtatttctataattacgtaagaaaagaatttattattttaaattaatttaaaacataaaatataattatatgacattattgatatcgatagataatcaatattacaaaattaagatacgaggatattattaatagtagggctgaacatcgggcgggtttaccgggtttcgggttggcgggtttcgggttcaaaaaattgaaaccgaacccggacccgaatagggcacgg

SEQ ID NO: 249672 - DNA, 683 bp, Cannabis indica
tgaaagtgtttctcctgaaggttttttcgactcactcctgatgacaaatccttcatttctaattttcacttgtatcttgatagattgctgagaatattgctaggaaatatggtgtgagaaagggtgatttacttgacattgaagcaaatgatctccctgtacgtctcgcacttggagaaactcaagtgattaaagagacaaaaaaggctcttaaaattgctggagtaaatgtagaatctttagaggactttgctgctgggagaactgatggcatgaaaagaagcaaccatgtttttctagtgaagaatttgccatatggatcttctgatagtgagctggctacgatgtttggtaaatatgggagtttggacaaggtcattcttcctccaacgaagacgatagctttggtaagccatcatgtatcgtggagcaattattagttgtccaccatcagttcacttaggtattcacctgattttgtggggctaaaaaaatggaattaacatacccatgctgtttataataagggataagcacatatttcttcaaaaacataaaaagaacgaaaaataaaatagaatctatcttagcagacacaagctggttagctttgcatatactggttaacttagttgggtttgcttagcttgtacttaattctttgcttggtgttatttttttgg

SEQ ID NO: 249673 - DNA, 769 bp, Cannabis indica
agagaaggaaacacttcaaagatggttgatccattaatgagagttgggtcagcatctgatgtaatgagatgcattcatataggactattgtgtgtccaagaaaacatagcaaatcgaccaactatgaatgctattgtgctcatgctaaacagtaactccctttctcttccactgccctctgagccagcattcttcatgcatagcaacactggatcacatatgtcatttggatccgatttcaattcaagagagactactaaatcatcaaatcattcaaaaagtgaatctattaatgaggcttctattactgaacccattcctcgataatatttatgataatcttttactttcaaaatgggaatggctgtacctaacgtataaacaaaaatgtatttcttaagtagaattttttttaagaaaattgtttgcactcatggtaaataaagaaaccataatttattttttaatttattttattttctataagttaaattttacctcatttgtttatttattttatttttatatgtgtataggaggttgtttatttatttttctaagtagaaaagtttgcatattccagcagaagttgtaaacttaatgataacttcttagcagagaaggccgattagagcatttgattgatctcacatgcttggtcttcctatttgttatgtggagtgtaaatgtttagttttaatttttgttttttcaagcactcttccgtttataatgagcttgaatcatttttagatgatattaatagttt

SEQ ID NO: 249674 - DNA, 735 bp, Cannabis indica
cacaacgaatttatagtagttcaatccatgtatcgaacagtaatggagctatgtctacttcaagttttatttctcacgagatggattaacaaaaaaaaaaaaacaaatctaatttctagagagagaaactagagagagatgttttgaccttatggctatttgtttgaacttaaaaaaatgagcttgtggaactctccttttataggtgaataatgtctaattaaatagggataaaatattccaaaaaatttatataaaaaaaaaaaataaatttaggcttttttttttaccataaatgatgatctaacggtaaaaattgactttggagattgattgtcaatttttggagtttgagtcgcgctggcaggacccactcagggtaagttgcaacttaaatttgtaactcccttggggtgaaattttaagtcgataaattcagaattgttattgatgtgtgagacatgactttatagagcattaaaatagctttgaaatacaagttgaatcgggtcgatcaaatcaatattgagtgagttatgaccattttattgaaggttattctgggcctagtacccatgttgacatcctggtgcccaagttgacatctagcacccaggtttacatgtgatgttaacctagacattgggtgagtgggaaaacatgtctgctgtattttttgatacctaggtgacattgtgacatcacttagtcaatttctgtgttctaacgaagctg

SEQ ID NO: 249675 - DNA, 1712 bp, Cannabis indica
gattgatcaaattttgctgaaataaaactaaaagtatgcgaagctgttttaagtttatcaaaccaaacttttggtgcttgcttcaaaccataaataactttatttagtttgcatactaaatttggagagtcttgatcaatgaatctaagaggttgagtgatatgaacctctcatgttaactacccatttaaaaaagcattattgacaagagaatggcggaagggaaaaattgctcgtgataccatgttgagtaatgaataacaaagtatgaaagagaaagaaatgaattgtgtattgatctgaataagctaaagctctatatatacaagatacacagtatacaactactaatctatgacaacaattagttaagtacgacagcagtacacaacagaatcctaactaactacttgacaatatgacggccgaccaattgtgagaaactccattcaaagctcgtcgggcgcaactagccaagaactaggtgtcgacaccaaaatatatatataaatatatatatatatatatatattatatataaaaccctaaaaaatgaatggagatgaaacaaccatgtaagaaaattacaaaattaaatcttatattacctgtagatagatctcggtttctacttaaatgacatttgtgaccaattgcaacataattgcttactattaaaaatattatattgtaatgtcccacctgagagtggacagtggtgaccactctaagttttcaaaatttattagtgtgcagagccagacataaagtggtctctctaccaataattaaaatgcttaaaagctatgtttcagcatcttattaaaaataaaaccaagatacccaaatctatcaaaagcataatattatcttatacatatccaccatatacatggaaatgatttcaaactttcttttttttccttttctatacataatataatatacatctcgattctttcgctttgatctcattatctctggcacaagataataaaataaccaatttagttttgatgaggagtatcttactctcttctatcctatttctcatatgcccaaaaacaagtgtcataaaatactcaatcaacattacacaagtgacactaacctataaatggaggacatcattcttccatcaaatatttgagttttttttaaaataaaaaaataaaaagtgaaaaacattatcattaaactatgcattattttatttgaagtaccaacatactttgataaaagcatatattggaaatgccatttccccactaggggagtaggaagggtaacgactcatacggtcaaccaaaatgtacatattctactattctcaatctcaactaccttaaaaaaaaaaaataacaaaaccttacaatatcaaaatcatacataggctaaaattatgttctatatttttgtttgatacataaactatctattaagtaggataatcaaagggcacatcagaaagagaggaatcaagtaagtgagggtgcatgtaaccaaagctgcgaagcacttgattatcagcaaaattcaaagcctttcgcataccatcccaacatgattggccagagtacatttgattatggtttccactacaaggttgacagccagtaaaatgagtaataaaaggtcttctccagctgcctaacccgtaccctacctcacccaaatgctcctctctaaacgcaccgtattgctcgttaact

SEQ ID NO: 249676 - DNA, 706 bp, Cannabis indica
aaatgttatttttgccgtgtcccagtataattgtaaagttttggtccaaaaacagtatttttgtaaaattccctaaaataaatcataacattaaaaacaagtttcatattctaaccttaataatcatttcacttaattatatgtttaaatttatttttttataagattttattattaggtttagaattagaaacttgttttttttttaaaaaaaaaatattacagtaatattatattatatattattactagaaattattataatattatatatattatatatattttttaaagatataattaagtgcggattgaattggattggttactttttgaggtcaaacaacatccaatccgcacaaatacggatttcaaatatttcaatccaatccaatccgcacaagtgcggatatccgcattttgcggattggattggatcggatcaaatactttatgaacagccctaataaaccttaactaattattactgtcttcatcaaatatataatataaaatttttgaaccagtatttaagtctaatggggttgtttaagcattgtcccaagcttgcagtaatggcggtgaagggtaaaatggatgttgtgaaagtaataacttaacaaattgttgagtttgttattgttgcaggagaagcggagattgttgttgctaaaactgaccaagaaaaggttgttgattttgtgga

SEQ ID NO: 249677 - DNA, 1088 bp, Cannabis indica
acttagctcccttcatatagatgtctatttatctatttaacccaaagaatgtcatgcttatccatgatagcccaaataaattttccaagaatagatctactccaattaggaccacttttgaacccaaggcctccataagatttagagagacacaccttatcccatgaagtcaaatgaatcttgcttttttctcccttattcccccataagaaacccctacaaagccgctcaacttccttgattatactttgaggaagaaagccccaagagcacggagtggatgagttgaattcggctagcataagagagatgcctagtggcctaggtaaccgtcctcattttaattttcttaagaatagcatcacaatcttcttgtctccatttggttggccttaacgggaccccaaggtatctgagagggaaagacccctcaacaattgcatcatgtccaaaatttcagctttatcattagaggagacatctccaaaataaatcttggacttagacttgttaggaaataaatcagggacttagacttgttagtaaataaatttggcaactttaagatgatgaacaacagtaggagagcctttgctaaccaacttgagactcttgcacataggatgaaatctaaaatattttttagtggtctccaatatcagccttcttgtgagacattccattatgagcacaaaaaagagaggcgacatccccttgtcgaagcccctttgtccccttcaagctacctcgaagtattccattcatcatgatcgtatatgaagtgcccttcaagcacatcatgatccacttaacaaatttggagggaaagtttaatcctacaagtaagtcctcaacaaaaccccaatccacagtatgctttacttaagtctattttgaaagcacacctaggagagacaatcttcctaccataattcttaatcaaatcttaaaagattaagatattatgagcaatagatctattcttgataaactcccatgattttggtgaataattaaaaattttgaattttacactttttatatttgtgtatgaagaatgtttttttttcttgaataatggagaaata

SEQ ID NO: 249678 - DNA, 994 bp, Cannabis indica
ttcttcaaggccgaaatgtgccaactaagtagcccatttttcttcaaactatttcactgtgcagtagctgtatattaagtcaaagaagcctttcctgaaatttggaatcttaatattctttgtggcattgttccccagatgccatgcacaaagtcaatgggtagagtctcgtaacaaatgtctgattgcgaatcccatcctttcatcattatcagtgaggactacttttggttgtttgttgctcatgcaatcacggaacacccacaagaaccaaatataagcgtcttccgtctcattaagtaaaattgcgaaaccgaacacacaggtttcaaaatggtgattgacgccaacaactacagtcaatggcttattatacttatttgtaacatctcgaaaatttatatagtatttaattagacatattttattaaatatgtaattattttggtaatgaagtaagattatgatcttacttagggtaattagtgaggatttattaaatgattatataaagcgtaatttattaattacggaaattatattgagatatgtgggtatcgaggataccatatttgaaataaaaatattatttttgggctcggcaactgtggaaacttagcaatgtggttagaaatgtcacgacaataaaggatagattgttttggaaatattctgaactagtttagaattttaaaatgccggtttggtagattagttattaaattactaaaataccctaagagttatttttatgttaggatggaggaaaggggtagaatggtcaataagtaatattttgatttctttttcactacaagaaatataagttttagctactacaaagttggtagcaaataatctatatttggtagctaatactttttttgctaccaaattttttggagcaaattggtagttgtatctcggtcgctgaaagtattttgctaccaaatgtttggtagttgatactatttttttggcttctaattttttg

SEQ ID NO: 249679 - DNA, 1093 bp, Cannabis indica
aaaccagtcaaaaaaattggttgctgcaaactggcccacacttaacgctgatcggatccaacaagaatgagcaaaggagcattgaaccaacgcatgaaaaactgactctttcctatagtttcacaacacacaatgtaaatccacaagaatatgtttactatgaagttgatagtacatgtaggcaaacaacccgaaagagctttccaagcaaaatgtaaaaccttaggaggggctttaatcttccccaacatcttccaaacatcctcctccatggatgagttccaactaccattgatcgactgtaagtgagcataggcacttttgacagtgaaaaaaccagttggatccttattccaaaaccaactgtcactcacaagattaacactcaaaggaacctgctatttgatgagctcaacatcacgggaatcaaacaagtcctcaataagctccagatcccattggctactacctggctgcatgagttgagacactttacaattgaccaataccggatgattagataccaaacacgggttatcctcagacaaaagccaaggtgtgtttagcacctcagtagatgaaccaggtcctattctcctacgggcaccatccataaacagcgtttgtgactctaaaatactgtgccaaagaaagctcggattgccacctaactcagcctccaagaatgaacatttaggaaagtttcgagccttatatatctgacccacaagggaatcctggtacagaagtaaccgccaaccttgcttacccaacaaagaaagattttactcacgcaaacttcgaaaacccatcccaccagatttcttatttttacaaagtttcctccaactaaatcaactcacatctttcctactactcgaacgccaccaatacttagccataaggctttccaaatgtgaacaagttttcagtggcaataagaacacagacatagcaaaacttggcaacgcttgtgctatagtttttattagaatctcacgcccagcggtagacaagaaatgaccctcccagctttgaatgcgcttctgcattttgtctttcaaaaaccccaagatggcatccttatttcgtc

SEQ ID NO: 249680 - DNA, 560 bp, Cannabis indica
ttttctagagtaagagaaaagtgtagaaatgtgtagcacttttcatcaataagttagttttcttttctacaacaatgaagtgtatgtatatgtaatttctaattaggtgtatttattgcttggtttgttaaatgatacttcttcgataacaactcattgtaacaaatttatctttcacaacggaatttacaattatgttttccaaaagtgtgatgtgattatggaatatcccttgtattttaaagataagaacaatgctaagcaaaaagccaattgtttcttccctttggagaaaattaatgagcaaattaaactttgacacaacacaattaagaaactttttttttttacaaaaagcaattctatggtttaaaaaagtgaaaaataaacaattttttaaaatttttgcaaaagacaaactattctcgtcgaaacaactattcagacaggttttaaaaaataaaattacattattattaggtgaaatatattggtgccgtttggtaacacttttgttttttaattttttaatcacaaaatgaaagtaaaatttttgtttt

SEQ ID NO: 249681 - DNA, 620 bp, Cannabis indica
aggatactcgcacatacttcgatacatgcgagttactctcttttcccgcataatacgagttatagtcatgagatcaaactttggtcatgctcgctgtatctcgctgactctatcttgagcgaggtttaaaactttgaggagtctcttacagacgtcttagctttcattggaaaatctgagtacacgtgtcttttaaataagagtttggtctcgagtttctaggtgagagaaatctcactataacattttttacagtatgatgtgaaagaggagcagaggagggtaataacattagcatttctgatgactgtggcgggggcacaaatagcggattcatcataaaagctctctttttggcttgattatcgctaatatagaaatttccttacttaaattttgagaagttatacgtgttttttttttaatatatctatgtttatgttttcctttcaatacttatagcaaataattatagtaattaggttttatttctaataatatcaatttcttaccggtaaaatttttatgggctaattagaagattttaatgttaaattaatgagcattctattatcaataataataatcacaattaatactcataaacatccaagatcaat

SEQ ID NO: 249682 - DNA, 510 bp, Cannabis indica
ctccttatcattcatgaaagacaagaaaatttcatagccaccactgcacaactccaagaacaaaatcttaacacgctaaaaaatcctaaaattttgaaaaatgaaaaataaagcaatgtaccttaataaaattattagagattatatttataccttgatggacgttgagattcgatgatttctacaccgaaattgacgactagagctacaaccactacctctaaactcgatttacactaaaaaaaaagtacgatcaaatacccgaaatttgtttttaggtatgaaaaatgaaagattttaaaaagaaaataagtaaaaatggtgggaaaatgaggaaatgggattgttaaggtgttaaacagcaagcatttttgtggttttgctctttgtgatgaaaaaatgaggaagatgaaagtgctgatcgattgagggttcactactacaaatatcagaattcgcgacggtcttaaaaataatttttcgggaaccgtcgctaaaaaagttaagtaa

SEQ ID NO: 249683 - DNA, 692 bp, Cannabis indica
aatagtctcttgcattgcaacatataacttttcccaatttggtggtggtggagggttctcgccctcaccaggagccccgagcccagctagctcgcgggtacccctaccagtccgcctcgggtgcatatctatacacctgcggtcacattccaggtaataacaatactaataagtatttccatatattatagtcctgcccacaccattccgatatcaacacaattcagataatcaggcaatcagaaaattaacaaactatcttttaactaaaagcttactgaaccatgagtcgatcaagtccttgcagccaatgtacatgtcaagcagtcttcaggatctaaaaaccttggcgctctgataccatgttgtaacgccctgtccaacagggacgccacgtgtgtgcaatttaataaaattcttatatagatactatataattataccaaaagtgtggttaattaaattttgaaattaaaaatttgacatataaactatatgataaaagataagtggtattaaccatggggtccccctgttttcaaaatattcacaaactggtttaatagtgtttttacaacataaactttgtactcccaaaatactttcaaaatagagcatcctgattactgggccgatacactgcggctgatatgtacattgctgctacgacctcgaactcatggctgctcaac

SEQ ID NO: 249684 - DNA, 717 bp, Cannabis indica
ttgtttttttagatcactcgagacaagaggaatagcacttatactatcaacccgccaaattgagtaaagcttaaggaaattctcatatagctaaagcttatttatgaaacaaggtatatagctttttacaaattgagtaacataactttaagaaaattttaacaaaaaatgctcgatatcaatacataataataatcatgattacaatattttttttagtttaggttaataagttattatatatttctttcttttttgttttaagaaaaaatttctactgaatgtttgtttattaaaatattttatttattacattattttttgttattatattttttggaattcctaaggtgatggaaaaaaatatgactagctctaatgcttttgacagcatatcatgatctttcaaataaaatcatgtgcgaacctgaatttatttcttaatcttgcttcttttaatttttaaaattttgttattgatttttttattttattttttttttaattaaccttaagtttactaaaaatgaaaaataactaagtaaccaaccaataattatactaataaataataatacaactaatacaacttcttcatattcaaatttaatataatgattattttatgcctaattacttttataataatagtgacgataattattttgtggtttccacttctaataataggatagatttttattttttttatttgtt

SEQ ID NO: 249685 - DNA, 733 bp, Cannabis indica
caacaaggatttttacgtggttggaaagttaataaaccttagtccacgagtcaatattattaaccttaacaagctatgtagtattcttacataaaagtgtccttacatagtcttaaaaccctaatctttagcctttaacttgtgagatgaatttctaacctttaacatgaaaagatgatgttttatttataggctaaagtcagctttatgggtaaaccagaccgactagggttttcttgtgttaactaagcccactaattgggtaaaatacaatattatagtgactttgggctagttaagtgagacccagtttgtaagataacggttatccgtacggggggaccacttgacaatgacaagtggcatgcgtcgccacttgtgcacagtattcatcagtgaagaaggagttggacaaaatgcatgtcccttttggtgcggtacgcatttcccaggcgggacaaactcccaattttgtgggatctgatgttagaaaggtgccacgtaggatgatatctggatggctcttcaattgccctttccagattaccccaatatggtctgactttattatgtttataaattggacttgtgtttgaatccgaaactgtgacccaactctattgtgggctgacccactggcttgattgggcctgagaatgggtttgtcttggttaatattaagcctcaaaagtacccgtgtcacttatttggaaacatcgaaggataacaccaa

SEQ ID NO: 249686 - DNA, 857 bp, Cannabis indica
aaacaaaaaaaattaaattttgatgtgagaaaatcttataaaaatatgggtaagtaaaaaaaataaaaaacctttgttccaaaaagtctgtacctgccgtataaaaaaaacatacacggtaaaaaagataaaaatgccgtctgacagtataaatgtaataaattagaaaaagttagtaatgtatgtaaatttctcttaagatattgagtgagggcttttgtgaattgggctttaataaattgagtgaagtgaattaatatatgtatttatctatatgtgaaaaatttgatgtatatatttgagtgagggattaaacctatatataagctaaagtccctccgtgggcatagatcaaggctagttactcaggaaacacccttttaggttgcttcgtcataatttagtttaattaagaagtggggaagagttactaaaatactaattaatgtatgagtagttagtaaccaattttgtactcatagttgccaatgattttgaagagtgactgaaaatcagtttctaaagaatgattttgaagagcaaggtattatttttgtttaatttaatttaagataataatttattttaaagaaaaactatataaagttatacaatctacttttaaaaaaatcctttaatatttttttttttttttgataaaatcataccaacatagtatttatctaaataccaaaactttatcatgaagctaaccttttatattaattgtaagaatataaatgaccctaaatttaacaattaagttaataaatgtctatttttaaaaaaaattaataaaatgtccttttagttaaaaaattgatgataaaattacaattataaccttgaataattaa

SEQ ID NO: 249687 - DNA, 1825 bp, Cannabis indica
cgagttctggtacgagtctgggtttgggtccgtgtctgggtttgggtcttggtttgggtctgggtcttggtccgggtttttgtatgggtttgggttctagtataggtctcgggtcaccgatcctgagttaaaggttctaggtcgtaggtcctggcgcaagtccgggtctaggtacgggtctgggtcggggtatcgatcctgatctgggtctgggtctaggtccgtgttcggttcttcgtctagatctagttttgggtccaggtccaattcatgttccagggtcttgattccagttcttgtaccgattttgggtcgagggttcgagtctgggatggggtcctgatctggaaatcgttccaagttccggtcttggtacgattcaaagatctagagaccgactgcgggttatgtccaagcctcgggtcgtgggtccacaatcggatcccaatatttggtcccggtctcgttctgattcagatcctaggttccagtctgtatgcttgttcgggtttgggtttaggaccgagaccggggtcgtgtcttgggtcccagttccattcctggatcacaattctggttctaatttttaatttgggtcccaaatctaggtttgggtcctgggtccaggtctgagtctccaatcctggtcctagtcttgggtccgagtatgggtccatgtttgtgtttgggttcgatttcgtgtcctgagtcccaatccgagtattgattcgggttcgcgtcccagtcagggtctaggtctaggtcctagtcaaattccaattcccaaactctaacccatactcggactgagacccagatcttgggtacgggtctgagtccgagtccgggtctgggtttgtgtccgagtatgggtccaacatcaaaacactgactacaggacaggtccaagccacttgtcctgatttggatcacggtatcgagtcccagtctagttccgctttgggtccgaagccttgatcagggtcctaggtcaggctctcggtctgtggtcgggtcctgggtctcggtcctagttatgatgcccatgtctcgggtaaaggttccccatcctggtccgagtcctaggtcccagtccgagtctaggacctagtcggggttcaagtcctagttcgttctgaaatcatgttcttatctcggtctgggtccagatctaggttcgatagattcgaatcctaggtcccggtctaggtcgaagtttaggtttgggtttggatcccgagtttgggtccaagtctaggtctcaagactggttaatgtttgagtcttgctccaggtgccagtttgagtccaagtccccgttcgagtctaagttagggttccgatttgggtcccagtcaaggtctaggacccggaccagtttttggtttgggtttgggtccgggttcaggtcctaggtttgggtctacgttttggtctggatcagggtctgggtctaggtcttgggtttcgatctcggtatgggtatgggtctgtgctcgtgtccatgttagtgtttagggtttaagattttgggtttagtgtttacggattgagggtttagggtttagggcttagggtttaggggtacgtgtatagaacttacgatttagggttaatgtttagggtttagggtttaagggtccgcttcaagttctagtccaaatttttggtcacagggtacgatttaaggttcgggtgttggtctgcgttcgagtcctggtctggtacgggttcaggttcgggtacgggtccgggttctagtctgagtttgggaccgagaccggggtcgagtcttgggttctagtcccattcctggatcccaatt

SEQ ID NO: 249688 - DNA, 707 bp, Cannabis indica
aaaaaaaatatatatgtaatagtaaagtacttttaacctgaattttgatacctgggatcccgatctatatggttattaatatacaaattattaaaattaatttccggttttattattataaaatgcgggcgttacactaataatgtaatccaagtgttaacatgaaaacgtttcttgctgacttagacatcaatgtttgacatgtggcaagaaagatgacatcacaaaattgagtagactcgagtcatatcagttgacctcggaggggtcccagccctgcacccaggttgacttcgggaactccaggatgaaagtttgagcttcaataactcgtttccaaatcactatcttttaatattctagatcatgaagacatgaagcaaccaaatccaagccctgagagctaccctacaagtctacttggacacctaaagtttcactcaactcctagctgacatcctcaactagggtttctgtaacgtccccgcttcaaacctttattgggcccttacacccatagaatgaatgactcttatacacgagtacgtcgcttcatggaactatgactgaccctacagaccaacacgagtgtttccagcgtactttgtcctcactcgcacgcttcttgggaaaacttcccaggaggtcacccatcctgaaattaccccaagtcaagcactattaactgtggagttctttcgtgatgg

SEQ ID NO: 249689 - DNA, 679 bp, Cannabis indica
taaatgtaatgtttgaaaaaaagttaatatttggtgtaaatttcccaaatagaaagaaaccttaaaatgtaaatgtaaaataaactaaaaaaaaataaaactaatcaagctataaacaaaaacatgaaatatgagtttagataataggtttacaaaaatatgacatatcaaataccataaaaaatcttaaatgtcaaaaaaatgtcataaaagagtggcaaacctataagtattatatttttataatttttttttataaaattccatatttcatgtcattttcacataaaagaaacacacatgtaatagattatttgaaatttattttattttcagcaccatattattttaaatttgcaaagagagtgcattggtacactctaaagatgcatcataaatttttttgtgaaattgttgactgtgaagtgattttgaagaagctggtagctttatatataggctattagacattatatttttgttaccacggaaagtttctaagaaaattgattgaatatgtagaaattttttattgggtgagaaaggaaacttgagtaagatgcacttagagcatctccaaggagacacaaaatttagtgttacactatcactaaatttggtgtcaaaaattatttctactccaaccacaacaccaaaaattacactaaaaaaatattcc

SEQ ID NO: 249690 - DNA, 1554 bp, Cannabis indica
ttgaataaaatagattacattgaaatagagttttatttagggcataaaacccaacagaaacttccgagcagaaatataattggcaggtcccacatagggttgaactccatgaggtgctaattgccttccaaaaaggatctggccacaccatcattacgccggccagagaaggaagtttgactcaccttgtaagaatgctccacgggtaatctcacaagaaagaaaagccttgaggaagacgcggccgagtgaccaacatgccagccagaaggaacgatgctaagagtgtcgagccagtctatcaaagaatataggagcttcaattgatccttactgcactctagaatatatggatatttactctttgatcactccttttacggagcctatcattacaacatcccatataaatagtgaatgcatacgcaaaggaagggacttgaaaatatactcatgcatctaagagcactttgctaaaagatattctctgtaaacacttcgagagtcgtagctagaatttactttgtcttccttagtgatatgcacgatattatctaacaatcaacaggggagtaggtcattacccacatataagggggtcgaacctctataattctatgtgttcttatttattattcttaactccttattggtgattaatcaacgtctatttgactccgagtcagccggctatttttccaatcaacatctttggtgctttcattgagagctttaaaattattacgaagatctcatctcttttaacctagtaatcaccatggtcctcacaaggaaaagcgtgtccacagaaccccgagatctaatggatgtggatcctaatgtccaagttccatcaattggtgacaacccgatcaaccctgccctaccacctcgggcaaatccatctgcagggtttagactcaaagacccagtcaatgccaggaaagatccaacaattaccgggcaagtcctagtcaatgctagacaacctacccaaagttctcttctacttttatacttagaattttgaattctactattcaagagggaatgagaatttgaaatcctactccaagtaggaattctcggagaacataaacaattttccaagattgccaaaattgatgcccacttggtagtttcgagagaaatgggcttagttcaagtcattaagtcaacctcacacaagtgtaaagttgacgtaaggggcaaatgtttacactaaaactatccatgatgatgtgcacatcaatgtttgacacatggcaataaaaaatatcccagagttgagtagttctgaatcatagcaagtcgacctgggaggggtccctagccctgtgcccgggttgactttggaaactccaaaataggtgtttggatcctaccaagttgtttccaactcactatctttcagtattatgtaccatgaagacatgaagcatccaagtccaggcctcgggagctgaaatacatgaatcagcacctcagatttcaactcggtgcctagggtttcacctagcacccaagttgacaacctaactagggtttcagttt

SEQ ID NO: 249691 - DNA, 730 bp, Cannabis indica
ttattatattagttttttaaaaaataattaatttaagatagatgtttttaataaaaaatttattaaaataattgtaaaatattttgtaaatttatgctctaataaaatattaaaaaattgaacagaattaaggagaaaaaagaaaatagttttagagaaattttagagcgccacatcaccgcctcatacttctcctttatatagataaatagatagattatatttatatatttttacaatacatttataattttatgtattgatatattttatttaaaaatatacattaattgatttaatatatatttaaaatatttatacttatctccttaaacattaataaaattgtcgatgcttattgaataaattttattttttggcaattttattatgggatcatgagaattaggttagactaaactaataattattatgtatgttggattattaagttttaaattatgtttttatatatttttctttttcatgaaatcaacttaaatggtaaaataaattggatggattcaatccaattcaatagaaaatcaactaatacatctaatggttaaaatcgatctaatctaatacatctattggatcgaatcaaatgactcaattcgattgtattagatcaaatttgatcagttgagtccaaatccatttagatgtgatccaataaacacccatacaatccatatttttcgataggttgtttcatacgggaccataa

SEQ ID NO: 249692 - DNA, 839 bp, Cannabis indica
tacaaaaaatagctatagtgataactttttagtcacataattttttgtaagtagatgtcacgttttgtcataatattagatacaagttgttactagtttagttttagtcacaacaagtattgtgactaaaaatatatttagtcacaacaaattgtaatttttatgtctaatacatttaaccatggacttcggtagaattaggactagttactacttagtaatttagttctagttagtaattcagagtaagattagttagtagttagcaacagtgtacagtaattagtattttaatagttaggattaatattatattgttatattgttgagtgataacgatatatattattgagtgctaaggatagatatagtaggctaaaaataatacaaaaaattgtctattgagatctgaacctgtgactaaaaagatatattgataagtccttaccactataccaaaagactacctatttataagaattaaaggaaattaactagtattggacattttattgtagtagaattaacaaatacatgataaacattgattctaatatttaacataagaatcctattagtttattttaagtaaaacagcaaaataaaatacaaataattggtaaaagtggtgcattacataaatttagtatccaaaatatttttttaagagaaaataattggttgtttgggatgtgcagaacaggaaaaatatccaagttaaaaaaaatcacctcaaacgaacaacccgcggaccaaaaattattaatgttcaaaatttttaaaaaatttctatgcaaagtttagtcttttctttgcaaagggaagctaaagggtgtgaa

SEQ ID NO: 249693 - DNA, 553 bp, Cannabis indica
tcgtttctgtttttacgtttccagttttttcaatttctgttttcgcttttccattctctgttacttggtttcctatttcttcttttccaagtttttcatttttaaaatcttctactgcaattgccactttttctttacccaagccaactgcaggagcattcaagataatcattctcaatacaaaaaggactaataacattaatcacacacctctacgaaagcagagcactgctagtctgctattattgaatatacacttcttgcaccatttctaaatttacttaaaacagactttaactatagcatcatcaatcctaactatagcatacattaagcaataacttgtttgtgaacaaaaagaacttaccaaaatttcaaaaaaaaattaatacaatacatacttctatgtaagctaacctggagtcaattgcaatccaccttggggtggaaaaggggtaagaagcggggttctcttccatgtcagcacaaaaacagtcgtgcacataagtaaaatggtaaccagagacagctctttagcccttagtccataaaa

SEQ ID NO: 249694 - DNA, 1353 bp, Cannabis indica
gagctctgccacggccacggccgcgaccacgaggattctggggattttcctgactgcctccggtctcaaccatattaccctgacttcctgtatttcgcagggcatccattttataggacttagcctgggaacccataagccaggcaggttagacagcaataaaagcttaataccgctcttaaggacttaaaggcaacacacttaacataaataattataatctagtatgcttcctaacatgctttaataatcacttaaaatatgaatcaagtacaggcttactgaactgtaaaacgagctttctctaatgaagattgtacatgtcttggtaagcttcagtagacaaacctggcggctctgatccaaaaattgtaacgccctattgctaaggcacgctacagtgttttttcaattacagtgcaatctttgctaattaaagaattttcttgaaaaacgtgtcaaattaaatttttataataaatattaaactttatattagaacaaaatatttactagtgctgggatcccgttttcaaacttttaaatttattattccaaaatacatataaaccaggtcgcacagcgactacaaaatatataaccctggatgtcccgagacccaacactcaggtcgcgccgatatgacatgtacaacttcatctgaggtcaggttcactcctgttcagctttcagctttcctttacctacacatgaaagtagagctatgagtcgacagactcagtaagaaaagcatataacatatcatataatttttgacttgtatttaggcgcccatacacctatttacaaggtttaacagatgagtacgaacgttccatactagggatagccactataccacatacactacgtacctcgatatacgagtgttggtagggtttgcttcataccctgagtaccactgagtgatataccacgcactcccagtacctctccgtacttatgctggtatcacggtactctcagataacattcactatacaaatgcattgtataccataactgtataagtgttggtagtataactaacattttaagcatgcatatacacataacatatacatacactcagatatctatatcacacattatatacagttctcaccttctttccgaattcaagtgtgctggccgacctaaaaatagggttccaaaaactgccccaacagacagaccagttcccaactaaaagtccggttccaggacaccaaccggtcaaccggttgctacaggtcccccagaaccggaattccagttttgtgctgggaaaccaaaaaatgctcccatgacctcaaaattaagccaaactttccaaaactctccagtatacct

SEQ ID NO: 249695 - DNA, 555 bp, Cannabis indica
attaaaaattaaaaaattaaaatcaaaataaaataataaatatttaatattcatattttaattaaattaaaataaaacaaatcattaattaaaacctaaaaattaaaactaacaaataaacccaaaacaaattggagtcgctctctctcctcctctttctttctctgcctctcttcctctactcaagcttcaacaatggtttttgtgaaagcacaaaaattgaaggtctacttcaagatgttttaggttaagttcaagagaaggagagagggaaagactgattaccatgctaggattagattgattaatcaggaacacaaaagaaattgaaatcctcttcttcttctcgcccttcttcttcttcagtcctcaccaatggctgttgttgcttcatcatcagccttccctcgggctccgacttcggcacagaaatcccacctgaaataaacagatctgcttcactttgcttgatgccagacgaagcaactcgacggagatctcggagaggcttcgatgccagacggagatctgtattttttttctgggttcgagtat

SEQ ID NO: 249696 - DNA, 629 bp, Cannabis indica
aagaaagaacaaatatgatccaccaattttctttgaatacaagaagtctagacacatgataatggattatccaaataaaaagaagaacaaatacaaaggaagggaggaggttggtgaattggctcaatagtgatagtgatgaggagaacttcaaaaataaggagaagaatgaagtagcaaatatgtgcatgatagcacttgatgatggggtaagcatttctagccaaaatgattgtgatagtgaaaatgatgatgataacttagatatgtcatatgataagttgtctaattcatttaaggaattatttgataaatttggtaaattgcttgccaaaaactaaactcttaaaaagaagaccaatatgctactaaaagaaattgagattttaaaattaaatataaaaaaaaaacttttaagctaattttcaatgtgcttcatgctcctcatataagaaagaaaatattgatttaaatgcacatgtgaaagcctaaaaaatgacatatatacttttactagaggtaaaaaaggctatgatctcatgctaggaagttaatcgtgtggttttgcaaaaagtgacagaattagttctattttaatttatgactggtttcagttattttgtattatt

SEQ ID NO: 249697 - DNA, 2206 bp, Cannabis indica
acaatggatgattagaccacattctacacgaaatggtttttttccccgtaaaatggcctcctgtactgtgactacagcaggagagtgatcaaagatgccctcagattggaagcagacttctgcagcagtaaatgcaaccaaccattcagggttagcaagcaccctatcaatcttagaatagatcctatctgctaaggcctacatatttcacatcttcaagtttgcattcctcaacacactctcgaaatgctagaaacttttaaactgtaccctgctgccaactctttcctctttttctaatatgtcattgaaatctccaaggaccattcatgcttcatcaccattaacctctttaagatccctccatagctccttccttccatcctcatcattaaaaccatagacaaaagtcacaaaaaacttggttcttttatctaaagtttcaactaaaagatgaatcatttgactagtacactttagtatagtgacaatgaatgaattaagattccaacaaacaataatccttccccctttgtgccaagcaatattagtattaaaacaccaaccattaaacattctcaagtacaaggctacaagattccgagccttaactcttgtctcgaggagaccaacacgcccaactttttgattactaatcaattgcttgactaggttttatttttgttgggagttaattcctcggatattccaactcatcattctatccatgagttagagagggatctcccccctctcctgtatcatcaatcttaacttgtttccccttctcctcaatcaacttcttcctagtttcatcttccagaccgccctctttttcttcgaaaagttggaaagaattgcttgtagtttctgccctacttgtattctcagctctcactttgtaacctttagtgacttgcttaaagccatccgcatctacaacttctttttgcttcccctcttttacagtattcttgaccatccattgttgtttctgccgagggtccttcttcctagaagcatctgtaacacgtcccattccatggcaattagcacaaataatcggtttccattcataagaaatggacactattgtggtacatccattctcatcctcaaattcaatgagttcgagtagctcttgttcaatggcaacttctatgaggacccttgcaaagcataacttttctctatttttagtggcatcgtctaccatcaccggcttgccaacctgctcgatgatcttgaaaagagatctttccccccaatatttcaaatgtaaatcatcgagatgaacccaaattggaaccatcctaatgtcctcttttttaacattgattgagggttcccaagccttcatcacaactggcctgcaattaaagaaaatgtaacccccttacaacactaggtctcaatccatttcagagtgaaatatgattatatagacccgatatgatagcagcccaactctttctatcttttcagcccacattctcctcacaaaacactcaagaacagctaagggtgggtttgcaccaagcacatagcatacaattgagggtttccaaaattgaacctcatcatgaatatcatcactagtgatcttaaccgtgtttttcacatctttagtaaagagactacgcaaaactgatccagatctcagaacaaggggattcgaactcataccttgagaaatcttggtcgaacattgctcgttagctgccaagaaatacccaaaatcctttatgataccctcctattgcagaatcgccttgagagacgatttttgtgatagaggctctggttctagcagttttggattcacttcatcgtccaccagctcctcctcttcagcttccgaaaagtccatgggagcaactccaagaatcgcgtctatagatttttttttctgcacatccgactccgagttcggccccttccttttcacagtttgagttgatacaaccttctctcaccctcgtccccttgatttttccatggctccagctctatcactgcaagagtcgagagagagaaaagtctaattggttccttacttacttctaccttcgtaggagaataagccaatgcaattgtattagagccatatccctaccgatcttttaatctacatctatcaagattttaaagccaatcacacaagatccagatggcacaaagaaacttgagattcaaaaaaaaaaaa

SEQ ID NO: 249698 - DNA, 538 bp, Cannabis indica
ataaataaaaaataaatatttataatatattatttactaaaattatttaaaaataaaataaaaataatttatttcatttattttatcaaaaaatataatcaaaatacttaaattaataaaattttcttttataattaaactataatatacaataattattttataaaataaatatatcattctatatttaatattaaaaataaaataaaaattattaccttaacaaaatagcaagataagtattttttgagctcatatttatttaaaaacattattatttattaatatgctataaaaatattaaatttttttgaatttcaattttatcgttttaaataactaactatatttttatggaaatagataaaatggatggatacacaattttatttagtatataaatataaataataaaataaatatattatatattattcattcacctcactctaactcactccctcttatcttcttctccaatcaaaaaagaagcaatgatcctacgtggcacaatctcagcccttcattcctcctccgc

SEQ ID NO: 249699 - DNA, 754 bp, Cannabis indica
aaagcgggaaattgaattcttgatcataaaaaaatatcctgcacttgcaaaaaatgcgtgaaggccgatcagaatcagtgggccacctacgcagacaataataaagatctacaaatgcctccataagttgagggacattcgcaagtaattattgggggcccacacctaactagagactcgagcaaagcttgggagaggtatgcccaaaccatataccatgagcaaaaagaagtagtcttggtcgtagaggagagaaagccaaaaataccacgggtaggggaacccactataaccttcactgaagaagatgttgtccacattttcttccagcataacaatcccttggtcgtggaagtccagatagcaaataaaacagtgacccagaccatgatagacaatggagcctcttcaattatcctattcaagacaccatatgagaggatgggactccaactcaaacatttgaccccctgtacccaacaagtctatggtttctctggccaaagtgttgcacctttggggaaaatttttctacctctcactgttggacaagctttgaggagcgtaatagtgatggcacaatttgtgataattgatgttccattagcgtttaacgtcatgttgtgccgaccagccctatatgacctaaaagctgtcacatcaactttccattcgtgcgtcaagttcccaacaaagaatggggtagggtgccttaaagggaattaacaaattgcacgagaatgctataatcttg

SEQ ID NO: 249700 - DNA, 674 bp, Cannabis indica
tgacgtactcgtgtataagagccattattccgtgggtgtaaggacccaatggaagcttgaagcggggacgttacacaaaaagtattattataaagtatccaataatactttcagtataagagaaaaaataaattatcaaaattataaaagataatgttgattcaaacatattatagtattaagattatactaaaaaaataatttttaataatactttagtataattcatagtatgtattatgaaaaaagacaggatttttattaacacagtttttttttaatgttttaaaaatagttcaggttttcttaaatttcttttacaacttcttctcttttgttctacgcaaaataagagcaattcaaaacaaaattttcttgctcttattttcttctaaccggaataataagcccagaaaaaaatatcaagttctaaaaccttagaaccgaacccagaaaactctccctaactcaagtttcatgatttaacacttatatattggtgtaatgacatttattaaacatgagtttactggatatgttttgtatttgactttttggatattttgttattttagataatttgaatttcgaaacaagttttatgaaataaaatttaactagtcattctaatcaattgtgttatgaagaaaaaaaaaggtattatagaaattaat

SEQ ID NO: 249701 - DNA, 680 bp, Cannabis indica
caccatcgccacccacatgaagatataggatacaaaaatactactcccaatcggatcaacaggtttgtctttgtaaacatgatttaaaatattgaaataaaaagctttaaggttaacgaattccaatcaattttaatcttaaatgaaattaaaacacttaccccttccgatttcgcaactgttgtcgaatctttcactcttcgtcccaaatataccatttagttgagggattttcttcattttataacttttgtttgtttttttctttaattgctttcttcatttccagatggattgcaggccgagttcatggagagcgccatggctgggtccacttcgttttccactcccgaaggagaggtcaacagccttatgcaacaggtagctgatgattacagcctcgaggtctcggtgggtcagccgcagccaggggcacacgctgtgcctaccaaggagactgagaaggtccacgaagacaatctctccaggcgccttgcagagctcaaggctaaaggttaagacttaaagaatccatcccatataaagaggacacaggatttcatatgccatctcattacatatatatacgactatttctcatttatctttttcttaacaatggtatcaattttcttccatattggcctaacatgttccatgacttttatggtctttgtgaa

SEQ ID NO: 249702 - DNA, 936 bp, Cannabis indica
aaagtcataaaaggtcactagaatttgggaattctaaaatctcaactattcttgacattcccaatgtctaaatatattgtcccgctatactaaaaatactaagatgtgattctaatagccatacaccgcgttccaatgttgccgggcacaaaatatgcaaaattatgaaatttctatatgtgacataaaaatacattctgaattcaaataaatcatcataaatatttaattcaatattaataaataattttcataataaagccctaattatctgctaatttccaaattaaagctaagcggtctttagagaacctctataaaatcctgtgtttattaactttattattcttattatgtaacatgtggaaagcatcatcatgaaatacgattctactttcggtttgccaaatctgagatgaacaagtattataaaattataaggtttttaacatgtcatagtttcaggctagagcatttgtgcttacgtgacatgcctcgtgtagtgcttaagctagactatttgtgcttacatgcatgccttttggacttgtcgtgtcgtgtaatgccaatttataatatcgtgtcttatcatacccaaacttatttttttcatgtctggtcatatttgtacggatttcatgtcgtgtcaaaaagctccccttgtatttataatactacatactttcatcttctcccttggtgaaaatatttatcaagttttaattttttttcctttctttttttaagaaaaaaaaataattaaatcaagtgagagattaagagacaaagtaaagggaaatttggtttagcatgcttaaatgtaaagcgtggtcttttaatataccacccaactagaaataggatacatatacttttagtattttttcctcccaaaaatacccttacatttcaaaaagcctctctctctaactctct

SEQ ID NO: 249703 - DNA, 801 bp, Cannabis indica
tggtaagccagtaaactccctcggtggaaaaaatcccaagagtaagggtagccccttacgatagtatgagcctcccttcaccaccaactccatcctcttggccccaagagaggagatctatatgtctacacagtcaacagtgtcctatcacaaacctcttacctttaaagagttagggaagagggacatgaacaaattctgtcgttaccataagaattatagttgtaacgccctaatctacagggacgccacgtgtgtaattttataaactagtttaatactaatagattaattaattattaaaaattgtgataatattgaaagggaaatttgattttttatgcttacattaccttaaaaaaaatttccttaacttatacttaccaatatttttaatatatgacaactttatgttttccccaaaacacccttccccaattacatcaactcatctatttccatcatcttccccgtaaacgtacatcgaacccatcgggcccaaggcatcgggcccaagcacaagccaaagggtgcattggaccttgaaatcggaccctatatcgggccatcgggcccatcgggcaatcgtctttaacctctagccaagcccccatcggacgggcatcgggccctatcgggcccgatttgaaaaatttcactttcgacagatctcttcctaatcttcctaaatctaaccctaactgacaaatttcacacaaaattgtaatatattattctatttcatggatttaagcaccaaaaattaaaacaaaaaaattgaaaaaaaaaaattaccttaga

SEQ ID NO: 249704 - DNA, 542 bp, Cannabis indica
caacagagatggattctcgaattcgcaaggggctgttcatgtggctaagattaggctggatgagattcaaactaagatgcaaagctgcccgtttaatgaagatgtacagcagcaggaaaaggaggctcgggagacatatgttaaggtacaaaaagactacaattcttttctgcaacaaaaggcaaagttggcttggatccaaaatggtgatagcaatacatcactatttcatgcaagtataaggcaaagactaagacagaatagaatcctatctattgaacatcatgatgggaagagaatccatgatcccaagctggtgcaatgtgcttttattgcctactacaaacagcttcttggtactaaaatggagaatagaagaggtgtgattccagggatattgaggagaggcccatggtaaccaaattgcaatctgagatgctggagaagaagtttagccatgaagaggtgaagaaggctgtatttaccatttctggttcgaaagctccgggtcctgatggctattccagttatttttaccaaga

SEQ ID NO: 249705 - DNA, 1006 bp, Cannabis indica
acactaagtacagttgaccgatggtcatagagattgagattcggggcagtacagtccaacacatgctaagaggataaagttaaatctgtaaaaacctctttaaaacaaatacatgtccataaaatttccatcactaaagccttcatgaagggaaacaaagagaaaaggtgcttaattcacaaaactaaacaatagtcagtgcttgtgaacttaaagtaattcatcaattttacttgtgttttggtaagacacagaaattatgcatttggctcttaaacgatactgacagtcagatcgtccaagtttcacttataaggtttctactcttatacatatttcacatttgaaattgggtgaccataccacaagcatatcagcttccaccacttcttccaaagttgcatgaaacatttcaactaactgaagaaatagattgcattttcattagtgacaaagaaaataatcatggagatagtgaaactgtgaatggatataatcattgaacttgtttttcaatcctactgtatcacttacaagcaccttcttttaggaattatattaacatggcaaaatcaataaacgtacactacagacgagcttcaattttttattgaaaatttaaaacgcaattacaaaagtaattctcaaacatattacccagatggaagaacaacacttcttaatcaggatcaattgttgcaacgagtctacagtatacacaaagtaaccattaattataatattaaaaatagtaaaagaattagaacctaaaatattaaggctttatgaaaattgcttatatgtacacatcagaagatacatattatataagtggaattacttaccgccaatcactataaagatcactgtttgagagtgcaccaactagtgtagatttcccctgttaaaaggaaaaaagggaacaatagcaattacaagggaaacaagaaacagaaaagcgatatccaatagtcaagatgacctacaagatcgtaatataatttac

SEQ ID NO: 249706 - DNA, 2347 bp, Cannabis indica
ttctttgggcaaaccttaaggtttatttgataagatttctttgaagaagaatacaagaaccaagaggaaagaacttgagactgaagctccctttgataacctttctgagaagaaaaaagaaaccaagagggagagaattgctaggaagagggtttagcggggagagtctttgagtgaggcccttgttgtcattaggccttagggatcagagtctaccacaactttctgcgtagtaattgttgagggcaagggtaagggtattgcgagtgtggagagtgaagagtccaattcaaatgacaagagttccatatatcccaccctgggatgacgcttctgggcaggccaagggtaaaacttctttactttacactcaacttatgtcttttaaagttaatttctgaccaacattttgagtctttgtatgtatggcttctaaattggaataatttgtcaagaggaaatccgtgggcacaaggtttcaaaaggaggggtcaagctccatccaatcaggactttctccacctcttcattatgctccttcagccaaccagcccatggtgggtaactattaagaacgtcctcctcctactaggaggtcaagtaaggagtgccaaagatccaactagggatctactccagactgggaagaaaaagtaaaagagattatccataactatctggacaggtgcttggttcaggtagatgagcagctgcaagacatatatagtaagtctggtaagaccctgatctctggccttttcaaggaccatgcttcagtaaattatcttccctcttttgaagtttttttttttaatgtgcaacttttattctaacttgcaatcttttattctcagatgtccctaaagtttgggcacgcctatgccccaacgatttaaagcagttatcttgtcttaccaaaatactataatcttttcttttggagttgtaatctttaatttttttttcttttttatcggggagacactcttatttacctttccccaaggctcttttaattccttatctgacatttgattttgagagtaatatttcaatgcatttaattataattatgcacttccctaagtgactaaaacaattcaatcctttttgaatcactttgtagaacttgttcttataatttaaaaatgatcatatattacataaatttcttaattcacaaaaggttttttaatcaaaaaatgtaatcatgattattgataatactttcagagattatcggcattccatgctctcagaatcacagacccaatactcctactctgggatcttgtgagtcaagaaagattctttttagaaccaagtctcatgttgagaactttttgtttctaacttttgaattaaagtatttttccactttcctttggtatgcagccagatgtatttatgactcctcatagagttattctatgagatccaatgattcttgtagcaatgatggattggtggttggatcgtaggtagtcctttaggtaatggtgctttccactaccattgcttcacatctatataccattaaaaatgaagaatgcacagtggtggtccgggcagtggttctagatgcccagagtacctgtagcaattcttcaggataattttttttacaggctagaagtttattcttgtgtgcgacctttaatatcttattcacaacttatgcttgaccatttgcttgtgctcaattttgtaattcttgagtgcctggagaaattccttgcagtcgagacataagaggccatcttctctctgtgggtctaatattctcctagtacttgcttaacaaccaactaggagtcactaaaaatttatatctagttggctcccataactttagacaatctcaatcctgctagcaaggcctcatacttggactcattattggaggctaggaatttaaattgtagggtagtctgaagtcgtaaccctttgggagatatcatcactactcctgctctcgatccacttttgttcgaggccccatctacatacactttccaagtgggtgcaattacttctagtgtattggcagttgcctcagttttgttgcactccataatgaagtttgctaggccctccccttaatcgagatgcatgggatgtactgaatgtcaaattaattgagctccatggcccatttaagcaatcttcctaaagcttctggcttctgccaaacttttcaaagtaaattattagtaaagactttgattgaatgtgcttggaagtagggtcgcagctttcgggatgctattagtagatagtaggttgatttctctatcaaagggtaccatattcatcaaaccgtctaaaaaatgcagtttgaaatctt

SEQ ID NO: 249707 - DNA, 1390 bp, Cannabis indica
cataaataatgctaagaagtatatcaatacaagacaagtgttcacagctttttagatgatcaatacttatagtatgtcataaaaaggtgtgttgtcatttcactagctttactcacttagaaagtaagttgtgtctaatcaggttggtcgatgtggttgcttatagttgtgcttgtttaggatgcagatgaaatttaagagaagagattatgagtgaggagctatataaatttgaatatcttttaacagatgatccaatatgttcatatcttttttacaacatagttcaaaacttctaagcaatttgagtaagagaaaaaatgatatcgatggcacaaaacctttgactacaaatgaaatgaataaatttcttaagctttttcaggaatgaactagccttagactaattgactgaagaaaaaaagaaaacccctcattcctctattttacaagggtgaaatcattgtgatttcaataagcatcgttattgacaaatgatctaaaccattgcaatattgtaaatttaggagtaaaagaagaatatttttttgaaaatgcccaactcaaaagttattgcctgacaaacatgacaatccacacaattttagaatattaatacagataaaaatcatagaaatataaatgggttcttccattggtgcttcaatgatgtatcaatggtgatgggtgattaagaaaagaatgtatgaatacgggggcacctttattaagtacaccacaagatgcatctctcatctcatgaagacccctgccctgacatgtaacattttacactataatactaacttactcccctttccctaataacccccacaatatctgacaagtaaagaaaatcaatacataacagctagacctgtagatgcactttatatgaaaaaacctattgagatcgtgggtaagaatgttttgtgagattaaacccattttagagattaaacccaaaatcaagtaatagaaattaataatacatttttcagagaactttagaaaggaaacccaaagctctaactggtgagatttataggagatgatactgtagataagaaaataaactccatttcagagattaaaccgaaaatctaatatcagagattaaactcaaaacccatttcaaagattatatgtgaaaactaaacagaaatttcctcaaactttgcaaacctaaaataaaaagaaaatacaagagaatcatacctgtaacaacaaaaattcttcctcaagctactctcatcatgatagtctccttttacatttcaaatctggcaataatgaaataaaagagaaaaaaaaaaaaatctaagagagagggagagagagagaaagatatatagaaagggagagaaggagatattacatgtggagtagc

SEQ ID NO: 249708 - DNA, 393 bp, Cannabis indica
ccatgctgtttgacgtggcttatctgcagtaacgtccactccacttacaagttatttctaaagtttacaaaccatttgaaacaaataggttccagatagaaagaagctatctcacacatcttggttaaaaagattttatcatgtaaagattttgtaagtcttcccttcttgaactgtttttaactttatcttctgctgccttggcagattttcagagccatgtacttttcttttcaactttttattgtgtgtgaattccattaaaaaaattatctaatcttaataacattatcatgaataaatggattagttgccaaaacaagtttcgtttattattttttatgttattttagtagtttttttttttttctctttctgaaattacctcttgga

SEQ ID NO: 249709 - DNA, 3082 bp, Cannabis indica
tagtttctttaaaatacattaccagaatctttacttttttttgttttttttttcaaattttaatgtattttattaattttaaatatataaatgatgtatacaaacattcccatataaagaaattaaaaaatattatatatatttataacaatgaatattttataaatgtagagtatacataataaattttaaaataaaagtttagaacacttaatatagtatattttaattagtttaatcatttaaatattttaattatttttaattttaaagcatgtaatgcgagtgttcattgccaaaggctaacccacaaatcaaaaaaggaaaaaaaggaaagcatgcgataaaaagagcattgctattgagcactagtggtgctcaacactttctataggtggcgccctatgattggccttggttgtaacttatcctgtctgatatgcacgtagggtgtgcaaccaaaaactctcaaatgctcaaacttgggtggcttccctatccacatctctagaggtattttaaagttgttagccactaaagaacacctatctattagataacatgttgttatgggagcctctccccaaaatggcctctccaagcttgctcctagcagcaagcatctaactctttccatgattgttctattcattctctcaacaactccattttgttgagggttcttcaccatagttctatgtctcatgattccttctcttgcacaaaaagctttgaactcattggaacaatactcaagtccattatcagttctgaggactttgaacttgttgcatgtttggttttccaagagttttctccaattgatgaaagtcagaaggggatggtctttgcttttcaaaagggccacccacacttttttgttatagtcatctattatgttcataaagtagtatgcacctcccatagttggtattttggagggtccccataggtcataatgtacataggataacatttcaatagtagtattctcacctttactaaattttattttgcatgctttcccaatcacacactcatcacaaaactcaatcttatctttccatttttccttgaagtcctctctggctgacttggccaagtctgagatgctagagcctaattgaacttttgcttgagttgttgattgctggtgcaacacttcctgctactgatttcccatccaagatgtaaaggccattgtgaagatggcctttaataaattcttgtgatccctgacttaccctcataatatcatcttcactcttaatagagtatccaaccttatcaaacataccaatagacaataaatttctcttaagatctggtacatacctaacctgttgtagtgatttcagacagttggcatggttcttgatcataacagtgcctattctttttatgtcacatgatttattgttgcccagtagtactgtgtcgttgtttccttctgagaatgagttgaacaaatccttgttaggggtcatgtggaatgagaatcctaagtctagtacccattcttcacctgagtcaagactggatgccacaaggacattaacatactcatgtccatctacaatgtctgcttctccattgttcttgtgtcatgtttgttggccatctcttttcagttttacctttagaactaggcattaatctctgaaatgacattttttgcaatagtagcactgttttccagttgttacctcttggatttgatccatttggctggcctcttggatttgtcttggattgattttccttgtaaccagttgagtgattctagtttctctagtaatatttcttggaaattttcccttgacaatcagtagaccttcaccattgatctcacctctgtcatctccctatttttgaatctccttggagttgagagcaaccttaacttctgtcatggtaagtatttccttttcataaaaaattgtgtccacgaagtactcatacatcttaggcaaataactgagtagtatgattgcttgatcttcattctcagtcttcacagcaagattgttgagatcaaggatgattatgttaaaatcatctaggtgtttcctattagttctatagtttcatccatccaaagtgtatggagtcttttcttaaggtacaacttgtttgttagagatttcttcatgtagattgatgacaacttgttctagagaccaagtgccttttcctcactagatacttctctcaacacttcattaccaaggctcaaaaggatggcactgtgtgcctttacctcaatcttagtcttcttctttctttcttctatgagattcatagcttcatcatataatgcatttgagatacctttgtgaactagaaaacctttcatcttaatcctccactagctaaaatcattagagccatttaatttgtccacctcaaatttggtggtagccattacaaacttggttcttgaaggtttgagtctgaatcttgaaatttcgaattagaatcttggaagcttgaatgtgattcttgaagactttgaatgtagatcttgaaaccttccactagaacccgtgctttggtaccatttgttgtggattaaattcacaataatgttgttgttatgattaataacaactcataagaatcaaatattcaaacattcaatactgaattaaagtcaaaccaaattataatacaagaacagagaggaagcttagcttgaaattagtagaagaaaaataatggattctttattagtaattagcacataatagcaagagtttccaaaatcaagtacactcatcaatggtgtacaacaccaattacaaaagactcacattaaggagtggatcaaatacaccagtgtgacaattagtagtcccgtgatctgtaaggggaaatactgggtaagctgtgtaatctcacactgcctgggaaaggtcaagtgtgatgattctaagactgtgtaggtatgggactacacagtcgaagagagcttaaatggagtgattggtactacctatatcaataaggtacatcatctttttttctggtagcccatcatgaaagaattctacagttaagcgttgataactctaagatttag

SEQ ID NO: 249710 - DNA, 767 bp, Cannabis indica
ttttaaaaaaaaaacaatgatttaaaatgttatgacaaaaagctgtgttatccaattaattaattaatcttagacaaacagtgaacaacgttgctttgactaattatggctaaagaaaataggctttataaaagacagagcagttaagtacgattagattgtcaaatgagaaatactaatggtaccaatggtagtttaacaactttctatgtgtcaatatcgatattggtccaactaagtatcgggtcccatataatttaatataatagcttttaaggagtatcgctagccaatcgcaacgcgacatatcgaaaatgtactaggcaccactagtaccttatagcaatgctcttgtcaaattgccaggtactaattactgattagtcactcttctctctgactggtcaaagttacaaactatctttttttacgaagcaaaggttactagttacaacattaattatataacaaataacacataaattaacatgttgatgttttgttactccattttggaaaattgtatttttgttctctctttttccatttgttttttcataaatgatggaatgtttcactttttataatggaaaattgttttatgtattgttattgggtattagtaatgtctaatactttttagaggtagagctctaaattgattagcgatattctctaaaatttattatattatattaaatgagatctcatatttaattacattaataagagagtgttaggtattattagtgtcttttagtatttct

SEQ ID NO: 249711 - DNA, 982 bp, Cannabis indica
tccccaaaaaaagcgtttttgggaccgtcgcgaatttggccttttgtagtagtgtctatccctgtagatgaggcatatggtgagtaacatcctgtacctccccgtggagaagaggaacataattaggttggcctgtgtagcgaacttttagaagtatggcatgtatcctcctacttctagagttgtgggggccgagggtccatcagttggtgtggatggagccccaactgttgaggaggaatttccttgtggtggacatgttcgagacatggatgatgatgtgcctctatcttggatagcctgggctctagagaagagagagagggccttccgctagcgcttggcttgcaggggcccagttggagatgctactcttcagattaggcctaaaggctacagctctacagggcctactcccccttgcctacatcgagaggtaagggcaaggcagccattgaggattcaaatgattccacttctgaggatgatggtatttgatagttgattgcaccatctcttatattcttgtcttgcaatgaatatttgtaacttgtattttgactttcttactttctcctggcagatttgtcttctagtttaagaggtctagctagtggaccttcaaaggagtcttcaagtaatccattggccaaagtggttgggaccacccatgctggagatgtcatgggttcatctcttcctcctccttcatctcttcctcctcctcctcctcctccatggtttgctcaagctaggcagcccataatggatgaccctctagtgaggagggatcagctttcgagcaagggtgccctgaggcctagtcgaggagcaggctcaatcgtaggttagagagccttggaggcagctcgtatgtgtatggatagggcttatcctactgtggatagcaagctataagagcttggtgacagtgagccagagaggctctcttctgtcaatcttcaagagttggccttggtaa

SEQ ID NO: 249712 - DNA, 551 bp, Cannabis indica
tacaaaaacaaaaataaaaatataaatttgggcactcgagcccagatttctattcgaaataccaaatacgaattaaagtacataaactataaaattgaataaaaattagatctgcaaactaatatatatccattaacacaaaaatgagatatgtgaaaccaatatatatacacaaaattttaattacataaaccaatatacatatacacaaaaatcagatttgccaacaattaaaataaaagtaaaaaaatttatgaatctctgaaactccatagccactaagagcgtgcaacaaaactcataaccatggtgcatctgaaaaaaaaaaatcagagagaagaagagagagatcgatggagggaggagatgcttactcatcctttgtcgttggagaagaacgcaacaattgtggctcggtctgtgttggacggtttaggatgtcatggtcatgcgccatcgtgttgctcctgcactaatgtgtacagctccatgtgagaggagagagcttgtagtgagagatacagagagcttgtagtgagagagagagagag

SEQ ID NO: 249713 - DNA, 4233 bp, Cannabis indica
aaaaataaaaattactaacaccacatttgatagcaaagcgtcgtcactacgctaccttttcgaacaataacaatgtcacaagaaaaactaagacgaacccaacaaatcatataaagaagttgagcaaaaacaccagctcaagagaagctttctttcgaacccatttgtgaaaagggaataaagagcaaaacccacatctcagaactcagtttgtgaagattaaaaactaaaaaagtgaaactttaatagagggtgtgctgtgctgtgaatgaatgagataaatattatcagaaagcgcgtacctttttccttttaacgaagtcttgtatgataagcgtggttaacccgaaagcgaagataaaggaaagaaaagaaagaagaggtaatatgaatgagagacgttcgaggagaggagatgagatggagaagaagacggtggagagagttgagtaagagggccacacctactttttcttttctacatattattttgtttttgttgaaaaatattgagtttcagagagagaaagagagagatcgtgcaagcaagcattaacagttttggaggtttttctggtccgaagggcttttcctttgctctctcttctagagtttggttttttgtttgttacaataagaatcctttatattattataaaacaaaacaaatatcattttcaacacgtgtgggcccctcattcgtatccaatttttatttttattttttttgaactaattatattttctttttattgtgagtaagtacagatttgtaagctaaaatggtataatcatgtataatatcttcttttcttttggttttttgttttgtaaaagataaagattacattttttgaaattttgatatgtgataaagattacatatttgaaaaagaatgtgtaatttttcgggaatgtcctttttttatttatttattattattttgaggttaaatattgaaattccaatattggaatatttgagtaaatgtgacatccaaggaaaatgtcaattttttgaaaatataaacatactctaaattttaaaaatttgtgtatccttccttcatagaataatcaagattctttctttcaaaaaattccattctttgaacaaggaaaacattgaccatatgcattccactaaccatttcttgtcttaataagggaaataaggaatcatctttatttatgttaatcattattttaattttgttttatataaaaaaacttaatattattttttgaaaatgaaaatcttgtgttatactattactatacagtcaatccttccttctatagtcacattttaaacatgtgaaatagaaaagtttggtaaataatttggggtacatttattgttattatacatagttttgaatctgaatggttagggggtttattgaaaaagatgtttcacgccatattaaaaggtcaactaaaattttcctttttttttgttgaacaatttcaaatgattgccttatctctaaatactaaaatgtggaatttcttaccaattttaaataataatgaaaaattattggcgaaaaaaaacttaaacgagattggttggttcaactaaaacaatttatttttcttaaataacaaatctttgatccccattatttttaatatattataaatgtaaaatatttttaacaccaaaattgacttgatatacatgtggtatgattttttttttttttaaatgaaaaaatgtacaatagtgaaaatgcatgagtacccaaatatatatactgcttacaaattttaatatataattagtagactggtcagccatttcttttaaaaattaggccatgtatttttgtatttgaaaaaaaaaagtaggtgatatatggtcctcatattattctctttcatgaatgactttattaaaaaaaacagagagaagatgaaagttgaagaagaaaatacgtctaataataacaacaatattaataaatgatgaaaatatgcattacaaaaatgcatttggctgagtagttttgaagttatcttttaaattttattttttctaaataaaaaaagggttttatttgtatagaaaacttgccattatgaacaaccatgaatatatttaaaagcatgggccattttctaataataagttacaactaatctagacatttttgttctttcggcttggcaatcgacctaggatttgaatttcaaaagttaaatattttcttttaagaaaaatagttaattcatttcattgagattttttttcccctttccatcattattacatacatgtagaaagaaaccaaattgttttaaaaatttattataaaaaataattatatgaaatagaaatactttggttgagataaacattagcaattgtatttggattttttttatcagggaatcactgttttttataatttaggttgcgatttaagttgcggaattaaattaatttgtgtttcgtgcatttttgtataaatgtaaaaaaaaattacttttataacttagttatttaagatcatttaaataactaataacctattctaaattgatattttttttaaccaattagttgttttaaatttttttaatcaatgtttataatacattttttgtgtcggctatagttattgctgttgactttataataagcctatttcattggagcattacagaaacttaaaatatttccttttcaataaaaaaaaaaagcacaaacttgatatatataccaccaagaacatttaaatatattaatagacaaattccatttcacaagtcttctttaaaacaaaccacttgaggctagctcaagtggccataggtgagtgtgtgagtgttggaggtcctcgaattccaagtaaaacatgttgtaatatataaacgcttaaaaaaaaaaaaaaaaaaacttctttaaaaacaaaaggaatggaatactttttattgttaaatatatataggtttaattttgtacttaagatacaaaaacatttataattggtaatcaaagtaggatgattaagcttaagcctattaaataaaaatatttatgttattgttttgggacttcaaaaaacacattttcattccatataataaatatatattaaataaatatataatttggctatttgtgacctacaaaggaaaaagatgtcatgacataattagaagacatgatatgaaaatcacactacaaaaagtctttaagagaagagagaggtcttttttggggttccttcgtgggggaaaagtgttaagagataacgtctctttaattatacaccaatccatcatgacatgagatgagatgacccataattcagcaacaaaaaagttggtgcctgcctttaattggtttgcaattgcattccttatatatatatatatattagattttagaccatcaagcattcatttctttattaataaaaaaaaaagaagataaatatgaagatagactacgtgaacgcatgctctacatctatttatccataaccataatataatatcatatatatagcttatagacatatatattttttcttgaagtggggaattttttttttttgacaaaagtggggaatttactttagtcctagtttttatttgtgtatttactaattgttttaactttttttttttcacgtgggaaaaagtgaacaagttttgccctatttttcattgctcaatctagataacagtaatataataagagaaatttacatagtatattaatttttaccattttttttataaaagctggcagtattttttacttttttactgtatttttttataagtttcatactgcagtatattgtgttaagattttactagtgttttactggtgtttttagttgttctactgttgttttgagttgttctgttttgtgttttactagagttttataaaaacacagtatttttgaaaactttttcgtgtgacagtatttttgtaaaaattaacccaaatttcagtatttttgtaagtttacctacaataatcttttggaaaccttttataaagataagaccaaaataaaagtcaaatgaatactgaagtgataaaccaataataataactcaaaattattgtaacaagtagttatttataaagagtacctaaatttttttaaaaatttaaaataatttatggtatcaaaaataaaattaaataatttcttgcatataaaaaaagactgtcacatgtataattaaatatttaaatattat

SEQ ID NO: 249714 - DNA, 991 bp, Cannabis indica
attctctttacatttgaagccacttactaaaccctctcacacacactctctctctctctctcattcactctttcattctttcttgctttctttctctgttgttgcaatggatttaggagtagcatggaaccatgtctcatcaaacatttacaacaaattattggataactcagcagaaattgaaaccgtacccgatttagaacaagaattctgctctctccttgaggctgcaccaacactttttcagagtaaacatcttaatgcatttgagaaacaatcgaaattcgtagaattgatcaaacaagctctgtctcttaagaagcgtgtggacgagttcggtgacaaatgcttaacctacaaccttccattatttcttggtgatggtgagtatgaagatgatcaatctttcaagaattacttgagatatttacaagagtttatgaagcattggaagacagaaaccgaaaagaaaagagagaatggaggaaaaagcttgattgagtggcttaaagaggttgatcaatctcaaagaaaaattgcatttgagaacatcaagatgcggttaatttatgctggtaaatatttatctcaactcatgagtgattttattttgatgattgtgtttttgggagataggaaagaaataataaagaatcttgaagatttcaagactatggtaaaactactaagtttggataactcaaattcgattgtgatcaagaatttggtatcttcaatccaattgataaaaacaatagcgaaaaagattaagcgtttgtgtttgccaaaaccggggaagttattaagtgatgatggggacatagaattcgagctgcttcgaatgatactcaaagaagttttgtgtattgaagttgttttttgtcttcctaggatgattgaggatttgacagatgatcaattctcatcatttggatttgatcttcataattaccttgggaacagattcatggctttggatttgaagattact

SEQ ID NO: 249715 - DNA, 612 bp, Cannabis indica
gagtcaataatatgtgtttgtagacacacatgaataagtcaatccctttgttcattcatactattatcagagaaagaataaataactcattcaacatatattatattttttcataagtaaagatgcaaaaattcaagtcaaatggacctctatttctccaaccggtaacaatggcagattgtcgatggaggccctagctctctttttgtttctctctcagagctttacggtctaccctcgtcgctctctgccgtgagctcaagcgaaccccatctccgaaatatccaacctctgaaaatcctagccacgttctcctccaaccccctctctctctcttattttttcccttctccttcttcttcctttactaaaaacattacagtataaatagaaaaatacaaagcataaactgtataaaagtttaaatatatgtctaatcgtatttttgtaaataaaatatataatttagtataatcttgtaaaaattccctagaaaaacgggttttggtgacacacattgagtaactctaaaactgtttagtgacacttcaacgcgcatcactaatgagggtgactggaaagacaatttttagtgacacttcacacgtgtca

SEQ ID NO: 249716 - DNA, 2389 bp, Cannabis indica
actcaagtcaatcttgtcaggtatcttctttctccattcacaatacttttcttgtatatttatacacctaccatacttgtgaacacaactctggtttataataactctcgttaaaggcttattagtctttggcctcccattaatcttatccattcgtatgccctcctttttatttttttatcgcgtgactaggcatgtgtctaaggagaccaccttgtgattgagttatagctggtattgtgtcactgcactcagtcagtgggagttggtgcccacattcacttttctcaaacaatatttctaccttgtcctctttctccgtctctttttttatagaaaaccatagacatccttcgttccagagggggtttcccccattaagctctcatctgattcggatggggacattgtcgacccttgggcatggtatcaccaactaatgtatgagcatttgaaatgtttagaagaaatttatgtgtttcaagagtggctatttaggctaaaggaggagattgagttcttggagggtcgagggagtgctaatacggaagcccgccattccctcttcagacagttatatggtgacatagcagagaaacttgctcacttggagcacatttttctgcttgagttgtctcccccttgcttagctcccatgcctttggctatgaagccagctgtctgccagtcaggcgaaggtggttgttcctcctactatcgctctccatctatcgttgcctagggtcatctaagtgatgatgccttggttgggcttagattgggtcgcaaggctccagctcgtcgaatgaagaacatgaagtgtctcacttcttgttctaactctttttatgattttgtagatagggataaaccacgtcgcttaactaagcccaatgcgccacttccaacccatgactggtcgatttccttcaggatggttgacgtggtgagtattgtgactcgatttaaagtcaagaggatggtacactagtatgcggtaatgcagggttttgaacctttgtctggtgattgcgctcatttaccacctcaaggcatggtggcctttagcaaatacattctcaaggtaggtgttgcttggacacttcaccctttttacttggaggttttgaattacttcggcatagctcccatgtagctcatgtcaaacggctggaatattctgacttgcttcttcatcgccttcaagaaagtaactggtaaggctcctactactaaggaggtacactatgtgtatagcttttttcacaatcccgcgttttggggtttctattacctacacaagaaagttttgactgacctaacggtcgtcgatttaatttctaacatgggaaaatcttggaagcaagacttcttccttgtgcccagtcaagcgggcgtgactgaagtcttctaaatgcttggtaagtgacttcttacctctacttacgtaattaattaataaggaaatccttcattatgaccattttttctctccctgtttgcagaggcggcaaccatccttccctcacacaagaagagtatacttccgatatactaaagctattcaaagccgactatgaaagcaagctctgccactatcttctaacttttcccaacttggttaaatgcgggttggtctcagagaatgttgggttaaagcctaagaagttgtacgccataccgcttcctttagcgaaaatagaggcagctctagagggtgaggtagaagttgatggtgataatgggcttaactaggctcttccagaagaacttggtgatgatgccatggcagaagaagatcaaactgtcaatgtcgggggtgatgtttttactggccctaggatggcccgctcttcaagtgggtcatcaggaggttgccccacggatgagaggcaagtcgcttccgcagatcccctagggaagcttctcacccaaagtcttcgtctagaggctttctagctaaaacttccagttttttgaagaagaacatcaagggcgatctttagctggcccttctctaaagagcctttctcaaggaaaaacaatgctagctttggtccttggagcaccatgccctttggtgctcctcctcccttatagaaactgggtgcctcaactggttgtggagttgcatctatcacaattaccccagctccgtccttcacccctactaggcaatctgtgcgcctagcctagtcaagggcattggcggcctctcttgcgccttcccatcatgctcaagctacaagtgttgacggctgggttctagctacggtgtttgaggaagtaagtcaggaccgccctaggcgatcgagacgcttgattttctctgcctaagctcccaaagtcgactccaatcgtccagagcagctcaaagatcccacacctt

SEQ ID NO: 249717 - DNA, 669 bp, Cannabis indica
agatgaagtcacttggatcaagtctttacttcataaacttcatctcaaactgccaagcattcttgttatctggtgtcataaccaaagcaccatcatgcttgttggtaatccaattctacatgctcaaaccaagcacattgagttagacttttactttgttcgagagaagatccttgccaaagatttggaagtcatgcatgttcctaccaatgacaacttgttgattgtttaacaaaggtcatttctagctctagattccctattctcagacaaatttagaattgaaagttcttcaaatttgagtttgagtttgagtttgtaattgtgtataacagaaagagttcaattcttaattcatagtggaggaatatcaaaattaataaattgactaatataattaaagagtttaattatttagttttgatttattgaagcttaatgttataggtccatagtccccgaaatagctcaatcaaaaaattgacaaaagtaaatacaaacaatgggcaaatgataagtaaaatattttactttgcgataaacataattattggataattatgaatatttaattaattcataattaattgaaatacataaatataacaagttatgaattaatttattttaggatattaagtattttattaattaggaaactaggcaatc

SEQ ID NO: 249718 - DNA, 2520 bp, Cannabis indica
tttggttccattcacatataattcggataactcatttatgagtttcttgcaagcagaatgagtttgcattagtcttttacaatgatggttggaaccagattcactaacaccatgtcctgtgccatatgccactggacctgtttacagaatcagggctaccggtgacacgatgaggagaaccccaacttgtttcccgctccgaatatacatttgggaaatgaggtaaatgttcccttccccacccaggaacatggcttgccaaagaatgttcttcacgagcattcctgtcagatgagctttgaggaggaaagatgaaaaaaccagcactatgatcgtgaggtagagctgttggcaccatagctggcaagctaccaccgtgaccatcgaatcttcggaaactaggagtcacgggtgatggcatggtgagcgaaacgctgtggtgtaaatgatggtggaaggcctgaactctctcatgaggttgagcagcggtgtctgttgaatgaggtacaaatgagctttccactctaggatcagacctgaaaagagcaatgtgcataaaaaattaatattcagtcgctggatcggccatctagccttattttgatgacaaaaaaagccttatcttcctatatctagagagtttttttacagatttaatcacactaaacataatatttacccaattaccaaaactccgagtcttatttttgtcattttgtttattttattaacagatcacaagaccattatttcaaaacaaaagagaccataaggagagttacaatggtttctccacagtagtttttaaagatatttatatcacaacgcatctgcccagagatgaaatgatatacctcctcaccaatcagttcttcaagcatagtatgaagaacaaaaggaatttacttgcttaggtaaataaataaaacaatgatgtagacttttaactttctcaaagttagactactcacccttgaactagccgaaacaggcgtgctctagatctcactgtagaatttgattcaatgttagtagacctaattgtagcagatggatttgaagctggattgttgacatggctgctggatggggagaaaggagaggaatgacgaccccagctttgatattggatactaagggccggaaagatatggggatttaatatctcattctgtcctcttacgacattccatgggttatttaagttaggatcatcaatgccattcatcgatctggatgatgcaggcggaactggtctgaagtacgcaaagtaagaatgaggcagggatgacggagcaatctgttctgcaaacatcgcatggtgctcacgagggtcgtgatctgcattaatgaataacattctcaagtccaaaatattttgcaaggatagctaagaaaactttgctaaggaactagataaatgacttacaagcagttggtggagattccacttccctgaaatacataaagcacatgtaacagccaatgagtacatatataatgattatgcgaacgaaaaggaagaaaagaactgccatacaagaaactctatacatcatctcaataggaaaaattgaagaagaaaatcatcattatactaaatatcgcattggacaagcatctgaacagaagctgcacgttcctaagaacaatctattatgccatcatcaaggaattgattacattcatatctccttaaagaaaggaacgaattggacgcatataatgcaacagaaagctaggttcagggagtttaatgtttcaattagtttgtgtcaggggtgttaagcaagcaaacatttattcgagacttaacatgaaaaacagtagaaaatgatcaatcaattaaaggtaaaagaaattttgcttactcaaaagatgaatgtatttgtgctgcttcaccgaatggacaccagtgaagtctaaatggctgcaaagtacaattaaaaaccataaagcagcatcataaatgtggtaaaacaatgccaatcataagtatcataagcgctctaatgcaggcgtgttgtggccctgaaaggccttaatggctaatgaaagaaaattgaatttgtaaacacaaatgcagcgaacccattgtctaattttctgccagctcaaaatatctttctgatttttgtgtttccttagggatgaaaaagcaatgtcaatccgaaatcattttatgggagagctgtgccatgggaaagatttttgccgaacataatgaataaataccaaactagagagtcaactagtttcagtaccatatcagcatagcccatatcataggcatcctcatcaggtatccagtcatctatgctaatctcagggaatgagcgagtagatccatttgcatacaaccattgaccattctcaactttacggcaatttggacattgcatcgcccctttcatattaaaagccgaaccaatgcaatctgcagaaaattcaaattgacatccatatatcagagattcaaaaatgttgttaaagtactttaaatgtatagacaaacaaaac

SEQ ID NO: 249719 - DNA, 1117 bp, Cannabis indica
gtgtccaataccttttataggtgtcacttaacaattggttagtgatattctttaaaagttatttttttgagttatataggaattgatatttaattatctcaatgactatataatattgaagagggtgctagacactaatagtactttttaataattctcattgtttatgagcatttctattaggcactattagtgtctagcactttctcgatatgtcgcgttgcgattggctagcgatactctctaaaagctattatattaaattatatgggactcgatacttaattggactaatagcaatattaacacgtaggagggtgctagatactactggtgtccgttagcatttctcttagtttgtgtagcaaaattccgaattcccatcaaattcagcaataatcagaatgaacctcttatatttctcagctctcaaggtctaaataaaggccccccatatattaaattttatattttaaaggatttatttaataaataaataaataatgttcaagagttccaacttccaacccctcaacttttagagattctaatcttcagaagcagggttcccactaagaaatttattaataattttaaggctaactttgtctttggaaagatcaaattaaaattaattttatataaattatatacgtgacacaaagctctcaaatcaaaaccactttattttattaatagtcactttttctcttctttttaacacaaatgattttacagagttacaaaaagacaaaggaattttttacttttttactttttactttttactttgaacaactgcaaagtggaagtgttgcaataaagtacaatcataagtgtttttggtttgtttgtttatagatttagattgttgttagatattagtattgcctaatactattaagatgtgttactttttgattagctagtgatattttctaaaggttattccattaaattatatgagtttcgatacttagttggaccaatagtgatattaacatgtaagagagtaagcaccactagtatcttttatcatttctcttacatgagtattgttattagatatcagtggtgctcatggtattgcctgacaattagttagcgatgttcttta

SEQ ID NO: 249720 - DNA, 801 bp, Cannabis indica
taaagttcatgggcatgatttagtacatgtcgaaattcagagtcaaaaatcttaattaccctaaatgtaattatatatgtacaattagttaaaaaaaaaaagttacattttggcatgtaatgtttgaaagcatctttcatatgtgcacatatcatttctctaattgaaaagaaggtaaagaaaaagtcatgtcctttttacctcttttaaataatacgtaattccaacacaagcgtcctttaaacaattctttacaaggcaagagaacattattaaaaatatatatctccttattattattattttttttttcttttgctgcaaatattacttttaatttgttggatcactacacaaatccccaactattgctgtctacataatgtgagatagtgttaagagtgttgggcttgaatagtagttttcttttgcaacgagtcaaaatgttaataatgggaaaaaggaacaggaagggccccttgtccttttggttttgggaccccattgatgtgggtagattagaagaagataaatgtttgggcttttccctttcagtgtgtgctaaggctgagtaggcagattttggggttccaccattagatttgtattcctcttaagcaaatggtagggttacttaccccatccaattagttgttgccacgtttaccttattctccttgtgtcatcacatcaccatctatgcaatttgcataagttttcctctagattttttatttcgtttggtggtgatttacccctactccaatttcttttcattattgtactcaaaaaaaaaaaaaa

SEQ ID NO: 249721 - DNA, 926 bp, Cannabis indica
ttgccacgtcatttatttgcacaatgacactttggtcgtcgaagtacaaaatgcaaatataatggtggctcagacaatggtcgataatggagcttcctcaaatatgttgttcaaaacaatatatgaaaaattggtgctttaacttaaagattttgttccttgcactcagctagtgtacagattcttagtgatcaacattctttcaacttttaatgtcatgttgggccgaccaaccttatatgacttaagagccatcacattagtctttcacctctgtgttaaatttcaaacaaagagtggagtgggttatttaaatggaaatcagagaactgcacaagaatgctacaacctttctctatttaaggccaagaaagaagatagttcttgccatagttcaaaaaatggaaaagcatcgcctaataggaatttttccaaggcggggttgaagatatggatccccgagttggggaaacaaacacaaatgttgggccagtggaagaactagaagaggtggagattgatccaatcatgtcgaccaggaagctcaaaatttgcaaaggtttgttatttaaaataaaattagctttaataatatttccaagagcaaacctcgacatttttgcctggtcacatgaggatatggtcgggattggtcaaactatcatgtctcatgctctaaacattgatccagactttcatcccgtctagtagaaaaggatattgctaggaaagaacgtgcacaagcactgaaagaagaggtagaaagtctctgcataaagaagttcattattgaagctttctacccaacttgggtggctaatcttttactagtgcccaagctaaacaacaaatgacgagtatgtattgacttcaccgacctcaataaggcatgtccaaaagctactttccacttccaagaatcgatc

SEQ ID NO: 249722 - DNA, 579 bp, Cannabis indica
tacagttttataaacattgggtagttatgccacgaaaaaaaatcattaagtttatgccgcttacaaatctaaaactttgggtacttatgtcattatttaccattctattaaatcacaattaccaagaaattagtattaaaataaacataatccgaagaaaatgacactaaatatacttttagtaaagaaaaaacttatttgagaaattatatgcacttcctttgagtggaaagccaacgattttatctttaagtggacttcttacaatttaatctctagaaatcgtagcctcaaagaaggaaatgtataatattaatacaaaaccatttgaaatatggtacaataactttaattggctccaaaaaccacccaagatggcacaaaacctctaaggaggcacaacaagctttaaaaataaaagcaaggagaaattctataatcaaatcacatacttatgtgtcatttgataacacttttgtttttaattttttaatcacaaaataaaagtaaaatttttgtttttgaaaaacaaaaatgtgtttggtaactatttttgtttttcaattttgaaaacaaaaa

SEQ ID NO: 249723 - DNA, 567 bp, Cannabis indica
caggatctagatttattaacaagcatgtttattaacatcctaaatatgaatttataaaataatagaatttaaacacatataaagtttgagtaaccttacattgattgcagcggtatataatgactcctcccactcgaatctctaacccttattcctctctgtcccagagtattatcaagatttgagcccgattctccttcaggtgtttggattctttatagtcttacacactatgattgatactagacttgctatgggtggacatacactcactcactaatagctcgaaaattttatgaagaacactaaagagatttcgaaatagaagaagaaggaagaaggaaggaggaggtgtcaaaattctagttggttgacagaatgtaaactaggttataataggttattggataatgaaaccatcctattctttttatactatttcacttagatttaagattgaattatacgaaataaaaaataataaaataataacaaaaataaggacttagttatatgggtcccattaattatatttttgtcatttttacccatttatctattatttca

SEQ ID NO: 249724 - DNA, 1513 bp, Cannabis indica
aattacatcaatactatagtaaaatgtttatctaggtgtatttttgttgttttccaaatttctaatggtgaatttattcatattaaatcattaagagacatgtagatagagttacgtacgtggaaacactgttttgatttttaatgtttcacaacagttgcattacagttgcctaaacattttgctaacaattatttcgtctgattgaaaccttcgtctgatgcaaccttcagccaagcacccagcaattacccagaaactttcgtctgattgaaaccttcgtctgatgcaatcttcggccaaccacctagcaaccaccctgcaaccatcgtctgattcgtctgatgcaaccaccgtgcaaccacgcagcaaccaccctgcaaccatcgtctgattgtgtaagtgatgatagtgtaagtggtattttagtaattaaaattacataaaatgtataaatgttgtcttatggaggtatttttgtaaataaaatgtcaatttatattttctatttaataattccttaaatattatattagaatagggggtagagctttttttttttggaaataaatatatattttcttaaaaaataaattaaaataggaataaagtcataagctaataaaaagtgaaaaatcttttgttaatgaagaatgaatgatgtgttgttcttttcataagactttttataatgcaatgtaaaatgtgagaagaataattcttagaatagaatcatagtgctctattttcggctatgtcttccatttacattaatatatattctttttacatatactttattttattttataaattacaattaattttaaccgtaaaaaatgaaccacctattttcatttctttttttttttttttaataaaacttatcttttttcttttttactttcttactttttttttcatgaaaacaccttgatgtggactcaatattttcaatttttaaaaaggaaaataaatgatttttttatgtaagtgacaattagttatttttataatttagcacaaaatactatatacatctaagaataattataaatatatatgagtgacaattacttttctttttttttttatgatttactataataggttaccaatgagtaaaaattttatttttagacttaaattaattatatatttaaaataaattaattttaattaaaatatttaaataaaccttttcaggaattaatatttataatttttaattttgaaaaaataaataaaatcaagttaatattacatcttaagtaatttatttattaatcacaatcgtctaataatgatttaacagctaaaaataaatataaccaccatacaaatatatttaatataattattgaaaattttatattatttaatagtttgaaataaggggtagtattgcattttcaggttcctttgtttgtacataattttgtatgtgagattttgagtttttgtcactattctaacttgctattgaaaaaatgacaaatagattcaattattg

SEQ ID NO: 249725 - DNA, 734 bp, Cannabis indica
aaaaatattaaagttttttatttattaatttttttaacttattacttttatatttggaaaattaaaaggaaaaaggggattaaatctggtgcgtccacgtgtcacgttagtcatactaacagactgagtatgaacggacaaacaactttgtccaccttgagtattttcaccgccaatttttgaggttgaggactaatcggcatcaacctcaagtttttggggacttttgccgcaattaccctatataatataatcagctagctacaaaatattttgagctcagtttttataattctctctctatctctctgctaccttttctttgttgtctttttcttgttttcaaactaaaacgacatcattaatggttatgtacagttttaatgggtgcatttgttatgtagtgagtgagccaaccataaccaaactaaacccaaatcagatctgagtgtattgaagttggagatgtaaagttttcatcattattaattatttctttaccaagcatagaaattgacgcacttaactcaccaaccacatgaatatcaactacatgaatatcatattattatataagaatctcatcactgttaacactataattaagattaattacatattattatgtaaataatttgtactcaaatgtgtcacaaaatctttttcaaaataataatagtgtgtcacaataacatttatttcccttgcctatattgcaacttgatttaggaaca

SEQ ID NO: 249726 - DNA, 1242 bp, Cannabis indica
cctatgatagtcgcaaccactgggtttaaaaactcaggaaacccacttttcagcttcgaaaattgcattaaaactcatccaaactcaccccaaacatgaatatatctcaaaatcaatcccacaataattatcaacataacagagagctaacacacatatttaaaggtctaattccaacataaacatgtttcaaaattcagatttaaccaacattcaaagtaagctcaagcacacactaaaatcttgaacctcaagcatgctttcaacttcaaccttcagcaggaaaacataaggtaaaacttgaattcacatatgaaaaataccctaaaatttcatctacaaatcatcaagaacacactccactactaagccacacaatcaagtcaaacacatcaagattaacaccaattttatccacatgcatacaagagcaacacgacacatttttcattcttttcaacatcaaaatctgagctgtaatttcacataaaaataacagtaagaagagctacctcaaatccttccaatctctagcacaattaacaccaaaatccaagcttgcaccatgctaaaaatccctttttgttgaagataattcaaagagtcaaaatgaccaatttgcccctagggccatataacactcacataagtaatcaagggtatttaagtcatttaacttcacatatctacccaaaataaatttagattaatcacacataaataaaatgtcaataaataatcccgaaaatgaatttcggccccaaacccggttcggcccgaaatttccaattgtgactataccgcgccgacttgtcagaaaacacctgaaaaaggacacaataagtacactatataataatatagtccaaaaacatgtaattaaattaaaatcactattttacccttctcgagtcaaaattacaaaaatgcccttggctcaccaacgatgtcttaacatgtcatatatcagattaattcacatataataaattatataataatataattctgtaataatacaaatttaactagttagggtttgctaatccattttcttaatcttagggtattacataaagtcacaactacaagttttgttatcgataactaaaataactatatcctaattattgaggaaacccataaactaaggctctgaaaatgacacgaatatgcaaaatagatttttctaggatcttgtctgtgatccgcttaactagttttacaggtttacaccaaaaa

SEQ ID NO: 249727 - DNA, 1142 bp, Cannabis indica
actcctcctctctctctctctctctctctctctctcgatcttttcttaagttcatcatgtttagtcagttcgtacttgattatcaattattagcaataattttgtggaacacacacttacttcatttgtacataaatacaaaacaacagataccgtacatgtttaatatatatatgactacttttggtagatttcaatattttttaaagaaaatactaaaccacacgatcgatcaaatctacatgttttaataataattaatataaaaaccatttacaattcataaaaggtcaccttttactatatgcaccttgttagagactctatatgagtcaattgtacattctgttatttctattatttgtacagtcatagttagttagagttagttatttactgtagcttccgttgcttagtttgttatgctctgtaactaacttatctctgtatatatactgagcttgttgctcacttcaataatagaataatcattcaactctttcttgttgtttctctctttctcttgcttctctcacatggtatcagagctctgctactttttttttccaaataacagacctccctctcccaatttctctggcagaggcacctggaatccttatgctgtcaatccccgtggcaatttctccccaaattactctgcacctccacctggtttcagtcgaggcaatacaccacaacaaggatctactcccaatcctaatacagctaacagacctgtttgtcagctttgttccaaggttggccatattacttctcgatgctatcagcgtttcaactttgagtttcctggtgttggtgctgccaacacagatcgacaatctgctaatattgccacatcagaatctgtaattgaccctgcgtggtatccagactcgggagcaacatcacattgcactgcagatgctaacaacttcactcaaaaggatccttattttggctctgaacaagtccacatgggagatggagctggcatctccattcaaaatgttggtaaggccattttcactactccttactcctctaaacctctctatcttaatagaattcttcatgtccctaagataaccaaaaatctcatgtctgtctcaaaatttgctagtgataacaatgcctatttt

SEQ ID NO: 249728 - DNA, 649 bp, Cannabis indica
tcgagaaaaactatttttgtagtagtgattaagattatattcagtattaattgaattaatgctacatgtgattgaaatttatgaaaaataaaaatgagtgtttctttatttttgaatttgaattaaatgagttgcttattattagtagtgtaatataaatattatattaatcatatatttatattttagtggttaacttcaatagttattattaatttgagagctgatcaaatttaataaattcagacaattaattaaaaatatggcatgtcaattcattgacacaattcaataaattataaaaacatatttatatatactgtttaataataatcgactttttttttatagtagtatctttttacacgatattaaaaagatgtctatataaaaattatctaactcaaacttaatttttttaatctcttttaattgatggaacaatctcaattcacatatagtgtaaaaatgatattttttattaattaacaaaattaaacataaaattaaaaaatttgctaatggtatttatctatagataatacctattaggagtattttaatatataaggaaaaattctaatagtaaaacaatagaagaaagtcatatggagtattttttttattatttttataattttttttttgt

SEQ ID NO: 249729 - DNA, 1522 bp, Cannabis indica
cagtcctagctactttcggttttctattttaaactattttatattgtctcgttagggtttctttttctaaattcttatccaagtgaggtttgttttatctccaactagactcgttgattctctcgtggccctaagcgcggctagagcggagatcggggtttgtgctactgctaatgaaatttagttttatctttatgacattagttttgagtgtcttttggttaggttactgcgattagtcttgtctttgtgacattgttttgttttattttatttcgttgttggttcgtcttttttttctttaatgcttcgccatcaaagttttgttagtagatgagaataataagttctctttcggttgaaggggttgttagtggtgtcgttacataccttgtacaatagttagaatgctcaattaaggggttgaatgaacctgttgcaataaatctactattgtaacttttaagcaatagagtaaactaaatgtaggtgttcttaaggttaactctagtgctgcaatccttttcatctgaatttattagtttcttttgtaaaacgatttgggaatcaagcgacctattagttgggttgttattctgattttaatcctagttgtatttccaacaaagaagatattctgattgggttgtagattgctattaataaaattgtttggtttattcttaaaaaaaaaaaaaaatcgtttaattttaaatataatatatatgataaacgttttatttaatcaaagtgtgaagtcattctattgtgttgagagtttatgattataaaaattttatcgataaatttaattttaaatataatattagagagttcttttcttttaaatattgaaaattttctcgattttattataatattaatattattatgggactaatttattttcactatcttttttcattttgtatatattttatagattattcataatatgttagatgcaaattattcttcttataattgttcgggacagttttgtgttcacaacctattgtttgtggcaattgatttgactaaatatattgtttagttagtacaattaattatcacggctcaaagagaattatatctcatgaaattagcgattctaatcactttatatatatatataatatatatactagatgagagttaataatatcatattgtatatataaacctataatatacacattgtattcaaatgttataatggggatttcaacccatcccgctatacatctcccacacattcacacacccaatcaattgagatatctccaagtaactacacacttaattattgtactcaaaagtcatgtaatcatagattggacattataattaaagagagagcagaaaggaagaaaataccagatacaaataaatatagcttattaattatatctttagaatttcaagctttattttactttctaattaagtaacaagttattgttattaattagtatctaattaattaattaccaggtagtagctttcgaatgcctatatgttt

SEQ ID NO: 249730 - DNA, 713 bp, Cannabis indica
tggtccttctagactgcggattggttgatcttctagagcccatgggctcctttccagaacgataattagtttccttatgtggggtgttaatattctttggatgtttagccataaagaagaaggtttttcttttaaaagaggggagggctttttttgagcctttttacagaggttctcaatgaaagcaccaaactgttaatgcatattttcattaaccaaatttgagcctcacgatgataattcaacacagaaaaaataaaagctatagaaaaataaaatatgaacacaagggcttttacgtggtttttcagttaaaattctgcatagtccacgagtcaatcttattcagatttctgagtgtattttcagggcctctttcataagagtttttttgtccccttttttgagattgtttgccactatttataattgcacagtggcagttaattataaagctgaccaaaataggattacagtcgttatccctaaatcgtgggatcttattacgtatcgcaaaatgtaaatgcagtgtgtgattttgaaaatcctataactgtgattttctcgcttttactgggtcaagaatattgtgtattaaacacatctttgattgttgaatctggagatgtctcgatagaaacttgattgtagtgatcccaatggcaagctggaaccattcttctttccgaagtcgacaagatatgtcttacgtc

SEQ ID NO: 249731 - DNA, 919 bp, Cannabis indica
  modified_base (893)..(893): a, c, t, g, unknown or other
tccattttaaaaagaaaggaatgaccattccaatgtaacaagaaaaaaaatttaatgatttttttatcaatttttttatgcattttaaattttattccattccattcctattcctattcccattctcattcacattcctatattttcattcctcccaaccaaacgccttaaagaaaaagagcttagagattttaccttaatctaggctaacaatttcacttcaatttctagctgaaattcttgctaaaaccgaagaaaaagctttgaaatttcctttgtctccttggatttcttagggtcgaaatagaggagagattaaggagagagagtgtattgtgtaatgcttagtttgagtctatcttttaatatttagaatctaacttttacccagcttatatctattagctccatataaatctactaaggatttaactgataaaacctaaatggaaaaaagactaaaatacccttacttaatcattaagttattttcatattgagtcagtttaaatataataggcccatttgtaggcccaataaagataatggactggatccattaacaaagttaagctttctagatgctggacagacgactcatttgggcgagataaacgtttaccacagtgtgcgtttgaatagcatttaacaaagcttccacggtaatagttcataagcatgcatatatccagctcagtatcacattcattaattaccagatcccataatatcagggcttaattcttaggatcatgcccaagaatcatatcttccgaataagaatcatatcaacttgatgtggtgtccacgtcagtaaaagatcaatgcctaatgggtcgggtttcactaaataagcttgaagtcaatatgtataatctgtatttaccctatcngtgggcaatgtgtacatactagaacc

SEQ ID NO: 249732 - DNA, 3830 bp, Cannabis indica
tgtaaatattttacaaaaaaaatggtggtaattattccaaaaaaaaatagcaccaatgtctctattctgtttatgggttcaattttactttggccataattcagcccatcagtgcctgataatgggctgaaatctagcccaatatttgattgggctccaacatttgggggtccaaaagtagaaaaaggaagatgaaaatgaaactcccgcctactctttcacaactgtgcaaaactcccgctacatttcatcactctgcaaaactccggctactcttccatggcgccttgattgattgagctgtttgtttcagtggaaagtaaagaactgaagctaagttaagtggcctgagcacgacatttcaactccatgaactctcgcgacctcactctgctttcttcagctaccattttcggtgccttagcatccgcactcgcttgccgcttattcttcttcttcaaccattccactaatcaatctctccgagtcgattcatctgataaagttgtcgttccgagaaattgctcttcccagagcccttttgatccctcaaaacgaaaagggtagctcaaagactactaaatttaataatcctttttatgctgtgtttggacattgctagggtttaggaattatccagaattatcattattgctatttgttaacgtgagtttttatttttgtgcagatatttgtcttgggatgattatttcatggcaattgcattcttatcagctgaaagatccaaagatcccaacaggcaggtcatgagtagttctaatgcgtattagtgatgtttcaaatcatgattattgattattgaatattgaataaatgcttcaatttgagtctgatattgggatttggttactttgaattgaaactgacttttttcatttttgtaatgtttctgtataggttggagcatgcttggtgactcaaaatggtgtaattcttggtgagtttcaataaatcatacattcagttccaaatagaaaacattatgatactttgcctggcatgaaagtttgctctttttatactatttgttataagaataaataggattcattcactgaactattaatcttgtagagattgcccctgaatattttgtttttgaaaaattctctccgaactataaaaatagttctccattcaataacattttgttcatatctttaaacaattttttttatgtagccatgacccacaagtatagttatattaggatgatctattcaactaacataaattagctgaaatctagtctattgacactaaacatttatctccatgaatgcacatatatattccgaaaattattcattagcaatttatgcatgtaattttgtctggattcttaaattgcaccagattaatgtcaaattagtgccacatcatcaaattgttgatcttatattttcatagctattggtcactctcatgctgtatttctttcatcaggcattggttacaatggttttcctagaggttgttcggatgataagcttccatgggcaaaggtaggcacttttacttatttttttttttatctttatcggtgtgctatgctatgtgtaaaacttttccgttttgtatgttttagaaatcaagaagtggggatcctttacagacaaagtatccgtaagttcacgtcttcattacctccatttctttctgtttattgtaagataaaagtttattcaaaaataattttcaccttcattatctaagttttctggtcatcttttaaagttctctgctgttggttctaatccgtctgattatattttctagttatgtctgtcatgctgaagtcaatgctattctaaatacaaatcatgcctcagctgctggacaggttggttgttgtcacgcttaacttttattacagaacatgttaattttggcaaactatattttgtttcatatcatagccatattcctcactattaaaaatggaaagaagaagaaaaagaaacaaagaaagagaaatccatttgcttagatataacacctttgttgaacaactgatttccaaagatttattgatgcttgtccattttgtgactgaagatccattttatctcttacctctgcagaagctttatgtaaccatgttcccttgcaatgagtgcgccaaaattattattcaggtttatcttcttacttctctccttctagtgttgaatcctctttactttgaattcaagcactagatttctataatttctttctggtaataggaaatggaaggtttaaaccaaacatgtgaagtcttttaatatgtttctctctcaaacttgatataaatctgtaccataaaaactgttatgtttatatgcatttctattttgatgtttcttgcagtcaggtgtctccgaagtgatatattttgtcgagaaaaagttaaacgatgtaaatgttgcatatattgcttctcacaaactactgtcaatggctggtgttaaagtaagcatcattagaattcttaaacttattttcaaattctttctacccctgtgaatcaagtatgatgttttgtctccataaaactatcctcaatagttcaatattactcactgttgtaaatcaagtgtcatgttttgtttccataaaactatcctcaatagttcaatattactcactgtgcactataagtaaacctctatctgctctactttttctttggtttttgttccatgtggataattacatttctggcctatcatcatttatctcatgaaggttaggaagcatcaaccgcaaatgaaccagattttaatcaatttcgaggagccctaaagcctagattttgagtcctggttcaagactggtaatcattctcaatcacgtttttatattcttcttaaaccaatcaagcaaagcttgttgcttggtgtaactataatgtttctcttctgtgaaagaactcaacatcagattttacctgagctagatgtacaacaatccatataattgcattacttttgcattttatatgttaaacctttatgaaatctttggataaagtcgagacagagggaatgatcatagttctttgatttgaataaacttgtgcattctttaatgtaattatcaccatagccaatgaaagtaaggaacttacgattcaagatatctcaaaatagataaacagatgataaatattactagtcaatctccttgacaaaagtcttagtacaaagttcaagtttcaaccataacactcctctcattgtccttattatcaggataattataggttatgacaaattagatagaattctagtttgccaaagtagttggttcacaactgtcgtggacacaggccaaaacatccttgtactccctgtaaacagtaaaggagtcatatacctcaccatctcgacttttcttgtattcaaagagcagtgatgagtgattaaaggcagtaagcttgacaaatccccaatcataatctcggtagacactccacaccggagacaagctactaaacttggccaaactttttcctcctcctccagtaaccacatgaattgttccgtttacaacaccactgaaatgtgatttttcatcgttcacacattggttctgtaaaacaatccacacaaacataccaagattatcatttatttttgcccaattagcatggactttaggtacccttgaacaatgtgttagatacatataaatcaatggctatatacctggtaaatggggcatatcctttcatagttgtgaacatgaccaaagaaagctatgtccaccttatatttttgccaaagcttttggaggtcatcccttccctcaggctctgaaaatga

SEQ ID NO: 249733 - DNA, 1864 bp, Cannabis indica
cctaagatccctcctaagaaatgatttctcatgtctcgtcaagtgaaagctagggatgaagaagacgccactgaaattaattctgaggaggaagaagcgcctgacgacttcaaaaaatttgtttcgtcaatttatgaagttagcgtcttcggttcttattatcagtaagtgagttttctataaactttcgtatgtttcttttttggttttttgtgtggggtttgttgcttgagaattgagatactgtggaacgtctcctgttttaattgtagtttttaattcatgctcttttcattattctatggatgtatgctctagtttttctggtttgtttaataaaatagtttctcttttccaaaaaaagaaaaaaaaaatctgcactgattgtctaataaacaaaaggcaaaaggtaattcttagagatttaactgcacaaagcaaatatgcaaatatttagtgcagctaaagaatcatatattcaatactcttctttctacaagtgttaattacttattgaaaaaatataattttttaatttaatagctaataataatagtttttgaccattaattttttaaaaaatcaataataataatacttacaaaaaaataaataaataaacagtttttctttttttaatttactacatagtactaatcctaacttttatatatttgtaaatatttgtttaaataagtgtatgaatattaatacacagtaagagcattgtttacacaacattgatacaccattaaccacatttcatatatatacaatttttttttaagattaatttctcattatacatttagttatttgtaagtagactatttattattattattattgaaaattatatatatattttaaaaaaaaaatgttcgaaaattattattacttgttaaaaaaaattatattttctcacattatgagtaattaaagtgttaaaaaaatttatggaagaaagagaaaaaaaaaaagaaagaaaaaaaaaatccataattcttatttattttgtttttctaaacataataaatatagaaaatacttattcaaaaaaaatatacagaaaacacatgagaattttatattaaaggaacataaaatgagacacaaaaatgggacagataatttttattgatcaaattcagcattcagtactcagtcctaaccttagcaatgatcatatgccagcagaatgtaacacctcacaagtagacaaccatgtggaggatgaaatgcatgcctattctgggatatcataagccatacctagctcactatgaccaaatctcatttccgccaaactatgtcagacaaaagtttaaaaagttcgatggaattaacggttctccccatggacatttggcatattgcacttttgcatgtggtgaatctgcccaatcagatgtactattgattagacaatttgtccaagagagaaaacatcacctagtacactcaattacccccaggatccataaatacctaggatgacttgcaaaaagcctatatggcacagtttgtgagctcaaagaagaccataagcatccatgacctggtggaaacaaagcaacgaaccagtaaaaatgctaatggattcataacgagatggagaaatctcaacctattaacttttatatatttgtaaatatttgtttaaataagtgtatgaaaattaatacacattaagagtattgtttacacaacattgatacaccattaaccacattttatatatactagaagttacgtgcgtaaatattagttttatttaaagtttaattttttatttttatttagatttctataactaaaggtatggttatgcaaatgatttattgtattaaagtaatatttgtac

SEQ ID NO: 249734 - DNA, 614 bp, Cannabis indica
cttatgattggaatagatcccagtttgggaacttagatgcccaaattcgtgatcttgaaagaagactggatagtgttcagaagctgcctgtgggatctagagattgggaaatggagaaggagcttcgtaaaaccctaaacgaggcccggactaggaaagaagtgtattggaaacaaagggctagaaattcctggctgaaggaaggggacaaatgtaccaaattctttttcttgtcagcttctatcaaaggtagaaggaatgccattgaaagcattcttaataaagacaatgtgtggataaccaaaagagagctcattggaaaagaattcttggagttcttccaaggtatctttaggggtcctgaaactgatactatccctaattgtactgacctggtgcgggatcgcctatctctggatgatcagaatgacctaattcgaaagccttcacctgaggaaatacggacaaccctgttctccatgagtagcaacaaagctccgggtcctgatggtatgtcagtccttttcttcaaacactattgggactcggttgggaatgacttttgtgatgcaatttcaaatttcttcctgtctgggcgaatgcataaaggagtc

SEQ ID NO: 249735 - DNA, 969 bp, Cannabis indica
tttatatataattgcaggaaagatgcacttagttattgcatataattgatatatgcgcgactaatgttaatttttcttgatcctacttttttccatgactatcttgagcatagtatgcgactacaccctgttttgatcctcgcaactttatgtcgtgcgaggttagctctcctgaaactttatgctagcacgtcaccatttttcacacgataactgggtctacatatcaaacatttatgagactatactcgtacttttaagcaaaaattttgcactataacactacatatgttaaaagagcatgctaatagacaccctctaagatagaacattgcaataatagtttactaccattggtgcctagtatcatggtacgaaccattaacgatattttataataattttaagttaaattatgtgaaatccaatacttaattcaactaatagcaatataatattttacagggtgtttatttcattataaaataacactttataaatgattaacaattttctataattattattatagtaaaataactatgatttcatattaaataacaccaataatagtacatcatacctgctacactatattaaaataaacatataaataagtactataaatatatataaaaaaaattagaaggtttaatcaataaaaaaaaaaaaaaaaaagtaaaaaaataaacaactgcatgaatatacaatatgatataataaaaggtttttttttaaaattcacaaacataataaaaggttaaaacaacaaatttttactacagccctacctttgaataacccaaattattatatataatataaaaagttaaaaaaaacaattagtcataagttatcatgccactattattattaccattattgtaattattataattaaatatgaagtctcagataatataacttaatcatcagtataaataagcaatcctattataaaatcttacc

SEQ ID NO: 249736 - DNA, 1921 bp, Cannabis indica
gtctttttgataagcgataaacgatatgtcgtaataagaatacgtaataaagtaaataataataataataagaagacacataaattttatagagattcagtcccgagcagttcggtaataacctaatcctcgttagttgtattgacttaagaataaggaagaagattccttttcttatagctcttacaataatatctctgaatatataattcttagatagccttagcttatagcgtttcggcgtatgatctctgtttacagtttttcgatcgatccccctgcccagtgaacattcctcactatttatagagcatgaaacttgaggaggaagagattcctctctcgttataaagcgcataaacacaaagatcgtgtgatcattgctgaatgctaggatcgtgggattgaggccgtatacaccgatagtggaatcgtgtgtatgccacatccccgcaagttgatccctgagttatagggattgagctggtgactcacgaagtgcttggttgaattcgctaagtgttgctcattttgcacggctcgttgagtattccatcatggacatgccagcgaggcatcctgctcggcatgttgatccgaccaagtgctctaagtagatgtcacgtgtcaccattcttgtgatgccacgtcagagtgccaatttcgggataacacagtgcatacaatcaatgcttcccaacatgcatggaaaaccacacctttctcccatttgaagtaagcggtgaatgtcaccgacgttgggtcatctcaaatattctgccccaaaaatttcattcactccacgaacaaaattaagtagacattcaatagcagtggtttcaccaattcgaacatactcatcaacgtaattggctggtgcttcgtatgccaacattcgcatagcagcggtacacttctgtagtggcgaaagcccttttctaccgattgcatcaaatctcatcttaaaatactctgaatgatgttctagagcttgcactatgcatagaaaaacatgtctacgcattctaaatcttcttcgaaaatgatattctgcatacaccgactcatcagaaaagtagtcacggaacaagcgttcgtgtccttctacacgacctctgtcaatgtgggctctttttcttcctcgccttcttgaggtactcgcagctaagtattcttttaaaaaaatttcatcagaatcgtcattacattccgaaattatgatatcagtaacactcatattctcaaaaggatctggagaacttgttgaatccattgcctaatttttaatagattataattgagaatgttagatgaatgagagtgtaaagtaatgtataaaatagagaagtgagtgaaaggaagaatagaacttggtatatatagacttggtgagtactttgatgtgttaaaatatagccgttaaaatatagccgttataatatactaaattaaaaaaagaaaataaatatactaaattaattaacaacaaacaaaacaaaaggggttcaataatcaagaccttggaaacttccacaagtatcgcctcataacattaacccctactccaatcctatctatttatctataattaatgcatgtggcttcactacatatcaacaatacgattattctaaatgaagtgtattaatttataaattagtaaaaataacttccccatctacactacttacttactaccctaccattcctactcgagacccaccaaatatttttgaaagatgaaagaaagtagatatagccgttaaaatatagtcgttaaaatatttgatgttaaaatatagcctttaaaatatagctgttataatatagccgttaaaatataatctttaaaatagaactgttaaaatattatcgttataatgtggttgttgaaatgaaataatttaaataaaggataatt

SEQ ID NO: 249737 - DNA, 445 bp, Cannabis indica
aagctcttgtccatgattttgatcatgtttcccttcacccagaaccccagacccattcctattgcttggtagtaaaaatcttatcccccaaaaccttgaaaatcgattggattcagaaggctatgaatgaagcctgggttgcccgatgccccttcacgttctctgaataccattctggacttttcctagtccagtttggctgtgaaggtgatcgtcgaagggtcatggaaggccagccatggcactttgatcgatctctcatgatctttgccatccctgatggctttgacaccatcctcccctcccaactgcgatacatcccgctctgggttcaggtacatttcatcccttttgggtccagatcctatggtctggctcaatttgttgccgatgccattggtgacctcatagaggtccatctcatttcactctatgactctgtcac

SEQ ID NO: 249738 - DNA, 622 bp, Cannabis indica
gccagacttatgcactcgcttcaaaagaacatgttgaaacagaaggccaactacgagagaaagttgagtttagaagttcagcaaaagtgtaaatacacaacttatggcttcgcacatgtagtacaatattgggtatatgaggccattgtagaggttggaaagaggtatggcatgaatcatgggatttgatttcccaggatacttagctggacgagcaagggtgatataggaaagaaggaccttagtgcattattttctagacgggtatgagtttctcttatgttagagtaataatttaagataaatgcttgtaataaatgctaaattatttttctcttatattttttgaatcttaaatagcatcttgaagtgatgaaggggttacttccacgcacagaagaggaggaatatgtgaggaccatctcttacgatggtgtggagaacctagttgagggtggggtggatgccacacaggctgaggaggaaacccaagatccagctgtttttggaagacaagtagagaaagcagcggaatatgttgaaaatgctgatttgcctaagacagagactcaggtaccattttttaaactttttttttatgattattgattgtcattagttg

SEQ ID NO: 249739 - DNA, 1192 bp, Cannabis indica
agagtcagttatgataggggcggaagatcggacggggaaagatggcatagcatgggtaatagcagtgttattggattggtcagtggacgaggatgaaacgaactgaggagattgagtagaactccgtgggttggggcgagattgaggagaatcaacgtggagaaattggtcaacagcttgctgcagatcttgtgagtctggagtagggtggagacgaggaaaaaactcctcaaaaggtgttgaattggacagctgaaaaggatttttcttgtgtggggatgaaggggtggcacggagagtatctttgtattccaaaagtggggggtgcgggaaattgtcacaacggagaagatatttggagcatttgttgtaagtatggtcgagcaaaccacagaagtaacagaaattgggaagaccttcatacttgaagctgacccatcgtggctcagaaatgcctctgaaccgaatggtcatacctctacggagaggcttagtgatatcaaacagaacacggattcgcaagtaaggtccaaagttttccacaagggagagaggataaatttccaggagatcaccaatttcatccgcaatgaactgagcaagttggggacttttacggccaaacgggattcgatggatttgaacccaaaagggggtatatctaacagaatcaggggtaggtgttggtgagacatcagggtgagtgaagaccatcaagaacttatcaaaatgccatggctgctcttcaagcacacggcgcctatctccatcacattggaatgaagctagaaagaggccagagtgatactcagaaatttgacagggaaagcggagggtccaagcttcagtcatggccttctcaatccaggatggtttagccgatttgggagataaaagcttgaagatcaagcagaaagcatcagtatcagtggaggagtggattgagatgtggtcaaagtcatgaacgaggctgtcctcgtcatcgagagcggtaatggggttggggttggtggaagaggaagccattaaggtgtggtaggtaagagtaactgggtttgcagcagggatcgaaaatgatgtgcaaacagaaatgaaaaggacatataaataaacaaaaatggaaaggagcaagagagacgagtacctggagaagaagagtcgcctcgaagagaggattggcgtctgaaccatc

SEQ ID NO: 249740 - DNA, 766 bp, Cannabis indica
tacacaataaattaaaacattcatttttcttttaaagaaacttaaaaattaattaaaaaattcttttgacattttattacatttatgctattttaactaatcacttcactattttttttagttgccaaaactaaattaattataaataattatatatttattttaaaaatatcacatttcattttttaaatcaaattacaattttaaattttttttaaaattatatttttttaatgaatttttcaattttattacattaataaaaattataattttttttcgttttttaaatggtacaaatttttaattcaatgtcaacagacaataattagaagaataaatttctaatcgtttgaaaaaaaaaatcacacttaataaatattttgatcattattattaattattaatatttaaatatattacttaattacaataataatatttaattataatttagataattatacatctaaatgtaatatttaaagggcgattaattttattttgttttttaaagtattagattattagtttttaatatttggcttggtaggccaattcatcaaaaggaattaattagtagtatgacttttgtttggtcttattatctctgatgagtaggtaggaatttttacaaaagtactaaatttcgggaaaaaatttacaattttattcacatggaattttttacaaaatactatctttttataaaataactgtaaaataacaaaatagaacaattgaaataatagtggaacaactaaaa

SEQ ID NO: 249741 - DNA, 1201 bp, Cannabis indica
attgaaatagatttatttaaggcataaaatcccaacacaaagatgagtgtctagaaaaatttaagatatggaaagcccaagtagaaaacaaaataaatttaaaggttaagacacttataaccgataatggtttagaattcatcaacactgagtttgatagattgtgcaatgagcatatgggataactaggcataggacaattgtgaaaactccacaacaaaatggagttgtgagcataaaaatagaacccttttgaacaaagtgaggtgtttacttcttagttagaggttgggaaagccttattggggagaggctttatctactgcttgtcaccttattaatatgagtcctaatagagtcatagatttgaagacaccttatgagatgtggtatgggaatatacaaaacctgaaatacttgagagtgtttgaatgtgcagcatatgtacatcaattcgatgataagcttgatgctagatttgtcaaaggcacgtttctaggatatcttattgttggatgttattttaccaagatctagatttactaacatgtatgttgattataatctataatctaacactctaaatatgaattttctgatggcagcataataatatgacaccttccgttcagatctctagcccttgattcctttctgtagcaaagcattatcaagatctgaacctggatcttctctccttcagtttggttaaacacagtcttccacactatgattgagtacttgacttgatatgagtgagcatggtagtattactaaaggctcgaaattgatgaagaacaaggagaggaattcaaaatactaaggaaggaggctctcttttactagttgtttaacaaagaatgaaaactagattattagagatagatgagaatgagagccatcttattcctttttagtatttctttagggtttatgatttaattttatggattaaaaaagataaaataaatggctgaaaattgctttagtgaccggccacttagtgggcctcactaattacaattttgccattttatttcataattattttcattcactaatgccatattttctaatttcaatcttataaatgtcaaaactatttatttaataattataattaattatcaaataaaatttctatttatcttatttattaattagacatttcaaagtctcttacgtttggaaagccacaatg

SEQ ID NO: 249742 - DNA, 1285 bp, Cannabis indica
ctaggtttgggagtcatttcttttaattcccccggatgccttatgtagagaccgtgttcacctctttgatcgcgctacgtgtctgattaataaaaatttggataacattaataattatataaaaaaaatatatgtgaaaatattcaactctaacacaaatgccagttaaagttatgtttagttgggagaaataataatataggaattaaaatgagaataagaataagaataaaaattaaatggaatcaaatttaaaatgaaaggaaaaaatttattaatattttttcatcttgtgttgcaatggattttctttcaatttcaaaatagaatagtcattccaataaaatggtaaaaaattattccatggaataacactccaatactttaaaatgcaactaaataaaagaatagttttcattccatttcattaaccctaaccaaagccaagatccccatcttcccagataaaaaaagaagtaacatttagttgggaggaataaaaatatagcaataggtatgagaatgggaatttgaagaggaattcaactgaatggaatcaaatttaaaaagtataaaaagatttgataaaaagtttattaaattgttttatattgcattggaatggtcacttcttttatttcaaaatgaaatagtaattctactaaaataatagaaaagtcattccacatttcaatattttaaaaccatacaaagaaatgaaataaaaatatttctttccataccatttcattacatctaatcaaatgctagatctacagattggtcttctgaaagtagtttattagagattgtcttaccaagtaattagccaaaatatgtgtagcacaaacaaaaaactggttacatcgcactgagcatactgtaagtggtgaaattttctgtgaataaagaagagaagatacgcacaacttgatttgacagtcaaggaattgaccctttcgtgatctctgttttccattttttttttctttgacaaaccctttagtgacctttgtgatgctgctttaacaagatatgtatcaatgttggaataacaagtgttaatcaattacatgtagatgaaatattttctgtgtaattggggtccatatgggatcaattgtctgagttagaagtgttaataggctaacctaataatagcggtttggagaagctataaatgaggaaattagactctataccctttttatattgtcttttttcatttttaccgtcctttttaaagtattatttttaccttttttttaaacactttaccaatttt

SEQ ID NO: 249743 - DNA, 187 bp, Cannabis indica
tatataattaagtattttttcagttgttttataatttatttatagttttattatatttattatttagattatttttctagttgttttatagttatcgtgtggttgatttttcgttaatttaaattttttttttttttttgtgaaaattacatgaaatatgagatttgatactaaagttacaaaaaaa

SEQ ID NO: 249744 - DNA, 812 bp, Cannabis indica
taataataataataaattactaataaataattattttaccatttttagtcactaaaaaatgtctaatcttagggtgtttggtcaattctgcttaccccaaatactttggtaatttttaaactaacttgtcccaataatcccgttataactaaaattattatgatatttttgtcctctgatagggtcttcaagactttaaggttgtcaaacttgaaaatatttttattccacaaataactcacattatacccacatattctaaatgaatatctgtaattaataaattacacttatttacccatttatggtaaaattcataattcacgttgaattagattagtaagatcataatcttactcattacttcctaattaacccataatatataataaaccctaattattcataattaagttttctgaaatattacatggacctctatatcaaatacattagggatggcaattatactcgcgggttcgggtacccgcgagtacctgcccctaatgggacgggtacgggggtagactttcgggggcgggggcaggtatgggtttaaagattcatacccgagttggaaacggggcgggggggggggggaaatagataaccgccccgaacccgccccgatatgatatatgtatatatttaaattttaaaatcataactactacaatttaaataacttcatactttaggctttttattgattatacattatttatttttactatacacattattccacttaagtttattgttttactaagttttttatgattatttttttaattctctttaagacatcattt

SEQ ID NO: 249745 - DNA, 627 bp, Cannabis indica
ggcaaaacaaacaattttgatcttaactacatagttatatagcaccagaaaaaaaaaaaaaaccacccaacaacgactaatttaaagatactagattccacatttttatcctactaaagattgcagcttcttctgacatcaagaagttaaaaaaaaacacagcacatacacatgcgacatagtctccaaacaacataattgagataaaggtgaaaatcttccaacaatgtgtgattagtttccaaattaaaatagaaataaagaaaggaaaggctttcaacaatatgataaacaaaaccaattccttgtattgtacatacaggaactttatagatgtgacagaatgttgggttataaacagattcagagtatcaatgtaagtgttgcataataaacaatttcaaactaacttatactttatttggcgactgtcaaatgaaccctactaagtgtagtacacaattaaataccaaagtatattgcccctcagcattcatacctcctttgaagagcctgtgcctttgaaatcggtacaacagtcaaagattccaatccttgctttggatcatacgaccgtgcttttaccaatcctggatctataacatacttaattccaggaatagttac

SEQ ID NO: 249746 - DNA, 565 bp, Cannabis indica
atccgaagtggaatggtgctatgggcagtgaactctctgctcttaagaaagctcacacatggactcttgttccctatgattcatccatgaatgtcattgggtgcaaatggattcatatagtcaaattaaacaaagatgggtctctcaacaggtacaagtcaaggttagtagctaaaggatatctccaagaagcaggaattgattttcaagagacttttagtcctgtggtaaaacctactacagttcgcacagtactctccttggccgtatctcacaactgggatgtttctcagttagatgtaagtaatgcatttttaaatggccctctcaatgaaactgtatacatgtgccaacctccagggttcgaagacccaaataatccaacccatgtgtgcaagctccacaaggctatatatggcctcaaacaagcccctcgggcatggaacgataagctgagaatgaccctacgggcatggggattcaatgattccaaagctgacagttctctcttcatctatggcaacggcacaagtctagtcatcctcctagtatatgttgatgacat

SEQ ID NO: 249747 - DNA, 832 bp, Cannabis indica
gggggcacatagatgacctggacaaatgcttcaaggtcctcagaaagtacaacatgaaactaaatcccttaaagtgctcctttggagttagctcgggaaagtttctgggcttcattgtcaatgcccagagaattgaatccaatccagagaagattcaagccctcttggatatgaagtcactaactaaaaccaaggaagtgcaaagtttgactggttggattgccgcacgcagtatatttgtttcaaaatcaacagacaagtgtgtcccattcttcaacatcctgcgaggaaacaagcaatttgagtggacgaaggaatgtgaaaaagctttccaagagctaaaagcacaacttgcaaaaccccccgtactctcaaaacctctggacggataagaacttggaatatacttagctgtcacggagcatgctgtgagtgccgtgctaatcagagaagagaacaacagacaacaccaagtctactacatcagtaaaagactcattgtggcctagggccgatacccattgatagaaaagctctcttactgccttattccagtaacaagaaagttaaggccttattttgaagctcatcctgttcgagtgtacactgaccaaccattacgccaaatattataaaagccagatgcctctagacgactactcaagtgggtggtggaattgggccaatacgaaattactttccaaccccgaacaacaatcaaaggccaagccttaacatactttgtgttagaatgcacaggcaaggaagaacgaataccagaaagcaaccccgagctagtacaaacacttcagccaagtaacagtgaagataa

SEQ ID NO: 249748 - DNA, 620 bp, Cannabis indica
cattagggttccaaaccctctttcaaaatcagcttagaaatcaaattacacaacctttaaaccctagcagcccctaactttcaaaattgcataaccaaaccaaaaagaacctaaagaaatcaaaagacaaaagcttctcgggtttacctttgttaaaattgcctccaactcttgctggaaacaccaaaaaccaacaacaagtccttggttcctagctggttcgaagagagagaagggaaagagagaggttctttgatttttggctttttctttcataatttcctttatttttctcaaatgaaaataagattaattgcattaatcttcgctgaaagtagaagctaggtgtcaacatctagggtagccaccaaatcactcatgtggcaaattactaaaatgtcctttcttttatcacttaggcattttcaagactgggtaaaatggtcaaaatccataatcccgctcaaccccggtactctatttccactaatatgcatcccactaagaaataaggttctagacttacctatgtgatcaaactagccatccatcgtattttccgttatcactgaacaaaaattgtaaaaaataatataattcatatataacacaaataatac

SEQ ID NO: 249749 - DNA, 596 bp, Cannabis indica
ctgccccatctcaacccggttccggtaggaggacctttgccctaaggaacgccagggggtgcgcttggagcgttagcaccagtcgctccctcgggagacccccaccagactcctggcctgccatcgagacccaatggaagagtgtctatgatctctggagggacccctatatcagagggaccactcgaaaggaattaaagtgcttacaacgcaatcctcggccgaccgaccctagtggactttggcgcagttatgtcattccggcactagtgtctgaaattccctactcaggaagctggagtagggaccgtgaggggtaaccaaggagaagtcagccaatgttataatgttgccgcgcacttaccaatattaatggtccgcgaagttatcgagccaagaacggtggaagaagatgagttggatccccgtgtggaatccgaaaatattgtagaacccatggaggatgtcgaggaagtgccagtatgcgaccttgaccctgccaaggttctccggctgggaaaaagactagagttggaggaaaaagaaaaaaatattaaagcactaagggcaaccacggatgtttttgcgtggtgcca

SEQ ID NO: 249750 - DNA, 724 bp, Cannabis indica
gtaactaagaagaggttgagactcctctaaaagttaatactccctcaataaaaaggttattcatccagcagtagaggaatgcaaattgaaaataataataataaggaaattacaacataaaatgtatgcggaagaacaaaacttttgagactcacatccaacatcacgagaactcattcaccctaagattctccatgaaggtattcaccaagtttcaaaaataagaagagagtttacaagaagagttgaaagaattcttatagacttggggataattgttaaccacgaatttttgtaatgtgaaatattaaaattattccaaatggagtaatctcaaactagggagaaatatatctatgaggattttaaaaggcccatcatgtgtttgtgatcatttaaggtatttctgatggaggtcagtgggcacgagtaaagttaaaaagactaacatatcaagtaaaattttttgctggatttatacaatgatgggtttagaattaaatctggtcataaacatgaaagtcatagatatctttcttatctttctaaagcatcttgaattttctgattttgagtcatatctagaaagttatatccaaaacactaagtccactgagggtgcatcaaccccctacaaagaccccctctggggcaccagcgaagaccccctctggggcacctacaaacaccccctttaggttacttgcgaacaccccctttaggg

SEQ ID NO: 249751 - DNA, 688 bp, Cannabis indica
gtattcattcgacaatgatgacgtcgaccatatttttgatgagttgttaaaagctaaggcaatacgactccccgagctgaaacgacccagcaaagttggtatgacaagtgatctaaattattgtcggtaccaccaaattgtgagtcacccactgtcggattgctacatccttaaaaacattatcgaagacatgatcaagagaaaagagattgagactgactcttctcttgggaaagcgacaacaaatacaacctccttaaatgagaatgaccaaataccaaatgatcccacacaaaaggacataatttatgtggcatttgaagttgacaaggatgttacaatagtccaagcccactcagacatgctaaggccaggaaacccaaatattcttacattatatgagctcatgacagagcctaatctagaaatttgggaggaatggtatgattgtgaagaggattcggaaagtacatggcaaacatgtactcgaaaaaaaccatcaaaaattccacctcggaagccatctagaaactctagagttaaatttcagagtaaaccagatgtaaaggaccaaaagaataagaaaagaatcggaaagcaaaaggtcgttcccaaaagaaatgaattcgaacaaccaagacgaaatttagtaactgtagaggaggttttaccaaaagagttacaggac

SEQ ID NO: 249752 - DNA, 685 bp, Cannabis indica
accacttaaatagattagtggcaaaaaaagctctaaggtgttatgtgcatcaggtagtggggttcggtgcgcaagagaatgctggaagaggtggcttcatgggccacgcgcgcgtcagtgtgtgatggaggagaagaacccgctgggaatgggagtaattgaattgtgagatatatgtatccactttcatcgcatcattgattgatcacttactcatcacatgttctacaatacaaaagtccataatttattattaatgggcttgtgtaattggactcaatttttatataaacaactttcttgctctaaatcaaatatttaacacaaaactaaaataaatcaaatactttcaacttaaataattttataattaaaacaatgaaaatattcaatttatattatttttttatacataattaaggccttaaaatatatgaatttgagccttaatcagagggtgagtcccatctcgataatatgtttgtattttttctcaacccttccatttggggctgaggtgtgaggaaaataatgctgaatgactagtttagaaaaaaggttgatattcaccaccatagtctgactttagtttcttaacctttctattgttagattttgtgtcctaaataaaacccatacaatcagatttacttattaataaagatcagaaataacattttatgtt

SEQ ID NO: 249753 - DNA, 516 bp, Cannabis indica
ttgcgcttttttttatatattgacagaggaggattcggacattttttgtggagataaatgtgaaactattaaattatatttatgatgataattatgcttcatttgtggagcttaattcggcttatgtaattaattagccaacataaatcaattcaagtagttatttttattttttattttcattctctaatttgggttattgttagatagtttggtattgataatgtgagaacataacatcatatatatatataagatgtatcacttacttatttcatttccaattagttgtgagagatagaattacaatataattgtgagccaaaaagagtcgtcataagccaaaagtgtcgcttaactaattatgatcgagctatctttggagagcaaaaaacagtcaccattttgaagagatgttaaagattcccatattaattaatttatttttttctttctgaaatggacattgattttgtttagggtgttgttgctccagaattcgcccaaaatacgtgg

SEQ ID NO: 249754 - DNA, 856 bp, Cannabis indica
tatatgtaatataataaagcaaattataaaaaaaaatatatacctccgatgaatcgagattgaaattttcacttgactcaaattcttttcaaacacttgcaaaacgccaaagcctataaaaagatataaaacagagtaaatcaaatggagccaataattcatgtttgaacacaaatgacaaaaagttgaacaaaagagtgattggagagattttcaatactaattaattatttaagctctaacatgggtgattgatttcacatggacaatatatcaaacaaaatcaccattaaatcccatttcacttatgtttagggagctgaatggaatgttaatgaacaaaaactccaaatggaatgttaattcttctcgtaacaacaatttcattctaagcacccaatatttagggagatgaattctggctcaaattaaggatggattagacaaacacttttaaggtgttgctttttaaaaaatgaaattcttattagaaaggaggagagcgtcgcagttcaaatttactgttttaggattcagatttcatttcatagggttgtggctgataatttatcttatatatgtacttgtacaactgattagtacttattctttgttggaattcttttaaaaattatcattaaactctactcctctgtttctcatagatctgaaactcttaatgattctcctaaatgtactttctgctgtcttctttctaaacaatagtaaattaaagttttgagactctatggatccctccaaactttcaagcaagatattaaataatgccctgtattccccatagctgattctctatgtttttgccttatatctcaggtggcaatctcattagcgg

SEQ ID NO: 249755 - DNA, 593 bp, Cannabis indica
aatacaaaataactcaaactagttataattaaaataaaaccggttctagctataacaatgttataatgaataaaaataaataacacgaaataactcaaattggttataatttaaacaaaacattttacataatgaatacaaacaaataacacgtaataactcaaatcgagtataattaaaaaacaaagagcctttcatctttcaagctcccaaccttacagcctttattaacgatagtcaagactatctgaaatctcgaattcttccatctaggtgaaaatactttagcgcttcatcaacatttccatgttctacaaatcagatcatactgtattgatcaaagcaaggttacaaaagactaaaaatagaaaattttcttcatcaaatattacaaaagacccatctttcaattcaagaaaaatcaacataattcagctcgaaacccaaaaattcaacatacccaactgaaaataaggtattcaaaatctataaacccaatacagatattaatagcctccaccaagctgtacaagagtaaaaaaaaaaaagaacacaaataaagcactgatcaatcagatatactttcacactta

SEQ ID NO: 249756 - DNA, 1110 bp, Cannabis indica
ctgagcatttcacagaggccctcaatgagagcacgaaactgctaatgcagattttcgttaactaaatttgagcctaacagtgatgatttcacacacaacaaataaaagctatagaaaagtaaagaatatgaacacagggttttttacttggttttgcaattaaaattttgcatagtccacgagtcaatcttattcaaatttctgagtatgtttcagggcctctttcatatgtagtttttttgtctcttttttcatctttttggttaactatttataattacatattgaacattaaattacaaagttgaccaaaataatgtgacagccatcatcccaaaaatcatgggatttgattacatatcacgtagtgtaaatgcggtttatgatttaaaaattttataactgttattttcttgcttttactgggtcaaaactatggtgtattaaacatgtctttaagtgttgaatctggagatttctcaacaaaaacttgattatagtgattccaatagtgagctgggccattcttccttcttaggtggacaatgtttgtcttgtgtcgatcgcggttatttacaaagaagtcttctaactcaccaaggttgtaagcctcactcctgttagctggatgaagctataggaagtcttcttatagcgagatggtcacctcgcttacttgttatttaagttgatctgacttttacacttagtttgttcaaggcaagctaaggacttttacggttgatatgtgtcaccttctccggtgcctgtctattcgcatttagcgacatattctttctcgctaatataccaagtcccagtttgtacattgattcctcgcctaagaccttacagtcagcgggttacaaatatactatgacccttatgtaattaatgagttattccataagagcaattgcattgtaacacattcccttcatcctgacacgtgtccttcatggaggaggcagccgatttttgggtataacatactacataacaaaatttctaatgagattttgtacgtaaatttttttaaatcctaaaaagggtttttactagtaaactttttttctctctatcacacaagaaatagttcttgctcatgta

SEQ ID NO: 249757 - DNA, 701 bp, Cannabis indica
gaaattagttttggattattggatgtcctgtttttgcatttgaagattaacgagcttttatacattaatacaatctcgattacttgcttgattaattgatgacttcaattaaactacactttttatttgtatgtatatttttgagtgttagactttatcgaattagtctcattattaaaaggaattaaatgtaattacaatttagggaacacaattgttagtttagtatataggcaatcaaaattaaataaaattagataaaaaatttaaatttaataattttaaatttttaatagtttaaaaatatgatttggtaaatataaaagttataaaagttgaagtagaaaaatcctgatttgaattgttatattataaaaataccagttttttgatatatgttaaggcccaagcccaggccaaagcccactagttttagggcatcattcctctctgaaaaaatcttgctcattcttcgttgtatttttagcttttaattttgttgtaatttttattagattttaatgaaatttattgataatcaaattacttgtcgttagtataaaccacatcaaatttttgctgtgcgatttctgcagtttttttattttgctgtttggaaaattggaaaaactgtatatgcggctttttgatttgtatttattgttatcttctaaggcataaagagtagaagaatgagttac

SEQ ID NO: 249758 - DNA, 679 bp, Cannabis indica
caagggaatacaggagctcacaacttagcacagatggcataagatagataacacatggtgttggaatagccaagacccttaccctctccctttgtaacacttttgggtgtttccgctcaaaaaaaaaaattctaaccacacgtttttctctattttgtaatgatataacttcacaattatcaacaacacaaatggatgaggagaagatccacttccttactgcaggttggaatcggccccatgtatatcattacatgatatattaataacaccacactcttgtgcttttttttatatacattgacacttggcgctattttcgatgtaatatcactatttaggtaattgcgtatttggtctcatgcaacttatgaaaatagcttttaggaaatattgataaccaatcataggatgtcacataatagaaagagttgggcaccagctatacattcgggtagcctaacccgtttttataaaagcccaatttttttacgttagcccaacctgatctattttataaaacaaattgggctgggcctggcccatattttcgaagtaagtcaagccctacccagaagcataaattatttgtgttggcccggattgtgctaggcctaaatgggccaacttgtttttttatgaaatgacttatcccatatttatcaaatggacctaaaga

SEQ ID NO: 249759 - DNA, 649 bp, Cannabis indica
cttccaccagtcttccgcagacttggtcaatgtcagggaaaaacacaagcacttggcacgtcgctcacacgtgccacttgcatcatcttgttatatttttctaagtgcgttcgcggatctgtctttccttcatacaattcaatgtggggcatcttaaagattttttagaagcaggatctctgcgatcctccttacacaaggtttttggtcctcatcctcaaaatctgaaaggggcccactctactttttaactagcttggttagagatgctatctgctcctctaaccttttcatgttgcttttgggaagatcacgtcctcgcattttgtcacttaagtggtttctaaggttgcctccatgtggcttcattttttcacttttgtacctttcgtacttagcgtgcaatcactgacgaaggtctacagtggacaactgtcttccatatgcccaccagttttccttctatcccggttgacagaatcactggtgtggtttttttgcccttgggcttaggtactttcgtactctgccctttaggcacaactttgcctctaggagcagaagggtgtccagactcgaaagaaccggtggccttctgcatcttagagggctggctgggcggattcgggtccttctgaggaggtttagg

SEQ ID NO: 249760 - DNA, 1584 bp, Cannabis indica
aaataaaagaacatctaattggtgttgcacttgtgatacctaatattgtttcaaacttggtttgttatcattctatgattttgtgtgttggcaaattgtttgaaaaatataataatttggcattaaaaagtcaatagtgataatcaatcatgaggtctgctctttgaagctagtgtgaatttgcattggtttatgataatgatacactaatgtgactagatagtaccttccctgaataaatgaagaagaaaagaacgtagaattgtttttacacttgtgataattattgtttcaaacttcatttgtaatcaatctattacatgaatgacctgaattatttgaaatataattgtctcaaaagccaatagtaacggaaaagaatattgctacggggcaacaatgatttccaacaccacctgattaaacatacgcagttggtgcaagctatattttaataaaaatagaataaaataatttttttttgacaaagaagaaaaaatttcattaaatcgttcctcattacataaatgaactccgaaagagcattactcactagataaacatgatcagaaataacaagtagttttggttgaaatgaatgctttgtttgtagattgtttgacaaattttaaaaaaacatctttgtgatcaaaactagttaacagactcctacaatcatcaataattttgccaaaataagacaacatagcagacgaacttcgaaatgcttggatgattacgaggcaatctgtttcaatgacaaccttacactacgacatcatttttatctaactcagaactttctggatttcaattgcttttgcaacttctagttgaacgtttactctactgcaaactgatctagcttcctctaatctgcctgtatgattttgggccaccaaagaataactaaaacattgagattgttcaaagattacgacatcagtatttaccttaattgtttttgcatttggagttcgccaatgctcatcaccatcctctgaattcataaatcctgaggatatatcttgtgtcttatcctgagcactttgccattgattaaggacaatatttgccaatgtcacaacttctctaacagatctgtttttgttatcccaagccagatcattttgacacttccataaagcccaaacaaccattgaaatcaaccttcgctcactgccaacaaatctggagtaaacctccttcagccaagtcgagaatgtcccattgacctctgttggaacacctatttccaatctattccagcaggctttcgaaaaagaacatgttatcatcacatgtgagattgtttccctctcagcattacataaaggaaaaagatcattaacataaacatgtttagtttgcagttgggatttagttggtaagcaacctgcagatgcgctccatagcaggtttttaaccttcagtggaacttttaagttccaaactttttgccagaaaccagagttgtcactggtgtgcctctctgccttctcttcttgcaagcttctgtacgcactcttcacagagtaatgtcctgttttttcaaatctcaagtaccaagaatcattctcacca

SEQ ID NO: 249761 - DNA, 1369 bp, Cannabis indica
gactgaaccactatatttcattgtcttctgtattttttccagcttggttgtctgttctcgcattcctatttgagtactcgccgttttaggttgaatactcgcatttatcatctttcaaataattctatcttttaccaactaaattacacttcttggtgttgtgaaattctagtaacaacatgactgaaccactatatttcattgtcttctgtattttttccagcttggttgtctgttctcgcattcctatttgagtactcgccgttttaggttgaatactcgcatttatcatctttcaaataattctatcttttaccaactaaattacacttcttggtgttgtgaaattctagtaacaacaccttttcaactttagggaatcggaaattcaagaaagaaggtcattgtgttggaaccaaaggcttccgggctcccgaggtaaaaagaaaaaaatctttcaatctttatatatcttagaagcaaacctatgaagataacataaaccactttagaaatggaataccatctcttagagcttctcccaagtgacttctttattatagtgaaatgatgggtcaagattttcaactgaattttatatcttgttgccccaagatatttctcattggactcaaatttcatgttggggttagaaacagtaataatgtctcatttcaagggttctgtttcttgcaggttttgttgagatttccattacaatataaaggcattacactaaactaaacatgctcgtttggaatggtagtgtgcacttttattgcttaaaaatgttggtttagaaacatggctattatgtccttggatgaggatatattatttatttttaacttgtcatttcttttataaataatttaaaatgaaattaagtatacgtgctttgcacattttttttaatttttgttacataatatttactttaaattttgtaaaacctatatcttgttcctttaaattttttataagtaaataataaatattattttattatgatttatatataaacaattatattttactaatcaaatataatagtacaaatatcaatttgatacaacaaatcattcttataatcatacctttagttatagaactctaaataaaaataaagaattaaactttaaataaaactaatatttacgtgccgaggtacgtaacttctaactagtatatatatatatttgtatacaaatggaaattctaatgtggtacttaactgaaatttttagatagaagtatgtagagcaaaactgaacttgggttttagtaaatttcatttttataattaagtgttaaaaaaatttaaaatctagtttaacttctaatattttttcattttattatatatatt

SEQ ID NO: 249762 - DNA, 502 bp, Cannabis indica
ttgatagtattgcactatcaaattgtgataattgctatggattaattagatacgcatacctaattattatatattattattgtgttctatgttatatacaaaattgatcttgaatttattattaattttctaacactgggcactactggtgtcgaatctcaatactcgtccctataaggagaaacgataaggcacaccttaaggtatcaagcatcactaaagattggtataatgttattgatgctataccacctacaatatattacatcgatagtgttggatactttaagatacttaataataatgctttcagtgggttcaaataatttgatttggagcaagcaagagtacgttgctcgcattgcataatttctctaagtattactattaggcctatcaattaatggtggctgaggattaatgaaaaatataacttttatataattaatggaaaatataattttttgggataaaataaggagtctttttttttttttttttt

SEQ ID NO: 249763 - DNA, 1428 bp, Cannabis indica
tacactcttaaagtgactctcacaaggaagaactgctttcaaggctttttctatcaaaggatatactctggtgataatagggtcaaagttgtcattcctaacaagaaagagtttaaggaccaattcttttagacaccatggctatatccttgtacacatacaacttttcaaaagcctcgtaagtcttgtccatgtacttgaactaacttcattgcttccgtgaacaacaatggtgctaaaacctactccaaatgaggttctatcaaaagactatcaaatattggtcaattttccatttgggatgaggttatcgagttgtaatctccacgatcaatcaaccatggatattaaagcacaaaaatattccacttggtcatctataaaagtccctcccaaggaggaagaacaagatcatgttgcttgagctgcgtttaacaagggtaccgttactcacaaagttgcccaaactactgaaggggatccccgaggtagaataaatcatttttatgggtggtcccaaatttttctcatggctgaaccaaggtgccttgtcaaattttttcatagtcagtagattttgtatatctagaattgcgttgaccttattgctcataggtttgatagttagtatcctgaattctatgtccaagttacttgtaaaagctcatattatggtatcccggaccaatacaactcaaatgactattggggaaaaacttagtatttaagtccaattaatacaacaaatatttgttaaattaccgactctagagagtatgttaatactcaagccgattcatcttcaactaaccttttagattgtagtctaggtgggattattattttgccttttatgtacctcgcaaatttagtttctgattttactcatttctctttgttggttttgcagaaataattaactttgcagaactcctctagagcccgactagtcttcccgtgaaaaaaggaaagaaaaggagcaagaaagatagagaaggagcctctaactctacaatagttctaaaatattaaaaatccaatccccctgttgaaactatttccaatgaccaagcaggcctcttatcttctaaaaaccttctagtttccaaccaaaagcatgccttggacgtagaggctgatttgaaaaaacgtgaaaaagggaaggaaacacttaattttgataaactagttgtttttaatgctaagaaattgaaagttcaactcctcgattccactcttcctttggattctttagctggcattacaagagccaaacttgtttctgagcacctcactaggcaagctcgcctttttcatggtctagagaaaggtgattggaaattgttcaataatggaaatgtctctgaactcatggacagagcaagaacctaatgtacatggtaagtttattcctttggtgaatgatta

SEQ ID NO: 249764 - DNA, 1011 bp, Cannabis indica
gggcataaaacccaacaatatttcgaacagagctcaacatacatctgcacggatagagtctacctggccgagcacggtaagggtggacgatccgaacaacgtatcaagacttagccgtttaaagacttacatcgtgaagcacaaaagtaatccctacaatccatggatcgtatcaaagggatatggcaagctgtctgaatccctcaatttatgtattctaaatatgtaatgtatgttcttaccaattatagatattgtaagcaaaagaaaaaccttccctcatgcattaagccctataaataatgatccatcgtcactggaatagcggtcgagagaattacttcagagagatctaagagtaaacactcagagatttcattgtgagagcttcaagagaggaaacattgtattcttagttcttgagttaatacaattcaaggacagtaggctattaccaaaccaaaggggcagaacttctttaaaatcttgtgttctttactgtttattggttcttatctcatcttaattactttttttatcgcttattaattgaatcattgtctttggctaaaagcgaggtcaacatatatcattttacttatcaggattttataaataatattttaaatattcaaataacctagatatttttgtagaaatttgaaaaagacttaatttgagatattttgacatgtaaaattggttattttcaaattggtttattttgttattttaattttattaaattataagattagaaaataatattaaaaatatctaattggttattttcaaatcatttatcttattagatatttaatataatttgattaaataatttaaataaacttagatatttagaaattagtttaaatttaaaattttgaaaagatatttaaggttgtttcaacaaccctaaattttcaaaataattggttatttaaatgataatttaattatataagtaataaatatcttatttcacatattgttacatgtatattgtttgtt

SEQ ID NO: 249765 - DNA, 985 bp, Cannabis indica
acccataaatttctcaaaaaccaataattttagttatatagacacactttatatagaatagatatatataatatagaaaaataaatagattccaaagtcaaatatatatattctttacgactcaacaaaaatatttaattaattaattattttatttcaatcaattaatatatataatatatattgttatttataatatagatcatcatcaatacatacatgaatatggtaagccagtcaaacagtacaaatatgtatatctaatcactagaaatatgtactatttatgaaaaatattttaataatcgaaaagtagggaagactttaattttcatttatttccataatatataaccgaacacatatattaattttcattagccgtcaaattaacaaaattctatgatttgttgggttttagtattatccaatctaattgtttggtattagtacaagttgtgtttgaaatttaaatgtattgtaattcacttttcctagtgttgttgaaaatagtttctatcttcttttagtgatgtctatttattttttaccttgtggttagagcgtcttggttacatgctcatctgtatttttactgagtttaatctttcttttgatattgatgtttgaggctgagttagtctagttaaatagaattttcagtactaaaaagaaaaaataaactcaatatgatgattaaaagccatttaaaacttttctcgttttatgttttaagagaaaatgtttatttctagtagtgaattaatttaattatagtcaaaataaatgtgtaacctataattttaatttatatttttgtaacctacatagtaacttggagaggagttacaatttgttatcacttgtaactcatgtgttgatcacacattattagtgtaataaaagggttattacacaattgatgatggaattcaaataatatgaaatatagttgttacaaactatattaatactcatttatatg

SEQ ID NO: 249766 - DNA, 567 bp, Cannabis indica
tgatgtaacaccaacttgagaaaaccttacagggcttgatttctcttctaactctatctcgagccagtaagtaatcttgaaagtcttcacctctggtctcatttgttccatgttcaatgtcacttggttgagtgtgtcatcatgatctaggttctgagctccacattgatcaagtacatgtgatgttgtttctaagtctatatgtacaatatcttactcgacttgtttagagctagcttcagttctagattttaggttagatttataaaacacttgctcattgagacaacatttctacttatatttcttgtcatgaattaaccacaacttgtaactttttataccactataaggtaaccaatgaaaacacctttcacagcccttggatccagtttacctttattaatatgaacataaccaatgaagctaaaaggttttaaatgatgatatttaggttcataattagaccaaacatgctcagagactttaaagtccaatgcagaagatggagataaatttataaaataacaagaagtggagcagcttctgcccaaaaagacttaggca

SEQ ID NO: 249767 - DNA, 1446 bp, Cannabis indica
ggaagatcataccaattaaagattacaaaatcgattctatggactccggtacgcttccgctattccttaatcctattgtttaattctcatgaattaactagggctatatacagatttacagtatttctaacaatgaatgcatgtgttttacagttttagttttactgatcacactatacttgcaacgaaaaacacaaagaccattgtttgcaacactgatcacttaaggtatggtaagattggatcacttactagagagggacagccaagatttgcaaacatacttgtaacgtaccatagattttgggtctaatcttgagttgaagttatattttcaatgttttcatatggtaatttcgaattacataacaccatcgccatttggatatcaaatcaaatcaaatcaaaacaaagagttgggaaacaaattaatttcattatttatacattttttatttcttttttcgattgtcattataacttttcctaatttaaaaaaataatgatatagtctttttttcctaacaaaattatcggcagccccacaaactaaacatttatacggtgtgtttcatatggtatatatatatatggtatgttttaggtaagggagatgatatttatacctctaaaaattataattataccccactttatttactaagagggtattatttaatacatcccattcctccaacaaatattaagaagctaatttatgaagagtttaatatattatgcgcacattgtacttttttttcttctcattttgtattttttttcaaataaatttatatggttattaataataataaatagagaaagattcacatatcattttcttaaacaggacaactatattaggttgcttcacaccgtgtttcgtaatcaaatcaggggtgctccaattcaacattcgagagaatctagtccctttacattgcccatacttcttctccacttcttgtatgacctcaaacacccaatattacagggctggtgcatatccgtacacattatacttcgcttctggtaaagcaatctttttctccttcttggatttcttcttcatttgatctttcttacttgagatcttatccatatagttttgtctaagctgctgcatatttttagctgtggaagacaacaacttctgataagaaaggaggaactaaaaatactcaaagaatttgtttacattttctactaacttcaacatatttgtcaagatacacacaccctcaaactgtggcagcaagatgccttcaataaatgcacacaactgcagcttgtacacatcttttacaacattacacgcctcaaaagctagccaaaggattttaaaggtcaccctttttgcataattgaaatggtctcgcagtgtccgatcagaatcgcattgtggttcaattcttttgtcgaggggccaccactcatctttaggcc

SEQ ID NO: 249768 - DNA, 1005 bp, Cannabis indica
tttttttttttttttaatatctttcaatttttttgatgaacttaactttttaaagggctaacaacttgttattagtcacttgcatctcaatttttaaaattcatttttaattttaaaacaacaaaaaacaaaaaaacaatcaattgctattatttattattttttttaaaacatttcatatttttttctctatttttttttggaatcattaacaatttagttaaaataatttgagtttttttagtgttttgtaaaatatataaccatataataatatttaaaaatattatttataaattgtattttttttggtcaattattaaaatttagaatgtgacttctaaaatattagaaccatgtgcatataaatattaaatgatcaatgtttatgttacaatgttacatatataataacttaaaattaatattattattattttcaataaaattaaaagcttattaatcaatattctagctataaaatacactataactttcatataaggatctataatattgttttttatttttatttttatatatttaataagatgatgagaattagagtcccatctcaaaatcaattggtgatgagtggagcagttcatgttcttatatatgactcattaatacttttacatttaattcatgtagcacaatgttctctaatatttcccctcaagatggtggctatttttgctcaccaatcttgaatcaccttattacaggtcatgctatttgctctcttatttttgttcagatcttaagcgtctttgcaccatctagatctcgtgcggctggctaactatttagataggtgtggactgaaagcccgctagctaggaatatggctctgatacgatgatgagaatcatggggtctcaactcaaaactaattggttataagtggagtagcccatattttatatatgattcaatacttttacatttaatctatatgggacaatattctagaagatgatccgaatttgtacctattaccat

SEQ ID NO: 249769 - DNA, 1091 bp, Cannabis indica
tcctgctcggccctaggcaaagttgcgtgctgagccacttgagggccataaccctatccctgtgtcccacacggtactgagtctagaacgttcatacgataatactatcgaccatattgtcagcctatactcaatatgctactcatactctagccatattgatgagacagcatcgatcaatattttagccaacatacatttatcaagtaatcagcataactttaagtgtactattattgctatcaatgtaatctaacaagcataaacaacatgtatgttaaatatgtaataacatatgcatgatattatactaatcttacctcaattccaaattcaaatttgccgatcaacttgagtggaataacttctcggcgaattataggctcttaaatcacattgataacaacatggataagtgacatgctgaatcacaatcgggagttaggttttaaactaaaaccctatttactgcaacttaatatggcaataccctaaactagtaggaattagccaaccaaaaacctgaaactaacacgaaatgacaacctgaattttttgggaaaccctactgcaaaaaccggttacccagttttataagtacctgtaaaaccggttagccggtttccccaaaaaaaccaaaacaaattcaaaccctaaccaaatcgtttccaaaccttaccaaaccctccagaccttcataatataccccaatagacataaaccaagcaataaaactagtacccaagctcagaatcgaatttcaccattaaagctccatgtttgagttctaaaactcaaaacttgattaaagttactaacaaccattaaacaaagcttaaatcaacatttgtaaacgttatttaacttctgaaatcaataacaaacactaacagcaactataaaagactataaactcaaaaacaatgcataatccatttctaaaaattcaagaaacttaagaaagtgaagacaagagtttacctagagcttaagaacactcaaatcctactgatactagcttgaatgcaggaaaaaataacaagcaaaccctaacgctgcttctagtggattcgaaagagagagagagagag

SEQ ID NO: 249770 - DNA, 976 bp, Cannabis indica
tatagaattcgaaataaataccgaaaatgaaaaacagaaaaaaccaacaatcagaccgaaaaactccaatcatgtttatatatatatacatgtatatagcacataaagacattataaatgtatggaagaaaatattatatacatttttatgcaataaaatcatatattcaatgtataatatataaaaacacatatgaatgaaatatatacgtatacattaaaacatacacgtatatagcatatatataagtaaatatatatgtatatacgtagataaaaatatataatcgtatgaatatatatatgtatatataaatgaaactcaaataaaattaaggcagagactaaaccactctgataccaactgttagacttttatatgtatgaattatgaaaatatgtatgtgtatataaaaatacggaataaacaaatatatacactatataacttaaggatccaaatacctccagccattgattctttgagcttcaatcccaacaagctttgatctgcaaaggaaattgactaccatgggtaatcggtcttcctccctctctcaactctctttagatagaattttgctattatgaacaaaatgagtgaggagctcggggaccgatactctatatttataggtgagatactccaccagtatctgcgccacattaattgtcagaatattttgacaatttattcaggaaattaaattaggtaatgaatattgaaatctgaccatatatagaatattacgtaattaattttttctagattcaatgaatataaaatattcatttatcacaaaatcaattctttattctattccataaatagaaatattctaataccctactccacgagtcagttatattggtcctttgggcatgtatttggataaacacaatatgtgtttacagtataaaccctagctatgcactccttttgtttctctcttgaagaagatgttggaaattattt

SEQ ID NO: 249771 - DNA, 556 bp, Cannabis indica
attttgatttttagagattctcataattagattaaatattagtaaattttaattgtattaaaaataaaatttattagttaatattcgtatgaatatttgataataagattgttatatgtaatagaattataaaatatgtatacgtatagttattattagataaaaatttataatatatataagtttagaaaaaaaaaacgtaaactttagtaaaaaaaagaaataaattagtttaaataatgaattgagggtttaatttgttagagtagatatttatttaaaactatcattttaatattctgaaaataataataaaaaattgaataaataattagtcatatttttaatttgaaatttaaacctattatacggttggtatatatgcgtatatacctcatataagatacatttttttttcaaaaccctagcagccatatacctatcgtatccttcttttctctaaaaatatcactttctttatgtcaccaaatagatagttctaaccctgaaacctttggagtcaacaatcagcaactcgtatctgaacaccagtatt

SEQ ID NO: 249772 - DNA, 708 bp, Cannabis indica
ctaagtgcagattttatattttaaatccaatctaatatgcaaaagtacggattagataagttattttagattggttacttttcaatattaaattatctaatatttataaaaaaaatattttttttaacataactagcaacaaaataaaataaattattattattatatatttccaacaataacttaaactaaataaaataataaataacaaatttaaaaggaaaaaaaagttgtatatttaaaaatatgtttaattttattttaaattgtacgtagaaacaaaattatatataataatagaatatatatttgatctatcaagttttgaaaacaatatgtattatatgtattagatttttaaattactattcttttacattattggatcggttacttttacatgtcaatcaacattcaatttgcaaaagtgtagattttgaatttttcaatccaattcaatccgcacaagtacagatatccacactttgtgaattgaattggattagatcgtaagaattgaattagatcgactattttatgactacccctactcacatccacaaagccaccagttgcttagttaatggggcccaaactcacgagtaaccgagctaaatgggcctttcttctatagatttagttcactggctccataagatgtatcataaatctattctatataaaatgtagttatataacagaattctt

SEQ ID NO: 249773 - DNA, 1673 bp, Cannabis indica
ttatataagacattattttttgtaagaaaattatacttttacgtttaaagaatttgttttacatttttacagtttctatagttacaacaagaaaactacataaaagtaacacgaaaataacatcaaaacaacaacaaaaaataacatacaaataacaaaaaatcaacaacaaattaacaagaattcaatataaaaatgaccgtattttctgtaaataaaataaaaaagaaattgtaaaaatattttaaattccataaaatcgtatttttgtaatttattttgttgtttttgtgtatttgtgaaataatcccaaaacaaaaggtattatcgaattcttcttttaaatggatcagttaaacgggcttgagattgggcctgggctttgaagtgttgaagggcccaactctataccgaagcctgaaaatgctgaattgttgttgtaactcggaaaccctaaaggacattataaatagtgttttaaaacagttttgaagctcatcaatggcagctagaattagggtttgtaaaaaaactcatacaaacactatgaagaagcaggtattctgtaaaatcatcaaagatttactttttctaactaaattatcaataacattactcaacaaagctttttgtgttgtgttgtgttgtgtgtcttctttttttgatatggtggtgcactagtacataggctccgtgttcttcattatcggtttgcctaatctttttaaagtgcaataacaatgttgggattcgctttgcagcttaacttgatcatatttttgctgcctgtaataccctcacatctacactaactcattttgatttttgatttttagattgacaactttttagggcaaatgttctgattcaattttctttggacaacattaccattcttctctgtcataactttggctttgaaaattaagagctgtttcaatgtgttttcaaaaaactgtttttaatttatttggccaaacactcactgaaaatagttttgaagttattaaaccaaaaaactccttagctctattgttttgaattttgatcttaaaatttgtattgccttaggaaagagttaccaaattgttgccatttctttagtttattgaaattttaggtatcctgtgtttccttctataatttctatctgatatgattcttaattgatttaatgaaaaaagttaatttttggttctcaagaaagaaggttggccaatttattttgaattggcaagttgaaactttgaacttgtgtggaaattgagcatttattacttagttgaacaagctattgaggtttgaatatgtaagagaaagaatacaattgttgcctgttttctttcagtgggcatttcatattgaccttatttgtcttgtgagtttaataatctaaaatctaaaagattggtaaaaatgttgggggcctcacacttattccttcacatttatttgatctaaaaaactagttcctctataacatagaggtggaaactttgatcattatcaaagatcaatctaaaattatactgccattcaagactacttagtacactaatccgttgaaaaactatcaaaattttgaaagttattttaaattccaccttgagataaaaatagagagtttccttgtgatttgtcaactgtttctccataggaaatgatcttaatct

SEQ ID NO: 249774 - DNA, 611 bp, Cannabis indica
taaactatatcataaaattatggtaaacaaatttattaggggcaaaacatagttactgacaccaaaacttttaaagacatcaaaaccataacatggtttcataaaatctccaaagcaaaattataagttgtctacaataattaaattaagaaaaaattaataattatatatgagtttcaaagaataattaatttaatttaaaaacactatgaatatttatgtcaaaaatgctgaaaaataataataaaaaaaaatgtgaaggaaatgatgataataaaaataaattgttaaaaaaatggtgtatgactgggcatggtaaaaagaaaaatgaagaaataagaagagaaaaaatatcagagaattggataggaaaaaaaaacatgattttgatgtttttaatttgtagtgtgaagttagaattagtattcatgttgagtatttgaaataaataaccaatcacattctttgtgggttgtagtttttgaaatcataaaattggatccaaattctatcccctatccatccttaatttatttattttatttatttttttttttttgtaaaaatatcaatgcttaaattttgtactcttaggactaataaaagtcaac

SEQ ID NO: 249775 - DNA, 1506 bp, Cannabis indica
ggggttatgtttggtgaaattttactgaataaagacaatacaaattagaagaaacacaaactatttcaatgaatcatcaactgaataaggagatcctaatatactcttctactgaaacaagtcagtgactgttatgaattagataatgaaagacacattttctgtcatcttgtgtagaaagataaattgatatggaatacagctaaaagaaaaattgagatttacatagcaaaaatccataatatgtaatgaaagatagtgtaatgcttgtgtcaaaatatgtattttactttcaacacttcaaacctgaaaaaataaaattagtagagacatttgatgacataaaaatgcacattattagtacacttaccacatagtaaaggaggaagatctcctatactaatactaatagtgttaaattcaatcaattcaatcaggtccttcgcattgtactcttcgatatcggttatgttaaacttcttataggaccaacataacttcttataggaccaaggcagagattgcctgtaaattaaatgacctcaagcaaaaaaatcaaaagcaaaacacataattactttattactcatcttattatcttagaagttaaaatgtagatgattaatcattgaaattcaaggtaaatacaaatgaaaattgttgtaataagatttaacaatgatacttactctatcatagtcagcgctcttcacccacaatgagattttaggcaaaagatcaagcaaaacatatgtgtccaactcagaaagtggcttgagaataacatcctacaccattaagaaaatcaaaactttaaacttgatttactcgcatatatcagacttgaactaagcttttaactattctgtaacgtaaaatcatgttggcctacatccccttaacttttaaagggggttgcgttactaaaaacacaatttcatatgatgtgaacaaatacattcatgattcagtcacctaaggaatagcacctgccattcctgaaatcaaataaccataaagctcaatcttcaaactttcaaagaagaaaaaaaaaaccttgaacaacaaagacgctattagaataactcagcattatttaattagggcttttaatttgagaaaataaaaagactacctaattgaaaggaaggaaaaggaagtaagttagagccataggttcttgcccttgcggtgagtgacaacgatagtatttcccaaaagtgcaacatcaaagtctgaggtgaagatgtcgttgatgactttggagtcgtcagctacgaccgacctcttcatcttcttgccaagaaaaatttcctctacaaccctccaaactgcctccacctccggtcgctccgacattttgggtgttttggttgtggcacaaggctagcacatgtgagcattgaccacatcttagaattgggcaaacagaaaagagaaaaactactcttgattaaatatacattgaaattcaaatgtagagataaggtacctcttactgtattc

SEQ ID NO: 249776 - DNA, 964 bp, Cannabis indica
ttgttgtaatggatttaataaaaatattacaatgattaaggaccatgtgtatttacgaggtttcaatagaagttatactacttggtattggcatggagaacattccatatccattaggaaagcagggggtagatgatatcgaggagtttgtttccctcaacaagccacctctcttgtacaattttgatgaccagaaggctcttgatcagcaagtatatctcttgtctgacaatatcgacaatattgtagaccgagcgtatttgtactagcatgagggtccaatcaaagttcactacaaggactacgataattcacatgcccgggttttgattttggaaatactgcaagaggatgctaaaatctcaatctcaattgaagggtgcagatatgttagggaagtagcaaacatgttcattccttggcctaaatacctaattgcaacacccgatgtaacttttgttataaattaattattaatgattcgtggagtttgaatatcttcaatattcaaccatagtgaagtaggttctgcgaatacatgtgcttcggtgggatggatgaataaacaactgtatatatctgtgttatttgtcattgtataggcatgtttcatatttttgggggcattcaattacagtcgttatgctgccgaaatttcggtagaattaagatcaaatttgatatattatggtgtgttttgtatagggtccactcgctcaaccgccttcaagacgtgacatgtcgaaaggaaaaagtcacatgccttctccacaaggcagtgatgatgaagaagatgaattattctcacaaaaggtcatggatttgatccctaaattgctaaaatggatagttgctcaatttctgaaactcaaagataaacctgatataatcacaattcctgttcctaagggattcataacaccgcgtacctcaatcacgttatctggagaggatttgcagcagg

SEQ ID NO: 249777 - DNA, 597 bp, Cannabis indica
ttgggaatgtcgagattggtcagaaatgtagaatttcctataataccctgagtacccattttatgttgttttggtgtggaggggcaaaatggtcattttgccccatatgcattttgtcctttagtggacttggtttacttagtaaatggtttgatgttggctggaattaatttagaaaatgtaagtaaagggttagtttatttcattttgcaaaaaacaaagaaaaggaagaaaatcattttctctcaagtctctctctttctctttcggcccccttagagcagctagggtttggattgttttgctgcatttcaagcttgtttcagcagggattaggagatcctaagctctaggtaatttcttgaatccttctctataatttcttgggttttaaggaaaaagaaattttgcatgctttgagtttgtgcttgttgtggttgctgtagttgattgttgttgtgttcggaggttaattatggtttgttatgttggtttatgcatgatttagaggctgttatgttggttgggcaagctttggtgttttgaactcaaggttggctcattaatggcaaattttgattatgtgtatgggtgaat

SEQ ID NO: 249778 - DNA, 791 bp, Cannabis indica
ggatccatccaatctaaaaaaaagtaaaattttaatgttaatttttatatatacatatattttatgtataataatataaaatcaaattattaagaagttctattggatgttggatacattggatttttagacaccccatccaacatctgatccgatccaattagatatttaaaaataacatccaatctgatccaatcacaattggacatctaatctttagcagtcgattgtaattggatcgttcagttgtcattgaattggattgatttttgcactccccttgtgaggtactattgtttgatgactttgatgtgtcattgtttgatggctttggtatcttttaaggttttcgaacttattttataagttgtccctaattatttagagtaatatagttaaatatcctatcatttcatagaaattagaattaaacaaaacttaaattattaaagtgttccaaatttgaatttgatatatttttgtgttatttggcttacttcaatcttactcatataagaaaatgtttgaaattgtaacatataatttgtaaggtaatcattaaataatagttaactggtacattaaaaagaatgataaaagatactaattaaaatttggttttatttgattttttggttgaggtataatttaattgaaagtgtagttaattggtttatgaattaataaagaaattaaactattataactgtgtttgataaaaatcataaaaaattatataaataaaaaatagtaaaaataaaaaaaattgttataaatattaataattatgt

SEQ ID NO: 249779 - DNA, 822 bp, Cannabis indica
aacatgagtaggttgttgagaatgtgcattattctgttgcctctaaatagtagaagccactaaagtattgagcagatcagtaaagaatgatcttgatcttgtggtgctacggaggatagtgagatgttggttgaacataatcaaaattattatttttgtgatgtaaatacttaagcttacattctatttacagataaatacctaagttaattgttaacataatacgtaagttatattttttaaactttcgtaggtattgaccgttaagtatcaagtcattgaccgcatgacaatccttgattggtctaagtcattgttaatattattactggagccactgagttttgagattggttggaagaagatgaatgagattaatgggaatgagtttgggttgacgaagcttttggcaaagacaagagaaattgtggcagagaggttgagagaggaggcgaagatgcttaaagaaaaaggagaagtcgaagaaaggtattaagttagagcattactgagatcgatcagtgatgtactcgccgaacatagtagcaacaccattgggttgtctagtactactaccacgtctagagacgaagatgatacatgcgaaaaaacaataaacacatttattttgttattttctttctcattttcttttgtttagatatgaagaaatcaatttcagttctgttcttgagcttttatagcttcagatctagatggttgtaattcagatccatataggggtgagcaacggtcggtttggtcggttttttacacaaaaaaaatccaaaattcggtttttcagtttttatggttctaatc

SEQ ID NO: 249780 - DNA, 648 bp, Cannabis indica
aatacgttttcatttgttaaatataaaacattacatttacaagtaagccagcaaaatagaagacatgataattcaacatataatttctcttccaacattcttattttccaaaaaataaaaatgaaaaatgaaacttcgacaaagtaaacaaaaaggagctcatctctttagaataacctaaaatccaggcaacactgaaaggtcagcaatgcctctaggaaggtcagcaattttgttgagcagcgcaagcctgttattccgaattctttcgtcctcctgaaatatgttcaaaactcattttcattttcattcataacttgcaaaatgcaactaattatatgatgccatgcctgttgggtcttaatttgcaagacaaattgttaaaatgtgtaaccttttacatggacaatttattacttacaggcaaggcaaggatataattcttctatctacaacttaggtcttagggtgactaaagtaaagttgattaaaattagatttgcataaaaatttcgtaagagaatgaaaaaatagaaatcataactgtataatcattttatctttcttttcataatgatgtgtagtgttttagctagcaagataagtgttaactctaattactatcaaaatcccatatgcataattttg

SEQ ID NO: 249781 - DNA, 664 bp, Cannabis indica
atggcacattgggaagtatggccatatgaagaaaagagttgctgaagctcaaactcgtgtgaatgatctcaacaatacattggaccgatcgcataacatcatggaagagctcaagacctctgaatcgatacttgatgatctgttagaacaagaggagatatattggcaacaacgatcaccagtggaatggatgagttcgggtgactgtaacacaaaattctttcatgcaaaagctttagctcgccaatccaataacagaataaaattcctaattgatgatgctggcctcaaagtgcatttgcgttcggatttggtctctgtcttagaagcatattttctgaatatttttcaagctgctccaacagatgatgctgctctgtcctctgttcttgacacaattcctattatggtctcggctgatatgaaccacggtctcacacagcctttcactcgagcggaggttgatgcagcattgcaaagtataagtccggataaaagtcctaacattgacggtatgtccgccatgttttaccaacaacattgggatttagtgtctcgggaagttctgggagttcttaatgatggagctgacccaactcccttgaaccgaaccattatcaccctaattccaaaaaataagaagcctcagaacatgaaagattac

SEQ ID NO: 249782 - DNA, 576 bp, Cannabis indica
gtcatcatcttgaacaacaggacgtttgcccttattcctattagctaaagatttcaaccccattttagaacttttctttggcacagagaaatgagtggataaagaacgagtaatagccatatttataaatggaataagagaaaaagaaaaagaaggaaaacagttatgtgaatcggttaatgtgagttgaaaaaaaaatggaataacagaaagaagagggaaaacgagttgggatcgtggagggagaagagttcagctatggagattttgattttaaaaaaaaaattgaaaagaaatggaaactaataagaaaagaagagaaaaatggagggaaatgatgtaatgtaagattgacataagacatcaatcaaatgacgtgtcagctgcatgtagtgtgtgtgcatgtggtaaaaatgtaataaaataaagatgatgagtataaatgttgctttaacagtgtgaaggtattaatataataaaaattgcatcttgtatttttggtaacaatttctaatgattttccccaatatttgttggaattttattttaccaagatcttagatctactcacaagta

SEQ ID NO: 249783 - DNA, 1349 bp, Cannabis indica
gaatcgatatgacatgttggtgttgtatggccaaagcgaagcaaacttgacattgagccgtgtagcttgattgcctggtttgggatatccacgacccatggttctgttgccttgaggtgggcgatagacattagatcttgggttactatatgttaaatttgcttgcattttcattgcaagttcagtaacaacactgtgattttccaacctgctttcatgagagagtaggagagcatgaacctcttctatagagagaaggtcacttctcgcagtgatgcctgacaccacggaatcatattccggtcccaatccattcaagatttgtaaaatgatgtcttgatcattgacggtagagccagcaacagctaaagaatctgcaagattctgaactttgtcagcataatccaaaatcgagagattacctttgcggatcgtagagaattgattcttaagttggagaagcctggcacgagattggctgttgaagcgttgctcgagagcctgccacaccttgtaagaagaggagaaatttgcaacagaggcaagcacaccttcggacatagatgagcgaagccaagagagcagtaattgatctttctttcgccattgagcaaacaatggattaggatttccattaaccagggtggagggagggggaactccagagaacaaaatttcatctagatcatggcctatcacagtgggcaccacctgtgatttccaagccaagaagttgagacgatccaatttgatcgtgagggaagaagaaagagaatgcgaaaaaggattcctagaaggaatcgttgatggtgaaggggcagacggaatcgtagatgccgagttggtggaaggattaatcgaggaggactccattgacgcaagtcagaggcaatctgataccatgtaacacaaggagaacggagatgaaacaagagtatctgaaatcaatctcaagctagaacagaggtgttaaagaaccaactgaactaactgagtaaaaactttatttatatcccaagtattgtacaaaagcaagaaactacaacataacagaataacaactttgtaacagacttaacagaaaagtcgttaagtgatttctatgctaacaccgaccaacttttgtgaggaagctggtctgtcacttgatgtctcgtttgagtaccagggtccccgtttgatgaggtactgacttgggcttcttgttggtgagttgtactgccatgtggcactgattttgtccacgtaagcactgccacatcaggtgggcaaaaattgggataacaaatatgtcattatctactactgcacattgtgttaattaaaaaaataaaaaatcttatcattgt

SEQ ID NO: 249784 - DNA, 520 bp, Cannabis indica
aactgggagacacaagaagttgaaagaaagacaatcaatattcctctaccaccaagacaagaacttgatcaaaatgaagtttttactcaaccaacaacaaaaaaaccaggacaagctattgaatccccaccaaactcaccagtaaggtgaacaagactgcttgctgggatctatgagacatgcaacctagtacttacagagccagaaagttttgaagtagctcaacaacaagaagtatggagaaaatccatgaatgaagagataaaactgattgaaaataatgagacttgggagcttgtagatcgacaacatgacaaagaaagttcatgagtcaagtaggtctacaagacaaaactcaacgtagaagactctatccaaaagcacaaagcaagattagttgtgaaaggatactctcaacaatatagagttgattacaatgaaatattttctccagtagcacgccttgacactattagggctttaatagctctagccacatagaataaatagaagatttttt

SEQ ID NO: 249785 - DNA, 599 bp, Cannabis indica
aacacaaatacttacatatgtaatatcaaaaagttccaaattagcatttttgggcctcacaagaccaatagctcgatgaaacaaaattgtataaagtatttctgtagtcaatttgaagacaatgtgatgaggtaaaaaagaaacacaaatgaaaaagtattgattcaaaggtagacatcataactttaaagactaagaagacctcaacaacaaagaaaggccactgtgcatcgttatatcatctaaacacgatggccaagtttctagaaagtatccgagtattttggataaaatgatcaactaccaaaatgactccctttatggtttcttatttagatgatagtggcagaagaatcatttgaagtaaaaataaaagcagttgcattcaaatatttctcatcataagacaacacttccgaccatattgatcttaaaagttgttccacttacagaaactttgatgtcattggctaaagaccaatacaataactttaaagccaaataatgtttgaaccagaatcagaggaaacatatgagcaaacattattattaatgattccaagaaaaatttcacaattgaatgcatacataattaatcc

SEQ ID NO: 249786 - DNA, 1487 bp, Cannabis indica
gtgattcaacacattcaatcaagtgtcaattttacatattttttcattaattaccaatattaacagtcaaaagggtagtacacaagatcagaatgcatcaattaaaagatctcgtgaatgtaaacaaaaattgcactcttttcccttaactgagtttttgacccactagattttttagcaaaattttcgagcagctattatagaaatctaataagaattgttgtaaaatattatattatatatagatgaccataataatagagaatcacaattagttatcccaaaaaataaaaattatctttaatatgtaattgtatagtcttaatttcttgatttcgtcttatttcattgtataaatatacgttcattctattgaaataaacaaataagaattctcattcaggatttctttctctattcatattattattttctattttatattattgatgatagttttataacatagatcaatatattgatttggaaacgatttggttagcctatttttataaattctactctatgagtaatattttcatgtaatccaatttgctaattaataaaaaaaattcattattttttgaaaaaacaaaagaggatcaaatatatacaattattattattattattattattatttgaaacaaaattattactattcttattcttcctattattgttgtggccacttactcacgcaaacccatagaatggggcaacaacgtggggattggggttggggaatgttgtggccacttacaatttatactttttcttacttgacacacatgtacaatatttatttagtaaaggcaaacaatatatattttctgtgaatggacaattaattttatttaactttcaaacacgataccaaattagttgaaacagactctaaattgaacatataatcatgatataatataataattttagcaaaattatgaatcattacattaattgatcgtttaataaaagaaaaagaaatattatttaagtctgcaagcaaattcttatactcttaaatgacgataccaaacaagaaaatcatatttaaagaacattgaagagcttgcatcacataaaaacaatatgtattctgtctctatactcaaatgactccaatttcttttttttttatcgaactcgaacctcacaaattcttatagcctcagttagaaccgattcaactaaactaaacgagagtttagttcaaccttcaatgagcaaacctcaggcatccttaggcaccaaaccaaccatacaaggcaaacaatatttatttttttgaaacaaggcatacaatatttttttcgaatggaaggcatacaatatttaattaatggaaaagtaattaattaagatataatagagatcttatatattattatttaaatatttactcaaatcgtgcttccaatctaaaaaaaaaaaggtgcttccacacttccttccactagcattgaatggtaatgaaaaatgct

SEQ ID NO: 249787 - DNA, 785 bp, Cannabis indica
ctgtcacttggtcagcactctatcaagttgactcaaactcacttcagcactctagaaatccatgataactgaagtaaattgaagcacacacaaatatctcatttaggaatggcattttcattagttttaaaggacaatggaatgtcaattccattagtgaagcacacacggtcaccatggatctgtcacaaggtcaaagctctgtattttttggctattgatggcactaagcatcacacatagttagcccacctaaactcacgttgaaacaatactactagaaattataataacctaagctatttttggaagaaaatataaccacagaatggaatggctatatttatgaatgatattttcattatttgtagagtagtcattccattagagtagctttcagtacatgtatcgattttatttttattcaattgatttcattccatccaaaccagtcaccacctcaatgttacaggtacctgattttttgatttccaatgagagctcctcttgggagtagaaccatgcagctctaggaatggactctatgactaagcattttctttatattagattgcatgagtggcttttagtccttttgtttttctgctaggtttgacggttgtacagggaaactaaaattaacttttccatctaattcaaggcatttgttatcaactattgtggagatcagctaaaatttagcttgtaagttgtaaccacggttttcctctgccacaagagaggctaccgaataaatttgggaggaggtcagtctaagacaagtg

SEQ ID NO: 249788 - DNA, 915 bp, Cannabis indica
ttttaattattaatattatgtggacaaatgaattttggccacgtgtacatttgtgtataccatggcactttactttgacacttaacaaactaaaatgaacagaaggacttcaaagcaaaacgattgtcgaatccaaagagtttagccataatttttcgagtaagaatttaaaccgtaacaaacataacaatatagagagttggaccgcaaatttcgtttaaaaaaaactctattttatcttcaaaattaacctttcacaggaattaatacttagtgagaatttaaagaaatttatctcatcactccaaacttgtggagattgcatatgtgattatataagatataacatttcccttatataaatcaatcaatcacccataaataattctacgccaactttgatttggcagatgtgaagaattagatttgggtatatatctccatttcaaatccaataattcttcaaatatataaatataaatatgtgtacatcaacttaattaatttctttcccttctaatataaatttgcttcttttcgatccctttatattcttttcgtgtgggatatttttaaatgtgatgagtatattattattattatatataggacattttaattaatttccaagccccatcaaggaatttagacgtgcgtgcacattatcatttatttaaagtcttctattactatataatcataaagataagggttttttttttataactatataatatacaaattctttcaaaggggaacgaaaaaccaaaaatatactatatgtacattacgtattatagcttatatatgtagatagtataaatggattcttttttaatggggtattatctattcattgaaaattttaaaaaataattacaattaaatatcaattttaaaaatattttttttaaa

SEQ ID NO: 249789 - DNA, 648 bp, Cannabis indica
atatacatacattcacacacctatatgtatataatattattttctcaatcttttgttctacatgatattttataggtgcacatactcttggagtaacacattgtccattaatgttccggaggctgtacaacttcaccggaaaaggagacacagaccctgctttgaaccaggactacgcgacagagctgatggctaaatgcccgccaccggcaaaccctaggaccactgtggagatggaccctaagagctctctgagctttgatagccattactacgttggtcttactgaatataaaggagccttctcatctgacgccgcacttctcactaaccgacgcgccgcccgccttgtgagaagctttcgtgactttaacactttcaagatcgcatttggtcgttccatggttcatatgggtgccattggagttcttactggtgatgaaggagagatcagaaccaattgccgagtcattaattaataattagctaataagtactaagtttaatttactctccttgatttctttttatcatatcttattattaatgtatgctcaataaaatctagttgtgcttcaaccaattatttgtatttattatatcgttggtcattagtattacaaacaattataataaaatcatacacta

SEQ ID NO: 249790 - DNA, 1372 bp, Cannabis indica
aaatataactgcatgcaaagctctggttgttttctagtggtctataaaagccaacacttctcccaactggttcatttctactgcccctcaatttctagaatttcaaacccactcaataaaattccataggcccctaatttttttctgctcttccttcgtcgttgccaagcgaagtattaccatcacacgacgtcttcggcccttgccttgccttgattgtgtaagctctttctacacatatatttcttttcatctactagggcaagtagtaataataatgtgtaggtttatatgctttgtttattttcctcgaaatgataaccggggtcgccattagtgtaacgtctcgagagcgtccgattaacgagtgtctttctttatcaccatattttgtgttcattattttcattatgcatgtattgctcctcttttttattttttctaaaagagaggagtcgaaatcagagggtttttcgtatgcccatttctggcagttcaaagttgctcttgcatgccttctatatttctttttctttgatttccctgtgttgcttggatattttgcacccgatgtctccatttgtgaatcgttatattcctttcgacagtcatcgagggggcctctttccaacggttaggagaccccattcccctttttgacttaggatttgatgtgggggctaactattggatttcttattttttttcagatgagtgaaatcctccatgatcttgacaaacacgatttctttgggtttgaccaagaaattcttaatctccaccaggaagactctatgtccacacccgcagctaccggagcaaaatcttccaagaaggggccaaagaagttggcccccttggaggaggttatgaagggcccggtcatttacaagaagttcgcatgccgttccaataagtgggaggctgacgaactctattcgacattgacctgcgcccatcaactgcagaaggttgttactgtggttgggattaagccctcaggttctggagtgtaccaccatcttccaagggacgaggagacgccaaaccataactacaatggcttcggggcctggaccagactcaccttatgtccgaggccatgctacccctccaagattacttcattgaattatttatttcatttgcttaaaaaaagtagagtatttttcatttaaaaaaatatttgttgtttggatgctaaagtagttatattatataatttttatataaaaaaaaaataagaaaaaaataatgtttatgactgttgtctagtaaaaaaaattaaaaatatattatttgctttcttttatatatatatatatatatattcatcttaaaaaatactctttgttggtatcttttattttta

SEQ ID NO: 249791 - DNA, 743 bp, Cannabis indica
aataattgtttattaatttcctttatgaagccaaaaaaaaatatcaaaaaatattaaaatttaaaatttaaaataattttatgatttaattatcattaaataaaatataactgcatgcaaagctcgggttgtttcctagtggtctataaaagccaacacttctcccaattggttcatttctactgcccctcaatttctagaatttcaaacccactcgataaaattccagaggcccctgatttttttctgctcttccttcgtcgttgccaagcgaagtattaccatcacacgacgtcttcggcccttgccttgcctttattgtgtaagctctttctgcatatatatttcttttcatctgctagggcaagtagtaataataatgtgtaggtttatatgctttgtttattttcctcgaaatgataaccagggtcgccattagtgtaacgtctcctttggtgggcatccgattaacgagtgtgtttctttattaccatattttgtgttcattattttcattatgcatgtattgctcctcttttttatttttttcttaaaagagaggatcgaaatcagagggtttttcgtatgcccctttctggcagttcaaagttgctcttgcatgccttctatatttctttttctttgatttccctgtgttgcttggatattttgcacccgatgtctgcatttgtgaatcgttatattcctttcgacagtcatcgagggggcctcttcccaacggt
